United States Patent Application Publication US 2009/0104218 A1 - sequence listing, part 4

SEQ ID NO: 11787 - protein, 588 aa, Streptococcus agalactiae
ATGATTCCAGTAGTTATTGAACAAACAAGTCGTGGTGAACGCTCTTATGATATTTACTCACGTCTTTTAAAAGATCGTATTATTATGTTGACCGGCCAAGTTGAGGATAATATGGCCAATAGTATCATTGCACAGTTATTGTTTCTCGATGCACAAGATAATACAAAGGATATTTACCTTTATGTCAATACACCAGGTGGTTCAGTATCGGCTGGACTTGCTATTGTGGATACCATGAACTTTATTAAATCGGACGTACAGACGATTGTTATGGGGATGGCTGCTTCGATGGGAACCATTATTGCTTCGAGTGGTGCTAAAGGAAAACGTTTTATGTTACCGAATGCAGAATATATGATCCACCAACCAATGGGTGGAACAGGCGGAGGCACACAGCAATCTGATATGGCTATCGCTGCTGAGCATCTTTTAAAAACGCGTCATACTTTAGAAAAAATCTTAGCTGATAATTCTGGTCAATCTATTGAAAAAGTCCATGATGATGCAGAGCGTGATCGTTGGATGAGTGCTCAAGAAACACTTGATTATGGCTTTATTGATGCTATTATGGAAAATAATAATCTACAA

SEQ ID NO: 11788 - protein, 196 aa, Streptococcus agalactiae; identical to SEQ ID NO: 2920

SEQ ID NO: 11789 - protein, 129 aa, Streptococcus agalactiae
GTGGCAGCACTTCAAGAAGCACATCCAGATGTAGATATTTATACCGCTGCTTTGGATGAAAAACTCAATGAACATGGCTACATTGTTCCTGGACTCGGAGATGCTGGTGATCGCTTATTTGGTACAAAA

SEQ ID NO: 11790 - protein, 43 aa, Streptococcus agalactiae
MAALQEAHPDVDIYTAALDEKLNEHGYIVPGLGDAGDRLFGTK

SEQ ID NO: 11791 - DNA, 198 bp, Streptococcus agalactiae
atgggaaaatttcaagtcatttcacatccacttattcaacataaactgtcaatcttacgtcgcactacaacatctactaaagattttcgtgagttagttgatgagattgcgatgttaatgggctatgaagtgtctcgtgatttgcctttagaagatgttgaaatccaaacaccagtagcgacaactgtacaaaacaat

SEQ ID NO: 11792 - protein, 66 aa, Streptococcus agalactiae
MGKFQVISHPLIQHKLSILRRTTTSTKDFRELVDEIAMLMGYEVSRDLPLEDVEIQTPVATTVQNN

SEQ ID NO: 11793 - DNA, 1167 bp, Streptococcus agalactiae
atgattacatatgatttcacaagtttaccagaacgtttttcaagtaatgccataaaatggaaggcggttcaaaaagatcaagaaatccttcccctttggattgcggatatggattttcctatctttccagaaatgtcggaggctattgaagatttttcacaccaaatggtttttggctatgatagtcctaaagacagtttataccaagctatctctaattgggaagtgcaagaacatggttatcaatttgataaaaaatcattattattaattgatggggttataccagcgatttcagttgccatacaagccttcacaaaggagggagatgctgttctaattaataccccagtctatccgccctttgctagaactataaaatacaataatcgtcatttagtttcaaatagtttacttaataataatcagtattttgagattgacgttaaacaattagaaaaagatatcattgaaaataatgtaaagctttatattttttgtagtccacataatcccggtgggcgtgtctggacaaaaggagaaattcaaaaaataggagatatctgtaaacggtataatgttatcctagtttctgacgaaatacatcaagatttggtattatttgataatgtacaccatagctttaatactgttgattctacttttaaagaattgagtgttattttatctagtgcaactaaaacgtttaatattgcagggactaaaaatagttttgcaataattgaaaatgaaaagttacgctctgattttaagaagaggcaaatagctaacaatcaacaagaaatttcctcattggggttattagctacagaagttgcctttacaaaagggaaacaatggttaaaggccctaaaaatggagttagaaggatcaatagaatacctttatgagcaattaacgcaaaaaactcatatcaaagtgatgaaaccagagggaacttatcttgtttggttagatttttctgcttataatttaacgcatttagaaattcaagaaaaacttcgatatgatgccaaattaatattaaatgatggtttaacttttggaaaagaagggaaaaaacatgctagaatcaatgtcgcagctcctaggtctgttattgaggaggcagttttgcgattagtgacaaactttagaaaaaatgac

SEQ ID NO: 11794 - protein, 389 aa, Streptococcus agalactiae
MITYDFTSLPERFSSNAIKWKAVQKDQEILPLWIADMDFPIFPEMSEAIEDFSHQMVFGYDSPKDSLYQAISNWEVQEHGYQFDKKSLLLIDGVIPAISVAIQAFTKEGDAVLINTPVYPPFARTIKYNNRHLVSNSLLNNNQYFEIDVKQLEKDIIENNVKLYIFCSPHNPGGRVWTKGEIQKIGDICKRYNVILVSDEIHQDLVLFDNVHHSFNTVDSTFKELSVILSSATKTFNIAGTKNSFAIIENEKLRSDFKKRQIANNQQEISSLGLLATEVAFTKGKQWLKALKMELEGSIEYLYEQLTQKTHIKVMKPEGTYLVWLDFSAYNLTHLEIQEKLRYDAKLILNDGLTFGKEGKKHARINVAAPRSVIEEAVLRLVTNFRKND

SEQ ID NO: 11795 - DNA, 546 bp, Streptococcus agalactiae
atgaatattgaaacattaacgcagaraaatcatcgttccgatagtggacgaaatcatattgttttatttgaaccacagattccagcaaatactggtaatattgctagaacttgtgcggcaacaawtgctcctttgcacatcatacgaccgatgggatttcctattgatgataaaaaaatgaaacgagcaggactggattactgggataagctagatgttagtttctatgatagtttggaagaatttatgttgtcatgtcgtgggaaagttcacctaattagcaaatttgctgacaaggtttactcagatgaaaattataatgatgatcaagaccattattttatgtttggtcgtgaagataaaggattgccagaaacttttatgcgcgagcatgccgaaaaggccttacgaattcccatgaatgatgagcatgtgcgtagcttgaatgtttcaaacactgtttgtatgattgtttatgaagcccttaggcagcaaagttttcctaatttagaattaagccatacttatgaaaatgataaattaaaa

SEQ ID NO: 11796 - protein, 182 aa, Streptococcus agalactiae
  VARIANT 9, 42: Xaa = Any Amino Acid
MNIETLTQXNHRSDSGRNHIVLFEPQIPANTGNIARTCAATXAPLHIIRPMGFPIDDKKMKRAGLDYWDKLDVSFYDSLEEFMLSCRGKVHLISKFADKVYSDENYNDDQDHYFMFGREDKGLPETFMREHAEKALRIPMNDEHVRSLNVSNTVCMIVYEALRQQSFPNLELSHTYENDKLK

SEQ ID NO: 11797 - DNA, 1350 bp, Streptococcus agalactiae
atggagaatcataattctattaaacagacctatggattaatgactacaattgctatgattgtaggtgtagtgattggttcaggcatttattttaaagttgatgacatccttaaatttactggtggagatgtctttttaggcatggtaattttagtactaggttctttttcgattgtttttggaagtttgtcaatttctgagctagctattagaacgagtgaaagtggtggtattttttcttactacgaaaaatatgttagcccagctttagcagcaactttaggcttgtttgcgtcttttttgtatcttccaactttaacagcaatcgtttcatgggtagctgcattttatactttaggtgaatcatcaagtttggaatcacagattattttagctgctgtttatattttagcgcttagtctcatgaatatctttgctaagcgtattgcagggggattccaatctttaacgacctttgtaaaaatgattcctttagtcctaattgctttaattggtgctttttggtctgataaagctccacaacttccacaacatttaacagctattcaaccgtcaaatgttggatggagttgggtgtcaggtctggtaccattgtattttgcatatgatggttggacaatttttgttagtattgcaccagaagtcaagaatcccaagaagaatttaccacttgcctttgtcattggtccagcgcttatcttattatcatatttggcatttttctatggtttgacacaaattttaggtgctagctttattatgacaaccggtaatgatgctattaattatgcagctaacattattttcggtcctagtgttgggcgtttattatctttcattgttattttatctgtattaggtgttgccaatggacttttacttgggacgatgcgtctacctcaagcttttgcggaacgcggatggatcaaaagtgagaggatggctaacataaatttgaagtatcaaatgtcattgccagctagtttgacggtgacggctgtagctattttttggctttttgttcactttatggttacaaaatttaatttattgccgggtagtgatattagtgaaattgctgtggtgtttaataataccagtttaatcattctttatgttttagtactcagcctttatctcaaaaaagatattaaaaataaatttaccggcttagtttcaccgattctagcaattttaggcggtttgatcctctttatcgggagtttgttaagtaatttctttacggttttaattttccaatgtttttgcttattattctgtttgatttgtcattatatctatcaaaaaaataacccaaaaactcatgaa

SEQ ID NO: 11798 - protein, 450 aa, Streptococcus agalactiae
MENHNSIKQTYGLMTTIAMIVGVVIGSGIYFKVDDILKFTGGDVFLGMVILVLGSFSIVFGSLSISELAIRTSESGGIFSYYEKYVSPALAATLGLFASFLYLPTLTAIVSWVAAFYTLGESSSLESQIILAAVYILALSLMNIFAKRIAGGFQSLTTFVKMIPLVLIALIGAFWSDKAPQLPQHLTAIQPSNVGWSWVSGLVPLYFAYDGWTIFVSIAPEVKNPKKNLPLAFVIGPALILLSYLAFFYGLTQILGASFIMTTGNDAINYAANIIFGPSVGRLLSFIVILSVLGVANGLLLGTMRLPQAFAERGWIKSERMANINLKYQMSLPASLTVTAVAIFWLFVHFMVTKFNLLPGSDISEIAVVFNNTSLIILYVLVLSLYLKKDIKNKFTGLVSPILAILGGLILFIGSLLSNFFTVLIFQCFCLLFCLICHYIYQKNNPKTHE

SEQ ID NO: 11799 - DNA, 1347 bp, Streptococcus agalactiae
atgagaataattgttgtcggcggaggtaaagtcggaaccgcactttgtcgctcacttgttgctgaaaagcacgatgttgttttaattgagaaaaaagaaaacgtccttaaacgtgtcactaaacagcatgatattatgggaattgttgggaatggggcaaactataaaattttagaacaagccgaagtcaaaaattgtgatatttttatcgctatcactgatcgagatgaagttaatatgatttcagcagttcttgccaaaaaaatgggggcaaaagagactgttgttcgcatgcgtaatcctgagtattctaatccttacttcaaagataaaaactttcttggcttctcttcagttgtcaaccctgaattgttagcagcacaatatatcgctaataccatagaatttccaaatgcaacttcagttgaacatttcgccaacgggcgtgtgatgttaatggaatttaaaattttagaaggaaataaactctgtcatacttcaatgagtcaaattcgtaaaaaatttggtaatattgttatttgcgcaattgaacgcgatggcaaattgattattcctgatggcgatgcaactatccaagtcaaagataaaatctttgtaactggaaaccgtattgaaatgatacttttccataattacgttaaaaataaagttgtcaaaaacttgatggttatcggtgcaggacgcatcgcctactacctactcaatatccttaaaaataccaatacacacgtcaaactagttgaactcaaccaagaacaagctgaatattttagtcaagaatttcccaatgttcctgtcgttcatggggatggtactgctaaaaatattttgttagaagaaagcgttacaagttttgacgcagttgctactttaactggtgttgatgaagaaaatatcattacctcaatgttcttagaaagtatcggtattcctaaaaacattaccaaagttaatcgaactagcctactagaaatcattgacgataaacaactatcaagcattatcacacccaagcgtattgccgtagaccatgtgatgcactttgtacgcgggcgtgtaaatgctcaggattccaacctagaagctatgcatcatattgctaacgatcgcattgaaaccttacaatttgaaataaaagaaactagcaaattagcaaatcgtagtcttgcatctttaaaattaaagcaaaatattttaattgcagcgattattcgcaataataaaacgattttcccaactggtgaggatgttttaacagtgggtgatcgtatcgttgttatcaccttattaaaaaatattactagaactagtgatatgttagcgagg

SEQ ID NO: 11800 - protein, 449 aa, Streptococcus agalactiae; identical to SEQ ID NO: 2932

SEQ ID NO: 11801 - protein, 1425 aa, Streptococcus agalactiae
ATGATTCGTTTCCTCCTCTCAAAACTTTTGATGATTGAAGCTGCTCTTCTAGCGATTCCTCTAACTGTTGGACTTATTTACCGTGAACCGCAAAGTGTCATGATGAGTATAGTCATTACCATGATTATTCTAATCATCCTTGGATTACTGGGTTCTCTCTTTAAACCTAAAAATTATCATATCTACACTAAGGAAGGCATGTTAATTGTTGCACTCTGCTGGATACTTTGGTCCTTCTTTGGCGCCCTTCCATTTGTTATTTCAGGACAAATCCCTAATATTATCGATGCTTTCTTTGAAGTATCTTCTGGTTTTACGACAACAGGAGCAACTATTCTTGATGACGTCAGTGTCTTATCCCCCGCGCTCTTATTTTGGCGTAGTTTTACCCATCTTATCGGTGGAATGGGGGTTTTAGTATTTGCCCTTGCCATCATGGAAAATTCTAAAAATAGCCATTTAGAGGTTATGAGAGCTGAAGTTCCTGGACCTGTATTTGGTAAAGTTGTCTCGAAACTTAAAAAAACTGCACAAATTTTGTATCTGTTATATCTTCTTATGTTTGCAGTATTTGCAGTAATATTATATTTTGCAGGTATGCCTTTCTTTGATAGTATTATCATAGCGATGGGAACTGCAGGTACAGGTGGTTTTGCAGTTTACAATGATAGCATTGCCCATTATAATAGTCCTCTGATAACTAACTTAGTTTCTATTGGTATGCTTATCTTCGGGGTTAACTTTAATCTTTACTATCTTCTTTTACTCCGAAAAATTAAAGCATTCTTTGGTGATGAGGAACTAAAAACCTATCTCCGCATCGTGGCAATAGCAACTTTCATGATTGCTCTAAACGTCATCGGTATGTATGATAATTTTCGACAAGGCCTCGAACATATTTTCTTTGAAGTATCAGCTATTATTACGACAACTGGTTTTGGCGTGACTGATATCACTCGTTGGCCTTTGTTTTCACAGGTTATTTTGCTATTCTTGATGTTTATCGGTGGTTCTGCTGGCTCTACAGCTGGGGGCTTTAAAGTCATGCGTAGCTTAATCCTAGCAAAGATTGCACGTAACCAAGTATTGTCTACACTCTATCCTAATAGAGTCATGTCACTACACATTAATAAAAGCGTTCTAGATAAAAATACACAACATGGCGTTTTAAAATATCTAACTATCTATTTAGCTATCTTCATGGCACTCGTTCTTGTTTTAACGCTTGATACTAATGATTTTTTGGTTGTTGTCAGTGCTGCAGCCTCATGTTTTAACAACATAGGCCCACTCTTAGGTAGCAATGAAACTTTCTCATTCTTTAGTCCATTCTCAAAACTCCTTCTTTCATTTGCTATGATAGCAGGACGTTTAGAAATATACCCTGTTTTATTGATGTTTATTCCTAAAACATGGTCAAAACTA

SEQ ID NO: 11802 - protein, 475 aa, Streptococcus agalactiae
MIRFLLSKLLMIEAALLAIPLTVGLIYREPQSVMMSIVITMIILIILGLLGSLFKPKNYHIYTKEGMLIVALCWILWSFFGALPFVISGQIPNIIDAFFEVSSGFTTTGATILDDVSVLSPALLFWRSFTHLIGGMGVLVFALAIMENSKNSHLEVMRAEVPGPVFGKVVSKLKKTAQILYLLYLLMFAVFAVILYFAGMPFFDSIIIAMGTAGTGGFAVYNDSIAHYNSPLITNLVSIGMLIFGVNFNLYYLLLLRKIKAFFGDEELKTYLRIVAIATFMIALNVIGMYDNFRQGLEHIFFEVSAIITTTGFGVTDITRWPLFSQVILLFLMFIGGSAGSTAGGFKVMRSLILAKIARNQVLSTLYPNRVMSLHINKSVLDKNTQHGVLKYLTIYLAIFMALVLVLTLDTNDFLVVVSAAASCFNNIGPLLGSNETFSFFSPFSKLLLSFAMIAGRLEIYPVLLMFIPKTWSKL

SEQ ID NO: 11803 - protein, 249 aa, Streptococcus agalactiae
ATGCTTAAATCTTTTTTGATTTTCTTGGTTCGCTTTTACCAAAAAAATATTTCTCCAGCTTTCCCAGCTAGCTGTCGTTATCGTCCAACTTGCTCTACGTATATGATAGAAGCTATTCAAAAACATGGTCTAAAAGGTGTTCTGATGGGGATTGCACGTATTTTGCGATGTCATCCCTTAGCCCACGGAGGAAATGATCCTGTCCCTGATCATTTTAGCTTAAGACGTAATAAAACGGATATATCAGAT

SEQ ID NO: 11804 - protein, 83 aa, Streptococcus agalactiae; identical to SEQ ID NO: 2936

SEQ ID NO: 11805 - protein, 720 aa, Streptococcus agalactiae
ATGAGAATTAATAAATATATTGCGCATGCAGGGATTGCAAGTCGTAGAAAAGCTGAGGAATTAATCAAGCAAGGAATGGTCACGATTAATGGTCAAGTGGTTAATGAATTGGCGACCCAAGTAAAGGCTGGTGATCTGGTTGAAATTGAAGGAAGTCCAATTTACAACGAAGAGAAGGTATATTATCTCTTAAATAAACCACGTGGTGTTATTTCAAGTGTCTCAGATGACAAAGGACGTAAGACAGTTATTGACTTGTTGCCACAAGTCAAAGAACGGATATATCCTGTTGGTCGCTTGGATTGGGATACAACTGGACTTTTAATTTTGACTAATGATGGTGATTTTACTGATAAAATGATTCATCCTCGTAATGAAATTGATAAAGTTTATTTAGCACGTGTTAAAGGAATAGCTACTAAAGAAAACCTTCGACCATTAACGCGTGGCGTTGTTATCGATGGTAAGAAAACAAAACCTGCTCGCTATACTATCATAAAAGTGGATCATGAAAAAAATCGTTCAGTAGTTGAATTAACTATTCATGAAGGTCGTAATCATCAAGTTAAGAAAATGTTTGAACAAGTTGGGTTATTAGTGGACAAGCTATCTCGTACACAATTCGGTACCTTAGATTTAACGGGTCTCCGTCCTGGGGAAGCACGACGATTAAATAAAAAAGAAATTAGTCAGTTGCATAATGCGGCTATTAATAAATCT

SEQ ID NO: 11806 - protein, 240 aa, Streptococcus agalactiae; identical to SEQ ID NO: 2938

SEQ ID NO: 11807 - protein, 582 aa, Streptococcus agalactiae
ATGACTTATTTAGGCTCAATAGAAGCTCTTCTTTTTGTTGCAGGTGAAGATGGACTGAGTTTGCGTCAAATGGCAGAATTATTGTCTTTGACACCATCAGCATTAATACAGCAACTAGAAAAGTTGGCTAAACGATATGAAGAAGATGACGATTCTAGTCTATTATTGCTTGAGACAGCACAAACTTATAAATTGGTAACAAAGGATAGTTATATGACTTTGTTGAGAGATTATGCGAAGGCTCCTATTAATCAGAGTCTATCTCGGGCAAGTTTGGAAGTTCTATCTATTATTGCTTATAAACAACCTATTACTAGGATTGAAATTGATGATATTCGTGGCGTGAATTCCAGTGGAGCTATAACTAGACTGATAGCTTTTGGTTTAATTAAAGAGGCTGGAAAGAAAGAAGTGTTGGGACGTCCTAACCTTTATGAGACAACTAATTATTTCTTAGATTATATGGGAATTAATCAGTTAGATGACTTAATTGACGCCTCTTCAATTGAATTAGTTGACGAAGAAGTATCGTTATTTTCAATGGATTCAATTAATACAGAAGATAAGGAAAACAATGAGAAT

SEQ ID NO: 11808 - protein, 194 aa, Streptococcus agalactiae; identical to SEQ ID NO: 7576

SEQ ID NO: 11809 - protein, 705 aa, Streptococcus agalactiae
ATGGATATTAAGTTAAAAGATTTCGAGGGGCCCCTAGACTTACTCTTACACCTCGTATCTAAATATGAGGTTGATATATACGATGTACCGATTGTGGAAGTTATTGAGCAGTACCTTGCTTATATAGCAACATTACAGGCGATGCGTCTAGAAGTAGCTGGTGAGTATATGCTTATGGCAAGTCAGCTGATGTTGATAAAAAGCCGTAACTTATTACCTAAAGTAGTGGAGTCAAATCCTATTGAAGATGATCCAGAAATGGAATTGTTGAGCCAATTAGAGGAATATAGACGTTTTAAAGTGCTAAGTGAAGAGTTAGCTAATCAGCATCAAGAACGTGCCAAATATTTTTCAAAACCAAAACAAGAAGTTATCTTTGAAGATGCAATTCTTCTACACGATAAATCGGTGATGGATCTTTTTTTGACTTTTTCTCAAATGATGTCCCAAAAACAAAAAGAATTGTCAAATAGTCAAACGGTAATTGAGAAAGAAGACTACCGTATTGAAGATATGATGATCGTTATTGAAAGACATTTTAATCTTAAAAAGAAAACGACATTACAAGAAGTGTTTGCGGATTGCCAAACAAAATCTGAAATGATAACTTTATTTTTGGCAATGTTAGAGTTGATAAAATTACATCAAATCACAGTAGAACAAGACAGTAATTTTAGTCAAGTTATCTTAAGAAAGGAAGAGAAA

SEQ ID NO: 11810 - protein, 235 aa, Streptococcus agalactiae
MDIKLKDFEGPLDLLLHLVSKYEVDIYDVPIVEVIEQYLAYIATLQAMRLEVAGEYMLMASQLMLIKSRNLLPKVVESNPIEDDPEMELLSQLEEYRRFKVLSEELANQHQERAKYFSKPKQEVIFEDAILLHDKSVMDLFLTFSQMMSQKQKELSNSQTVIEKEDYRIEDMMIVIERHFNLKKKTTLQEVFADCQTKSEMITLFLAMLELIKLHQITVEQDSNFSQVILRKEEK

SEQ ID NO: 11811 - protein, 777 aa, Streptococcus agalactiae
ATGATTTTACAGACGAATATACTATCACTCCTAAAAACAATGATAAATGATATTAATAATTTTATTGAGAGTAAGAAATTATCTCTCAATTCGCGTAAGTCCTATCACTATGATTTAAAGCAATTTTATAAAATAATTGGTGGACATGTAAATTCTGAAAAACTGGCATTGTATCAACAGTCTCTAAGTGAATTTAAGTTAACAGCTCGTAAGCGAAAGTTATCTGCAGTCAATCAATTTCTTTTCTTTTTATATAATAGAGGAACGCTGAAGGAATTTTACAGACTACAAGAGACTGAAAAAATCACTTTGGCTCAGACAAAGTCTCAAATAATGGATTTATCAAATTTCTATCAAGATACTGATTATCCGAGTGGTCGTTTGATTGCTTTGTTGATTTTATCTTTAGGTTTAACTCCGGCTGAAATTGCTAATTTGAAGAAGGCTGATTTTGATACAACTTTTAATATCTTAAGTATTGAAAAATCGCAGATGAAGCGTATTTTAAAACTTCCAGAAGACTTGCTTCCTTTTCTTTTGGAATCTTTAGAGGAAGATGGTGACTTAGTCTTTGAGCATAACGGTAAGCCTTATTCTAGACAATGGTTTTTTAATCAATTAACAGATTTCTTAAATGAGAAGAATGAGCAACAACTAACTGCACAACTTCTGCGAGAACAATTTATTCTAAAGCAAAAAGAAAATGGCAAAACGATGACGGAGCTCAGTCGCCTTCTAGGCTTAAAAACTCCTATCACTTTAGAGAGATATTATAGA

SEQ ID NO: 11812 - protein, 259 aa, Streptococcus agalactiae; identical to SEQ ID NO: 2944

SEQ ID NO: 11813 - protein, 471 aa, Streptococcus agalactiae
ATGATTGCTAAAGAATTTGAGTCGTTTTTGCTAAGTCATTTGGACCACTATCTAATTCCAGCTGAAGACGTTGCTATTTTTGTGGATACGCATAATGCAGACCACGTTATGCTACTATTAGCAAGTAATGGTTTTTCACGTGTACCAGTTATCACTAAAGAAAAAAAATATGTAGGTACTATTAGTATCTCAGACATTATGGGCTACCAATCTAAAGGTCAATTAACAGATTGGGAGATGGCACAGACTGATATTGTTGAGATGGTTAATACAAAAATCGAGCCGATTAATGAGGCAGCTACTCTGACAGCAATTATGCATAAGATTGTAGATTATCCATTTTTACCTGTTATCAGTGATCAAAATGATTTTAGAGGCATTATAACCCGTAAATCGATTTTAAAAGCTATTAATAGCCTCCTACATGATTTTACAGACGAATATACTATCACTCCTAAAAACAATGATAAA

SEQ ID NO: 11814 - protein, 157 aa, Streptococcus agalactiae
MIAKEFESFLLSHLDHYLIPAEDVAIFVDTHNADHVMLLLASNGFSRVPVITKEKKYVGTISISDIMGYQSKGQLTDWEMAQTDIVEMVNTKIEPINEAATLTAIMHKIVDYPFLPVISDQNDFRGIITRKSILKAINSLLHDFTDEYTITPKNNDK

SEQ ID NO: 11815 - protein, 519 aa, Streptococcus agalactiae
ATGGCAATTAGAAAATTAGTTGTAATGAGTGATTCTCACGGAGATCGTGACATTGTAAAAGATATAAAGAATCATTATTTGGGAAAAGTGGATGTTATTTTTCACAATGGGGATTCCGAACTTCCTAGTTCAGATCCTATATGGGAAGGCATTCATGTGGTCACAGGAAATTGTGATTATGATTCAGGTTATCCGGAAGTTTTGGTTACAAAAATAGATAATACTGTTATTGTTCAAACCCATGGTCATCTCCATCAGATTAATTTTACTTGGGATAAATTGGATTTGTTAGCTCAGCAAGAAGACGCGGATATTTGTTTATATGGTCATCTTCATCGTGCAGATGCTTGGAAAAATGGTAAAACTATTTTTATCAATCCAGGTAGTGTTTTGCAGCCAAGAGGACCAATAAATGAGAAGCTTTACGCTGTTGTAACTATAACAGATAGTAAGGTTTTGGTAGAGTATTATACTCGCCAACACCAACCCTATCCTAACTTGACAAAGGAATTTTCAAGA

SEQ ID NO: 11816 - protein, 173 aa, Streptococcus agalactiae
MAIRKLVVMSDSHGDRDIVKDIKNHYLGKVDVIFHNGDSELPSSDPIWEGIHVVTGNCDYDSGYPEVLVTKIDNTVIVQTHGHLHQINFTWDKLDLLAQQEDADICLYGHLHRADAWKNGKTIFINPGSVLQPRGPINEKLYAVVTITDSKVLVEYYTRQHQPYPNLTKEFSR

SEQ ID NO: 11817 - protein, 970 aa, Streptococcus agalactiae
ATGACAAAAACAATTTTTGAAAGTAAAACTGAAGGCAATTGGTTTTTAGGTAGTTTCCAAGCTTTTAATTATTTTACTTGTTTTGGTAATGATGAATCTTACGAAGCTATCCAAGATGTTTTTCATCGTCTATTATCAACTTTGAAAGTTGAAGGTCTACAGTTCACGTTGTGCAGATGACTTCGGATTTTCAATTATTAGCATTCCTCGTTGATATGATTAATCAAGAGTATTCAAGGCACATCAAAGTGACTCAACATAAAGGGGCCATCTTAGTTAGTGAAGATGATCAGTTGTTCTTAGTTCACTTACCTAAAGAGGGCACTTCTTTAGAAAAATTCTTTGATTTAAAGAATGATAATAATTTTGGGATACCATATTAATTGCGACTCACAATGAAGGAAAAACGAAGGAATTTAGAGAATTATTTGGGAAATTAGGACTCAAAGTTGAAAATTTAAATGATTACCCAGATTTACCAGAAGTTGAAGAGACTGGTATGACCTTTGAAGAAAATGCTCGACTTAAAGCAGAGACTATTTCAAAATTAACTGGGAAAATGGTAATTTCAGATGATTCCGGATTAAAAGTAGATGCTTTAGGTGGTTTACCAGGGGTATGGTCTGCTCGTTTTTCAGGTCCTGACGCGACAGATGCTCGTAATAATGCCAAATTATTGCATGAATTAGCCATGGTATTTGACAAAGAAAGACGTTCAGCACAGTTTCATACAACCTTAGTCGTGTCAGCTCCAAATAAAGAAAGTTTGGTAGTTGAAGCAGAGTGGCCAGGTTATATTGGTACGGAACCTAAGGGGGAAAATGGCTTTGGTTATGATCCACTCTTTATTGTTGGAGAAGGTAGTAGGACAGCAGCTGAATTGAGCGCACAAGAAAAAAATAATCTATCACATCGTGGGCAAGCTGTCCGTAAATTGATGGAGGTATTTCCAAAATGGCAATTAGAAAAT

SEQ ID NO: 11818 - protein, 324 aa, Streptococcus agalactiae; identical to SEQ ID NO: 2950

SEQ ID NO: 11819 - protein, 327 aa, Streptococcus agalactiae
ATGTCTTCTAGTTTAGCCAAAAAGGTGGTTTATGAAACGTTGTCCCCATTAGTTGGTAAATTAGATACTTTAATTTTAGGTTGCACGCATTATCCCTTATTACGTCCCATCATTCAAAATGTTATGGGGGCTGAGGTTAAATTAATTGATAGTGGCGCAGAAACCGTTCGTGATATTTCTGTTTTATTGAACTATTTTGAGATAAACCATAATTGGCAAAATAAACACGGTGGTCATCACTTTTACACAACCGCCAGCCCAAAAGGTTTTAAAGAAATTGCAGAACAATGGCTTAGTCAAGAAATAAATGTGGAGCGTATAGTATTA

SEQ ID NO: 11820 - protein, 109 aa, Streptococcus agalactiae; identical to SEQ ID NO: 4128

SEQ ID NO: 11821 - protein, 476 aa, Streptococcus agalactiae
ATGGATAGTAGGCCTATTGGCTTTCTAGATTCTGGTGTAGGTGGTTTAACGGTTGTTAAGGAAATGTTCCGTCAACTTCCAGAAGAGGAAGTAATCTTCATTGGAGATCAGGCTAGAGCTCCGTATGGTCCTAGACCTGCTCAACAGATTAGAGAGTTTACCTGGCAGATGGTTAATTTCTTATTGACTAAAAATGTTAAGATGATTGTTATAGCTTGTAATACAGCAACTGCAGTTGCCTGGCAAGAAATTAAAGAAAAACTAGACATACCTGTTTTAGGCGTTATTTTACCAGGAGCTAGCGCAGCTATCAAATCAACTAATTCAGGGAAAGTTGGTATTATAGGTACTCCCATGACTGTTAAATCAGATGCTTATCGTCAAAAAATTCAAGCTTTGTCTCCAAATACTGCTGTGGTATCCCTTGCTTGTCCGAAATTTGTTCCAATTGTGGAATCAACAGATGTCTTCTAGTT

SEQ ID NO: 11822 - protein, 159 aa, Streptococcus agalactiae
MDSRPIGFLDSGVGGLTVVKEMFRQLPEEEVIFIGDQARAPYGPRPAQQIREFTWQMVNFLLTKNVKMIVIACNTATAVAWQEIKEKLDIPVLGVILPGASAAIKSTNSGKVGIIGTPMTVKSDAYRQKIQALSPNTAVVSLACPKFVPIVESIRCLLV

SEQ ID NO: 11823 - protein, 95 aa, Streptococcus agalactiae
ATGAGTCAAATGGGCAAAAACCTAGTGAAGCTAAAGTTCAACAGACATACCGTAATATTGTAAAACACGCAAAAACAGCTATCAAAACTAAAAAA

SEQ ID NO: 11824 - protein, 32 aa, Streptococcus agalactiae
MSQMGQKPSEAKVQQTYRNIVKHAKTAIKTKK

SEQ ID NO: 11825 - protein, 540 aa, Streptococcus agalactiae
ATGTCAAAAAAAACAACACAAATGGTTTCTTATACTTCTATTTTAGTAGCTTTTGCAATCATGATTCCTATAATCATGCCTGCTAAAATAATTATTGGGCCTGCTTCTTTCACCTTAGCAAGCCATGTACCTTTATTTTTAAGTATTTTTATATCTGTTCCAGTTGCAATATTAGTAGCTTTAGGGACAGGACTTGGATTTCTACTAGCTGGTTTTCCGATTGTAATCGTTCTTAGAGCTTTATCACATATCGGATTTGCATTAATTGCGGCTTTCTTGATTAAGTCAAAGCCCTCTTTATTGATGAGTAAATGGCAAACATTGTTATTTGCTGTAGCTATTAACATAATTCATGGTCTGCTCGAATTTATTACTGTTTATATAATCACAATGACTTCTAACAGTAGTTCAACTTATTTATGGTCACTATTTTCTTTGATAGGGCTAGGCTCTTTGCTACATGGATTGGTAGATTTTTATATAGCTCTCTTCATTTGGAAATGGATGACACAAAAGTTGGGGAAAACACTTAGGATAAGA

SEQ ID NO: 11826 - protein, 180 aa, Streptococcus agalactiae; identical to SEQ ID NO: 2956

SEQ ID NO: 11827 - protein, 519 aa, Streptococcus agalactiae
ATGAAGGCACAGGAGCGTCGAGAAAATATTTTAACGACTTTAAAAGGAACAAAAGAAGCTATATCGGCAAGCACATTAGCAAAGATTTTTAGTGTTAGTAGGCAGGTGATTGTTGGAGATATTGCCTTATTGCGTGCACAACAATGTGATATTATTTCTACCCCAAAAGGATACCTCATGTCCAGTGCTCTAAGTACTCATCAATTCACTGCTAGATTGGTTTGTCAGCATGGCATAGAACAGACAGAAGAAGAACTGGAAATTATTTTGCGGTATCAAGGAATCATTATGAATGTGGAGGTAGAGCACCCTATTTATGGGATGCTGACTGCTCCCTTAAACATTCAAAGCCAAAAAGACATTGATAATTTTACTGCTAAATTAAAAGTTTCCAATGCAGAATTGCTATCCTCTTTGACAGATGGTTTACATACACATATGATTTCTTGTCAAGATCAGTCAGTTTTTGACCAAATATGTGAGGCTCTAAAAAAAGCAGGAATTTTATACATAGACAAA

SEQ ID NO: 11828 - protein, 173 aa, Streptococcus agalactiae; identical to SEQ ID NO: 2958

SEQ ID NO: 11829 - protein, 573 aa, Streptococcus agalactiae
ATGCTGTATATGTTTCCACAAAATATGATTGCCATCATGCAAAAAATGCCAGGGTTGTATTTTGGAGCAATCATCTTAGAATTGGTTTTAGTCTTTGTTGCTAGTGGAGCGGCGCGTCGAAACACACCAGCTGCATTACCATTATTTTTGATTTATTCAGCTTTGAATGGGTTTACTTTAAGTTTCATTATCGCAAGGTACACGCAAACAACAGTTCTTCAAGCTTTTATAACATCTGCAGCTGTTTTCTTTGCAATGGCTTTGATTGGAGCTAAGACTAAAAAAGATTTATCAGGTATGCGTAAAGCGTTAATGGCTGCTTTAATTGGGATTTTAATTGCAAGTCTTGTTAATTTATTTATCGGTAGTGGGGGGATGAGTTATATCATTAGTATCGTATGTGTCATCATCTTTTCTGGATTGATTGCTTACGATAACCAAATGATTAAATATGTCTACAATAGCCAAGGCGGCCAAGTCGCAGATGGTTGGGCAGTTTCGATGGCACTAAGCCTTTATCTTGATTTTATTAATCTATTCTTAAATATTCTTCGTCTTTTTGCACGAAATGAT

SEQ ID NO: 11830 - protein, 191 aa, Streptococcus agalactiae
MLYMFPQNMIAIMQKMPGLYFGAIILELVLVFVASGAARRNTPAALPLFLIYSALNGFTLSFIIARYTQTTVLQAFITSAAVFFAMALIGAKTKKDLSGMRKALMAALIGILIASLVNLFIGSGGMSYIISIVCVIIFSGLIAYDNQMIKYVYNSQGGQVADGWAVSMALSLYLDFINLFLNILRLFARND

SEQ ID NO: 11831 - protein, 499 aa, Streptococcus agalactiae
ATGAAAAAGTATCAAGACGATAAGGACTTCATGGATTTGGTCGGTCACCTTATTGACCATCCACGTTTCCAAAAACTCGAAGCTATTGTCCAACATCATCACTCAACTCGCTTAGAGCATTCTATAAATGTTAGTTATACAAGTTATAAAATTGCTAAGAAGTTTGGTTGGGATGCGAGTAGTACTGCTCGAGGTGGTTTACTACATGATTTCTTTTATTATGATTGGCGTGTAACGAAATTTAACAAGAGCCATGCCTGGGTTCATCCAAGGATAGCGGTTCGTAATGCGCGAAAATTAACTGATTTAAACGCTAGAGAAGAAGATATTATTTTGAAACACATGTGGGAGCGACTATTGCACCACCACGTTATAAAGAAAGTTATATTGTGACTATGGTTGATAAGTATTGGGCAGTACGAGAGGCTTCTCGTCCACTCAAACGTATTTTTAAGAAACCTATCCGTTTTAGTCGCAAATTCTTAGGTAGTCACATCAT

SEQ ID NO: 11832 - protein, 167 aa, Streptococcus agalactiae; identical to SEQ ID NO: 2962

SEQ ID NO: 11833 - protein, 741 aa, Streptococcus agalactiae
ATGACTACTATTATAACTTCAAAATCAAATAATCTCATTAAAAAAACGAAAAAGTTGTTACAAAAAAAATATCGGAAATCTTCATATCTTATTGAAGGCTGGCATTTATTTGAGGAAGCTGAAAAATATGGTGCACAATTTTTAAATATTTTTGTGACAGAAACGGCAATAGATCGTTTGAGAAAACCCGAGAGAGCTATTGTTGTTACAGATGATATTTTGAAAGAATTAACTGACTCACAGACTCCTCAAGGGATTGTAGCTGAGATTGCCTTTCAAGAGACAAGATGGACAGATATTAAAAAAGGACGTTTTCTTGTATTGGAAGATGTGCAGGATCCAGGAAACCTAGGAACAATGGTTCGAACTGCAGATGCAGCGAATTTTGATGCTGTTTTTTTATCTCAGAAATCTGCTGATTTGTATAACCAAAAAACACTTCGTTCTATGCAAGGCAGTCACTTTCATTTACCAGTATTTAGGGTAGAAATAGAGCAGTTTGTTAACTTTTGTAAAGCAGAAGGGATAACTATGATTGCCACAACTTTATCTGAACAATCGGTAAATTATAAAAATCTCCCTAAATATGATTATTTTGCTTTAATCATGGGAAATGAGGGACAGGGAATTTCCAAAACTATGACAGAAGAAGCAGATGTTTTAGCACATATTGAAATGCCTGGACAAGCAGAAAGTCTTAATGTAGCAGTAGCTGCGGGAGTAGTCATTTTCAGCTTAATT

SEQ ID NO: 11834 - protein, 247 aa, Streptococcus agalactiae
MTTIITSKSNNLIKKTKKLLQKKYRKSSYLIEGWHLFEEAEKYGAQFLNIFVTETAIDRLRKPERAIVVTDDILKELTDSQTPQGIVAEIAFQETRWTDIKKGRFLVLEDVQDPGNLGTMVRTADAANFDAVFLSQKSADLYNQKTLRSMQGSHFHLPVFRVEIEQFVNFCKAEGITMIATTLSEQSVNYKNLPKYDYFALIMGNEGQGISKTMTEEADVLAHIEMPGQAESLNVAVAAGVVIFSLI

SEQ ID NO: 11835 - protein, 276 aa, Streptococcus agalactiae
ATGAAAAAAGTTCATTTAATTGTCTCAGGGCGCGTTCAAGGAGTCGGATTTCGCTATGCAACTTATTTCTTAGCTTTAGAAATAGGTGATATTTACGGTCGCGTTTGGAATAACGATGATGGAACTGTTGAAATTTTAGCACAATCCACAGATTCAAATAAAATGACACAATTTATTCAAAAAATTCGAAAAGGACCTTCAAAATGGTCTAAAGTAACTTATGTTGATATTAAACTAGATAACTTCGATGATTTTAATGACTTTAAAATGAGGAAT

SEQ ID NO: 11836 - protein, 92 aa, Streptococcus agalactiae
MKKVHLIVSGRVQGVGFRYATYFLALEIGDIYGRVWNNDDGTVEILAQSTDSNKMTQFIQKIRKGPSKWSKVTYVDIKLDNFDDFNDFKMRN

SEQ ID NO: 11837 - protein, 798 aa, Streptococcus agalactiae
ATGGCCAACCTCATTACTTATTTCGCTCAACACCAAGGGCTTGGTTTTGGTGTCGCTATCATTATTGTAACCATCATCGTACGTGTCGTTATCTTACCACTTGGACTTTATCAGTCTTGGAAAGCTAGCTATCAAGCTGAAAAAATGGCGTACTTTAAGCCTTTATTCGAACCTATCAATGAACGACTACGCAATGCTAAAACACAAGAAGAAAAATTAGCAGCTCAGACAGAATTAATGACAGCTCAACGTGAGAATGGCCTTAGCATGTTTGGCGGTATTGGCTGCTTGCCATTACTCATTCAGATGCCATTTTTCTCAGCTATTTTCTTTGCTGCACGCTATACTCCTGGAGTCTCTAGTGCAACCTTCTTGGGACTTAACTTAGGTCAAAAGAGTCTGACACTTACTGTCATTATCGCCATTCTTTATTTTGTACAATCTTGGTTGTCAATGCAAGGTGTTCCAGATGAACAACGTCAGCAAATGAAAACAATGATGTATCTGATGCCAATAATGATGGTATTCATGTCTATTAGTTTACCTGCTAGTGTTGCGCTTTATTGGTTTATTGGTGGTATTTTCAGTATTATCCAGCAGCTAGTTACGACTTATGTACTTAAGCCTAAACTACGCCGAAAAGTAGAAGAAGAATATACTAAAAATCCTCCTAAAGCCTACAAAGCTAATAACGCACGAAAAGATGTTACAAATTCAACTAAAGCCACTGAATCTAATCAAGCAATTATTACATCTAAAAAAACAAATCGTAACGCCGGAAAACAAAAAAGACGGGGA

SEQ ID NO: 11838 - protein, 266 aa, Streptococcus agalactiae
MANLITYFAQHQGLGFGVAIIIVTIIVRVVILPLGLYQSWKASYQAEKMAYFKPLFEPINERLRNAKTQEEKLAAQTELMTAQRENGLSMFGGIGCLPLLIQMPFFSAIFFAARYTPGVSSATFLGLNLGQKSLTLTVIIAILYFVQSWLSMQGVPDEQRQQMKTMMYLMPIMMVFMSISLPASVALYWFIGGIFSIIQQLVTTYVLKPKLRRKVEEEYTKNPPKAYKANNARKDVTNSTKATESNQAIITSKKTNRNAGKQKRRG

SEQ ID NO: 11839 - protein, 192 aa, Streptococcus agalactiae
TTGCTAGATATGGTCAAGGGTTCCTCATTGACTGCGATGATTACGGTACCTGATATCTTTAATAATGCTAAAATAGTTGGGGGAACCTACTCCGACTATATGACCGCCTATATCTTAGTAGCCCTTATCTATTGGGTAATTTGTACGCTTTATGCAATTATTCAAGACTGGTGGGAAAAACGATTACTTTAT

SEQ ID NO: 11840 - protein, 64 aa, Streptococcus agalactiae
MLDMVKGSSLTAMITVPDIFNNAKIVGGTYSDYMTAYILVALIYWVICTLYAIIQDWWEKRLLY

SEQ ID NO: 11841 - protein, 233 aa, Streptococcus agalactiae
GTGCGCTTTGGGTTAGGTGGTATTTCAGTATATCCAGCAGCTAGTTACGACTATGTACTTAAGCCTAAACTACGCCGAAAAGTAGAGAAGAATATTAAAAATCCTCCTAAAGCCTACAAAGCTAATACGCACGAAAAGATGTTACAAATTCAACTAAAGCCACTGAATCTAATCAAGCAATTATTACATCTAAAAAAACAAATCGTAACGCCGGAAAACAAAAAAGACGGGGA

SEQ ID NO: 11842 - protein, 80 aa, Streptococcus agalactiae
  VARIANT 19, 34, 45: Xaa = Any Amino Acid
MRLWVMVVFQYIQQLVTTXVLKPKLRRKVEEEYXKNPPKAYKANXARKDVTNSTKATESNQAIITSKKTNRNAGKQKRRG

SEQ ID NO: 11843 - protein, 663 aa, Streptococcus agalactiae
GTGATAAACTGGGATGCCATTTTTAATTTGGAACTAGCTGTTAAGGCTTTTCCAAGTGTTATTCAGGGGTTACCATATACCATTGGATTATCCTTGGTTGGCTTTATTTTAGGAGCTATCGTAGGATTCTTTGTAGCTCTAATGAAGATGTCTCATTTCCGCTTACTGAGGTATCTAGCTAATATTCATATTTCCTTAATGCGTGGGATTCCTTTAATGGTTCTACTCTTTCTTATCTACTTTGGTTTGCCTTTTATAGGGATACAGTTAGATGCTGTGACTGCTTCTATCGTAGGTTTTACCATGATGTCTAGTGCATATATATCAGAAATTATCAGAGCAGCTCTTTTAGCTGTTGATCATGGTCAGTGGGAAGCTGCTAGAGCTTTAGGGTTAAAAACACCGACGATTTATAGAGGCATTATTATTCCGCAAGCAACAAGAATTGCACTCCCTTCTTTAAGTAATGTTTTGCTAGATATGGTCAAGGGTTCCTCATTGACTGCGATGATTACGGTACCTGATATCTTTAATAATGCTAAAATAGTTGGGGGAACCTACTCCGACTATATGACCGCCTATATCTTAGTAGCCCTTATCTATTGGGTAATTTGTACGCTTTATGCAATTATTCAAGACTGGTGGGAAAAACGATTACTTTAT

SEQ ID NO: 11844 - protein, 221 aa, Streptococcus agalactiae
MINWDAIFNLELAVKAFPSVIQGLPYTIGLSLVGFILGAIVGFFVALMKMSHFRLLRYLANIHISLMRGIPLMVLLFLIYFGLPFIGIQLDAVTASIVGFTMMSSAYISEIIRAALLAVDHGQWEAARALGLKTPTIYRGIIIPQATRIALPSLSNVLLDMVKGSSLTAMITVPDIFNNAKIVGGTYSDYMTAYILVALIYWVICTLYAIIQDWWEKRLLY

SEQ ID NO: 11845 - protein, 855 aa, Streptococcus agalactiae
ATGAAAAAGACAATTTTACTTGGTTTAGTCGGTTTATCTGCAATGACATTAGCAGCTTGCTCAAATGGTCAATCTAGCAAAGAAACAACATGGGACAATATTAAAAAAGATGGTGTCCTTAAGGTTGCTACCCCTGCAACGCTTTATCCAACAAGTTATTATGATGACCATAAAAAATTGACTGGTTATGAGATTGATATGATGAAAGCGATTGCTAAAAAACTTAAGATAAAAGTTAAGTTTGTTGAAGTTGGAGTTGCTGAATCATTTACTTCTGTAGATAGTGGTAAGGTGGATGTTGCTGTCAATAACTTTGACACAACTCCCGAGCGTTTGAAAAAATACAATTTCTCTCAACCTTATAAATATTCTGTTGGAGGTATGATTGTACGTGCAGATGGTTCTTCAAAGATTACAGCAAAAGATTTATCTGACTGGAAAGGTAAAAAAGCTGGTGGTGGCGCTGGAACGCAATATATGAAAATTGCAAAACAGCAAGGTGCTGAACCTGTTATTTATGACAATGTAACTAATGACGTTTACCTTCGAGATGTATCAACTGGACGTACAGATTTCATTCCGAATGATTACTACACACAAGTCATTGCTGTAAAATATGTAACAAAACAATATCCAGATATCAAAGTAAAAATGGGTGATGTGAAGTATAATCCGACTGAGCAAGGTATTGTGATGAGTAAAAAAGATAAGAGCCTCAAAACAAAAATTGATGCAGCTATCAAGGATATGAAGAAAGACGGTTCTTTGAAAAAAATCTCTGAAAAATATTATGCTGGTCAAGATCTCACAAAAGAACCTGCTGGAACGGATAAAATTCCAGTAATTAAAGTTAAA

SEQ ID NO: 11846 - protein, 285 aa, Streptococcus agalactiae; identical to SEQ ID NO: 2972

SEQ ID NO: 11847 - protein, 1458 aa, Streptococcus agalactiae
ATGGTTTTTAAAGATGCTACCGCTATGGTACAAGCGATAAAACAGCATAAGATTTCGTCGCAAGAATTAGTAGAGCAAGCAATCTACAAGATCGAGGAACAGAATGTAAGCGTTAATGCTGTTGTCAGCAAGCAATATAATGAGGCGCGTCAAGCAGCCAAATACGCAAATGAATCAAATGCTCCTTTTGCAGGAGTTCCTATTCTTCTGAAAGATTTGGGACAGAATCAAAAAGGACAACTCTCAACCTCAGGTTCACAATTATTTAAACACTATCATGCTAAACAAACGGACTATTTAGTGCAGTCCTTTGAAAAATTAGGGTTTATTATTTTAGGAAGAACAAATACCCCTGAATTTGGTTTTAAGAATATTAGTGATGGTCAACTTCACGGGAATGTTAATCTTCCATTTGACCATTCAAGAAATGCTGGAGGCTCTAGTGGTGGTGCAGCCGCAGCTGTTAGTTCAGGAATGGTTCCAATTGCAGGAGCTAGTGATGGAGGAGGGTCAATCAGAATTCCAGCAAGTTTTAATGGTTTGATTGGTTTAAAACCGAGTCGAGGACGTATACCTGTTGGACCTTCATCCTATAGAGGTTGGCAAGGGGCTTCTAGTCATTTTGCTTTAACAAAGTCAGTTAGGGATACAAAACGACTATTATATTATTTACAATCATATCAAGTAGAAAGCCCATTTCCCCTGAAAAAACTCAGCAAAGAGAGTCTTTTCGAGTTTAGCGTTAGTAAACCCCTAAAAATAGCAGTATTGATGGATTCTCCCTTAAAAACAAAGGTATCAAGTGAGGCTAAAGCAGCTATTAAAGAAGCCGCAGATTTTCTGTCTCAAAAAGGGAATCATTTAGAATTAGTAGAACAACCTTTAGATGGTATTCATTCTATGAAAACTTATTGTATGATGAATAGCGTTGAAACAGCAGCAATGTTTGATGACATCGAAAAGAGTTTAGGGCGTTCAATGGAATTTAGCGATATGGAATTAATGACCTGGGCTATGTATCAGAGTGGACAAAGGGTATTGGCTAAAGATTACAGTAAACTCTTAGATTCATGGGATCAATTTGCAGCTACCATGGCGAGGTTTCATGAAAATTATGATTTAATTTTAACAGCAGCAACTAATCAACCAGCTCCTTTTCATGGACAATTTGATTTAGACGAGACACTCCAGAAACAATTGAGGCATATGGGAGAATTCTCAGTAAGTGAACAACAGGATTTAATTTGGAAAATGTTTGAAGACTCAATGGCCTGGACACCTTTTACACATCAGCCAAACTTGACAGGGCAACCTTCTTTAGCCATACCAACTCATCTAACTAAAGAGGGGCTACCTTTAGGTGTACAATTGACAGCGGCTAAAGGGAGAGAAGATTTATTGCTTGCTGTTGCAGAGTTGTTTGAAAAAGAGAAGCAATTCAAAGGGCCTGTTTACCAT

SEQ ID NO: 11848 - protein, 486 aa, Streptococcus agalactiae; identical to SEQ ID NO: 2974

SEQ ID NO: 11849 - protein, 479 aa, Streptococcus agalactiae
ATGGCAGAAAAAACTTACCCAATGACACAAGTGGAAAAAGATCAACTTGAAAAAGAACTGAAGAGTTAAAATTAGTTCGTAGACCAGAAGTTGTAGAGCGTATCAAGATTGCTCGTTCTTATGGTGACTTATCAGAAAATAGCGAATATGATGCAGCAAAAGACGAACAAGCATTTGTTGAGGGTCAAATTCAAATTTTAGAAACAAAAATTCGTTATGCTGAAATTATTGATAGTGATGCAGTTGCTAAAGATGAGGTTGCAATTGGTAAAACTGTCCTTGTCCAAGAAGTTGGTACAAATGATAAAGATACTTACCATATCGTTGGTGCTGCTGGAGCTGACATTTTTTCAGGAAAAATTTCGAATGAAAGCCCAATTGCTCATGCTTTAATTGGTAAAAAAACAGGAGACTTAGCTACAATTGAATCACCTGCTGGTAGCTATCAAGTTGAAATCATTAGTGTTGAAAAAACAAAT

SEQ ID NO: 11850 - protein, 160 aa, Streptococcus agalactiae; identical to SEQ ID NO: 2976

SEQ ID NO: 11851 - protein, 1800 aa, Streptococcus agalactiae
TTGACCGAATTTAATGACGATCAGCATTCTAACCATGATCAGAAAAGTTTTAAAGAACAAATTCTGGCAGAGTTAGAAGAAGCTAACCGTTTGAGAAAGTTGCGTGAAGAAGAACTCTATCAAAAAGAGCAAGAAGCCAAAGAAGCTGCTCGCAGAACAGCACAATTGATGGCAGATTATGAAGCGCAACGTTTGAAAGACGAACAAGAAGCTAGAGCAAAGGCGCTAGAGACTAAGCAACGCTTAGAAGAGCAAGAGAAGGCTCGGATTGAGGCGAAACTTCTGGCAGAAGCTGCTCGAGAAGAAGAAAGACGTCAGGCGGAACAAGCATTAGCTTCCCAAGAAGAACAAGTTATCAATCAAGGGATGGAACCTTCAAGAGAGCTTGATAGCGGCTCCAAATCTAGTGAATTTAGGACAACTGAAAATGTACCTGACATAGATTTAAAAGCAGATAAGACTGATGTTGCAACTGCTGTGCCTAATCAAGAAACGGAAGAAATCTTTCTTGTGAGAGCAACAGATATTCCTACAGAAGGTGAAAATGTAAAACTTGGTGAGACATCAGAGTTAGAGCCCGTAGCAAAGGAACCTATCCGAGTAGAGGATTTGTCAAAAGAAGAAGAGGGTATAGCTTTGTCAGCCAAGAACAAACATAACAAGCGTGAAAGACGTCAGAAAGCAGATAATGTGGCAAAACGAATTGCACGTATTCTGATATCAATTATCATACTTGTATTGCTCTTGACAGCATTTGTAGGTTATCGTTTTGTAGATAGTGCTATTAAACCTGTTGATTCCAATTCAAATAAATTTGTACAAGTTGAAATTCCGATAGGATCTGGGAATAAATTAATTGGTCAAATTTTAGAAAAAGCAGGAGTCATTAAGAGCGCCACAGTCTTTAATTACTATTCCAAGTTCAAAAACTATAGTAATTTTCAAAGTGGATACTACAATCTTAAAAAAAGTATGACTTTAGATCAGATTGCTGCTGAATTGGAAAAAGGCGGAACTGCAGAACCGACAAAACCAGCTTTAGGTAAGATATTAATTACCGAGGGTTACACTATTAAACAGATTGCTAAAGCTATTGAGTCTAATAAAATTGATACAAAGACTACAAGTACACCTTATAAAGCTGATGATTTCTTGAAACTTGTTCAAGATGAAACGTTTATTAAAAAAATGGTAGCTAAATATCCAAATTTACTAGGAAGTTTACCTGATAAATCAAAAGCTATTTATCAATTGGAAGGATATTTATTCCCAGCTACCTACAACTATTATAAAGATACAACCTTAGAAGGACTTGTTGAAGATATGATTTCAACAATGAATACTAAGATGGCACCTTACTATAACACTATTAAAGCGAAGAATATGTCTGTAAATGATGTTTTGACATTATCATCTCTTGTTGAAAAAGAGGGATCAACAGACGAAGATCGCCGTAAAATAGCAAGTGTCTTTTATAACCGATTATCAGCCGGTCAAGCTCTTCAAAGTAACATTGCAATTTTGTATGCTATGGGGAAATTAGGTGATAAAACAAGTTTAGCTGAAGATGCTCAAATTAATACTTCAATTAAATCACCATACAACATCTATACTAATACTGGTTTGATGCCTGGACCAGTTGATAGTCCAAGTATCTCAGCAATTGAAGCGACTATAAAACCTGCTTCAACAGATTACCTTTATTTTGTCGCTGATGTGAAGACCGGAAATGTATACTACGCTAAAGATTTTGAAACACACAAGGCTAACGTTGAAAAATATATCAATAGTCAAATTAAC

SEQ ID NO: 11852 - protein, 600 aa, Streptococcus agalactiae
MTEFNDDQHSNHDQKSFKEQILAELEEANRLRKLREEELYQKEQEAKEAARRTAQLMADYEAQRLKDEQEARAKALETKQRLEEQEKARIEAKLLAEAAREEERRQAEQALASQEEQVINQGMEPSRELDSGSKSSEFRTTENVPDIDLKADKTDVATAVPNQETEEIFLVRATDIPTEGENVKLGETSELEPVAKEPIRVEDLSKEEEGIALSAKNKHNKRERRQKADNVAKRIARILISIIILVLLLTAFVGYRFVDSAIKPVDSNSNKFVQVEIPIGSGNKLIGQILEKAGVIKSATVFNYYSKFKNYSNFQSGYYNLKKSMTLDQIAAELEKGGTAEPTKPALGKILITEGYTIKQIAKAIESNKIDTKTTSTPYKADDFLKLVQDETFIKKMVAKYPNLLGSLPDKSKAIYQLEGYLFPATYNYYKDTTLEGLVEDMISTMNTKMAPYYNTIKAKNMSVNDVLTLSSLVEKEGSTDEDRRKIASVFYNRLSAGQALQSNIAILYAMGKLGDKTSLAEDAQINTSIKSPYNIYTNTGLMPGPVDSPSISAIEATIKPASTDYLYFVADVKTGNVYYAKDFETHKANVEKYINSQIN

SEQ ID NO: 11853 - protein, 501 aa, Streptococcus agalactiae
ATGATTATTAGAAATGGTTGCCTAGAGGATTTACAGCAAGTCATTAGTATTGAACAAATAAATTTTTCAGAAGCAGAGGCTGCGAGTAAAAAAGCAATGCAAGAACGTTTAACGATAATGACTGATACTTTTTTAGTTGCAGAGATTAATGGTCGTTTAGCAGGTTACATTGAAGGACCGGTTATTAAAGGTCGGTACTTAACGGACGATTTATTCCATAAAGTTTCTGAATTCCCTGTAAGGGTAGGTGGTTTCATAGGAATTACTAGTCTATCAATACATCCTGATTTTAAAGGTCAGGGGATTGGTACAGCATTATTAGCAGCGATGAAAGACCTGGTTGTTTCTCAAGAACGAGATGGTATAAGTTTAACTTGCCATGATGATTTAATTTCCTTCTATGAAATGAATGGATTTAAAGATGAGGGAGAATCTGACTCCCAACATGGTGGTTCGCTTTGGTATAATATGATTTGGAATAATCCAACACGATCAATTTGT

SEQ ID NO: 11854 - protein, 167 aa, Streptococcus agalactiae
MIIRNGCLEDLQQVISIEQINFSEAEAASKKAMQERLTIMTDTFLVAEINGRLAGYIEGPVIKGRYLTDDLFHKVSEFPVRVGGFIGITSLSIHPDFKGQGIGTALLAAMKDLVVSQERDGISLTCHDDLISFYEMNGFKDEGESDSQHGGSLWYNMIWNNPTRSIC

SEQ ID NO: 11855 - protein, 1329 aa, Streptococcus agalactiae
ATGTCAAAAACTTATCATTTTATTGGTATTAAAGGATCCGGAATGAGTGCCCTAGCACTGATGCTTCATCAAATGGGACATAACGTCCAAGGAAGTGACGTTGACAAATATTATTTTACCCAACGTGGTTTAGAGCAAGCAGGTGTAACTATATTACCTTTCTCACCGAATAATATCAGTGAGGATTTAGAGATTATTGCAGGAAATGCTTTTCGTCCAGATAACAATGAAGAGTTGGCTTATGTTATTGAAAAGGGCTATCATTTTAAACGATATCATGAATTTCTCGGAGATTTTATGCGTCAGTTCACTAGTCTAGGTGTAGCTGGGGCACATGGAAAAACCTCAACGACAGGTTTATTAGCTCATGTTTTAAAAAATATTACAGACACTTCTTTCCTAATTGGAGATGGTACAGGACGTGGTTCTGCTAATGCTAATTACTTTGTGTTTGAAGCTGATGAATACGAACGTCATTTTATGCCGTACCATCCAGAATACTCAATTATTACCAATATTGATTTTGACCATCCTGATTATTTTACAGGCCTAGAGGACGTATTCAATGCCTTTAATGACTATGCTAAGCAAGTTCAAAAAGGTTTATTCATTTATGGAGAAGATCCAAAACTTCATGAAATCACTTCTGAGGCACCAATATATTATTATGGTTTTGAAGATTCAAATGATTTTATAGCAAAAGACATCACTCGAACTGTTAATGGTTCTGACTTTAAGGTTTTCTATAACCAAGAAGAAATTGGTCAGTTTCATGTACCAGCATACGGTAAACATAATATCTTAAATGCAACTGCTGTTATTGCTAACCTTTACATAATGGGAATTGATATGGCATTAGTAGCTGAGCATTTGAAGACATTTTCAGGGGTAAAGCGTCGTTTTACTGAGAAGATTATTGACGATACTGTCATTATTGATGACTTTGCTCACCATCCTACTGAGATTATTGCGACATTAGATGCTGCTCGACAAAAATACCCGTCAAAAGAAATTGTAGCTATTTTCCAACCGCATACGTTCACTCGTACGATAGCTCTTTTAGACGAATTTGCCCATGCCTTGAGTCAAGCGGATAGCGTTTATCTCGCTCAAATATATGGTTCTGCTAGAGAAGTAGATAATGGTGAGGTGAAGGTAGAAGATTTAGCTGCTAAGATTGTCAAACACTCAGATTTAGTGACAGTCGAAAATGTCTCGCCTTTACTCAATCATGATAATGCTGTCTATGTCTTTATGGGTGCTGGAGACATTCAATTGTATGAGCGCTCTTTTGAAGAATTATTAGCTAACCTAACTAAAAATACACAA

SEQ ID NO: 11856 - protein, 443 aa, Streptococcus agalactiae; identical to SEQ ID NO: 2982

SEQ ID NO: 11857 - protein, 615 aa, Streptococcus agalactiae
GTGAATAGAGGCTCTAGACGATTTCCGTTGATAGCAGATGATGAACCAGTAATGTCTCCGCTTGTAAAGATGAATCTTTATGATAATGAAGATTTAATTAACAACATTCGAGGCTTTTATCAAGAAAAAACATATCAAAGCATGGTCAAAAGCAATTATGAACATGAAGAAATATCACATCCTAAGGTAATTGAAAATGATCCTGTACCACCGCAGAGTTTTGTAAAAAAAGCGACAGAGTTGAGCAAATCTCGACAAGAGGCAAAGAGGTCTGTTCGGGAGAAACGACAAGCTTACTATGCGAAACAGGAATTTAAGGCGCCATCAAAGGAAGCTTTTCAGCAACAATTGAAGGCAACAGTACCGAAAAAACAAACTCAGCGAAAGGTGACTGAACTAAGTCATCTTTCTGATCGTTTACAGCAGGAAAGCTATATATTAGCAGAAATTCCAATCATATTTCAAGAACCTGATAATACACCGAACCCAAAAACAAAGAAAAATAATTTTGATTTTTTGAAACGCAGTCAAGTTTACAATAAACAAGACAATCAGTTTCATAAAGAAAGAGCCAAGGCTCAAGAATTAAATCTGACACGTTTTAAAGACATTAAT

SEQ ID NO: 11858 - protein, 205 aa, Streptococcus agalactiae; identical to SEQ ID NO: 7624

SEQ ID NO: 11859 - protein, 96 aa, Streptococcus agalactiae; identical to SEQ ID NO: 7625

SEQ ID NO: 11860 - protein, 32 aa, Streptococcus agalactiae; identical to SEQ ID NO: 2986

SEQ ID NO: 11861 - protein, 3096 aa, Streptococcus agalactiae
ATGAGTAGAATGATTCCAGGACGTATTCGAAATCAAGGTATAGAACTCTACGAACAAGGTTTGGTGTCCTTGATTTCTCAAGAAGGTAATCTATTAAAAGCTAAAGTTGGGGATTGTCAGATTGAATATTCATTAGTAACAGAAGAAACAAAATGTTCTTGTGATTTTTTTGCAAGAAAAGGCTATTGTCAACATTTAGCTGCTCTGGAGCATTTCTTGAAAAACGATCCAGAAGGTAAAGCAATCTTATCTAAAGTTCAAGTTCAACAAGAAAGTCAACAAGAAACTAAGAAGAAAACCTCTTTTGGTAGTGTTTTTTTAGATAGTCTAATTATTAATGAAGATGATACTATAAAATATCAATTATCGGCTCAAGGAGAACAAAATCCTTATGCTAATGATATCTGGTGGACTTTAAAAATTAGACGACTGCCTGATGATAGAAGTTATGTTATTCGTGACATCAAAGCCTTTTTAAATACTGTTCGAAAAGAAGCTTATTATCAGATTGGAAAACAATACTTTGAAACTTTGTCTTTGATACAGTTTGATGAGACCAGTCAAGAATTGATAGAATTTTTATGGAGGCTCATTCCAAGTCATTCAAGCAAAATTGATCTAGAGTTTATTTTACCAAATCAAGGTCGTCACCTTAGTCTCACTCGTGGTTTTTTTGAAGAGGGTGTTACTTTGATGAATGCTTTAGAAAATTTTTCATTTGAAAGTGATTTTCATCAATTTAATCACCTCTACTTTAAGGAATTAGAAGGTGAGGATCATCTTTATCAATTTAAGGTTATTGTCCATAGGCAATCAATTGAATTAGAAATCAAAGAGAAAGACTTAAAACCACTATTTGCGAATTCTTATTTGTTTTATCGCGATACTTTCTACCATCTTAATTTGAAGCAAGAAAAGATGGTAACGGCTATTCGTAGTCTTCCCATTGAGGGAGATTTAGCAAAACATATCCATTTTGATTTAGATGATCAAGATAAGTTAGCAGCTCATTTACTGGATTTTAAGGAGATTGGACTAGTGGATGCTCCACGGAGCTTCTCTATTCATGATTTTAAGGTAAATTTTGAGTTCGATATTAATAGTCAAAATGAAATTTTATTGCAAATGGTATTTGATTATGGTAATGATTTAACTGTTCATAATCGTCAAGAACTAGAACAGTTAACATTTGCTAGTCACTTCAAACATGAAGAAAAAGTATTTAAACTCTTAGAAAAATATGGCTTTGCACCCCACTTTTCAACCAGCCATCCAGCATACAGTGCACAAGAATTATACGATTTTTATACCTATATGCTTCCACAATTTAAAAAAATGGGAACAGTGAGCTTATCCGCAAAATTGGAAAGTTATCGTCTCATAGAACGACCGCAAATTGATATTGAAGCTAAGGGAAGCCTGCTAGATATTTCTTTTGATTTCTCTGATTTACTGGAAAACGATGTTGATCAAGCTCTGGTAGCTTTGTTTGACAATAATCCTTATTTTGTGAATAAATCAGGGCAATTAGTTATTTTTGATGAAGAAACTAAGAAAGTAAGTGCAACTTTGCAAGGGTTGAGAGCTAGACGAGCAAAGAATGGGCATATTGAATTAGATAATATTGCAGCATTTCAATTATCAGAACTGTTTGCAAATCAAGATAATGTTAGCTTTTCACAACATTTTTACCAATTGATTGAAGATTTGAGACACCCAGAAAAGTTTAAAATACCTGGTCTATCTGTTTCAGCTTCCTTGCGCGATTATCAGCTTACAGGTGTCCGTTGGTTAAGTATGTTAGATCATTATGGCTTTGCAGGGATTTTAGCTGATGATATGGGGCTTGGAAAAACACTTCAAACGATTTCATTTTTAAGTACAAAACTAACTAGAGATTCTCGTGTGCTTATTTTATCACCATCAAGTTTAATTTATAATTGGCAAGATGAATTCCACAAATTTTCGCCAGACGTAGATGTAGCAGTTGCCTATGGTTCTAAGATTCGTAGAGATGAAATTATTGCTGAACGTCATCAAGTAATCATTACAAGTTATTCATCATTTAGGCAGGATTTTGAGACTTATTCTGAAGGAAATTATGATTATTTAATTTTGGATGAAGCACAGGTTATGAAAAATGCTCAAACTAAAATAGCCCATAGCTTGAGATCTTTTGAGGTCAAAAACTGTTTTGCATTATCGGGAACACCTATTGAGAATAAACTGTTAGAAATTTGGTCCATTTTCCAGATCATTTTACCTGGTTTATTACCTGGTAAGAAAGAGTTTTTGAAGTTGAACCCTAAACAAGTTGCTCGTTATATCAAACCATTTGTGATGAGACGTCGAAAAGAAGAAGTTCTCCCAGAATTACCGGATTTGATTGAAATGAACTATCCAAATGAAATGACAGACAGTCAAAAAGTTATCTATTTGGCGCAATTACGCCAAATTCAAGAAAGTATCCAACATTCTAGTGACGCTGACTTAAATCGTCGTAAAATTGAAATTTTATCTGGCATCACACGATTACGTCAAATTTGTGACACTCCACGTCTTTTTATGGATTATGATGGTGAAAGCGGTAAGTTAGAAAGCCTACGTCAACTTTTAACACAAATTAAGGAAAATGGACATCGTGCTCTGATTTTTTCTCAGTTCAGGGGTATGTTAGATATCGCAGAACGTGAGATGGTAGCTATGGGGCTTACAACTTATAAAATTACTGGTTCTACACCAGCAAATGAACGTCATGAAATGACCAGAGCATTTAATGCAGGATCAAAAGATGCTTTCTTGATTTCTTTAAAAGCTGGTGGCGTTGGTCTCAACCTTACAGGAGCTGATACCGTTGTTCTGATTGACTTGTGGTGGAATCCAGCTGTTGAAATGCAGGCGATTAGTCGCGCACATAGGTTGGGGCAAAAAGAGAATGTCGAGGTTTATCGCTTGATTACTAGAGGCACAATCGAAGAAAAAATTCTAGAAATGCAAGAAACTAAAAAACATTTGGTTACAACAGTTCTGGATGGAAATGAAACCCATGCTAGCATGAGCGTAGATGATATTCGAGAGATACTTGGAGTTTCTAAA

SEQ ID NO: 11862 - protein, 1032 aa, Streptococcus agalactiae
MSRMIPGRIRNQGIELYEQGLVSLISQEGNLLKAKVGDCQIEYSLVTEETKCSCDFFARKGYCQHLAALEHFLKNDPEGKAILSKVQVQQESQQETKKKTSFGSVFLDSLIINEDDTIKYQLSAQGEQNPYANDIWWTLKIRRLPDDRSYVIRDIKAFLNTVRKEAYYQIGKQYFETLSLIQFDETSQELIEFLWRLIPSHSSKIDLEFILPNQGRHLSLTRGFFEEGVTLMNALENFSFESDFHQFNHLYFKELEGEDHLYQFKVIVHRQSIELEIKEKDLKPLFANSYLFYRDTFYHLNLKQEKMVTAIRSLPIEGDLAKHIHFDLDDQDKLAAHLLDFKEIGLVDAPRSFSIHDFKVNFEFDINSQNEILLQMVFDYGNDLTVHNRQELEQLTFASHFKHEEKVFKLLEKYGFAPHFSTSHPAYSAQELYDFYTYMLPQFKKMGTVSLSAKLESYRLIERPQIDIEAKGSLLDISFDFSDLLENDVDQALVALFDNNPYFVNKSGQLVIFDEETKKVSATLQGLRARRAKNGHIELDNIAAFQLSELFANQDNVSFSQHFYQLIEDLRHPEKFKIPGLSVSASLRDYQLTGVRWLSMLDHYGFAGILADDMGLGKTLQTISFLSTKLTRDSRVLILSPSSLIYNWQDEFHKFSPDVDVAVAYGSKIRRDEIIAERHQVIITSYSSFRQDFETYSEGNYDYLILDEAQVMKNAQTKIAHSLRSFEVKNCFALSGTPIENKLLEIWSIFQIILPGLLPGKKEFLKLNPKQVARYIKPFVMRRRKEEVLPELPDLIEMNYPNEMTDSQKVIYLAQLRQIQESIQHSSDADLNRRKIEILSGITRLRQICDTPRLFMDYDGESGKLESLRQLLTQIKENGHRALIFSQFRGMLDIAEREMVAMGLTTYKITGSTPANERHEMTRAFNAGSKDAFLISLKAGGVGLNLTGADTVVLIDLWWNPAVEMQAISRAHRLGQKENVEVYRLITRGTIEEKILEMQETKKHLVTTVLDGNETHASMSVDDIREILGVSK

SEQ ID NO: 11863 - protein, 1308 aa, Streptococcus agalactiae
ATGGTATTACCTACAGTTGCTATTGTTGGTCGTCCGAATGTTGGAAAATCAACATTATTTAACAGAATTGCAGGAGAACGTATTTCCATTGTTGAGGACGTTGAAGGAGTCACTCGTGATCGTATCTATACAACGGGTGAGTGGCTAAATCGTAAGTTTTCATTAATTGATACTGGTGGGATTGATGATGTTGATGCACCGTTTATGGAGCAAATTAAGCACCAAGCAGACATTGCTATGACAGAGGCTGATGTTATTGTGTTTGTTGTGTCGGGTAAAGAAGGTGTGACTGATGCAGATGAGTATGTCTCACGTATTCTTTATAAGACCAATAAACCGGTTATTTTAGCTGTTAATAAGGTAGATAATCCTGAGATGCGCAATGATATTTACGATTTCTACTCTCTTGGTTTAGGGGATCCTTATCCCTTGTCATCAGTTCATGGTATTGGTACTGGTGATATATTGGATGCTATTGTGGAAAATCTTCCGGTAGAAGAGGAAAATGAAAATCCAGATATTATTCGTTTTAGTTTGATTGGACGTCCAAATGTTGGGAAATCTAGTTTAATTAATGCCATCCTTGGGGAAGACCGTGTTATTGCTAGCCCAGTTGCTGGTACTACGCGCGATGCTATTGATACTAATTTCGTTGATAGCCAGGGGCAAGAGTATACTATGATTGATACTGCTGGTATGCGTAAATCTGGTAAGGTATATGAAAACACAGAGAAATATTCTGTTATGCGTTCTATGCGCGCCATCGACCGCTCAGATGTTGTTCTTATGGTGATTAATGCAGAGGAAGGTATTCGTGAGTATGACAAGCGTATTGCAGGGTTTGCACATGAAACTGGTAAAGGTATTATTATTGTAGTTAATAAATGGGATACTATCGAAAAAGACAATCATACTGTCAGTCAGTGGGAAGCTGATATACGTGATAACTTCCAATTCTTGTCTTATGCGCCAATTATCTTTGTTTCTGCAGAGACAAAGCAACGTTTGCACAAGTTACCAGATATGATTAAACGTATTAGCGAAAGTCAAAACAAACGTATTCCGTCTGCTGTATTAAATGATGTGATTATGGATGCTATTGCTATTAATCCAACACCAACTGATAAAGGAAAACGTCTTAAGATTTTCTACGCAACTCAAGTTGCTGTTAAACCACCAACTTTCGTTGTTTTTGTTAACGAAGAAGAATTGATGCACTTTTCATATCTTCGTTTCTTAGAAAATCAAATCCGTGAAGCATTTGTTTTTGAAGGAACACCAATTAATCTAATAGCACGTAAACGTAAA

SEQ ID NO: 11864 - protein, 436 aa, Streptococcus agalactiae; identical to SEQ ID NO: 2990

SEQ ID NO: 11865 - protein, 900 aa, Streptococcus agalactiae
ATGAAATCAGTGGGACAAGCATTAGAAAATCAAGGGAGAGTGCCTCGTAATACAAATGATGAGCTTATTCAAATGATTTTAGCAGATGCTCAGGTAGCGGAGTTCATTAAAACCCACCAACTTTCTCAGCGTGAAATAAATATCAGCATGTCTAAATTTAATCAATTTTTGATTGAGCGTCAGAAATTTAAAAATAAGGATAGTCAATATATTGCTAAAGGCTATGAGCCTATTTTGGTTATGAATGAAGGTTATGCAGATGTTTCTTATTTAGAAACACGAGAGTTAATTGAAGCACAAAAAAAACAAGCTATCAGTGATCGTATTAATTTAGTTAATCTACCCAAGTCCTATCGGAATATCAGAATGACTGACTTTGATATTAATAACGAGAGTCGAATGAAAGCTATGTCACAACTGCTTGATTTTGTAGAGACTTATCCTTCATATAATCACAAGGGGCTTTATTTATATGGAGATATGGGGGTTGGGAAATCCTATTTAATGGCAGCAATGGCGAGGGAATTATCAGAGAGAAAGGGTGTGTCAACGACTCTTCTTCATTTCCCTAGTTTTGCTATTGATGTCAAAAATGCTATTTCAAGCGGAACTGTAAAAGATGAAATTGATGCTGTGAAAAGTGTTCCGATTTTGATTTTAGATGATATTGGGGCTGAACAGGCAACGTCCTGGGTTCGTGACGAGATTTTACAAGTTATATTACAACATCGTATGCTAGAAGAGTTGCCCACTTTCTTTACGTCAAATTATAGTTTTAACGATTTGGAAAGAAAATGGGCTAATATAAAAGGAAGCGACGAAACTTGGCAAGCAAAACGAGTTATGGAGCGCGTACGGTATTTAGCGATAGAATTCCACTTAGAAGGACCGAATCGCCGT

SEQ ID NO: 11866 - protein, 300 aa, Streptococcus agalactiae
MKSVGQALENQGRVPRNTNDELIQMILADAQVAEFIKTHQLSQREINISMSKFNQFLIERQKFKNKDSQYIAKGYEPILVMNEGYADVSYLETRELIEAQKKQAISDRINLVNLPKSYRNIRMTDFDINNESRMKAMSQLLDFVETYPSYNHKGLYLYGDMGVGKSYLMAAMARELSERKGVSTTLLHFPSFAIDVKNAISSGTVKDEIDAVKSVPILILDDIGAEQATSWVRDEILQVILQHRMLEELPTFFTSNYSFNDLERKWANIKGSDETWQAKRVMERVRYLAIEFHLEGPNRR

SEQ ID NO: 11867 - protein, 1173 aa, Streptococcus agalactiae
ATGAGTCCAATAGATGAGTTTACATATATTAAGCAAAATAAGATTGTTTATGATAGTAATAGTTTAATACAATTGTATTTCCCAATTATGGGAAGTGATGCCATGGCACTCTATGATTATTTTGTTCATTTTTTTGATGACGGAATACGACGTCATAAATTTTCAGAGGTTCTCAATCATCTGCAATACGGGATGCCAAGATTTCAAGATGCATTGGTAATGTTAACAGCTTTGGATTTGTTGACTGTTTACCAAGCCACAGGTACTTACCTTGTTAAGTTGAATCAAGCTATGTCAAATGAGTTATTTTTATCTAATCCCATCTATCGTCGTTTGTTAGAAAAACGTATAGGAGAGGTAGCAGTGGCAGAATTAGATATGAAAATACCTAAAAATGCTAGAGATATCTCTAAAAAATTTACAGATGTTTTCTCGGATTTAGGACAACCAAAACAAGAGGTAAACCGGAGTAAAAATGTTTTTGACTTGGAAAGTTTCAAACGTTTGATGATGCGAGATGGCTTACGTTTTAACAATGAAAAAGATGATGTCTTAGGTATTTATAGTGTATCAGAACTTTATCATTTAAATTGGTATGATACCTATCAATTAGCAAAACAAACAGCTATCAATGGAATGATTGCGCCTCAGCGAATGAAAGTTCAACAAAATGAGGGGCAGCATATTAAAGATAATCAGAGTTTTACAAATAATGAAAAGGTCATACTAAGGGAATCTAAAAATGATAGTGCTCTAGTGTTCCTTGAAAAAATCAAGAGAAGCCGTAAGGCAGTGACAACAAGTGGTGAGAAGACTTTACTTGAGGATTTGGCAAAAATGAATTTCCTAGACGAAGTCATTAATGTTATGGTTTTATATACCTTGAATAAGACAAAATCTGCTAACTTAAATAAGGCCTATATCATGAAAGTTGCTAATGATTTTGCCTTTCAGAATGTTATGACGGCCGAAGATGCTGTGCTTAAAATTCGTGATTTTTCAGATCAAAAAGTAAGGACTAAAACAGAAACGAAGAAGAAACAATCGAATGTTCCTGAATGGAGTAATCCTGATTATAAAGATGAGGTTAGCCCAGAAAAAGAAATTGAATTAGAACAGTTTAAAACAGATGCCCTCAAGCGTTTAGAACGATTAGGAAAGGATGGTGAATCA

SEQ ID NO: 11868 - protein, 391 aa, Streptococcus agalactiae; identical to SEQ ID NO: 2994

SEQ ID NO: 11869 - protein, 477 aa, Streptococcus agalactiae
ATGCGTTGTCCAAAATGTGGCTATAATAAATCTAGTGTGGTTGATAGCCGACAAGCTGAAGAAGGTACGACTATCAGACGCCGGAGAGAGTGCGAAAAATGTGGCAACCGCTTTACAACATTTGAACGTTTGGAAGAATTGCCTCTTTTAGTCATAAAGAAAGATGGTACTCGCGAGCAATTTTCTCGAGATAAAATTTTGAATGGTATTATTCAGAGTGCTCAAAAACGCCCTGTTTCGAGCGAAGATATTGAAAATTGTATCTTACGTATCGAACGTAAAATTAGGAGTGAGTATGAAGATGAGGTTTCTAGTATCACTATCGGAAATTTAGTGATGGATGAACTCGCCGAATTAGATGAGATTACTTATGTGCGCTTTGCTAGTGTTTATAAATCTTTTAAAGATGTAGATGAAATTGAAGAACTACTTCAACAAATTACAAAGCGCGTACGGAGTAAAAAGAGTGGTAGCGTG

SEQ ID NO: 11870 - protein, 159 aa, Streptococcus agalactiae; identical to SEQ ID NO: 7636

SEQ ID NO: 11871 - protein, 1503 aa, Streptococcus agalactiae
GTGAAAAATAAAAAAGATCAGTTTATAGGGGTAAAACAACCTCTGTCAAAAAAATTATCGCAATTAGTTTTTATCTTATTTTTTAGCCTATTTACAGTATTTTCTGTTTTAGTTTATACTTCGGCAACAAGATACGTCCTTCACAGGGAAAAAATTAATGTCGGTAGGTCATTAGAAAAAACTAGAGTTCGTTTGTCGCAAGCGAACTCTAGTTTGACATCCGATGATATTTTAGAGATCCTGTACAACCAGGTTTTTGCGGATGACATCTATCCTCATAAGCGTCAAAATGGAATTGTTAGAACGGGCGAGTCAATCGATAGTATTCTTTATGTTAATCAAGAAATGACCCTATACGATGTCAACAGGAAACCAGTTTTTTCTACACTGAGAACGGGTATGCCAACTATTGGTAAATCCATGGGAAAAGTTATCATCTCTAAAGTTGCAGATATGGAAGGTTTTGTTGGTACAAAAGCAATCTACTCTCAAAAAACAGGACAGTTGCTTGGATACGTTCAAATTTTCTATAATTTAGGTCGTTATTATAGTATGAGGCAAAACATCATTGTTTTCTTGATTATGATGGAAGTTTTAGGGACTGTTTTAGCCTTGGTCGTTATTAATAGTGCTACTAAGCGTATTGTTCGTCCGGTTAAAAATTTACACGACTTAATGCATCAGATATCTGAAAATCCTAGTAATTTAGAAATTAGAAGTAAGGTCCGTTCAGAAGACGAAATTGGAGAATTGTCTAGGATTTTTGATGGGATGTTGGATCAGTTGGAAGACTATACTCGTCGACAATCACAATTCATTAGTGATGTTAGTCATGAATTAAGAACGCCTGTCGCTGTTGTAAAGGGTCATATTGGTTTATTACAACGTTGGGGGAAAGATGATCCAGAAATTCTTGAAGAAAGTTTAGCAGCGGCATACCATGAGGCAGATCGTATGTCCTTAATGATTAATGACATGTTAAATATGATTCGCGTCCAAGGAAGCTTGGAACTTCATCAAGATGAAATGACAGATTTATCAAGCTCTATATCAGTTGTTATTGAAAATTTCCGTATTTTGAGAGAAGATTTTCAATTTATTTTTGAAAATAATATTTCAGATATCGTTTGGGGAAAGATATATAAGATACATTTTGAGCAAGCTCTCATGATCTTAATTGATAACGCTATCAAGTACTCTCCTAGTTATAAAGAAGTCAGTGTTGTTTTATCAGTAGACAATGATTTTGCGACAGTAGTTGTAAAAGATAAAGGAGAAGGTATCTCAGATGAAGATATTGAGTTTATCTTTGATCGTTTTTATCGAACTGATAAATCACGTAACAGAGAAAGTACACAAGCTGGTTTAGGTATCGGGCTTTCAGTGTTTAAACAAATTATGGATGCTTACCATTTAAAGGTGGATATTAAAAGTGAACTAAATCAAGGGACTGAATTCATTGTTCGCATTCCTATAAAAAAATTTGAAGAAACTAAAGAAATA

SEQ ID NO: 11872 - protein, 501 aa, Streptococcus agalactiae
MKNKKDQFIGVKQPLSKKLSQLVFILFFSLFTVFSVLVYTSATRYVLHREKINVGRSLEKTRVRLSQANSSLTSDDILEILYNQVFADDIYPHKRQNGIVRTGESIDSILYVNQEMTLYDVNRKPVFSTLRTGMPTIGKSMGKVIISKVADMEGFVGTKAIYSQKTGQLLGYVQIFYNLGRYYSMRQNIIVFLIMMEVLGTVLALVVINSATKRIVRPVKNLHDLMHQISENPSNLEIRSKVRSEDEIGELSRIFDGMLDQLEDYTRRQSQFISDVSHELRTPVAVVKGHIGLLQRWGKDDPEILEESLAAAYHEADRMSLMINDMLNMIRVQGSLELHQDEMTDLSSSISVVIENFRILREDFQFIFENNISDIVWGKIYKIHFEQALMILIDNAIKYSPSYKEVSVVLSVDNDFATVVVKDKGEGISDEDIEFIFDRFYRTDKSRNRESTQAGLGIGLSVFKQIMDAYHLKVDIKSELNQGTEFIVRIPIKKFEETKEI

SEQ ID NO: 11873 - protein, 687 aa, Streptococcus agalactiae; identical to SEQ ID NO: 7639

SEQ ID NO: 11874 - protein, 229 aa, Streptococcus agalactiae; identical to SEQ ID NO: 3000

SEQ ID NO: 11875 - protein, 456 aa, Streptococcus agalactiae
ATGGAGCGTCATTCAGAGATAATGGATATTTCTGATATTCAAGTTTCAGGTCATGTGGTGTATGAAGATGGTCTCTATCTACTTGACTATAATATGGCTTACGATATTACATTACCGTCTAGTCGTTCTATGAAACCAGTTGTTTTATCTGAAAAGCAAACTATTAATGAAGTTTTTATTGAAGCTGAAAATGTTAGCACTAAAAAAGAGCTCGTTGATCAGGATTTGGTCTTAATATTAGAGGAAGATGATATTAATTTAGAAGAAAGCGTTATCGATAATATCTTGTTAAATATACCTCTTCGTGTTCTGGCAGCTGATGAGGTTGGGGTAGAAGCGGATTTATCAGGTAAAAATTGGTCGTTAATGACTGAAAAGCAGTATGAAGAAAAACAAGCTAAAGAAAAAGAAAAATCTAATCCTTTCGCAGCCTTAGAAGGTATGTTTGATAGTGAT

SEQ ID NO: 11876 - protein, 152 aa, Streptococcus agalactiae; identical to SEQ ID NO: 7642

SEQ ID NO: 11877 - protein, 888 aa, Streptococcus agalactiae
TTGCTGTATCAACAAATTGCAAGTAATAAGAGAAAAACAGTTGTCTTGTTAATTGTCTTCTTCTGTCTTTTAGCAGCTATTGGAGCAGCTGTAGGTTATTTGGTATTAGGCAGCTACCAATTTGGGCTTGTTCTAGCTCTAATTATTGGGGTTATCTATGCAGTAAGTATGATTTTTCAATCAACTAATGTTGTTATGTCAATGAACAATGCGCGTGAAGTTACAGAAGATGAGGCGCCAAATTATTTTCATATTGTTGAAGATATGGCAATGATAGCTCAGATACCTATGCCACGCGTTTTCATTGTTGAAGATGACTCCCTAAATGCCTTTGCCACAGGCTCTAAGCCAGAAAATGCTGCTGTTGCAGCAACGACAGGCCTATTAGCTGTTATGAACCGCGAAGAGCTAGAGGGTGTTATTGGACATGAGGTTAGTCATATTCGTAATTATGATATCCGTATTTCAACCATTGCAGTAGCTTTAGCGAGTGCTGTAACTCTAATATCAAGCATTGGTAGCCGTATGTTATTTTACGGCGGAGGTCGTAGGCGTGATGATGACAGAGAAGATGGTGGAAACATCTTGGTTTTGATTTTCTCTATTTTATCACTAATCCTTGCACCATTAGCCGCTAGTTTAGTTCAATTAGCTATTTCAAGACAGCGCGAATACTTAGCAGACGCTAGTTCTGTTGAGTTAACAAGAAATCCACAAGGAATGATCTCTGCTTTAGAAAAACTTGATCGTTCTGAACCTATGGGGCATCCAGTAGATGATGCTAGTGCGGCTCTCTATATCAATGACCCAACGAAAAAAGAAGGGTTAAAGTCTTTATTTTATACGCATCCACCAATTGCAGATCGTATTGAGCGTTTGCGTCATATG

SEQ ID NO: 11878 - protein, 296 aa, Streptococcus agalactiae; identical to SEQ ID NO: 3004

SEQ ID NO: 11879 - protein, 552 aa, Streptococcus agalactiae
ATGGGAACTATGATTTTAATAGCAATTATTGCTTTGTTTGTTATTTGGTTGATTGTTGCTTATAACAGTTTAGTTAGAAGTCGCATGCATACTAAAGAATCATGGAGTCAAATAGACGTTCAATTGAAACGTCGTAACGATTTAATTCCAAACCTAATCGAAACTGTTAAAGGCTATGCTGCGTACGAAGGGAAAACACTTGAGAAGATTGCAGAACTGCGTGCTCAAGTTGCTAAAGCTAACACACCTGCTGAAGCAATGACAGCAAGTAATGAGCTAACAAGACAGCTTTCAAGTATTTTAGCGGTTGCTGAAAATTACCCAGATTTAAAAGCCAACAATAGCTTTGTTAAACTTCAAGAAGAACTAACTAATACGGAAAATAAAATTTCTTATTCACGTCAGTTATATAACACAACAACATCCAATTATAATGTGAAATTAGAAACTTTCCCAAGTAATATTGTTGGAAAACTATTTGGGTTCAAACCAAGCCAATTCTTAGAAACTCCTGAAGAAGAAAAAGAAGTGCCAAAAGTTTCCTTTGACTTT

SEQ ID NO: 11880 - protein, 184 aa, Streptococcus agalactiae; identical to SEQ ID NO: 3006

SEQ ID NO: 11881 - protein, 711 aa, Streptococcus agalactiae; identical to SEQ ID NO: 7649

SEQ ID NO: 11882 - protein, 237 aa, Streptococcus agalactiae; identical to SEQ ID NO: 7650

SEQ ID NO: 11883 - protein, 1377 aa, Streptococcus agalactiae
ATGAAACATTTCTTTGATTACAAGACAATGTCTGTCGCACGTAAACTCAGCATTAGTTTTATCGCTGTTATCCTATTGGGAAGTATTTTACTTTCACTTCCAATTTTTCAATATGCTAACGCCCCTAAAACACATTACATTGATCACCTTTTCACGACTGTTTCAATGGTATGTGTAACTGGTTTATCTGTTTTTCCTATCAGTAAGGTTTATAACGGTTGGGGGCAGATTGTAGCTATTTTACTCATGCAAACAGGGGGACTTGGTTTAGTAACACTAATGTCGTTGTCTTACTATACCCTAAGACGTAAAATGTCGTTAAATGATCAGACCCTTTTGCAGTCAGCGATAACTTATAACAGTTCGACAGATTTAAAAAAATATCTCTATATGATTTTTAAAGTAACTTTAACTTTAGAAGTTTTAGCAGCCAGCATTTTAGCCATAGATTTTATTCCTCGATTTGGTTTGGGTCATGGTATCTTTAATAGTATATTCTTAGCTGTCTCAGCCTTTTGTAATGCCGGTTTTGATAATCTAGGGGCAACGAGCTTAGCTCAATTTAAACTAAATCCTTTGGTTAACATTATCGTTTGTTTCTTGATTATTTCAGGAGGACTTGGATTTGCCGTATGGAAAGATTTAATTGAAGCTACTATACAAACATCTCACAAGGGACCAAAATTAATCAAGACATTTCCAAAACGCCTCAGCAACCATTCTAAACTGGTTTTAAAAACAACAACCATTATTTTACTAACAGGAACTTTGCTTTCTTGGTTGTTAGAGTTTGGAAATTTTAGAACAATTGCTAATTTATCTCTACCTAAACAACTAATGGTCAGCTTTTTCCAAACAGTTACGATGCGTACCGCTGGATTTTCAACTATTGATTATACCCAAACTGATTTCGCAACCAACCTTGTTTATATTATCCAAATGTTAATTGGAGGAGCTCCTGGTGGAACGGCAGGAGGATTTAAAGTCACTGTTATCGCCATTTTACTCTTACTATTTAAAGCCGAACTGAGTGGCCAAAGCCAAGTGACTTTTCATTATCGAACAATTCCTTCCAGTATTATTAAACAAACACTATCGATTTTAACTTTCTTTTTTATCATACTTATTAGCGGCTATCTCCTTCTTCTGGAACTCAATCCCCATATAGATCCTTTTTCTCTTTTCTTTGAGGCATCTAGTGCCTTAGCAACCGTGGGTGTAACAATGAACACTACCAATCAATTAACTCTGGGCGGTCGAATTGTAATTATGTTCCTCATGTTTATTGGTCGAGTCGGTCCAATTACCGTACTGCTATCAATTCTTCAGAAAAAAGAGAAGGAAATTCACTATGCTGAAACAGAAATTATTCTAGGT

SEQ ID NO: 11884 - protein, 459 aa, Streptococcus agalactiae
MKHFFDYKTMSVARKLSISFIAVILLGSILLSLPIFQYANAPKTHYIDHLFTTVSMVCVTGLSVFPISKVYNGWGQIVAILLMQTGGLGLVTLMSLSYYTLRRKMSLNDQTLLQSAITYNSSTDLKKYLYMIFKVTLTLEVLAASILAIDFIPRFGLGHGIFNSIFLAVSAFCNAGFDNLGATSLAQFKLNPLVNIIVCFLIISGGLGFAVWKDLIEATIQTSHKGPKLIKTFPKRLSNHSKLVLKTTTIILLTGTLLSWLLEFGNFRTIANLSLPKQLMVSFFQTVTMRTAGFSTIDYTQTDFATNLVYIIQMLIGGAPGGTAGGFKVTVIAILLLLFKAELSGQSQVTFHYRTIPSSIIKQTLSILTFFFIILISGYLLLLELNPHIDPFSLFFEASSALATVGVTMNTTNQLTLGGRIVIMFLMFIGRVGPITVLLSILQKKEKEIHYAETEIILG

SEQ ID NO: 11885 - protein, 669 aa, Streptococcus agalactiae
ATGAAAACAAAAATTATTGGTGTACTTGGTCTAGGAATATTTGGACAAACACTCGCACAAGAACTAAGTAACTTTGAACAAGATGTTATTGCTATTGACAGCAATCCTGAAAATGTACAAGCTGTCGCCGAAGTTGTTACAAAAGCAGCTATCGGAGACATTACTGATTTAGCTTTCCTAAAACACATCGGGATCAGTGACTGTGATACTGTTATTATTGCTACAGGAAACAGTTTAGAGAGCTCAGTATTGGCCGTAATGCACTGTAAAAAGTTAGGCGTCCCACAAGTTATTGCTAAAGCTCGAAACCTTGTATACGAAGAAGTACTTTATGAAATTGGTGCTGATTTGGTTATCTCTCCGGAGCGAGAATCTGGGCAAAATGTTGCTGCAAACCTCATGAGAAATAAAATTACAGATGTCTTCCAGATTGAATCTGATATTTCTGTCATTGAATTTAAAATTCCCAAATCATGGGTAGGGAAAACTGTCGAACAATTAAATATCCGTCACAAGTTTGATCTTAACCTCATAGGTATCAGAAAAGCAAAAAACAAACCTGTCGATACCGAAGTTCCAATCAATAGTCCACTTGAAGAAGGTATTATTCTAGTGGCTATCGCTAACTCAGATGCCTTCCAACGCTATGACTATTTAGGATACTTTAAC

SEQ ID NO: 11886 - protein, 223 aa, Streptococcus agalactiae; identical to SEQ ID NO: 7654

SEQ ID NO: 11887 - protein, 828 aa, Streptococcus agalactiae
ATGGCTAAACAATTAATTGGTTATCAAGAGGGTTATGGCTTTCTATACAGGCTATCAGGTGCCAGTAAGTTACTATTTTTTATTTTAGTTTCTGTTGCTTGCATGACCACTTATGATACAAGATTTTTAATTGTTGTTTCATTGGGATCGCTAGTCTTATTTAGATTAGCAAAAATCAAATGGCAACAGGTGTCCTTTGTTATGACTTTAGTTGTTGTATTCGCTGTTTTAAATATTATAATGGTCTATCTTTTTGCTCCCCATTATGGTGATAAGATTTATGGTAGTTCTTCTTTATTGTTAAAAGGAATTGGCCCATATGATGTGACTAGCCAAGAGTTGTTTTACCTCTTTAATCTGATTTTAAAATACTTTTGTACAGTGCCTTTAGCTCTTTTGTTTTTGATGACAACTAATCCTAGTCAGTTCGCATCAAGTTTAAATCAATTAGGTTTATCATATAAAATAGCTTATGCTGTTAGTTTGACCCTTAGATATATACCTGATGTTCAAGAAGAATTTTATACAATACGTCGAGCACAAGAGGCAAGAGGAATAGAATTATCAAAAAAATCGAACTTAGTAGCACGCATTAAGGGGAATTTGCAGATTGTCACACCATTAATTTTTAGCTCTCTAGAACGTATTGATACAGTAGCAACTGCTATGGAACTTCGACGATTTGGTAAAAATAAAAGACGTACTTGGTACTCTAAGCAATCTTTGGAAAAAAGTGACATTGTCTTAATCATACTTGCTCTAGCTAGTCTGTTTGTAAGCCTTTATTTAATTCACCTTAATCATGGACGTTTCTATAACCCATGGCAA

SEQ ID NO: 11888 - protein, 276 aa, Streptococcus agalactiae
MAKQLIGYQEGYGFLYRLSGASKLLFFILVSVACMTTYDTRFLIVVSLGSLVLFRLAKIKWQQVSFVMTLVVVFAVLNIIMVYLFAPHYGDKIYGSSSLLLKGIGPYDVTSQELFYLFNLILKYFCTVPLALLFLMTTNPSQFASSLNQLGLSYKIAYAVSLTLRYIPDVQEEFYTIRRAQEARGIELSKKSNLVARIKGNLQIVTPLIFSSLERIDTVATAMELRRFGKNKRRTWYSKQSLEKSDIVLIILALASLFVSLYLIHLNHGRFYNPWQ

SEQ ID NO: 11889 - protein, 1673 aa, Streptococcus agalactiae
ATGAAAGATTTTATTGAATGGAAGGATTTTACCTTTCAATATGACGTTCAATCTGAACCAACTTTAAAAGGGATTAACTTAAGCATTCCTAAAGGTGAAAAGGTCTTGATATTAGGACCTTCAGGGTCGGGGAAGTCAACGCTTGGTCATTGTTTAAATGGTATTATCCCAAATACTCATAAAGGCCAATATAGTGGTATTTTTACGATTAACCATAAAAATGCTTTTGACTTGTCAATATATGACAAGTCTCATTTAGTTTCTACGGTTTTACAAGATCCAGATGGCCAATTTATAGGATTGACAGTAGCAGAAGATATTGCTTTTGCATTAGAAAATGATGTTGTAGCACAGGAAGAAATGGCCTCTATCGTTGAAATGTGGGCAAAACGTTTAGAAATAGCTCCTCTTTTGTCTAAACGTCCACAAGACTTGTCGGGAGGACAAAAACAACGGGTTAGTTTAGCTGGAGTTTTAGTAGACGATAGCCCAATTCTATTATTTGATGAGCCTTTGGCTAATCTAGATCCACAATCGGGACAAGATATCATGGCATTGGTTGACCGTATTCATCAAGAGCAAGATGCGACCACTATTATTATTGAACATCGATTGGAAGATGTTCTTTATGAGCGAGTAGATCGTGTAGTTCTTTTTAGTGATGGACAAATTATTTATAATGGGGAGCCGGATCAACTTTTAAAAACTAATTTTTTATCTGAATATGGTATTCGAGAACCACTGTATATTTCTGCTCTCAAAAATTTAGGATATGACTTTGAAAAACAAAATACAATGACGTCTATTGATGACTTTGATTTCAGTGAACTATTGATACCTAAAATGCGAGCATTAGATTTAGATAAACATCAGATAAATTATTATCAGTACAGCATTTGTCGGTGTCATATGATTTAGAGAATAATACTTTAGATGATGTTTCGTTTGATTTATATAAAGGTCAGCGGTTAGCTATCGTTGGGAAAAATGGTGCAGGTAAATCTACTTTAGCTAAAGCGTTATGTCAATTTATCCCTAATAATGCTACTCTAATTTATAATAATGAAGATGTCAGTCAAGACTCTATAAAAGAAAGAGCAGAACGAATTGGCTATGTTTTGCAAAATCCCAATCAGATGATAAGTCAAGCGATGGTTTTTGATGAAGTTGCTCTGGGTCTCCGTTTAAGAGGTTTTAGTGATAATGATATAGAAAGTCGTGTCTACGATATATTAAAGGTTTGTGGGCTCTACCAATTTAGGAATTGGCCTATATCGGCTCTATCATTCGGTCAGAAAAAACGTGTTACGATTGCTTCGATACTGATTTTAAATCCAGAAGTTATTATTTTGGATGAACCAACAGCTGGTCAAGATATGAAGCATTATACTGAAATGATGTCTTTCCTTGATAAACTAAGTTGTGATGGACATACCATTGTTATGATTACACATGATATGCAGCTTATGTTAGAGTATACAGATCGTGCAATTGTAATCGACAATGGTCTGATTGTTGCAGATGATCATCCTATTAACATCCTTTCAAATACAGAGCTTTTGAAAAAGACTCATTTAAAGAAAACGAGTTTATTTGCTTTAGCAGACAGATTAGGGATATCTCCACAGAAACTAACACAATGGTACATTGATAATCAAGGAGGTAAGAATGGC

SEQ ID NO: 11890 - protein, 558 aa, Streptococcus agalactiae
  VARIANT 291: Xaa = Any Amino Acid
MKDFIEWKDFTFQYDVQSEPTLKGINLSIPKGEKVLILGPSGSGKSTLGHCLNGIIPNTHKGQYSGIFTINHKNAFDLSIYDKSHLVSTVLQDPDGQFIGLTVAEDIAFALENDVVAQEEMASIVEMWAKRLEIAPLLSKRPQDLSGGQKQRVSLAGVLVDDSPILLFDEPLANLDPQSGQDIMALVDRIHQEQDATTIIIEHRLEDVLYERVDRVVLFSDGQIIYNGEPDQLLKTNFLSEYGIREPLYISALKNLGYDFEKQNTMTSIDDFDFSELLIPKMRALDLDKHXDKLLSVQHLSVSYDLENNTLDDVSFDLYKGQRLAIVGKNGAGKSTLAKALCQFIPNNATLIYNNEDVSQDSIKERAERIGYVLQNPNQMISQAMVFDEVALGLRLRGFSDNDIESRVYDILKVCGLYQFRNWPISALSFGQKKRVTIASILILNPEVIILDEPTAGQDMKHYTEMMSFLDKLSCDGHTIVMITHDMQLMLEYTDRAIVIDNGLIVADDHPINILSNTELLKKTHLKKTSLFALADRLGISPQKLTQWYIDNQGGKNG

SEQ ID NO: 11891 - protein, 546 aa, Streptococcus agalactiae
ATGAATACAAACACAATAAAAAAGGTTGTAGCGACTGGAATTGGAGCTGCACTTTTTATCATTATAGGTATGCTAGTTAATATACCAACACCAATTCCAAATACTAATATTCAATTGCAGTATGCAGTTTTAGCATTATTTGCAGTTATTTATGGACCAGGAGTTGGTTTTTTTACTGGTTTTATCGGACACGCATTGAAAGATTCGATTCAATATGGTTCTCCGTGGTGGACTTGGGTTTTAGTTAGTGGTCTTTTAGGTTTGATGATAGGCTTTTTTGCTAAAAAATTAGCTATTCAATTATCTGGCATGACTAAGAAGGATTTGCTTCTATTTAATGTAGTTCAAGTTATTGCTAACCTTATAGGTTGGTCTGTCGTTGCACCGTATGGTGATATTTTCTTTTATAGCGAACCTGCAAGCAAAGTTTTTGCACAAGGTTTCTTATCAAGCCTTGTGAATTCCATTACTATTGGAGTAGGTGGTACGCTTTTGTTGCTAGCATACGCTAAATCACGACCACAAAAAGGTAGTTTATCCAAAGAT

SEQ ID NO: 11892 - protein, 182 aa, Streptococcus agalactiae
MNTNTIKKVVATGIGAALFIIIGMLVNIPTPIPNTNIQLQYAVLALFAVIYGPGVGFFTGFIGHALKDSIQYGSPWWTWVLVSGLLGLMIGFFAKKLAIQLSGMTKKDLLLFNVVQVIANLIGWSVVAPYGDIFFYSEPASKVFAQGFLSSLVNSITIGVGGTLLLLAYAKSRPQKGSLSKD

SEQ ID NO: 11893 - protein, 1064 aa, Streptococcus agalactiae
TTGGGTATTTTAGTCCCTAAAGCCTCTGCGATTGGTTTACTTGGTCAACTTTTTGTAGGAGGGTTGAAAGCTATTGCCCCTCTTTTAGTTTTCACTTTAGTTATTAGTGCCTTGTCGCAACACCGTGAGGGCGGTAAGACCAATATGTCAACGATAATTGGTTTGTATATCACTGCAACTTTTGCAGCGGCCCTAATCGCTGTTGTTGTGAACTATATTTTCCCTTTGACACTGATATTGAAAACGCCAGCAAAGACAGACTTATTACCTCCCAAGGGGATTTCAGAAGTCTTTCAATCTCTTTTGTTGAAAATTGTTGATAATCCCATTCATGCCATTACCGAGGCCAATTATATGAGTATTCTATTTTGGGCGGTTATTTTTGGTTTGGCGATGCGAAGCAGTAATCAGCGTACAAAAGATTTAATGCAAACTTTTGCTGATGCTACTTCACAAGTTGTCAAATGGATTATCAATTTGGCCCCAATTGGTATTATGGGGTTGGTTTTCACTAGCATTTCAGAAAACGGTATTGGTATACTAGGTGATTATGGTCTTTTAATATTAGTTTTGGTGGGTACGATGTTATTTGTAGCTCTTGTCGTTAACCCAATCATTGCTTTTGTTATGATGCGTAAAAATCCTTACCCTTTGGTATTACGATGCTTAAAGGATTCAGGTATTACAGCTTTCTTTACACGTAGTTCTGCGGCGAATATTCCTGTTAATATGAGACTATGTGAGGATTTAGGATTAGATAAAGATACTTACTCAGTATCTATCCCGCTTGGTGCAGCTATCAATATGGCTGGTGCAGCTATTACAATTAATATCCTGACTTTAGCAGCAGTAAATACTTTAGGAATTACTGTTGATTTTCCAACAGCATTCTTATTAAGTGTGGTTGCTGCTGTATCAGCATGTGGAGCTTCTGGTGTAACTGGTGGTTCACTTTTATTGATTCCGGTGGCATGTAGCTTATTTGGTATTTCAAATGACGTTGCAATGCAAGCGTAGGAGTTGGTTTCATTGTAGGGGTGATACAGGATTCGTGNNNNNTTAAT

SEQ ID NO: 11894 - protein, 355 aa, Streptococcus agalactiae
  VARIANT 352, 353, 354: Xaa = Any Amino Acid
MGILVPKASAIGLLGQLFVGGLKAIAPLLVFTLVISALSQHREGGKTNMSTIIGLYITATFAAALIAVVVNYIFPLTLILKTPAKTDLLPPKGISEVFQSLLLKIVDNPIHAITEANYMSILFWAVIFGLAMRSSNQRTKDLMQTFADATSQVVKWIINLAPIGIMGLVFTSISENGIGILGDYGLLILVLVGTMLFVALVVNPIIAFVMMRKNPYPLVLRCLKDSGITAFFTRSSAANIPVNMRLCEDLGLDKDTYSVSIPLGAAINMAGAAITINILTLAAVNTLGITVDFPTAFLLSVVAAVSACGASGVTGGSLLLIPVACSLFGISNDVAMQVVGVGFIVGVIQDSXXXN

SEQ ID NO: 11895 - protein, 1253 aa, Streptococcus agalactiae
TTGGCGTGGGCTATCATTGGGTTCTGCTTAACAGGCGTAACTTTACCCCTACTTGGTGTTGCAGCTGTGGCGTACTCAGGAGCAACCGATGTTGAAAGCTTCACCAAACCTGTCTCTAAAACATATGCTATTTTCTTTGCAGTAGCACTATACCTATCTATTGGACCTTTCTTTGCCATTCCTCGAACAGGGGCAACCTCATTCTCAGTTGGTATTCAACCTATCTTAGCGACAGCTCCTTAGTCAAAATTATCTATGGTTTAATTTTCTTTGGTATTTCTTATTTCTTAGCTATTAGACCTAGTCAGATTGTAGATCGTATTGGTAAATATCTAACTCCCTTTTTACTAACTGTTATTAGTATTTTAATTATTGCCTCACTCATCCATCCAGCTGCTATCGTTGGAACACCACATAACGCTTCAACGAATGTCAGCGATGCTTTCAAGGATTTACCATTCCTAGCAGGACTGATTCAGGGGTATGGTACAATGGATGCCCTTGCATCAATTGCTTTTGCTATTATCGTTATTCAAGCAAGTAAACAGTACGGAGCAATTACCAAAAAAGAAATTACTTCTATGGCACTTAAATCTGGTGCTATCGCTACATTTCTTTTAGCTTTTATTTATATTTTTGTAGGACGTATTGGTGCAACTTCACAAAGCTTGTTTAAATTTGCAAATGGTTCCTTCTTACTTCACAATACTCCAATAGACGGTGGGCATGTTCTTAGTCAATCAGCTAACTTCTATTTAGGAATTGTGGGACAAGCTATTTTAGGTACGGCTATTTTTCTTGCTTGCTTAACAACAGCTACTGGATTAATCACTGCTTGTGCGGAATACTTCCACAAATTACTTCCAAAGATTAGTCACATTACTTGGGCTACAATCTTTACTTTAATTGCTATTACGTTCTATTTTGGTGGTTTATCAGAGATTATCCGTTGGTCACTACCAGTTCTCTACCTTCTCTATCCATTAACTATAGTCTTAATTTTCTTAGTCTTTTTTGATCAAAAATTTGAAAGTAGCCGCATTGTCTACCAAACTTCTATTGCCGCCACTGCTGTCGCTGCTTTATACGATGCCTTATCAAAACTCGGCGAAATGACTGGTTTATTTACCATTCCATCCGCTTTGACCACATTCTTTACTAAAGTTGTTCCTTTAGGTGAATATTCTATGGGATGGATTAGTTTTGCAATTTGTGGTGTCTTAGTTGGTCTTATTCTAAAAAAAGTAAAAGCA

SEQ ID NO: 11896 - protein, 418 aa, Streptococcus agalactiae
  VARIANT 77: Xaa = Any Amino Acid
MAWAIIGFCLTGVTLPLLGVAAVAYSGATDVESFTKPVSKTYAIFFAVALYLSIGPFFAIPRTGATSFSVGIQPILXDSSLVKIIYGLIFFGISYFLAIRPSQIVDRIGKYLTPFLLTVISILIIASLIHPAAIVGTPHNASTNVSDAFKDLPFLAGLIQGYGTMDALASIAFAIIVIQASKQYGAITKKEITSMALKSGAIATFLLAFIYIFVGRIGATSQSLFKFANGSFLLHNTPIDGGHVLSQSANFYLGIVGQAILGTAIFLACLTTATGLITACAEYFHKLLPKISHITWATIFTLIAITFYFGGLSEIIRWSLPVLYLLYPLTIVLIFLVFFDQKFESSRIVYQTSIAATAVAALYDALSKLGEMTGLFTIPSALTTFFTKVVPLGEYSMGWISFAICGVLVGLILKKVKA

SEQ ID NO: 11897 - protein, 1052 aa, Streptococcus agalactiae
ATGAGAGCTGCAACTTATCTTTCAGCTAATGAATTATCACTTACTGATAAGGCTAAACCTCAAGTAATAAAACCCACAGATGCGGTTGTAAGACTTGTCAAAACAACCATTTGTGGTACTGATCTACATATCCTTGGTGGCGATGTTCCTGCTTGTAAACCAGGAACAACTTTAGGTCATGAAGGCATTGGTATCGTCGAAGAAGTTGGTTCTGCTGTCAATCATTTTAAAGTCGGAGATAAAGTAATTATTTCTTGTGTCACTGCCTGTAATACTTGCTATTACTGTAAGCACCAGTTGCCTTCACATTGTGAAGATGGCGGGTGGATTTTAGGACATCTTATTGAAGGTACTCAAGCAGAATATGTTCATATTCCACATGCAGATGGTAGCCTTTATCATGCACCTGAAGGTGTTTGTGACGATGCATTGGTTATGTTATCTGATATTTTACCAACTTCATACGAAATCGGCGTCTTACCTTCTCACATTAAACCAGGTGATACTGTTTGTATTGTAGGCGCTGGACCAATTGGACTATCTGCCTTACTAACTGCACAATTCTATTCTCCTGCCAAAATTATTATGGTTGATTTATCTCAAAAACGACTTGAAGCCTCTAAAAAATTTGGTGCAACACACACCATTCTATCAACGTCTACTCAAGAAGTTAAAGAAGAAATTGATAAAATTACCAAAGGCCGGGCGTTGATGTCGTATTAGAATGTGTTGGTTATCCTGCAACATTTGATATTTGTCAAAATGTAGTTTCTATTGGAGGACATATCGCAAATGTTGGTGTTCATGGTAAACCTGTTGAATTTAACCTCCAAGATTTATGGATAAAAAATATAACCCTTAATACTGGATTAGTTAATGCTAATACAACTGAAATGCTCCTTGAAGTTCTTGAGACAGGCAAAATCGATGCAACACAACTAGTAACACATCACTTCAAGCTATCTGAAATCGAAGAAGCTTATAAGGTATTTAAAGCTGCTGAAGAAAACAATACTCTCAAAGTTATCATCGAAAACGATATTACTCCAGCC

SEQ ID NO: 11898 - protein, 351 aa, Streptococcus agalactiae; identical to SEQ ID NO: 7666

SEQ ID NO: 11899 - protein, 690 aa, Streptococcus agalactiae; identical to SEQ ID NO: 7667

SEQ ID NO: 11900 - protein, 230 aa, Streptococcus agalactiae; identical to SEQ ID NO: 3016

SEQ ID NO: 11901 - protein, 1068 aa, Streptococcus agalactiae
ATGAGTAAAGAACCAATTATTAAATTAGACAACATTGATGTTACTTTCCACCAAAAGAAACGTGAGATTAATGCTGTTAAAGATGTTACTATCCATATTAATCAAGGTGATATATATGGAATTGTCGGTTATTCAGGAGCCGGAAAATCTACCCTTGTTCGTGTTATTAATTTGCTACAAGAACCTTCAGCAGGTAAAATTACTATTGATGACCAAGTTATTTACGACAACAAGGTGACACTGACTAGCACACAATTACGCGAACAGCGCCGTGAAATTGGAATGATTTTTCAACATTTTAACCTAATGTCACAGTTGACAGCAGAGCAGAATGTAGTTTTTGCTCTTAAACATTCAGGTTTATCAAAAGAGGCGAAAGCAGCTAAGGTTGCTAAATTATTAGAACTTGTTGGATTATCCGATCGTGCTCAAAACTATCCTTCACAATTATCAGGAGGGCAAAAACAGCGTGTTGCCATTGCGCGTGCATTGGCTAACGATCCTAAAATCTTAATTTCAGATGAGTCTACCTCTGCACTTGACCCTAAAACAACAAAACAAATACTTGCCCTTCTCCAAGATCTGAATAAAAAATTGGGACTTACGATTGTTTTGATTACACATGAGATGCAAATTGTCAAAGACATTGCTAATCGCGTTGCTGTTATGCAAAATGGTAAATTGATTGAAGAAGGATCAGTTTTAGACATTTTTTCACATCCTAGAGAGAGTCTTACACAAGATTTTATAAAAATAGCTACTGGGATTGATGAGGCAATGCTTAAGATTGAGCAACAAGAAGTTGTCAAAAATCTACCAGTAGGTAGCAAATTAGTTCAACTGAAATACGCTGGGCATAGCACGGATGAGCCGCTTTTAAATCAAATTTATAAAGAATTTGAAGTAACTGCTAACATCCTCTATGGGAATATTGAAATTTTAGATGGTATTCCAGTTGGAGAAATGGTAGTTATCTTATCAGGTGACGAAGAAAAATTAAGACAAGCCTGCCAAGCAATTACAGATTCGCAAGTTCAATTAACGTTATTGAAAGAAGGTGGTAAAGCA

SEQ ID NO: 11902 - protein, 356 aa, Streptococcus agalactiae
MSKEPIIKLDNIDVTFHQKKREINAVKDVTIHINQGDIYGIVGYSGAGKSTLVRVINLLQEPSAGKITIDDQVIYDNKVTLTSTQLREQRREIGMIFQHFNLMSQLTAEQNVVFALKHSGLSKEAKAAKVAKLLELVGLSDRAQNYPSQLSGGQKQRVAIARALANDPKILISDESTSALDPKTTKQILALLQDLNKKLGLTIVLITHEMQIVKDIANRVAVMQNGKLIEEGSVLDIFSHPRESLTQDFIKIATGIDEAMLKIEQQEVVKNLPVGSKLVQLKYAGHSTDEPLLNQIYKEFEVTANILYGNIEILDGIPVGEMVVILSGDEEKLRQACQAITDSQVQLTLLKEGGKA

SEQ ID NO: 11903 - protein, 1374 aa, Streptococcus agalactiae
ATGACTTTAACAAACGAAGAAAATCAAATTCAAAAGTTTCTATCTGATACTATTGTTCAGGATGATATCAATATTTTAAGAGATTTAATTGCAATTAAGTCAATTTTTGCTCAGAAAGTTGGTTTAAATGACTTATCAAGCTATCTTGGAGAAGTTTTCAGAAAAGCTGGCGCAGAAGTCATTATAGATGACAGCTATAGCGCTCCCTTTATCGTGGCAAATTTCAAATCATCAAAAGTAGATGCTAAGCGTATTATTTTTTACAATCATTATGATACTGTACCAGCAGATGAGGTAGAACAGTGGACTGAGGACCCTTTTACACTTTCACTTCGATATGGTAAGATGTATGGACGTGGTGTAGATGATGATAAAGGTCACATTACCGCACGTTTATCAGCAGTTAAAAAATATTTATCAAGACACAAAGGGGAACTTCCTCTAGATATCACTTTTATTGTGGAAGGAGCAGAGGAATCAGCTTCAGTAGGCCTTGATTATTATTTAGAAAAGTATCAAGAGCAGCTACAAGGGGCTGATTTGATCGTGTGGGAAGATGGCCCTAAAAATCCTAAAGGACAGTTGGAAATTGCTGGTGGAAATAAAGGCATTGTCACTTTTGATTTATCAGTAAGTTCAGCGGATGTTGATATTCATTCATCCTTTGGTGGGGTTGTTGATTCCTCGACATGGTATTTAATTCAAGCCCTCAATACGTTAAGGGATAACAAAGGTCATATATTGGTAGAAGGTATTTATGATAAAGTTATTCCCCCTACTAAGAGAGAGTTAGAATTAGTTGAAAAATATTCTTATAGATCTGCAAAGGCGCTAGAAGGTGCTTACCAATTAGTTTTGCCCAGTTTAGCAGATAGTCATAAAACTTTTTTGAGAAAGCTTTATTTTGAACCTTCTATAGCCATTGAAGGTATAACCTCAGGTTATCAAGGTGAAGGCGTCAAAACAATTTTACCTGCTTATGCTAAATGTAAAGCAGAGGTTAGGTTAGTACCAGGGTTAACCCCGAAAGGTGTACTAGATTCAATACAAAATCATTTGAAAGAGAATGGCTTTAAAGACATTGAGCTAACCTATACCCTTGGTGAAATGTCTTATCGTAGTGATATGTCAGCGCCATCTATCCTAAAGGTTGTTGATTTAGCTGAGCAATTTTATCCAGAAGGGATATCTCTGTTACCTACCTCACCAGGTACAGGACCAATGTATTTAGTTCATCAAGCTCTAAGAGCGCCAATTGCAGCTATTGGCATAGGACATGCCAATAGTCGAGACCATGGCGTTGATGAAAATGTTAGTATTGCTGATTATTACACCCATATTGAATTAGTGGAGGCTTTAATAGAATCATATGAG

SEQ ID NO: 11904 - protein, 458 aa, Streptococcus agalactiae
MTLTNEENQIQKFLSDTIVQDDINILRDLIAIKSIFAQKVGLNDLSSYLGEVFRKAGAEVIIDDSYSAPFIVANFKSSKVDAKRIIFYNHYDTVPADEVEQWTEDPFTLSLRYGKMYGRGVDDDKGHITARLSAVKKYLSRHKGELPLDITFIVEGAEESASVGLDYYLEKYQEQLQGADLIVWEDGPKNPKGQLEIAGGNKGIVTFDLSVSSADVDIHSSFGGVVDSSTWYLIQALNTLRDNKGHILVEGIYDKVIPPTKRELELVEKYSYRSAKALEGAYQLVLPSLADSHKTFLRKLYFEPSIAIEGITSGYQGEGVKTILPAYAKCKAEVRLVPGLTPKGVLDSIQNHLKENGFKDIELTYTLGEMSYRSDMSAPSILKVVDLAEQFYPEGISLLPTSPGTGPMYLVHQALRAPIAAIGIGHANSRDHGVDENVSIADYYTHIELVEALIESYE

SEQ ID NO: 11905 - protein, 822 aa, Streptococcus agalactiae
ATGAAGTTAAAACATATTGTCTTAGGATTAGCCTTAACAACACTTTTAGGAGTCACATTTAGTAATCAAGAAGTTTCAGCAAGCTCAACTTCAAGTAAAGTTGTTAAAGTTGGTGTTATGACCTTTTCTGACACTGAAAAAGCACGTTGGGATAAAATTGAAAAGCTAGTAGGTGATAAAGCTAAAATCAAATTTACAGAATTTACAGATTATACACAACCAAATCAAGCGACAGCCAATAAGGATGTGGATATTAATGCCTTTCAACATTACAATTTCTTAGAAAACTGGAATAAGGAAAATAAGAAAAACTTAATTCCACTTGAAAAGACTTACTTAGCTCCAATTCGTATCTATTCTGAGAAGGTAAAATCTCTTAAAAAATTGAAAAAAGGAGCCACTATTGCAATTCCAAATGATGCAACAAATGGTAGCCGTGCATTGTATGTCCTTCAGTCAGCAGGTTTAATCAAATTGAATGTTTCTGGTAAGAAGGTTGCAACAGTTGCTAATATCACATCTAATAAAAAGGATATTAATATTCAGGAGTTAGATGCGAGTCAAACACCACGTGCACTCAAAGATGTAGATGCAGCTATTATTAATAATACATACATTGAGCAAGCTAATTTAAAACCTTCAGATGCTATCTTTGTTGAGAAATCAGATAAAAATTCAAAACAATGGATTAATATCATTGCGGGACGTAAAAATTGGAAAAAGCAAAAGAACGCTAAAGCTATCCAAGCTATCTTGGATGCTTATCACACAGATGAAGTGAAAAAAGTTATCAAAGATACTTCAGCTGATATTCCACAATGG

SEQ ID NO: 11906 - protein, 274 aa, Streptococcus agalactiae; identical to SEQ ID NO: 7674

SEQ ID NO: 11907 - protein, 831 aa, Streptococcus agalactiae
ATGACAATAAAAAAAGTGTTAAGTGTAACAGGAATTATTTTAGTGACAGTAGCGTCTCTAGCTGCTTGTAGCTCAAAATCTCATACTACTAAGACGGGCAAAAAAGAAGTTAATTTTGCAACTGTTGGAACAACGGCACCTTTTTCTTATGTGAAGGATGGGAAACTGACTGGCTTTGATATTGAAGTAGCCAAAGCTGTTTTTAAAGGTTCAGATAACTATAAAGTCACTTTTAAAAAAACAGAATGGTCATCGGTATTTACCGGCATAGATTCAGGAAAGTTTCAAATGGGTGGAAATAATATTTCTTATTCATCAGAGAGATCTCAAAAATATTTATTTTCATACCCAATAGGCTCTACTCCTTCAGTTTTAGCAGTTCCTAAGAATAGTAATATCAAAGCTTATAATGATATTAGTGGTCATAAAACACAGGTTGTCCAAGGAACGACAACTGCCAAGCAATTAGAAAATTTCAATAAAGAGCATCAGAAAAATCCTGTTACTCTAAAATATACTAATGAAAATATTACACAGATTCTAACGAATTTGAGTGATGGAAAAGCTGATTTTAAACTTTTTGACGGACCAACTGTTAACGCTATCATAAAGAATCAAGGTCTCACGAATTTAAAAACCATCCCTTTGACTATGAGAGATCAGCCTTATATTTATTTCATCTTTGGTCAGGATCAAAAAGACTTGCAAAAGTATGTGAATAATCGCCTTAAACAATTACGTAAAGATGGGACACTTTCAAAAATAGCTAAAGAATACCTTGGAGGTGATTACGTACCAAATGAGAAAGATCTCGTTACTCCTAAGGAGAAG

SEQ ID NO: 11908 - protein, 277 aa, Streptococcus agalactiae
MTIKKVLSVTGIILVTVASLAACSSKSHTTKTGKKEVNFATVGTTAPFSYVKDGKLTGFDIEVAKAVFKGSDNYKVTFKKTEWSSVFTGIDSGKFQMGGNNISYSSERSQKYLFSYPIGSTPSVLAVPKNSNIKAYNDISGHKTQVVQGTTTAKQLENFNKEHQKNPVTLKYTNENITQILTNLSDGKADFKLFDGPTVNAIIKNQGLTNLKTIPLTMRDQPYIYFIFGQDQKDLQKYVNNRLKQLRKDGTLSKIAKEYLGGDYVPNEKDLVTPKEK

SEQ ID NO: 11909 - protein, 687 aa, Streptococcus agalactiae
ATGTTAACAAAGCCTATTATTGGTATTACAGGAAATGAAAGAGAAATGTCAGATATTCCAGGTTATTATTATGATTCGGTATCTAGGCATATTTCGGAAGGAGTTAAAAACGCAGGCGGGTTACCAGTTATCCTACCAATAAGTGAAGCAGAAAGTGCCAAAGCTTATGTTGAGATGATAGATAAGCTGATCATATCTGGTGGCCAAAATGTTTTACCATCCTATTATGGTGAAGAGAAGATAATTGAGAGTGATGATTATTCACTTGCGCGTGATATTTTTGAATTTGCATTAGTCGAAGAAGCGTTGAAACAAAATAAACCAATCTTTGCGATTTGCCGTGGCATGCAGTTAGTAAATGTGGCGCTTGGTGGTACACTTAATCAATCTATTGATAATCACTATCAAGAGCCTTACATTGGATTTGCTCATTATTTAAATGTGGAAAAAGGGAGTTTTCTAGAAGGCTTTATATCAGGTGATTTTAAGATCAATTCTCTTCATAGACAAAGTGTTAAACTGTTAGCTGAAGGTCTGATAGTTAGTGCTAGAGATCCTAGAGATGGGACAGTAGAAGCTTATGAAAGTCGAACAGAACAATGTATTATAGGTGTTCAATGGCATCCAGAATTAATGCTTCACCAAATTGAAAACCAAACCTTATTTGGTTATTTTGTTAATGAAACG

SEQ ID NO: 11910 - protein, 229 aa, Streptococcus agalactiae; identical to SEQ ID NO: 3026

SEQ ID NO: 11911 - DNA, 111 bp, Streptococcus agalactiae
ttgataggtattgttaaagaagtgataggtaaaaaatattattcaaaaagtttttttaggtgtaaaatgataattattagacagttattggttgatgagggagcaaaatgt

SEQ ID NO: 11912 - protein, 37 aa, Streptococcus agalactiae; identical to SEQ ID NO: 7680

SEQ ID NO: 11913 - DNA, 714 bp, Streptococcus agalactiae
atgggacgtaagtgggccaatattgttgccaaaaagactgctaaagatggtgctaactcaaaagtatacgctaaattcggtgttgaaatatatgttgctgcaaagcaaggtgaaccagaccccgagtcaaactcagctctaaaattcgttttggaccgtgctaagcaagcacaagttccaaagcatgttattgataaagcgattgataaagccaaaggaaacacagatgaaacttttgtagagggacgctatgaaggttttggtccaaatggttcaatgattattgtggatactttgacatcaaatgttaaccgtacggcagcaaatgtacgtactgcttacggtaagaacggtggcaatatgggagcttcaggatcggtatcctacttatttgataaaaaaggtgtcatcgtttttgctggtgatgatgctgacactgtcttcgaacaattacttgaagcggatgtagacgtagatgatgttgaagcagaagagggaaccataacagtttataccgccccaacagatcttcataaaggtatccaagcacttcgcgataatggtgtagaagaattccaagttactgaacttgaaatgattcctcaatcagaagtagtattggaaggtgatgaccttgaaacttttgaaaagcttattgacgcactcgaatcagatgatgatgttcaaaaagtttatcataatgtagcagatttc

SEQ ID NO: 11914 - protein, 238 aa, Streptococcus agalactiae; identical to SEQ ID NO: 3028

SEQ ID NO: 11915 - DNA, 984 bp, Streptococcus agalactiae
atgagaaaaacagaacatcataaaatggaatatgtttttgaaacaataaaagcaatcactaaaactaatcctaaagtagagcaaataaaagatttgcccgctattcattatttagggcaatccgagcaagtaattccgattttatcaggaggaggcagcggacatgagccggctcactttggatatgttggtgagggaatgctatcggcagcgattagtggtcctatttttgtaccaccatgtgctagtgatattctagagactattagatttatcaatcgaggcaaaggtgtctttgttattatcaaaaattttgaagctgatttggaagaattttcccaagcgattgaacaggctcgtcaagaaggcattccaatcaaatacatcgtttctcatgatgacatctctgttgaaacatcaaattttaaaattcgtcatcgaggcgttgctggtactgtgttgctacataaaattattggacaagctgctttagaaggagcaagcttagatgaattagaacagctaggactatctttgacaacttcaatggctactttaggtgtagcaagtaagtcagccactattttaggtcagcatcaacctgtttttgatttagaagaaggttacatctcatttggaatcggtattcatggtgagccaggataccggacaatgcctttcgtgtccatggaacatttggcaaacgaactagttaacaaattgaaaatgaaattacgttggcaagatggagaagcattcattctattgataaataatcttggaggaagttctaaaatggaggaattactttttacaaatgctgtcatggaatttctggctttagacgatttacaattaccttttattaaaacaggccacctaattacaagtttagatatggctggtttatcagttaccttgtgtcgtgtaaaggatagtagatggattgattacttaaaacataagacagatgctagagcttgg

SEQ ID NO: 11916 - protein, 328 aa, Streptococcus agalactiae; identical to SEQ ID NO: 3030

SEQ ID NO: 11917 - DNA, 534 bp, Streptococcus agalactiae
atgacttcttcgcttattactaagaaaaaaatagccaagtcatttaaacgtttatttatttcgcaagcttttgacaaaatatcggtgagtgatattatggaagatgcaggtattagacgtcaaacattttataatcactttgttgataaatatgctttattagaatggattttccaaacagaattaagcgaacaagttacggataatttagactatatctcaggttttcagttgttatcagagttgttgactttttttaaaatgaatcaagaattctatattaaattatttcaaattgaagatcaaaatgatttttcttcgtattttgagtcttactgtgagcagttagtagataagcttctttctgattatagtaaatctaactttaatcagaaagaaagagttacatttattaattatcatagtaaagccctctcttattttataaaatatgagttaataaataactcaaaagaagaattatttaataggaaagtcattgaaaaaattatcagaacatcaatagaaaattat

SEQ ID NO: 11918 - protein, 178 aa, Streptococcus agalactiae; identical to SEQ ID NO: 3032

SEQ ID NO: 11919 - DNA, 111 bp, Streptococcus agalactiae
atgattattgaaaaccctaacaaagcggacaaacaagaaaatctgtccattccagaaaaggcttacaaattttataataaaagagaattaaacataaaaggagtttccaaa

SEQ ID NO: 11920 - protein, 37 aa, Streptococcus agalactiae; identical to SEQ ID NO: 3034

SEQ ID NO: 11921 - protein, 987 aa, Streptococcus agalactiae
ATGAAAAAAATTCTCAATCAACCAACTGATGTTGTTACTGAAATGCTAGATGGATTAGCATATGTTCATAATGATTTAGTACATCGCATAGAAGGTTTTGATATCATTGCTCGCAATGAAGAGAAGTCAGGAAAAGTGGCTCTCATTTCTGGCGGAGGAAGTGGACATGAGCCTTCACATGCTGGTTTCGTAGGCGAAGGAATGTTATCTGCAGCTGTGTGTGGTGCAGTATTTACTTCTCCAACTCCTGACCAAGTTCTTGAAGCAATTAAAGAAGCTGATGAGGGGGCTGGAGTTTTCATGGTTATCAAAAATTATTCAGGGGATATCATGAACTTTGAAATGGCACAAGATATGGCTGAAATGGAAGGCATAGAAGTTGCAAGTGTGGTCGTTGATGATGATATTGCAGTCGAAGACAGTCTTTACACACAAGGAAAACGTGGTGTAGCTGGTACGATACTCGTCCATAAAATTCTAGGACATGCTGCTCGTCATGGCAAATCACTTCAGGAAATCAAAGCTATTGCTGATGAATTAGTACCAAACATTCACACTGTTGGACTTGCACTAAGCGGGGCTACTGTTCCTGAAGTAGGCAAGCCAGGATTTGTTCTTGCAGAAGATGAAATTGAATTTGGTATCGGTATTCATGGTGAACCAGGTTATCGTAAAGAAAAAATGCAACCTTCAAAGGCTTTAGCGACAGAATTAGTTGATAAGTTAATTGAATCGTTCGATGCTAAATCTGGCGAAAAATATGGTGTCCTTATTAACGGTATGGGTGCAACCCCACTTATGGAACAATATGTCTTTGCTAACGATGTTGCCAAACTCCTTGAGGATAAAGGCATTGAAGTGAATTACAAAAAACTTGGTAACTATATGACTTCAATTGATATGGCTGGTTTATCACTAACCTTGATTAAACTGGAAAATCAAGAGTGGTTAGAAGCACTTAATAGTGACGTTACAACCATTGCTTGG

SEQ ID NO: 11922 - protein, 329 aa, Streptococcus agalactiae; identical to SEQ ID NO: 3036

SEQ ID NO: 11923 - protein, 576 aa, Streptococcus agalactiae
ATGGAAGTAAAAACTGCAATAGAATGGATGCACACTTTTAACCAAAAAATTCAATCCAACAAGGACTATTTATCCGAACTAGATACTCCAATAGGTGATGGCGACCATGGTGGCAATATGGCGCGTGGTATGACTGCTGTTATTGAAAACCTTGATAACAATGAATTTAGTAGTGCTGCCGATGTTTTCAAAACCGTGTCCATGCAACTTTTAAGCAAAGTAGGCGGAGCATCTGGACCACTCTATGGTTCTGCATTTATGGGAATTACAAAAGCTGAACAGAGTAAAAGTACCATTTCAGAGGCACTTGGCGCAGGACTTGAAATGATTCAAAAACGTGGTAAAGCTGAACTTAATGAAAAAACAATGGTTGATGTTTGGCACGGTGTTATTGAAGCGATTGAAAAAAATGAATTGACTGAAGACCGTATCGATTCCTTAGTAGATGCTACAAAAGGGATGAAAGCAACAAAAGGACGCGCTTCTTATGTTGGAGAACGCTCAGTAGGACACATTGATCCAGGATCATTTTCTTCAGGATTATTATTTAAAGCATTACTAGAAGTTGGAGGTGTC

SEQ ID NO: 11924 - protein, 192 aa, Streptococcus agalactiae; identical to SEQ ID NO: 3038

SEQ ID NO: 11925 - protein, 372 aa, Streptococcus agalactiae; identical to SEQ ID NO: 7693

SEQ ID NO: 11926 - protein, 124 aa, Streptococcus agalactiae; identical to SEQ ID NO: 3040

SEQ ID NO: 11927 - protein, 711 aa, Streptococcus agalactiae
ATGACTCAATTTCTTGGGGAATTTTTAGGAACATTTATTTTGGTTCTTCTTGGGGATGGCGTAGTTGCAGGAAATGTGCTCAGTAAAACCAAAGAAGAAGGAACTGGATGGACTGCTATTGTTTTTGGCTGGGGAATTGCTTGTACCGTTGCTGTTTATGTTTCTGGATTATTCAGTCCCGCTCATCTAAATCCAGCAGTCACATTAGCAATGGCTTCTATTGGAGCAATTTCTTGGGGACAAGTTATCCCCTTTATCATTGCACAGATGTTAGGAGCAATGGTTGCGGCAACTATTTTATGGTTACACTATTATCCTCATTGGAAAGAAACAAAAGATAGTGGACTTATCCTTGCCAGCTTCTCAACCGGACCTGCTATCCGCCATACACCATCGAATCTCCTTGGTGAAATTATCGGTACTGCTATTCTTGTGATTACAATTATGGCAATTGGTCCTAGTAAAGTTGCAGCAGGTCTTGGTCCAATTATCGTTGGTATAGTTATTTTCGCAGTAGGATTCTCTCTTGGTCCAACAACTGGTTATGCTATTAACCCTGCACGTGACCTAGGGCCTCGTCTTATGCATGCTATCTTACCTATTGAAAATAAGGGTAACTCAGATTGGTCATACGCTTGGATTCCAGTTGTAGGTCCAATTATCGGCGGTGTCCTTGGGGCTATCTTATACAATATTGCTTTGACTTTAGTT

SEQ ID NO: 11928 - protein, 237 aa, Streptococcus agalactiae; identical to SEQ ID NO: 3042

SEQ ID NO: 11929 - protein, 402 aa, Streptococcus agalactiae
ATGAAAGGATTTCATGGGAATATCGAAAAATTGACACTAGGAAATACAAATTTCCGCCAAGTCCTCTATACCGCAGAACATTGTCAACTCGTTTTAATGACACTGCCTGTTGGGGGAGAAATTGGTAGCGAGATTCATGCAGAAAATGATCAGTTTTTCCGTTTTGAAGCTGGTCATGGTAAGGTTGTCATTGATGGTAATGAATATGAAGTTGCAGATGGAGACGCTATAATAGTTCCGGCAGGTGCTGAACATAACGTAATTAACACTTCTGAAACTGAGATGTTAAAACTCTATACAATTTACAGTCCAGCTCATCACAAAGATGGTATTATCCGTGCCACAAGAGAAGAAGCTGAAGAAAATGAAGAAGATTTTGATGGAGTTACTACTGAAACTAAA

SEQ ID NO: 11930 - protein, 134 aa, Streptococcus agalactiae; identical to SEQ ID NO: 3044

SEQ ID NO: 11931 - DNA, 711 bp, Streptococcus agalactiae
atgaaaacagttaaagaaataagtcacatttctggtattagtgtgcgcacacttcattattatgatgaaatagatttgttatctccttcatttgtaggagagaatggttatcgttactatgatgatgaatcactgattaagttacaagaaattttgttatttaaggaactggaatttcctcttaaaaaaataaaagagataatggatagtccaaattatgatcgtaatcaagcacttcttgatcaaattaggtggctggaactaaagaaacagcgactagaagaagtaattgaacatgcaaagtctatccagaggggtaaaaatatgtcagattttacagcttataatcaagaagaattagaagcatttcaagaggaagctagaacacgctggggggatacagatagttacaaagaatttgaaaatagccatagtaagaatgatttttcaatgatttcacaagctatgagtcagatttttaaagactttggacagttgaaagaactttctccgacagatgagaaatttcaaaaacaagttcagattttacaagattatatcacagctcagttttacaactgcactaacgatttattagcaagtcttggaataatgtacatccaagatgagcgtttccaaaagtctattgataattggggaggccagggaacagcattatttgtttctaaagctatagatagctattgtcat

SEQ ID NO: 11932 - protein, 237 aa, Streptococcus agalactiae
MKTVKEISHISGISVRTLHYYDEIDLLSPSFVGENGYRYYDDESLIKLQEILLFKELEFPLKKIKEIMDSPNYDRNQALLDQIRWLELKKQRLEEVIEHAKSIQRGKNMSDFTAYNQEELEAFQEEARTRWGDTDSYKEFENSHSKNDFSMISQAMSQIFKDFGQLKELSPTDEKFQKQVQILQDYITAQFYNCTNDLLASLGIMYIQDERFQKSIDNWGGQGTALFVSKAIDSYCH

SEQ ID NO: 11933 - DNA, 1107 bp, Streptococcus agalactiae
atgacagttacaggaattgttgccgaatttaatccctttcataatgggcataagtaccttttagaacaagctcaaggcataaaagtaatagccatgtcgggtaattttatgcaacgtggtgagccggcgattgtagataaatggacccgttcccagatggcactagaaaatggtgctgatttagtgattgaactcccttttctggtttcggtacagtcagcggattatttcgctagtggagctgtgtctatcctggcacgattaggtgtggataacttatgcttcggtaccgaagaaatgcttgattatgcccgtattggggatatttatgtgaataaaaaagaggagatggaagcttttttgaaaaaacaatcggattctctttcctatccacaaaaaatgcaagctatgtggcaagaatttgcagggattacattttcgggacaaaccccaaatcacattttaggcttagcctacaccaaagcagctagccaaaatggtattcgattaaatccgatacaacgtcaaggagctggttatcattcatcagaaaaaacagagatatttgcttctgcaacaagtcttcgtaaacatcaatctgatcgtttctttgtagaaaaaggtatgcctaacagtgacttgtttttgaatagtccacaagtagtttggcaagattattttagtttactcaaatatcagataatgacgcattctgatttgacacaaatttatcaagtgaatgaagagatagccaatcgtataaaaagtcaaattcgttatgtggagactgtggatgagttagttgataaagtcgcaactaaacggtataccaaagcaagaattcgacgtttattaacctatatcttgataaatgctgtggaaagtcctataccaaatgctattcatgtcttaggttttacacaaaaaggtcaacagcatttaaagtctgtgaagaagtctgtggatatcgtgacgaggattggttcacaaacgtgggatagtttgacgcaacgagcagattctgtttatcagatgggaaatgctaatatagcagagcaaacatggggacgtatccctttttatcaacctgttagtcaaagtgacctt

SEQ ID NO: 11934 - protein, 369 aa, Streptococcus agalactiae
MTVTGIVAEFNPFHNGHKYLLEQAQGIKVIAMSGNFMQRGEPAIVDKWTRSQMALENGADLVIELPFLVSVQSADYFASGAVSILARLGVDNLCFGTEEMLDYARIGDIYVNKKEEMEAFLKKQSDSLSYPQKMQAMWQEFAGITFSGQTPNHILGLAYTKAASQNGIRLNPIQRQGAGYHSSEKTEIFASATSLRKHQSDRFFVEKGMPNSDLFLNSPQVVWQDYFSLLKYQIMTHSDLTQIYQVNEEIANRIKSQIRYVETVDELVDKVATKRYTKARIRRLLTYILINAVESPIPNAIHVLGFTQKGQQHLKSVKKSVDIVTRIGSQTWDSLTQRADSVYQMGNANIAEQTWGRIPFYQPVSQSDL

SEQ ID NO: 11935 - DNA, 249 bp, Streptococcus agalactiae
atgataatattcttatacgcttgtctgatgatatttgggatactttatattattgaacgtcgggtaagtcagaaaaagtctaaagttattttggaattattgatgaaccctaaacttcatttggatttattatcggcattaaaaccatttgaaaaagaaacagatcgtctcatataccttcgtaaaacttatcacctagatattattgatgctgttactttaaataatcaattgaaagagaaagaagta

SEQ ID NO: 11936 - protein, 83 aa, Streptococcus agalactiae; identical to SEQ ID NO: 3050

SEQ ID NO: 11937 - DNA, 732 bp, Streptococcus agalactiae
atggcaacgtatgaaacttttgcagctgtttatgatgctgtcatggatgatactttatatgctaaatggactgatttttcacttcgtcattttccaaaaggtaagaaaaaacttttggaattagcatgtggtacgggaattcagtctgttcgatttgcacaagctggttatgctgttacaggacttgatcttagtggcgatatgctgaaacttgccaaaaaacgtgcaacttctgctcaccaaagtatccagtttattgaaggaaatatgttagatttatctaatgttggtaaatatgatctcatcacgtgctattcagactctatttgttatatgcaagatgaagtcgaggttggtgatgtttttatcgaagtctataaggccttagaagaaaatggcgtctttatttttgatgttcattcgacttatcaaacagataaagtatttcctggttattcttatcatgaaaatgcagatgactttgctatggtgtgggatacttatgaagatgatgcacctcattctattgtccatgaattaacattttttgttcaagaagaagatggtcgatttacacgtcatgatgaagttcatgaagagcgtacttatgatattttgacttatgatattttacttgaacaggcaggttttaaagatgttaaggtgtatgcagattttgaagataaaaaaccaactgcaacttctgctcgctggttttttgtagctcataaa

SEQ ID NO: 11938 - protein, 244 aa, Streptococcus agalactiae; identical to SEQ ID NO: 3052

SEQ ID NO: 11939 - DNA, 354 bp, Streptococcus agalactiae
atgacagaaaaagacttactacagctagtcgttaaggctgcggatgaaaaacgagcagaagatattgtaattttagatttacagcctgtaacgagtgttgcagattactttgtgattatgagtgcaagtaatagtaggcagttagaagcaatcgcagacaatatccgtgaacaagtaaaaggaaatggwrgggatgctagccaccttgaaggcgatagtaaagctggttgggtacttcttgacctcaatagcgtcgtggttcatatcttctctgaagatgagagacagcactataaccttgaaaaactttggcatgaagcaccattgcttgatgctgaagtctttatgacagaa

SEQ ID NO: 11940 - protein, 118 aa, Streptococcus agalactiae
  VARIANT 64: Xaa = Any Amino Acid
MTEKDLLQLVVKAADEKRAEDIVILDLQPVTSVADYFVIMSASNSRQLEAIADNIREQVKGNGXDASHLEGDSKAGWVLLDLNSVVVHIFSEDERQHYNLEKLWHEAPLLDAEVFMTE

SEQ ID NO: 11941 - protein, 519 aa, Streptococcus agalactiae
ATGACTTGTGCACTTTTACTAATTGATATCCAACAAGGTATTATGGATAAGAAACCAAAGCATTTAACAAATTTTGCAGTGCTTTTAGATGATTTACTTTTAAGTGCCAAAGGTTCTAATTGTGAAGTGATATGGATAAGGCATCATGATAAGGAATTGCCTCAAGGTTCTCCACAGTGGGAAATTTGGGAACAGCGACATCTTGTGACGCATCACAAAATAATTGATAAAACTTACAATAGTTGTTTTAAAGATACTCATTTACATGATTACTTGCAAAGTAAGCATATTAGTCAATTAATCATGATGGGACTTCAAACAGAATACTGTTTTGATACATCAGTAAAAGTTGCTTTTGAATATGGTTATGATATCTTTATTCCACAAGGTGGACACCTAACATTTGATACACCAACTTTAAGTGGGGATTCTATTAAAAAACATTACGAGAATATTTGGCATCATCGTTTTGCGACAATGGTAGCAAAAGATAGCTTATTGAAATTAATAAACGAGGAA

SEQ ID NO: 11942 - protein, 173 aa, Streptococcus agalactiae
MTCALLLIDIQQGIMDKKPKHLTNFAVLLDDLLLSAKGSNCEVIWIRHHDKELPQGSPQWEIWEQRHLVTHHKIIDKTYNSCFKDTHLHDYLQSKHISQLIMMGLQTEYCFDTSVKVAFEYGYDIFIPQGGHLTFDTPTLSGDSIKKHYENIWHHRFATMVAKDSLLKLINEE

SEQ ID NO: 11943 - protein, 584 aa, Streptococcus agalactiae
ATGACCTACAAAGATACACAGGTTTAGATCGGACTGAACTTTTGAGTAAAGTGCGTCATATGATGTCCGACAAACGTTTTAATCATGTGTTAGGAGTAGAGCGTGCTGCAATAGAGTTAGCAGAACGGTATGGTTATGACAAGGAAAAAGCGGGTCTAGCTGCTTTATTACATGATTATGCTAAGGAACTATCTGATGATGAATTTCTTAGATTAATTGATAAATACCAACCAGATCCCGACCTAAAAAAATGGGGTAATAATATTTGGCATGGTCTTGTTGGCATTTATAAAATACAAGAGGATCTAGCTATCAAAGATCAAGATATTTTAGCTGCTATTGCAAAACATACTGTTGGTTCAGCCCAAATGTCCACATTGGATAAAATCGTTTATGTAGCAGATTACATTGAACACAATCGAGATTTTCCAGGAGTTGAAGAAGCTCGTGAGTTAGCGAAAGTTGACCTTAATAAAGCAGTAGCTTATGAGACTGCTAGAACAGTTGCGTTTTTAGCAAGTAAGGCTCAGCCTATCTATCCTAAAACGATTGAAACCTATAATGCTTATATACCTTATCTCGAC

SEQ ID NO: 11944 - protein, 195 aa, Streptococcus agalactiae
MTYKDYTGLDRTELLSKVRHMMSDKRFNHVLGVERAAIELAERYGYDKEKAGLAALLHDYAKELSDDEFLRLIDKYQPDPDLKKWGNNIWHGLVGIYKIQEDLAIKDQDILAAIAKHTVGSAQMSTLDKIVYVADYIEHNRDFPGVEEARELAKVDLNKAVAYETARTVAFLASKAQPIYPKTIETYNAYIPYLD

SEQ ID NO: 11945 - protein, 627 aa, Streptococcus agalactiae
ATGGCACTCGAATTGCTAACACCATTTACAAAAGTTGAATTAGAAGAGAAAAAGCGAGATACTAACCGAAAACAAATTGGAATTATGGGAGGAAATTTTAACCCTGTTCATAACGCCCACCTTGTTGTTGCAGATCAAGTACGTCAGCAATTGTGTTTAGACCAAGTTCTGTTGATGCCTGAATTTCAGCCACCACATATTGATAAAAAAGAGACAATTGATGAACAGCATCGTCTCAAGATGCTTGAATTAGCAATAGAAGGCATTGATGGTTTATCTATTGAACCAATTGAAATTGAACGTAAAGGTATCAGCTATACATACGATACGATGAAGCTTCTAATTGAAAAAAATCCAGATGTTGATTATTATTTCATTATTGGGGCAGATATGGTGGAATATCTACCTAAGTGGCATCGTATTGATGAACTTGTTAAAATGGTGCAGTTTGTTGGTGTTCAACGTCCAAAATATAAAGCTGGTACATCATATCCCGTTATTTGGGTGGATCTGCCATTGATGGATATCTCATCAAGTATGATTCGTCATTTATTAAAAGTAATCGTCAGCCCAACTATTTACTGCCTAGAGAGGTATAGATTATATCAGGAAAGAAGGTCTTTACAA

SEQ ID NO: 11946 - protein, 210 aa, Streptococcus agalactiae
MALELLTPFTKVELEEKKRDTNRKQIGIMGGNFNPVHNAHLVVADQVRQQLCLDQVLLMPEFQPPHIDKKETIDEQHRLKMLELAIEGIDGLSIEPIEIERKGISYTYDTMKLLIEKNPDVDYYFIIGADMVEYLPKWHRIDELVKMVQFVGVQRPKYKAGTSYPVIWVDLPLMDISSSMIRQFIKSNRQPNYLLPREVLDYIRKEGLYK

SEQ ID NO: 11947 - protein, 315 aa, Streptococcus agalactiae
ATGTTAACATCTAAACAACGTGCTTTCTTAAAATCAGAAGCACATTCTATGAAACCCATTATTCAAATTGGGAAAAATGGTTTAAATGATCAAATCAAAACAAGCGTACGTAATGCACTCGATGCACGTGAGCTAATCAAAGTAACCCTTTTACAAAATACCGATGAAGATATCCACGATGTCGCTGAAGTTCTGGAAGATGAAATTGGCTGCGATACTGTCCTTAAAATAGGACGTATCTTGATTCTTTATAAAGAGTCAGCGCGCAAAGAAAATCGTAAAATTTCAGTTAAAGTAAAAGCAGTAAAATCAAAC

SEQ ID NO: 11948 - protein, 105 aa, Streptococcus agalactiae; identical to SEQ ID NO: 7720

SEQ ID NO: 11949 - protein, 1116 aa, Streptococcus agalactiae
ATGGAAGAGTTATTTTGTATTGGCTGCGGAGCCAGGATTCAAACTGAAAATAAAGATGCTGCTGGCTATACACCTCGTGCAGCACTTGAAAAAGGTTTAGAGACAGGAGAATTATACTGTCAGCGTTGTTTCAGATTGCGCCACTATAATGAGATTACTGACGTTCATATCACTGATGATGAATTTTTGAAATTACTACATGAGGTTGGAGATAGTGATGCCCTTGTGGTGAATGTCATTGATATTTTTGATTTCAATGGTTCAATTATTCCTGGTCTTAGTCGTTTCGTTGCAGGAAACGATGTTCTTTTAGTAGGAAATAAAAAAGATATTCTTCCCAAATCGGTTAAAGATGGAAAAGTAACACAATGGTTAACTGAGAGAGCTCATGAAGAGGGGCTTCGTCCTGTTGATGTCATCTTGACAAGTGCCCAAAATCATCATGCTATTAAGGATTTGATTGATACGATTGAAAAGTATCGTCATGGTCGAGATGTTTATGTTGTTGGGGTTACTAATGTTGGAAAGTCAACTCTTATTAACGCTATTATTCGTGAAATTACTGGTAGTCGTGATGTTATTACGACCTCACGTTTCCCAGGTACAACGTTAGATAAAATAGAAATACCTCTTGATGATGGTAGCTATATTTTTGATACCCCGGGTATTATTCATCGTCATCAAATGGCTCATTATTTGACAGCAAAAAATCTTAAATATGTTAGTCCTAAAAAAGAAATAAAACCCAAAACTTATCAGCTTAATTCAGAACAAACATTATTCTTGGCTGGCCTAGCACGTTTTGATTTTATTTCTGGTCAAAAACAAGGTTTTACGGCATATTTTGATAATAACCTGAATTTACACCGCACTAAACTAGTTGGAGCAGATGAATTTTACACTAAACATGTTGGAAAATTATTGACACCACCAACAGGTAAGGAAGTTTCAGATTTTCCTAAATTAGTTCGTCATGAATTTACAATCAAAGATAAAATGGATATTGTTTATTCGGGTCTTGGTTGGATACGTGTGAAATCAGAAGCAGAAAATCCAGTAGTAGTAGCTGTTTGGGCTCCAGAAGGCGTGGCAGTTGTTTTACGCAAAGCTTTAATT

SEQ ID NO: 11950 - protein, 372 aa, Streptococcus agalactiae
MEELFCIGCGARIQTENKDAAGYTPRAALEKGLETGELYCQRCFRLRHYNEITDVHITDDEFLKLLHEVGDSDALVVNVIDIFDFNGSIIPGLSRFVAGNDVLLVGNKKDILPKSVKDGKVTQWLTERAHEEGLRPVDVILTSAQNHHAIKDLIDTIEKYRHGRDVYVVGVTNVGKSTLINAIIREITGSRDVITTSRFPGTTLDKIEIPLDDGSYIFDTPGIIHRHQMAHYLTAKNLKYVSPKKEIKPKTYQLNSEQTLFLAGLARFDFISGQKQGFTAYFDNNLNLHRTKLVGADEFYTKHVGKLLTPPTGKEVSDFPKLVRHEFTIKDKMDIVYSGLGWIRVKSEAENPVVVAVWAPEGVAVVLRKALI

SEQ ID NO: 11951 - DNA, 531 bp, Streptococcus agalactiae
atgaaattgagtatagatgattataggccgaccttcgtggttgaggcagtttatgatttaagagcagaagatttattacgtcatggcattcgtgcggttttagttgatttagataatacactcattgcttggaataatccagatggtactgctgaggtgcgtgcatggttagatgagatgacaacagcggatatttcagttgtagtagtgtctaataacaatcatgctcgcgtagaacgtgcagtatcacgttttggtgtggattttgtaagtcgtgcgatgaaaccatttactcgtggtataaacatggcaattgagcgttatggctttgatcgtgacgaggtgattatggttggagatcaattgatgacagatattcgtgctagtcatcgcgcaggaataaagtccgtattggtaaaaccaattgttaaatctgatgcttggaataccaagttcaatcgcttacgtgaacgtcgcgtttggaaaaaaatagaagagaattacggtaaaatcgtatatcaaaaaggaatt

SEQ ID NO: 11952 - protein, 177 aa, Streptococcus agalactiae; identical to SEQ ID NO: 7724

SEQ ID NO: 11953 - DNA, 885 bp, Streptococcus agalactiae
atgaccttagctgccggactagcatggggcatttctggaattagtggtcaatacttgatgtcgcacggagtacacgttaaccttttgacttctttacgattgttgataacaggtatctttctcttgtctttagctagatcaaaacaaaaggagcatttagtagcagcgtggaaacagccaaaatttttaaagcaggttttacttttttctatatttggtttagttttaaatcaatatgcttttctcagagcgattcatttaacaaatgctggaactgcaacggttttgcaatatatggcaccaatacttattttgagtattgtttgtatcctaaacagacaaagaccaacatcttttgaaataatagcaattgctatggcaattttaggaacctatatgattgcaacgcatgggaagttaggaagtttagctatcacaccgaaaggattaatgtgggggcttggttccgccattacttattctatttatattttattacctgtgaaacttattcatgaatggggaagtacgattgttattggttcaggaatgtttataggtgggattttatttagtttggtgacaaaagcgtggcaataccccttacaaattaatgtgatgagtatacttgcttatattggcattattggtattgggactatttttgcttacacttttttccttaaaggggttagtattgtaggtgctgtcaagggtagcttattagcatcggtagagccagtttcttcggtatttttgacagtacttgttttaggagaaattttttatccaatagatttacttgggatgctgtttatttttcttgctgtaactctaatctcttacaaagatttaattgcattgaagaaaatgaaacgagtaaga

SEQ ID NO: 11954 - protein, 295 aa, Streptococcus agalactiae
MTLAAGLAWGISGISGQYLMSHGVHVNLLTSLRLLITGIFLLSLARSKQKEHLVAAWKQPKFLKQVLLFSIFGLVLNQYAFLRAIHLTNAGTATVLQYMAPILILSIVCILNRQRPTSFEIIAIAMAILGTYMIATHGKLGSLAITPKGLMWGLGSAITYSIYILLPVKLIHEWGSTIVIGSGMFIGGILFSLVTKAWQYPLQINVMSILAYIGIIGIGTIFAYTFFLKGVSIVGAVKGSLLASVEPVSSVFLTVLVLGEIFYPIDLLGMLFIFLAVTLISYKDLIALKKMKRVR

SEQ ID NO: 11955 - DNA, 1440 bp, Streptococcus agalactiae
atgaattttgaaacagtcattggacttgaagtccatgttgaattaaatacgaactctaaaattttctcaccttcttccgctcattttggtcaggaacaaaatgctaatacaaatgtaattgactggtctttcccaggtgtccttccagtcatgaataaaggagttattgatgcaggaatcaaggcggcacttgccttgaatatggatatccatcaaaacatgcattttgatcgtaaaaattatttctatccagataatcctaaagcttatcaaatttcacagtttgatgagcctattggttacaatggttggattgaaatcgaattagaagatggtacacgaaaaaaaattcgtattgagcgtgcccacctcgaagaagatgcaggaaaaaatacacatgggacagatggttattcctatgttgaccttaatagacaaggtgttccactgattgaaattgtatcagaagctgatatgcgttctcctgaggaagcttatgcttatttgacagctctcaaagagattatccaatatactggaatttctgacgttaaaatggaagaaggttctatgcgtgtagatgccaatatttcacttcgtccttatggtcaagaagagtttggtactaaagcagaacttaagaaccttaactcattcaataatgtacgtaaaggtttgatacatgaagaaaaacgtcaagcacaagttttacgatctggtggtcaaattcagcaagagactcgtcgttttgatgaaacaacaggtgagactattttgatgcgtgtcaaggaaggctcatcagattatcgctatttccctgaaccagatctaccactatttgatatctcggatgaatggattgatcaagttcgtttagaattaccagaatttccacaggaacgtcgtgcgaaatatgtatcgtcttttggtctatcatcttatgatgctagccaattaacagctacaaaagcaacttctgatttctttgaaaaagctgttgctattgggggtgatgcaaaacaagtttccaattggttacaaggagaagtggcgcaatttcttaacagtgaatcaaaatcaatcgaagaaattggtctgactcctgagaatttggttgagatgattggcttgattgctgacggtacaatttcatccaaaattgctaaaaaagtttttgtgcatttagctaaaaatggtggttcagctgaagaattcgttaaaaaggctggtttagttcaaatttcagatcctgaagtattaatcccaattattcatcaagtctttgcagataatgaagctgctgtgattgactttaagtcaggaaaacgcaatgctgataaggccttcacaggttatctaatgaaagcaacaaaaggacaagctaatccacaagttgctctgaagctgttagcgcaagaattagcaaaattaaaagaagaa

SEQ ID NO: 11956 - protein, 480 aa, Streptococcus agalactiae; identical to SEQ ID NO: 3058

SEQ ID NO: 11957 - DNA, 1464 bp, Streptococcus agalactiae
atgtcgtttaataatcaatcaattgatcagttgcatgattttctcgttaaaaaagaaatttcagcaactgaattaacaaaagctacattggaagatattcatgcgcgtgaacaagcggttggatcttttattactatttctgatgagatggcaatagctcaagccaaagaaattgatgataaaggaattgatgctgataatgttatgtcaggtattcccttagcagttaaagataatatttcaacaaaggggattcttacaacagctgcttctaaaatgctctataactatgagccaatctttgatgctacggctgttgaaaagttatatgctaaagatatgattgtgattggtaaagcaaacatggatgaatttgccatgggaggctctacagaaacatcttattttaaaaagacaaataacgcttgggaccatagtaaagttccgggaggatcatcaggtggttctgcagcagcagtagcttcaggacaagtacgtttatcattgggctctgatacaggtggttcaattcgccaaccggcttcatttaatggaatcgttggtatgaagccaacttacggacgtgtatcacgctttggtttgtttgctttcggtagttcgcttgaccagattggaccgatgtctcaaacagtaaaagagaatgcacagcttttgacagttatttctgggcatgatgtaagagattcaacttcttctgagcgtactgtaggcgattttactgctaaaattggtcaagatattcaaggaatgaaaattgctttaccaaaagaatatttgggagaaggaatagcgcaaggagttaaagaaacgattattaaggccgcaaaacatctggaaaaactaggtgcagttattgaggaagttagtttaccgcattctaaatacggtgttgctgtttattatattgttgcttcatcggaagcttcttcaaacttacaacgttttgatggtattcgttatggataccgtacagaaaattataaaaacttggatgatatctatgtcaatacacgatctgaaggttttggagacgaagttaagcgtcgcattatgctgggaacgttcagtttatcttctgggtattacgatgcttattataaaaaagcaggtcaagttcgtagtttgattattcaagattttgaaaaagttttcgcagattatgacttgattttaggtccaacagctccaacaacagcctttgacttagattctttaaatcacgatccagttgcaatgtacctagctgatattctaacaataccagttaatttggctggtttaccaggtatttcaatccctgctggttttgatcaaggtctaccggttggtatgcagttgattggtccgaaattcagtgaagaaacaatatatcaggttgctgctgccttcgaagcaacgacagattatcataaacaacaacctaaaatttttggaggtgagaac

SEQ ID NO: 11958 - protein, 488 aa, Streptococcus agalactiae; identical to SEQ ID NO: 3060

SEQ ID NO: 11959 - DNA, 300 bp, Streptococcus agalactiae
atgaaaatttctgaagaagaagtgcgtcatgttgccaatctgtcaaaattgcgcttttctgatcaagagactaaagaatttgcgtcaagtttgtcaaagattgttgatatgattgaactcttaaatgaagttgacacagaaggcgtaccagtaacaacgaccatggcagatcgcaaaaccgtgatgcgtgaagatattgctcaaccaggccataatcgtgatgacttatttaaaaatgtaccacagcatcaagattattatattaaagtacctgcaattcttgaggatggaggagatgcc

SEQ ID NO: 11960 - protein, 100 aa, Streptococcus agalactiae; identical to SEQ ID NO: 3062

SEQ ID NO: 11961 - protein, 1466 aa, Streptococcus agalactiae
TTGACGACAGGACTTCCAGCTTCTCCTGGAGCTGCTTGGGAAAGTTTATTTCCATGCAGAAGATGTGTTAAAGAGATGAAAAAGGGAAATCCAGTGCTATGGTCAGACAAGAGACATCACCTGAAGATATCGAGGGGATGGTTAGTGCAAACGGGATTATAACAGCAAGAGGCGGAATGACTTCCCATGCGGCAGTAGTAGCCAGAGGAATGGGGAAACCATGCGTTGCAGGCTGTAGTCAATTATTGGTTGATGAAGTAAGACGAGAAATTTCTATTGGGCATCAAACGATAAAAGAAGGTGAGATGTTATCAATCGATGGTGCTACAGGAAATGTTTATATAGGACAAGTTCCGATGGCAGAGACTAGCGTAGATCGTGATTTTGAGATATTTATGAAATGGGTAGATGAAAATCGAGATATGATGGTGTGTTCAAATGCAGATAATCCGAGAGATGCTCAAAAGGCCTTGGACTTTGGAGCAGAAGGAATAGGTCTTTGTCGCACGGAACATATGTTTTTTGACGATGAACGTATTCCAGTCGTTAGAGAAATGATTTTAGCGGATGAAATATTGAGCCGAAGGAAGGCTCTAGAAAGGCTTTTATCTTTCCAAAGAGACGATTTTTATCAAATTTTTAAAGTATTGAAAGGTAAAGCTTGTACGATTCGTTTGCTTGACCCTCCTTTACATGAATTCTTACCCCATGATAAAGAGTCTATAGAATCTATGGCAAGACAAATGGGGATATCTACTTTAGCTATTGAAAAACGGATTCAAACATTAGAAGAATTCAACCCTATGTTAGGTCATCGTGGTTGTAGACTTGCGATTACCTATCCGGAAATTTACCAAATGCAGGTGAGAGCTCTTGTACAAGGCGCTATACTTGCAATGAAAGAGGGATATGAGGCAAAGCCAGAAATTATGATTCCTTTAGTGACAGCGCATGAAGAAATCTCTATAATACGTGATCTGATTGAAGAGACAATTGTTGAGGAGAGTAAATCTAAAAAAATTAACTTATCATTCCCTATTGGGACAATGATTGAAACACCAAGAGCTTGTATGATAGCGGATGATATTGCAAAGTTTGCGGATTTCTTTAGTTTTGGGACCAATGATTTAACACAAATGAGCTTTGGATTTTCACGAGATGATGCTGGAAAATTCTTAGGAGAATACGTTGATAAAGGACTTCTAAAAAAAGACCCTTTCCAAGTTTTAGATCAAAAAGGAATAGGAAGGTTTATTGAGCAGGCAGTGAGGTTAGGAAAAGAAGTTAAGCCAAACCTTAAAATAGGTATCTGTGGAGAGCATGGTGGAGAACCATCATCTATTGAGTTCTGTTACCAACTGGGGTTACATTATGTATCGTGTTCGCCGTTTAGGATTCCTATTGCTAAATTAGCGGCTGCACAGGCTAAAATCAAACAAAGCAGAAATGATATAACAATAGATAAA

SEQ ID NO: 11962 - protein, 490 aa, Streptococcus agalactiae
MTTGLPASPGAAYGKVYFHAEDVVKEMKKGNPVLLVRQETSPEDIEGMVSANGIITARGGMTSHAAVVARGMGKPCVAGCSQLLVDEVRREISIGHQTIKEGEMLSIDGATGNVYIGQVPMAETSVDRDFEIFMKWVDENRDMMVCSNADNPRDAQKALDFGAEGIGLCRTEHMFFDDERIPVVREMILADEILSRRKALERLLSFQRDDFYQIFKVLKGKACTIRLLDPPLHEFLPHDKESIESMARQMGISTLAIEKRIQTLEEFNPMLGHRGCRLAITYPEIYQMQVRALVQGAILAMKEGYEAKPEIMIPLVTAHEEISIIRDLIEETIVEESKSKKINLSFPIGTMIETPRACMIADDIAKFADFFSFGTNDLTQMSFGFSRDDAGKFLGEYVDKGLLKKDPFQVLDQKGIGRFIEQAVRLGKEVKPNLKIGICGEHGGEPSSIEFCYQLGLHYVSCSPFRIPIAKLAAAQAKIKQSRNDITIDK

SEQ ID NO: 11963 - protein, 1666 aa, Streptococcus agalactiae
ATGGAAACTAAGTTTGTGTATCATTTTGATGAAGGTTGTAAGGAAATGAAGGAACTGCTAGGTGGTAAGGGGGCTAATCTAGCTGAAATGACGAGTATTGGGTTACCGGTACCACAAGGTTTTACTATTACAACACAGGCTTGTAATGATTATTATGATAACGCTTGCCATATCCGAGAGAGTATTCTTAGTCAAATTGATCAAGCAATGGCACAATTGGAGGTTGAACAGAACAAGCAATTAGGAAGTGTTGATGATCCTTTGTTGGTGTCAGTTCGGTCAGGATCAGTTTTTTCAATGCCTGGTATGATGGACACAGTTTTAAATTTAGGGTTAAATGATCGTAGTGTCCAAGGTTTAGTGAAAAAGACAGAAGACGAGCGTTTTGCTTATGACAGTTATCGTCGTTTTATCCAAATGTTTGCAGATGTGGTTACAGGCATTCCAAAATATAAATTTGATACCATTTTAGATCGACTTAAGACAGATAATGTTATCAAGATGACACAGAACTAACTGGTTCAGATTTAAAGAGACTTGTTGAATTTTACAAGGAACTATATCAAAAAGAAGCAGGAGAAAAATTTCCGCAAGATCCTAAAAGGCAGCTTTTGTTAGCAATTGAGGCAGTTTTTAAATCATGGAATAATCCAAGAGCTAAGATTTATCGTAAATTAAATGATATTCCGGAGACGCTTGGGACAGCCGTTAATATCCAAGCTATGGTTTTTGGGAATATGGGAAATAACAGCGGAACGGGAGTTGCTTTTACACGAAACCCATCAACTGGAGCAGCAAATTTATTTGGTGAGTATTTGATTAATGCACAAGGAGAAGATGTTGTTGCAGGTATCAGAACACCACAATCCATATCAAAATTGGCAGAACAAATGCCTATTATTTACCAAGAGTTTGTAAGCGTTACCCAAAAGTTAGAAGCTCATTATCGCGATATGCAAGATATGGAGTTTACAATTGAAAATGGTAATCTTTATATGCTTCAGACGAGAAGCGGTAAGCGTACAGCGAAGGCAGCTATCAAAATAGCAGTAGATCAAGTAAATGAAGGCCTAATTAGTAAAGAAGAAGCTATACTACGTATCGAGCCCAAACAATTAGATCAGTTATTACACCCTTCTTTTGACTTGAAAAGTTTAAAGAAAGCTATTATTTTGACGACAGGACTTCCAGCTTCTCCTGGAGCTGCTTATGGGAAAGTTTATTTCCATGCAGAAGATGTTGTTAAAGAGATGAAAAAGGGAAATCCAGTGCTATTGGTCAGACAAGAGACATCACCTGAAGATATCGAGGGGATGGTTAGTGCAAACGGGATTATAACAGCAAGAGGCGGAATGACTTCCCATGCGGCAGTAGTAGCCAGAGGAATGGGGAAACCATGCGTTGCAGGCTGTAGTCAATTATTGGTTGATGAAGTAAGACGAGAAATTTCTATTGGGCATCAAACGATAAAAGAAGGTGAGATGTTATCAATCGATGGTGCTACAGGAAATGTTTATATAGGACAAGTTCCGATGGCAGAGACTAGCGTAGATCGTGATTTTGAGATATTTATGAAATGGGTAGATGAAAATCGAGATATGATGGTGTGTTCAAATGCAGATAATCCGAAGATGCTCAAAAGGCCTTGGACTNNNNNTTAATTAAT

SEQ ID NO: 11964 - protein, 556 aa, Streptococcus agalactiae
  VARIANT 552, 553: Xaa = Any Amino Acid
METKFVYHFDEGCKEMKELLGGKGANLAEMTSIGLPVPQGFTITTQACNDYYDNACHIRESILSQIDQAMAQLEVEQNKQLGSVDDPLLVSVRSGSVFSMPGMMDTVLNLGLNDRSVQGLVKKTEDERFAYDSYRRFIQMFADVVTGIPKYKFDTILDRLKTDKCYQDDTELTGSDLKRLVEFYKELYQKEAGEKFPQDPKRQLLLAIEAVFKSWNNPRAKIYRKLNDIPETLGTAVNIQAMVFGNMGNNSGTGVAFTRNPSTGAANLFGEYLINAQGEDVVAGIRTPQSISKLAEQMPIIYQEFVSVTQKLEAHYRDMQDMEFTIENGNLYMLQTRSGKRTAKAAIKIAVDQVNEGLISKEEAILRIEPKQLDQLLHPSFDLKSLKKAIILTTGLPASPGAAYGKVYFHAEDVVKEMKKGNPVLLVRQETSPEDIEGMVSANGIITARGGMTSHAAVVARGMGKPCVAGCSQLLVDEVRREISIGHQTIKEGEMLSIDGATGNVYIGQVPMAETSVDRDFEIFMKWVDENRDMMVCSNADNPRDAQKALDXXLIN

SEQ ID NO: 11965 - protein, 828 aa, Streptococcus agalactiae
ATGGAAGATCAACTCACTATATTTATTATTTCAGATTCTTTAGGGGAAACAGCCAAAGCTATTGCGAAAGCATGTTTGTCACAATTTCCAGGACATGATGATTGGCATTTTCAACGTTTTTCCTATATTAACAGTCAGGAACGCTTAGAACAAGTTTTTGAAGAGGCTAGCCAGAAGACAGTATTTATGATGTTTAGTTTAGTTGATGTTGCTTTGGCTTCCTATGCACAGAAACGATGTGAAAGTGAACATTATGCTTATGTTGACTTATTAACAAATGTTATTCAAGGAATATCAAGGATATCGGGTATAGATCCTTTGGGAGAACCAGGGATTTTACGACGCTTAGACAATGATTATTTCAAAAGAGTAGAATCAATAGAATTTGCAGTAAAATATGATGATGGGAGAGATCCGCGAGGTATTTTACAAGCAGATTTAGTTATTATAGGAATTTCAAGAACTTCTAAAACACCATTAAGTATGTTTTTAGCAGATAAAAATATTAAAGTTATTAATATTCCTTTGGTTCCAGAGGTTCCTGTTCCTAAAGAATTACGTATGATTGATTCTAGAAGGATTATCGGACTAACTAATTCGGTTGATCATCTTAATCAAGTCCGAAAAGTTCGATTAAAGTCCTTAGGTCTTTCTAGTACGGCAAATTATGCCAGTTTAGAACGGATTTTGGAGGAGACGAGGTATGCTGAAGAAGTTATGAAAAATTTAGGTTGCCCAATCATTAATGTATCTGATAAAGCAATCGAAGAAACAGCAACGATTATTTTAGAAATCTTAAAAACAAATGGACAAGTAGCTAAAAATCTG

SEQ ID NO: 11966 - protein, 276 aa, Streptococcus agalactiae; identical to SEQ ID NO: 3066

SEQ ID NO: 11967 - protein, 495 aa, Streptococcus agalactiae
ATGCTAGGTATCATAGATGCAAAACCTAAGGTTGGTTATTTTTATTTAGGACAGTATCATGCTTCAATAGGGACAAGTCATTTTGAAAAGATGACAGTTTCAGAAATTATGGGGATCCCTCTGACAGTTCATCAAAAAGATTCAGTTTATGATGTTATTGTACATATTTTTATGGAAGATGCTGGTTGTGCTTTTATCTTGGATGATGATGATTTTCTCTGTGGAGTCGTGTCACGTAAAGATTTACTAAAAACCAGTATTGGCGGAGGAGATCTTTCTAAAATGCCAATAGGAATGGTGATGACACGTATGCCACACGTGACAACTGTTTTAGAAAATGAAAGTCTTTTTGCGGCAGCTGATAAATTAGTGAGCAGAAAAGTGGATAGTCTCCCTGTCGTTCGTCATGATAAGCAATATCCCGAAAAATTTAAAGTGATCGGGAAATTATCTAAAACAATCCTCGCTAGTTTGTTTTTAGAAATAAGAGATTAT

SEQ ID NO: 11968 - protein, 165 aa, Streptococcus agalactiae; identical to SEQ ID NO: 7738

SEQ ID NO: 11969 - protein, 1131 aa, Streptococcus agalactiae
TTGTATACTATTTATTTTATATGTTATATTATATATCTTTTTTTACTGAAATCAAGTAAAAAAAGATACTATTTTAAAAATAATCATACTATATATTTGCTTTTAGACATATCTTTTGTTAAACTTTCTTCGAAAACGTTTTCGAATATAAGTATCGGAGGTTGTAATATGACAATTAAAAATCTCACTGTTGCAGGAAGTGGCGTTCTAGGTAGTCAAATCGCCTTTCAAGCAGCTTACAAAGGAATGTCTGTCACCATATATGACATTAACGATGAAGCTTTAAATAAGGGAAAAGAACGCATCAAAAAATTAGCTAAAGTCTATCAATCAGAAATTGAAACAGCAAAAGAAGCATATAGTGATAAAGCTAAAAGTATCAAGTATAATAAAAACTTATTGCCTAGCTTAGACCATATTTTTCTTTCAAAAGTTGCCGATTCATTAGACTTGATTGCTGATTTACCAAACCAAATTACTTTTTCAAAAAACTTAGACCAAGCTGTAAGTGACGCCGATTTAGTAATCGAAGCTGTCCCAGAAACAGTTAGTATAAAAGAAGATTTTTATAAACAATTAGCTAAAGTGGCACCTTCAAAGACAATCTTTGCAACAAATTCTTCAACACTTGTTCCAAGTCAGTTTGCTGATATAACAGGACGGCCTGACAAATTTTTAGCAATGCATTTCGCTAACAATATTTGGCAAAATAATATTGTTGAAATTATGGGACATAAGGGAACTGACGACGAGGTTATCAAAGAAGCTTTGGCATTCTCAAAAGATATTGGTATGGTGCCTTTACATATTCATAAAGAACAACCTGGCTATATTCTTAATTCAATACTAGTTCCATTCTTAGAGAGTGCACTAGCATTGTACTATGATAAGGTTTCTGATTCTGAAACTATTGATAAAACCTGGAAGTTAGGAACAGGAGCACCGATGGGACCTTTAGAAATTTTAGATATTATTGGCATCGATACCGCTTATAATATCATGAAGAATTATTCAGATACCAACAGCGATCCTAATAGTCTTCATGCTCACCTTGCAAAAATGCTTAAAGAAGAATTCATTGATAAAGGACGTACCGGTAAAGCTGCTGGACACGGCTTTTATGATTACGAC

SEQ ID NO: 11970 - protein, 377 aa, Streptococcus agalactiae
MYTIYFICYIIYLFLLKSSKKRYYFKNNHTIYLLLDISFVKLSSKTFSNISIGGCNMTIKNLTVAGSGVLGSQIAFQAAYKGMSVTIYDINDEALNKGKERIKKLAKVYQSEIETAKEAYSDKAKSIKYNKNLLPSLDHIFLSKVADSLDLIADLPNQITFSKNLDQAVSDADLVIEAVPETVSIKEDFYKQLAKVAPSKTIFATNSSTLVPSQFADITGRPDKFLAMHFANNIWQNNIVEIMGHKGTDDEVIKEALAFSKDIGMVPLHIHKEQPGYILNSILVPFLESALALYYDKVSDSETIDKTWKLGTGAPMGPLEILDIIGIDTAYNIMKNYSDTNSDPNSLHAHLAKMLKEEFIDKGRTGKAAGHGFYDYD

SEQ ID NO: 11971 - DNA, 546 bp, Streptococcus agalactiae
atgacaaaagcactcatctcaatagactacacatatgattttgtggcagatgatgggaaattaacggcaggtaaaccagcgcaatctatcgcttcagctatagctgacgttacagagaaagcataccggtcaggggattatattttttttgcgattgataatcatgatattggagatgtttttcatccagagagcaatctttttcctgagcataatattaaagggacttctggtagaaacctatatggtcctttgggaactctatatgaaactattaaggaagatagtcgtgttttttggatagataagcgtcattattctgccttttctggcactgatttagatattcgcctacgtgaaagacgagtagatactttgatattgacaggagtattgacagatatttgtgtattacacacagcaattgatgcttataacttaggttataaaattgaggtcccagcagcagctgtagctagcttaaatgatagtaatcatcaatgggctttaaatcattttaaaactgttcttggtgcaactattctt

SEQ ID NO: 11972 - protein, 182 aa, Streptococcus agalactiae
MTKALISIDYTYDFVADDGKLTAGKPAQSIASAIADVTEKAYRSGDYIFFAIDNHDIGDVFHPESNLFPEHNIKGTSGRNLYGPLGTLYETIKEDSRVFWIDKRHYSAFSGTDLDIRLRERRVDTLILTGVLTDICVLHTAIDAYNLGYKIEVPAAAVASLNDSNHQWALNHFKTVLGATIL

SEQ ID NO: 11973 - DNA, 783 bp, Streptococcus agalactiae
atgccgaatttattagaaaaaactagaaaaattacatccatcttacagcgttccgtagatagcttagatgccgaactaccatataatacaatggcggctcaattagctgatattattgactgtaacgcatgtattattaatggtggtggtaacttacttggctatgccatgaaatataaaacaaacactgaccgtgtggaagaattttttgaaacaaaacaattcccagattactatgttaaatctgctagtcgtgtttatgatacagaagctaacttatcagtagataatgatttgtcaattttcccagttgagacaaaggaaaacttccaagatggtattacaacaatcgctccaatttatggtggtggaatgcgcttgggaacatttattatctggcgtaatgataaagaatttagcgacgatgatttgattttagttgaaattgcaagcaccgttgttggtattcaattacttaaccttcaaacagaaaatctagaagaaaatattcgtaaacaaacagcggtgacaatggctatcaacactctatcttattcagaaatgaaagctgtagctgctatcttaggagaattagatggacttgaaggacgcctaacggcatctgttattgcagaccgtattggaattacacgttccgttattgtaaatgctcttcgtaaattggagtctgcgggaatcattgagagccgctcactcggtatgaagggaacatacctcaaagttattaacgaaggtatttttgacaaattaaaagaatataat

SEQ ID NO: 11974 - protein, 261 aa, Streptococcus agalactiae; identical to SEQ ID NO: 7744

SEQ ID NO: 11975 - DNA, 1128 bp, Streptococcus agalactiae
atgagggcaaatggtgaaaagatattgcggttaaatactggaaatccagctgcctttggcttcgaagcgccagatgaagtcattcgtgatttaattacgaatgcgcgtgaatcagaaggttactctgattcgaaaggtattttttcagctcgtaaggctgttatgcagtattaccagttacaaaacatccatgttgacatggatgatatatacattgttaatggtgttagtgagggaatctctatgtcaatgcaagctttgcttgataatgatgacgaggttctagttccaatgccagattacccgttatggacagcttgtgttagccttgctggtggaaatgctgtgcattatatttgtgatgaggaagctaattggtatcctgatattgatgatatcaaatcaaaaatcacatccaaaacaaaagcaattgtcctcattaatccaaataatccaactggagcagtctatccgcgtgaaattctgcaagagattgtggatatcgctagacaaaatgacttgattattttttcagacgaggtttatgaccgtttagttatggatggaatggagcatatcccaattgcttctattgcagaggatatttttacagttactttatctggcttatctaaatcacatcgcatctgtggtttccgcgttggttggatggtattgtctggtccgcgacaacatgttaaaggttatattgaaggtttgaatatgttagctaacatgaggctgtgttcaaatgttcttgctcaacaggttattcaaacatcgttaggcggacagcaatctattgatagtatgttgttgccaggaggtcgtatctacgagcaacgtaattatatccataaagcaattaatgaaatacctggtttatctgctgtaaaaccaaatgctggactgtatcttttccctaaaattgatacagatatgtaccgtattgataatgatgaagagtttgtgcttaatttcttaaaacaagaaaaagtattactaacacacggtagaggatttaatatgaataccgctgaccattttagaattgtttacttaccacgtgttgatgaattgactgaactacaagaaaaaatggctcgctttttaagccgatacaagcgc

SEQ ID NO: 11976 - protein, 376 aa, Streptococcus agalactiae
MRANGEKILRLNTGNPAAFGFEAPDEVIRDLITNARESEGYSDSKGIFSARKAVMQYYQLQNIHVDMDDIYIVNGVSEGISMSMQALLDNDDEVLVPMPDYPLWTACVSLAGGNAVHYICDEEANWYPDIDDIKSKITSKTKAIVLINPNNPTGAVYPREILQEIVDIARQNDLIIFSDEVYDRLVMDGMEHIPIASIAEDIFTVTLSGLSKSHRICGFRVGWMVLSGPRQHVKGYIEGLNMLANMRLCSNVLAQQVIQTSLGGQQSIDSMLLPGGRIYEQRNYIHKAINEIPGLSAVKPNAGLYLFPKIDTDMYRIDNDEEFVLNFLKQEKVLLTHGRGFNMNTADHFRIVYLPRVDELTELQEKMARFLSRYKR

SEQ ID NO: 11977 - DNA, 450 bp, Streptococcus agalactiae
atgtcacaaaaatatgaacgcatccttgtcgctattgatggatcaacagaatctgaacttgcttttgaaaaggcagttaacgttgctcttcgcaatgattctgaattaatcttgacacatgttatagatacacgtgctttacaaagctttgcgacatttgatacttatatctatgaaaaattagaaaaagaagcaaaagatgtccttgaggaatatgaaaaacaagctcgtgaaaaaggagcagataaagttagacaagtcattgaatttggtaatcccaaaacattacttgcacatgatattccagaaaaagaaaaagtagacttgattatggttggtgcaacaggtcttaatacctttgaacgtttccttatcggatcttcctcagaatacatccttcgtcacgctaaagtagatttactcattgtacgtgaccctaataaaacaatg

SEQ ID NO: 11978 - protein, 150 aa, Streptococcus agalactiae; identical to SEQ ID NO: 3074

SEQ ID NO: 11979 - DNA, 1380 bp, Streptococcus agalactiae
gtggcaattaaggcagtattttttgatattgatggtacacttcttaatgatcgtaagaatgtacaaaagtcaacaattaaagcaattcgaaatttgaaagaccaaggaatactagtcggtttagcaacggggcgaggtcctagttttgtacaaccttttttagaaaaccttggtttagattttgctgtaacctataatggtcaatatatctatagtagaagtgaaattatttataccaatcaattatctaagacaactgtctatcgtctgattcgttatgctggagcaagaagaagagaaatttcattaggaacagcctcaggattactcggttcaggtattattggtctaggaactagccgtttggggcagattgtatctagccttgttccgagaaaatgggcaaaagcgattgaacgaagctttaagcattttattcgtcggattaaacctcaaaatattgatagcctcatggttatcttacgagaacctatttatcaggtcgttttagttgcaacagagggcgaatcagagcgaattcaaaaacaatttcctcgtgttaaattaacaagaagcagtccttactcaatggatgtcatttctgaagggcagtcaaaagttaagggaattgaacgtgttggtcaacgctatggttttgatctatccgaagtgatagcatttggagattctgataatgatattgagatgttatctcaagttggcattggtgttgccatggggaacgctagtcagcaagtgagagaaaatgcacgttatacaactgctgacaataatgatgatggtatctctaaggcattagcccattatggacttatccaatttgagattgaaaaaacattcagtagtcgtgacgagaatttcaataaagtaaaatccttccatctattaatggatggtgaaactattgaaacgccacgcttatatgacagtaaggaagctggtttcaggtcagactttaaagtagaagaaatcgttgagttcttgtatgctgctagtcaaggtaaccaaaaagtatttgaccaatctatccgtaatttacacttagctattgataaagcaagagataaggttatttctaaagaccatccagaaacaccattagtgggagaagtggatgccttaacagatttactttatctgacttatggctcctttgttcttatgggagtcgacccaaaacctctttttgatacagtacatgaggccaatatggggaaaatctttccagatggcaaagctcattttgatcctgttactcataaaattttaaaaccagacgactgggaagaacatttcgctcctgagccatcaattcgacgtgaattagatagccaaattcagaaatccttaaatcgaaaa

SEQ ID NO: 11980 - protein, 460 aa, Streptococcus agalactiae
MAIKAVFFDIDGTLLNDRKNVQKSTIKAIRNLKDQGILVGLATGRGPSFVQPFLENLGLDFAVTYNGQYIYSRSEIIYTNQLSKTTVYRLIRYAGARRREISLGTASGLLGSGIIGLGTSRLGQIVSSLVPRKWAKAIERSFKHFIRRIKPQNIDSLMVILREPIYQVVLVATEGESERIQKQFPRVKLTRSSPYSMDVISEGQSKVKGIERVGQRYGFDLSEVIAFGDSDNDIEMLSQVGIGVAMGNASQQVRENARYTTADNNDDGISKALAHYGLIQFEIEKTFSSRDENFNKVKSFHLLMDGETIETPRLYDSKEAGFRSDFKVEEIVEFLYAASQGNQKVFDQSIRNLHLAIDKARDKVISKDHPETPLVGEVDALTDLLYLTYGSFVLMGVDPKPLFDTVHEANMGKIFPDGKAHFDPVTHKILKPDDWEEHFAPEPSIRRELDSQIQKSLNRK

SEQ ID NO: 11981 - protein, 276 aa, Streptococcus agalactiae
ATGAAAAAAATCCTTGTTCTACACACAGGTGGAACGATTTCCATGAATGCTAACGAGAAGGGACAGGTCATGTCCAGCGCCGATAACCCAATGAAATACGTTGATTTATCATTAGATGACCTTGATTTGACTGTTGTAGATTTTCTAAATCTTCCCAGTCCTCAAATCACCCCTCATCATATGCTTGATATCTATCACTATCTGAAGCACATGCCAGTAATTTTATGGTGTTGTCATTACGCATGGGACTGACACTTTAGAAAACAGCATATTTTT

SEQ ID NO: 11982 - protein, 93 aa, Streptococcus agalactiae
MKKILVLHTGGTISMNANEKGQVMSSADNPMKYVDLSLDDLDLTVVDFLNLPSPQITPHHMLDIYHYLKQHASNFDGVVITHGTDTLEKQHIF

SEQ ID NO: 11983 - protein, 180 aa, Streptococcus agalactiae
ATGAATGATGAGATACATGCTGCTAAATATGTCACAAAAACACATACAACAAACGTTTCGACATTCCAAACCCCTACACATGGCCCCCTTGGGATTATTATGAAACAAGACCTGCTTTTCTTTAAAGCAACTAAAGAGAGAGTTCGTTTTGATTTAGATAAAATTANNNNNTTAATTAAT

SEQ ID NO: 11984 - protein, 60 aa, Streptococcus agalactiae
  VARIANT 56, 57: Xaa = Any Amino Acid
MNDEIHAAKYVTKTHTTNVSTFQTPTHGPLGIIMKQDLLFFKATKERVRFDLDKIXXLIN

SEQ ID NO: 11985 - protein, 345 aa, Streptococcus agalactiae
GTGAAAGCATATGCTGGCATGGGTGATAGTGGTATCATTAGCTTTTTAAATTCTCAAAATATTAGCGGATTAGTTATTGAAGCACTCGGTGCAGGGAATATGCCCCCAAAAGCTGCACAAGAAATCGAAGAATTAATTGAGCAAGGTGTCCCTGTTGTTCTAGTGTCTCGCTGTTTTAATGGTATTGCTGAGCCAGTTTACGGATATGAAGGTGGCGGAGCAAAATTACAAGAATCTGGTGTCATGTTTGTTAAAGAACTAAACGCTCCCAAAGCCAGACTCAAATTACTCATTGCACTCAATGCAGGTCTCACAGGGCAAAATCTAAAAGACTATATTGAAGGT

SEQ ID NO: 11986 - protein, 115 aa, Streptococcus agalactiae
MKAYAGMGDSGIISFLNSQNISGLVIEALGAGNMPPKAAQEIEELIEQGVPVVLVSRCFNGIAEPVYGYEGGGAKLQESGVMFVKELNAPKARLKLLIALNAGLTGQNLKDYIEG

SEQ ID NO: 11987 - protein, 873 aa, Streptococcus agalactiae
ATGAATTCATTAAATGGGGAAACTTTACTAACTGGTCTAATTGCCAATCCTGCACGCCACTCTCTATCCCCGTTAATGTGGAATACCTCTTTTCAAGAAAAAAACATGAATTATGCCTATCTGACATTTGAAGTAGAAGAGGGTAAATTAACAGAAGCTGTTCGAGGTGTCAGGGCATTGGGTATTCGTGGTGTTAATGTTTCAATGCCATTTAAACAGAGTGTTATCCCTTTGCTAGATGATTTATCTCCTCAAGCTAAATTAGTGGGTGCTGTAAATACTATCGTTAATCAAGGTGGAACCGGACGTTTAGTAGGCCATATGACAGATGGCATTGGTTGTTTTAAAGCTTTAGCAGCTCAAGGTTTCAGTGCTAAAAATAAAATAATTACAATAGCTGGTATTGGTGGTTCAGGTAAAGCAGTTGCAGTTCAAGCAGCTATGGAGGGAGTTGCGGAAATTAGATTATTTAATCGTAACAGCTCAAATTACGATAAGGTCATTGACTTATCAGATAAAATTAAAAAACAGTTTCAAATAAAGGTAGTCGTTGATTATCTAGAAAATAAGACAGCATTTAAAGACGCTATTAGAACTAGTCATTTTTATATTGATGCTACTAGTTTAGGAATGAGGCCATTAGATAATTATAGTTTAATTAACGATCCAGAAATTTTAACACCGAATTTAGTAGTTGTCGACTTGGTTTACAAGCCTAAAGAAACAGCATTGTTACGATTTGTTAGACAAAATGGAGTGAAACATGCTTATAATGGTCTAGGGATGCTGATTTATCAAGGAGCAGAAGCATTTCAATTAATAACGAATCAAGAATGCCTATTAGCAGTGTTGAGAGAGTATTACAACTGAAAT

SEQ ID NO: 11988 - protein, 292 aa, Streptococcus agalactiae
  VARIANT 289, 291: Xaa = Any Amino Acid
MNSLNGETLLTGLIANPARHSLSPLMWNTSFQEKNMNYAYLTFEVEEGKLTEAVRGVRALGIRGVNVSMPFKQSVIPLLDDLSPQAKLVGAVNTIVNQGGTGRLVGHMTDGIGCFKALAAQGFSAKNKIITIAGIGGSGKAVAVQAAMEGVAEIRLFNRNSSNYDKVIDLSDKIKKQFQIKVVVDYLENKTAFKDAIRTSHFYIDATSLGMRPLDNYSLINDPEILTPNLVVVDLVYKPKETALLRFVRQNGVKHAYNGLGMLIYQGAEAFQLITNQEMPISSVERVLXTXN

SEQ ID NO: 11989 - protein, 912 aa, Streptococcus agalactiae
ATGTTACAAAACATTGGACAAACAGGCATTCAAGCAACTCGAATTGCTTTAGGTTGTATGAGAATGAGTGACTTGAAAGGAAAACAAGCTGAAGAAGTAGTTGGAACAGCATTAGATTTGGGTATTAATTTTTTTGATCATGCTGATATTTATGGGGGAGGGCTATCTGAATTACGCTTTCGAGATGCAATCAAACATTTAAATGTCAATCGTGACAAAATGATTATTCAATCTAAATGTGGGATACGAGAAGGTTATTTTGATTTTTCTAAAGAGTATATTTTATCATCAGTAGATGGTATTTTAGAAAGATTAGGGACAGAATATTTAGATTTTCTCATTCTTCATCGTCCAGATGTATTAGTTGAGCCTGAAGAAGTAGCAGAAGCATTTACCAAACTGAGGGCAGAAGGTAAAGTAAAACACTTTGGTGTTAGCAATCAAAACCGGTTTCAAATGGAGTTGTTACAATCCTACCTTGACGAGCCCTTAGCAGTGAATCAACTTCAGTTATCGCCAGCACATACACCAATGTTTGATGCAGGGTTAAATGTTAACATGTTAAATAAAGCTTCAATTGAACATGATGATGGCATTGTTGATTATTGTCGTCTTAAAAGAGTTACCATTCAAGCTTGGTCTCCATTTCAAATTGATTTATCTCGTGGTTTATTTGTTAATCATCCGGATTATAAGGAATTAAATGAAACCATAGCTAAACTGGCAAAAAACTACAATGTTAGCAGCGAAGCTATTGTGATTGCATGGATTTTACGTCATCCTGCCAAAATGCAGGCGATTGTTGGTTCAATGAATCCATCTCGTTTAAAGGCGATTGATAAGGCTAATGATATCGCTTTAACCCGTAAAGAATGGTATGATATTTACCGTAGTGCAGGTAATATATTGCCT

SEQ ID NO: 11990 - protein, 304 aa, Streptococcus agalactiae
MLQNIGQTGIQATRIALGCMRMSDLKGKQAEEVVGTALDLGINFFDHADIYGGGLSELRFRDAIKHLNVNRDKMIIQSKCGIREGYFDFSKEYILSSVDGILERLGTEYLDFLILHRPDVLVEPEEVAEAFTKLRAEGKVKHFGVSNQNRFQMELLQSYLDEPLAVNQLQLSPAHTPMFDAGLNVNMLNKASIEHDDGIVDYCRLKRVTIQAWSPFQIDLSRGLFVNHPDYKELNETIAKLAKNYNVSSEAIVIAWILRHPAKMQAIVGSMNPSRLKAIDKANDIALTRKEWYDIYRSAGNILP

SEQ ID NO: 11991 - DNA, 2013 bp, Streptococcus agalactiae
atgctattacaatcaccaatttctaatcttaagggatttggaccaaaatcagcagaaaaatttcagaaattagatatttatacagtagaagatttacttctttattatccgtttcgctatgaagattttaaatcaaaatctgtttttgatttagtggatggtgaaaaagcagtcattacaggcctagtcgttactccagctaatgtacaatattatggttttaaacgtaaccgtttaagttttaagttgcgtcaaggggaagctgtcttaaatgttagtttttttaatcaaccctatttagctgataaaatagaacttggtcaagaggtagctgtctttggtaaatgggatgcaactaaatcagctattactgggatgaaggttttagctcaagttgaagatgacatgcaacctgtttatcgcgtagctcagggaatttcacagtctactttgattaaagctattaagtcagcttttgaaatcagtgcgcatttggaattgaaggaaaatttaccagctactttattggaaaaataccgattgatgggtcgtagtcaggcttgtttagctatgcatttcccaaaagatatcacagagtataagcaagcgctccgtcggattaaatttgaagaattattttactttcaaatgaaccttcaagttttgaaatccgaaaataaatctgaaacaaatggtttgcctattctttatagtaaacatgctatggagacaaaaatttcctctttaccttttattctaacgaatgctcaaaagcgctctttagatgaaatattatctgatatgtcatcgggagctcatatgaatcgtttattgcaaggagatgtaggatcaggaaagacagtcattgctggtctatcaatgtatgcagcttatacagcaggttttcaatcggctttgatggttccaacggaaatcctagctgaacaacactacattagtctgcaagagttatttccagatttatcaatcgctatattaacttcgggtatgaaagcagctgttaagcgtacggttttagcagctattgcaaatggctcggttgatatgattgtaggaactcatgctcttatccaggactcggtacagtaccataaactggggcttgtaattacagacgagcaacatcgttttggtgttaaacagcgtagaattttccgtgaaaagggagaaaatcctgatgttttaatgatgacagccaccccaattccccgaactctagcaatcacagcttttggagaaatggatgtttctattattgatgaattacctgccggtcgtaaacctattattacacgctgggtgaaacacgagcagctaggtactgtgttggaatgggtaaaaggtgaattgcaaaaagatgctcaagtgtatgtcatttcaccgttgattgaagagtcagaagctttagatttaaagaatgcagtagcattgcatgctgaattatctacttattttgaaggaattgctaaggttgctcttgtacatggacgtatgaaaaatgatgaaaaagatgctataatgcaagatttcaaggataaaaaaagtcatattttagtatctacaacagttattgaagtaggggtaaatgtcccaaatgcaacgatcatgattattatggatgccgatcgttttggattaagccagctacatcaacttcgtgggcgtgttggtcgtggatataaacaatcatacgctgttttagtggctaatcccaaaactgattctgggaaaaaacgaatgacaatcatgacagaaacgacagatggtttcgttttagctgagtcggatttaaaaatgcgtggttctggtgaaatctttggtactcgtcagtctggaattccagaatttcaagtagctgatatcgttgaggattatcctattttagaagaagccagacgtgttgctagtgatattgtcaaagataataattggaaagaaaatacagaatgggcacttattctagataatttacgccaacattcagattttgat

SEQ ID NO: 11992 - protein, 671 aa, Streptococcus agalactiae
MLLQSPISNLKGFGPKSAEKFQKLDIYTVEDLLLYYPFRYEDFKSKSVFDLVDGEKAVITGLVVTPANVQYYGFKRNRLSFKLRQGEAVLNVSFFNQPYLADKIELGQEVAVFGKWDATKSAITGMKVLAQVEDDMQPVYRVAQGISQSTLIKAIKSAFEISAHLELKENLPATLLEKYRLMGRSQACLAMHFPKDITEYKQALRRIKFEELFYFQMNLQVLKSENKSETNGLPILYSKHAMETKISSLPFILTNAQKRSLDEILSDMSSGAHMNRLLQGDVGSGKTVIAGLSMYAAYTAGFQSALMVPTEILAEQHYISLQELFPDLSIAILTSGMKAAVKRTVLAAIANGSVDMIVGTHALIQDSVQYHKLGLVITDEQHRFGVKQRRIFREKGENPDVLMMTATPIPRTLAITAFGEMDVSIIDELPAGRKPIITRWVKHEQLGTVLEWVKGELQKDAQVYVISPLIEESEALDLKNAVALHAELSTYFEGIAKVALVHGRMKNDEKDAIMQDFKDKKSHILVSTTVIEVGVNVPNATIMIIMDADRFGLSQLHQLRGRVGRGYKQSYAVLVANPKTDSGKKRMTIMTETTDGFVLAESDLKMRGSGEIFGTRQSGIPEFQVADIVEDYPILEEARRVASDIVKDNNWKENTEWALILDNLRQHSDFD

SEQ ID NO: 11993 - DNA, 258 bp, Streptococcus agalactiae
atgggtaatggtggagattggcaacataaggctggttttgaaacaacacattcaccaaaagtaggctatgctgtatcattttcaccaggacaagctggtgctgatggcacttacggtcacgtagctattgttgaagaagttaaaaaagatggttcagttcttatttcagaatctaatgcaatgggacgtggtattgtctcttaccgtacttttagttcagcacaagctgcacaattaacttatgttattggccataaa

SEQ ID NO: 11994 - protein, 86 aa, Streptococcus agalactiae
MGNGGDWQHKAGFETTHSPKVGYAVSFSPGQAGADGTYGHVAIVEEVKKDGSVLISESNAMGRGIVSYRTFSSAQAAQLTYVIGHK

SEQ ID NO: 11995 - DNA, 951 bp, Streptococcus agalactiae
atgtcaaaacaaaaagtaatggcaactttgttgttatccactttagtcttatcgctatcatcacctttagtgaccttagcagaaactattaatccagaaacaagcctgacaatggcaacagcatcaacagaaagttcttctgaagcagagaaacaggaaaaaacacaacctacagattcagaaactgcttcaccttcagccgaaggaagtatctcaacagaaaaaacagagattggtacgacagagacatcatcaagcaatgaatcatcatcaagttcatcacatcaatcttcttccaacgaagatgctaaaacatctgattctgcttcaacagcatctactcctagcactaatactacaaacagtagtcaagcagacagtaagccaggtcaatcaacaaagactgaattaaaacctgagcctaccttaccattagtagagcctaaaataactcccgctccgtctcagatagaaagtgttcagacaaatcagaatgcttctgttcctgctttatcctttgatgataacttattatcaacaccgatttcaccagtgacagcaacgccattctacgtagaacactggtctggtcaggatgcctactctcactatttattgtcacatcgttacggtatcaaagctgaacaattagatgggtacttaaaatctttagggattcaatatgattctaatcgtatcaatggtgctaagttattacaatgggaaaaagatagtggtttagatgtccgtgctattgtagctattgctgtccttgaaagttcattgggaactcaaggagtggctaagatgccaggtgctaatatgtttggttatggtgcctttgatcatgactctagccatgctagtgcttataatgatgaagaagcaattatgttgttgacaaaaaatacaattattaaaaacaacaactctagctttgaaatccaagat

SEQ ID NO: 11996 - protein, 317 aa, Streptococcus agalactiae
MSKQKVMATLLLSTLVLSLSSPLVTLAETINPETSLTMATASTESSSEAEKQEKTQPTDSETASPSAEGSISTEKTEIGTTETSSSNESSSSSSHQSSSNEDAKTSDSASTASTPSTNTTNSSQADSKPGQSTKTELKPEPTLPLVEPKITPAPSQIESVQTNQNASVPALSFDDNLLSTPISPVTATPFYVEHWSGQDAYSHYLLSHRYGIKAEQLDGYLKSLGIQYDSNRINGAKLLQWEKDSGLDVRAIVAIAVLESSLGTQGVAKMPGANMFGYGAFDHDSSHASAYNDEEAIMLLTKNTIIKNNNSSFEIQD

SEQ ID NO: 11997 - DNA, 1098 bp, Streptococcus agalactiae
atgatttcaagttatcatagaccaaccagagccttgatagatttagaggcgattgcaaataacgttaaatctgtacaagagcacattccaagtgataaaaaaacatttgctgtagttaaggctaatgcttatgggcatggtgctgttgaagtttcaaaatacattgagtctattgtagatggtttttgcgtatccaatttagatgaggctattgagctacgtcaagcaggaattgtaaaaatgatattggtattaggtgttgttatgcctgagcaggttatactagccaaaaatgaaaatattactctaacagttgctagcttggagtggttacgtttatgtcagacatcagcagtagatttatctggtctagaagtacatatcaaagttgatagtggaatgggacgtataggtgttcgccagttagatgaaggaaataagctaatttctgaattgggggaaagtggtgcctctgtcaaggggattttcacccattttgcaacagctgatgaagccgataactgtaaattcaatcaacaacttactttttttaaagactttatttcaggattagataattgtccggaccttgttcatgctagtaattctgctacaagcctttggcatagtgagacaatttttaatgccgttagattgggtgttgttatgtacggcttaaatccaagtggaactgatttagacttaccttaccctataaaccctgctttaagtttagagtctgagctagtacatgttaaacaactacacgatggttctcaagttggctatggcgcaacctatcaagttactggagacgaatttgttggaacagtaccgattggctacgctgatggatggacacgagatatgcaaggattttcagttatagtaaatggagaactttgtgaaattattgggcgtgtctcgatggatcaaatgactatccgtttacctcaaaaatatactatcggaactaaagtaaccttgattggtcaacaaggtagttgtaacattacaactacggacgtcgctcaaaaaagacagacgattaattatgaagtactttgtcttttaagcgatcgtattccgagatattat

SEQ ID NO: 11998 - protein, 366 aa, Streptococcus agalactiae; identical to SEQ ID NO: 7764

SEQ ID NO: 11999 - DNA, 357 bp, Streptococcus agalactiae
atgattgttggacacggaattgatttacaagagatagaggcgattactaaagcatatgagcgtaatcaacgttttgcagaacgcgttttgaccgaacaagaattgcttctttttaaaggaatttccaatcccaagcgtcagatgtcttttttaacagggcgatgggcagcaaaagaggcttatagcaaagcacttggaacaggaattgggaaagttaattttcatgatatcgaaattttatcggatgataaaggagcgcctttgattacaaaagaaccgtttaatggaaaatcttttgtttcaatatctcatagtggtaattatgcacaagctagtgttattttggaggaagaaaaa

SEQ ID NO: 12000 - protein, 119 aa, Streptococcus agalactiae; identical to SEQ ID NO: 7766

SEQ ID NO: 12001 - protein, 1005 aa, Streptococcus agalactiae
ATGGGATTTCATCAGTTAAGTGATAAAATTAATATTGAAATATTGAAGCAGAAAACTAGCTTAGATCTAGAAGTTAGCCAAAAAAAATTAGCCAAAGAAGAAGAGTTAAAAAATATCATAAAAGGTGAGGATCAGCGGTTTCTAGTAATAGTAGGTCCTTGTTCTGCGGATAATCCAAAGGCGGTGCTAACTTATGCAAAGCGTTTAGCTAAATTGGAAGCTGCCTTTAAAGATAAAATGTTTTTGGTTATGAGAGTTTATACCGCTAAGCCAAGAACGAATGGTGATGGTTATAAAGGCTTAGTTCACCATTCTGACAAACTAGGAGTTTTTTTTCAAGCACGTAAGATGCACTATGACATCATTCGAGAGACTGGACTCCTGACAGCTGATGAATTACTTTATCCAGAGATGTTATCAGTGATGGATGATTTAGTTTCTTACTATGCTATTGGTGCGCGTTCAGTGGAAGATCAGGGACACCGTTTTATATCTTCAGGTATAGATGCACCAGTAGGTATGAAAAATCCAACGTCTGGTAATTTAAGAGTCATGTTTAATGCGGTCTATGCAGCACAAAATCAACAGGAATTATTCTATCAAAATAAGCAAGTTAGAACAGATGGTAATTTGCTGTCACATGTTATTTTGAGAGGATATCATAATGCCGACTATCGAAGTATCCCTAATTATCATTATGAAAACCTTTTAGAAACTATTACTCATTATGAAGAGACTGATTTGCAAAATCCCTTTATTGTTGTTGATACAAATCATGACAATTCAGGTAAGCAATTTTTAGAACAAATTCGCATTGTGAAATCAGTACTTGCAGACCGACAGTGGCATACTAAAATTAGAAACTATGTTCGTGGTTTTTTGATAGAATCTTATTTAGAAGATGGAAGACAAGATAAACCAGATGTTTTTGGTAAGTCTATCACAGATCCATGTCTAGGTTGGGATAAAACAGAAATGCTAATTAGGGATATTTACAATAGTTTG

SEQ ID NO: 12002 - protein, 335 aa, Streptococcus agalactiae; identical to SEQ ID NO: 3080

SEQ ID NO: 12003 - protein, 2526 aa, Streptococcus agalactiae
ATGGCAAATATTCTACGCACTGTTATTGAAAATGACAAGGGTGAATTAAAAAAATTAGATAAAATAGCTAAGAAAGTTGACTCTTACGCAGATCATATGGCTGCGTTATCAGATGAAGCTTTACAAGCAAAAACTCCAGAATTTAAAGAACGTTATCAAAATGGTGAAACTTTAGATCAATTGTTACCGGAAGCGTTTGCGGTAGTTCGTGAAGCTTCTAAACGTGTATTAGGTTTATACCCATACCACGTCCAAATTATGGGTGGTATCGTTCTTCACCATGGTGATATTCCAGAAATGCGTACTGGTGAGGGAAAAACTTTAACAGCGACAATGCCTGTTTATCTAAATGCTATCTCAGGATTAGGTGTTCATGTTATTACTGTTAATGAGTACTTATCAACACGTGATGCGACCGAAATGGGTGAGGTTTATAGTTGGCTTGGATTATCTGTAGGGATTAACTTAGCAGCTAAGTCACCATTTGAAAAACGCGAAGCTTATAATTGTGATATCACATACTCAACTAACGCAGAAGTCGGATTTGACTACCTTCGAGACAATATGGTTGTTCGCCAAGAAGATATGGTGCAACGCCCACTCAACTATGCTTTGGTTGATGAGGTTGACTCTGTATTAATCGATGAAGCTAGGACGCCATTGATTGTTTCAGGTCCTGTAAGCTCTGAGATGAACCAACTGTATACACGTGCGGACATGTTTGTAAAAACGCTTAATAGCGATGATTATATCATTGATGTTCCAACAAAAACAATTGGTTTATCAGATACAGGTATTGACAAGGCTGAAAACTATTTCCATCTAAATAACTTGTATGATCTCGAAAATGTTGCCTTAACTCACTACATTGATAACGCTCTTCGAGCTAACTATATTATGTTGTTAAATATTGATTATGTGGTTAGTGAAGAACAAGAGATTTTAATTGTGGACCAATTTACCGGTCGTACGATGGAAGGACGTCGTTTCTCAGATGGCTTACACCAAGCTATTGAAGCAAAAGAGTCAGTGCCAATCCAAGAAGAATCAAAAACGAGCGCTTCAATTACTTACCAAAATATGTTCCGTATGTACCATAAATTAGCAGGAATGACTGGTACTGGTAAGACTGAGGAAGAAGAGTTTCGTGAAATTTATAATATGCGCGTTATTCCTATCCCAACAAATCGTCCTGTTCAACGTATAGATCATTCAGATCTACTTTATCCAACTCTTGACTCTAAATTTAGAGCGGTGGTAGCAGATGTCAAAGAACGTTATGAACAAGGACAACCTGTACTGGTTGGTACAGTAGCTGTTGAAACGTCAGACTTAATTTCTAGAAAATTAGTTGCTGCTGGAGTACCACATGAAGTTTTGAATGCTAAAAATCACTTTAAAGAAGCTCAAATCATTATGAATGCTGGGCAACGTGGTGCTGTTACAATCGCAACCAACATGGCTGGTCGTGGTACTGATATCAAGCTTGGTGAAGGGGTTCGTGAACTTGGTGGTTTATGTGTTATTGGTACAGAGCGTCATGAAAGCCGTCGTATTGATAACCAGCTTCGTGGTCGTTCGGGTCGTCAAGGAGATCCAGGTGAATCACAATTCTATCTTTCGTTAGAAGATGATTTGATGCGTCGCTTTGGTACAGATCGTATTAAAGTGGTTCTTGAGCGAATGAATTTAGCTGAAGATGATACAGTTATTAAATCAAAAATGTTGACACGACAAGTTGAATCAGCTCAACGCCGCGTTGAAGGTAATAACTATGACACACGTAAACAAGTCTTGCAATACGATGATGTTATGCGTGAACAACGTGAGATTATTTATGCTAACCGTAGAGAAGTGATTACTGCTGAGCGTGATTTAGGACCAGAGCTCAAAGGGATGATTAAACGTACGATTAAAAGAGCAGTTGATGCACATAGCAGAAGCGATAAAAATACTGCAGCAGAAGCTATTGTTAATTTTGCAAGATCGGCGTTATTAGATGAAGAAGCTATCACAGTTTCAGAACTTCGTGGTCTAAAAGAGGCTGAAATTAAAGAACTTCTTTATGAACGTGCCTTAGCTGTTTATGAGCAACAAATTGCTAAATTAAAAGATCCAGAAGCTATTATCGAATTCCAAAAAGTCTTAATCTTGATGGTAGTGGATAATCAATGGACAGAGCATATTGATGCCTTAGATCAATTACGTAACTCCGTTGGACTTCGTGGTTATGCTCAAAATAACCCAATCGTTGAGTATCAATCAGAAGGTTTCCGTATGTTCCAAGATATGATTGGTTCGATTGAGTTTGATGTGACACGTACATTGATGAAAGCTCAAATTCATCAACAAGAGCGTGAACGTGCTTCTCAACATGCTACGACAACAGCAGAGCAAAATATCTCGGCACAACATGTACCTATGAATAATGAATCACCAGAATACCAAGGGATTAAACGTAATGATAAATGTCCTTGTGGCTCTGGCATGAAGTTTAAAAATTGTCATGGTCTGAGATGTTTACAA

SEQ ID NO: 12004 - protein, 842 aa, Streptococcus agalactiae
MANILRTVIENDKGELKKLDKIAKKVDSYADHMAALSDEALQAKTPEFKERYQNGETLDQLLPEAFAVVREASKRVLGLYPYHVQIMGGIVLHHGDIPEMRTGEGKTLTATMPVYLNAISGLGVHVITVNEYLSTRDATEMGEVYSWLGLSVGINLAAKSPFEKREAYNCDITYSTNAEVGFDYLRDNMVVRQEDMVQRPLNYALVDEVDSVLIDEARTPLIVSGPVSSEMNQLYTRADMFVKTLNSDDYIIDVPTKTIGLSDTGIDKAENYFHLNNLYDLENVALTHYIDNALRANYIMLLNIDYVVSEEQEILIVDQFTGRTMEGRRFSDGLHQAIEAKESVPIQEESKTSASITYQNMFRMYHKLAGMTGTGKTEEEEFREIYNMRVIPIPTNRPVQRIDHSDLLYPTLDSKFRAVVADVKERYEQGQPVLVGTVAVETSDLISRKLVAAGVPHEVLNAKNHFKEAQIIMNAGQRGAVTIATNMAGRGTDIKLGEGVRELGGLCVIGTERHESRRIDNQLRGRSGRQGDPGESQFYLSLEDDLMRRFGTDRIKVVLERMNLAEDDTVIKSKMLTRQVESAQRRVEGNNYDTRKQVLQYDDVMREQREIIYANRREVITAERDLGPELKGMIKRTIKRAVDAHSRSDKNTAAEAIVNFARSALLDEEAITVSELRGLKEAEIKELLYERALAVYEQQIAKLKDPEAIIEFQKVLILMVVDNQWTEHIDALDQLRNSVGLRGYAQNNPIVEYQSEGFRMFQDMIGSIEFDVTRTLMKAQIHQQERERASQHATTTAEQNISAQHVPMNNESPEYQGIKRNDKCPCGSGMKFKNCHGLRCLQ

SEQ ID NO: 12005 - protein, 945 aa, Streptococcus agalactiae
ATGTCGGAACCATTATTTTTAGAAGCAAGCATGCACGATAAAATCTGGGGTGGAACAAAGTTAAGGGATGAATTTGGCTATGATATTCCAAGTGAAACAACAGGAGAATATTGGGCTATTTCAGCTCATCCTAACGGTGTCTCAAGAGTTAAGAATGGTCGCTTTAAAGGTTGTTTTTTAGATAAGCTGTATCAAGGTGAAAAAAGCTTATTTGGCAACCCTGATGATACTGTCTTTCCTTTACTAACTAAAATCTTAGATGCTAATGACTGGCTTAGTGTACAGGTTCATCCGGATGATGCTTATGCTCTTAAACATGAAGGTGAACTTGGTAAAACAGAATGTTGGTATATTATTTCTGCTGATGAAGGATCTGAAATTATCTATGGTCATAATGCTAAAACTAAAGAAGAACTTCGCCAAATGATTGAATCTGGAGATTGGGAACATCTTTTAACCCGAATTCCTGTTAAATCAGGGGATTTTTACTACGTTCCAAGTGGGACAATGCATGCTATAGGTAAAGGGATATTAATTTTAGAAACACAGCAATCTAGTGATACTACTTATCGTGTTTATGATTTTGATCGTCCAGATGCTTCAGGAAAATTACGTGATTTACACATTGAACAATCAATAGATGTTCTCACGATTGGTAAACCTGCCAATACTGTTCCTGCCAATATGAAGTTAAAACATCTATCTTCAACTTTATTAGTTTCAAATGATTTCTTTACAGTTTATAAATGGGAAATTTCTGGTGTTACCAACTTTAAACAATTTGCACCCTACCTTTTGGTTAGTGTCTTAGACGGAGCGGGTCACATTACAGTAGATAACAAAGTTTATACACTTAAAAAAGGTGACCACTTTATCTTGCCAAATGATGTTGTCAAATGGGATATTGATGGACAGTTAGAAATTATAGCAAGTCATGTTAAAAAA

SEQ ID NO: 12006 - protein, 315 aa, Streptococcus agalactiae; identical to SEQ ID NO: 3084

SEQ ID NO: 12007 - protein, 879 aa, Streptococcus agalactiae
ATGACAAAGTTATATGGTAGTATTGAAGCAGGTGGGACAAAGTTTGTTTGTGCAGTTGGTGATGAGGAATTAAAAGTTGTAGAAAAAATGCAATTTCCAACAACGACGCCTCAAGAAACGATTAAAAAGACTGTTGATTTCTTTAAAAGATTTGAAAAGAAGTTAGAGGCAGTTGCTATTGGTTCTTTTGGCCCCATTGATATTGATAAAAAATCAAAGACATACGGTTATATCACAACGACCCCAAAGTTACATTGGGCTAATGTTGATTTACTCGGCTTAATTTCTAAAGATTTCAATGTTCCATTTTATTTCACAACAGATGTTAATAGCTCTGCCTATGGTGAAGTTATAGCTCGTAACAATATTGATTCACTTGTTTATTACACCATTGGTACAGGAATTGGTGCAGGAGCTATACAAAAGGGTGAATTTATAGGAGGAACTGGTCATACTGAAGCAGGTCATACTTATATGGCGATGCATCCGCAGGACCAAGCAAATGATTTTAAAGGTATCTGTCCGTTTCATAATAGCTGTTTAGAAGGTTTGGCATCTGGTCCAACTCTAGAAGCTAGGACTGGTATTCGTGGTGAATTGATTGAAGAAAATTCAATGGTTTGGGATGTTCAAGCATATTATATTGCTCAGGCTGCGATGCAAGCAACTGTATTATATCGTCCACAAGTCATTGTATTTGGTGGAGGCGTCATGGCACAAGAACACATGTTAAGACGTGTTCGCCAGACATTTGCAACTTTATTAAATGGGTATTTACCAGTTCCCGATTTGTCTGATTATATTGTGACACCAGCTATAGAAGAAAATGGTTCTGCAACGTTAGGAAATTTTGCTTTAGCAAAGAAAATATCAAAAGGT

SEQ ID NO: 12008 - protein, 293 aa, Streptococcus agalactiae
MTKLYGSIEAGGTKFVCAVGDEELKVVEKMQFPTTTPQETIKKTVDFFKRFEKKLEAVAIGSFGPIDIDKKSKTYGYITTTPKLHWANVDLLGLISKDFNVPFYFTTDVNSSAYGEVIARNNIDSLVYYTIGTGIGAGAIQKGEFIGGTGHTEAGHTYMAMHPQDQANDFKGICPFHNSCLEGLASGPTLEARTGIRGELIEENSMVWDVQAYYIAQAAMQATVLYRPQVIVFGGGVMAQEHMLRRVRQTFATLLNGYLPVPDLSDYIVTPAIEENGSATLGNFALAKKISKG

SEQ ID NO: 12009 - protein, 1917 aa, Streptococcus agalactiae
ATGGCTTCAAATACAGAAATTGCTAAACAAGTCATTAATGCGATTGGTGGTGCTAGTAATGTGCGTAGCGTAGCACACTGTGCCACTCGTCTTCGCGTTATGGTAAAAGATGAGACAGTCATTGATAAAAATACTGTTGAAAATATCGAAAAAGTTCAGGGAGCATTTTTCAATTCAGGTCAATATCAAATTATTTTTGGAACTGGTACTGTTAATAAGATTTATGATGAAGTAGTAGCTCAAGGTTTGCCAACTTCGTCAACCTCTGATCAAAAGGCAGAAGCGGCTAAACAAGGGAATGCTTTCCAACGAGCTATTCGTACTTTCGGTGATGTTTTTGTTCCATTGTTGCCAGCCATTGTTGCTACTGGTTTATTTATGGGAATTCGCGGTGCGATTAATAATGATACAGTTTTAGCTTTATTTGGGACGACTTCAAAAGCATTTTCAAGTTCTAATTTTTATACCTATACTGTCGTTTTGACTGACACGGCCTTTGCTTTTTTTCCTGCCTTGATTTCTTGGTCAGCTTTTAGAGTTTTTGGTGGAAATCCTGTTATCGGTCTCGTATTAGGATTGATGATGGTCAACTCTGCCCTTCCAAACGCTTGGGCAGTGGCCTCAGGTGATGCCCATCCCATAAAATTTTTCGGCTTTATTCCAGTAGTTGGTTATCAAAATTCAGTATTGCCGGCATTCTTTGTAGGTTTACTTGGTGCTAAACTTGAAAAATGGTTGCATAAGAAAATCCCAGATGTTCTTGATTTACTATTAGTGCCGTTCCTAACTTTTACAGTTATGTCAATTTTAGCACTTTTTGTCATTGGTCCTATTTTCCATTCAGTTGAAAACTATGTTTTAGCAGGGACAAAATTTGTCCTTAATTTACCTCTTGGCCTGTCAGGTCTTATTTTAGGTGGTGTTCATCAGATAATTGTTGTTACAGGTGTCCATCATATCTTTAATTTACTTGAAGCTCAGTTAATTGCTGCTGATGGGAAAGATCCATTTAATGCTATTATTACAGCTGCTATGACAGCACAAGCAGGTGCTACTTTGGCAGTTGGTGTTAAAACAAAAAATAAAAAATTAAAAGCCCTTGCTTTTCCGGCAGCGCTTTCAGCTGGACTTGGTATTACAGAACCGGCTATATTTGGAGTAAACTTACGTTTTGGTAAGCCATTTATTATGGGATTAATTGCAGGAGCAGCAGGTGGCTGGTTAGCTTCAATATTGAAATTAGCAGGAACTGGTTTTGGTATTACCATTATCCCAGGAACATTACTTTATTTAAATGGTCAAATTGTTAAGTACCTTATTATGGTGATTGGAACTACGGCTTTGGCTTTTGTATTAACTTATATGTTTGGATATGAAGATAAAGATGAAAAAGTAGTAGCTGAAGTTAGTCCTTTGGTTGAAGAAACAGATGACAATCCAACAATTACTCAAACTAGCCAATTAAGGGCAGAAACGATTGTTAGCCCTCTTGATGGACAGGTTATTGCTCTTGATACAGTAAGTGACCCAGTCTTTTCATCAGGTATTATGGGAGATGGCCTTGCTATTAAACCAAGCGGTAATACAATTTACTCACCTGTTGATGGTTTTGTCCAAATTGCTTTTGAAACAGGTCATGCTTACGGTATCAAATCAGATAAAGGTGCAGAAATTTTGATTCATATAGGTATTGATACTGTCACCATGAATGGCACAGGGTTTACTTCTAAAGTAAAGGCAGACCAAAAAGTGAAAAAAGGTGATATTCTTGGCACCTTTGATTCAGCCAAGATTGCAGAAGCAGGTCTGGATAATACAGCTATGATTATTGTGACTAATACAGCTGATTTTGCTGATGTTATACCATTGGTAAAAGAGGGTGTTGTTACTACAGGTGACATGATTATTGATGTTAAG

SEQ ID NO: 12010 - protein, 639 aa, Streptococcus agalactiae
MASNTEIAKQVINAIGGASNVRSVAHCATRLRVMVKDETVIDKNTVENIEKVQGAFFNSGQYQIIFGTGTVNKIYDEVVAQGLPTSSTSDQKAEAAKQGNAFQRAIRTFGDVFVPLLPAIVATGLFMGIRGAINNDTVLALFGTTSKAFSSSNFYTYTVVLTDTAFAFFPALISWSAFRVFGGNPVIGLVLGLMMVNSALPNAWAVASGDAHPIKFFGFIPVVGYQNSVLPAFFVGLLGAKLEKWLHKKIPDVLDLLLVPFLTFTVMSILALFVIGPIFHSVENYVLAGTKFVLNLPLGLSGLILGGVHQIIVVTGVHHIFNLLEAQLIAADGKDPFNAIITAAMTAQAGATLAVGVKTKNKKLKALAFPAALSAGLGITEPAIFGVNLRFGKPFIMGLIAGAAGGWLASILKLAGTGFGITIIPGTLLYLNGQIVKYLIMVIGTTALAFVLTYMFGYEDKDEKVVAEVSPLVEETDDNPTITQTSQLRAETIVSPLDGQVIALDTVSDPVFSSGIMGDGLAIKPSGNTIYSPVDGFVQIAFETGHAYGIKSDKGAEILIHIGIDTVTMNGTGFTSKVKADQKVKKGDILGTFDSAKIAEAGLDNTAMIIVTNTADFADVIPLVKEGVVTTGDMIIDVK

SEQ ID NO: 12011 - protein, 1017 aa, Streptococcus agalactiae
ATGACAAGTGATGGCAAGATTACAAAATTTGATAAAGTCCTTATTTCACAACCAAATGATGTCACTGAGCATTTTCGTGACCCTCAGATTTTCAATTATGATAATCAATTCTATGCTGTTATCGGGGCGCAAAATAGTAAAAAATGCGGATTCATTAAATTATATAAAGCACTTAATAATGACATCCATCATTGGGAGTTTGTGGGAGATTTAGATTTTGGTGGTACTGGATCTGAGTATATGATTGAATGTCCAAATATTATTTTGGTCAAAGGAAAACCTGTATTACTTTATAGTCCTCAAGGACTAGATAAAAACGAATTGGACTACCAAAACATTTATCCAAATACCTACAAAATCGGACAATATTTCGATGCTAACTCATCTAAGATAGTTGAACCATCCCCTATCTATAATTTAGATTATGGTTTTGAAGCCTATGCTACTCAAGGATTTAACACTTCTGATGGTCGTGCCTTTATCGTGAGTTGGATAGGCTTGCCAGATATTGATTATCCTAGCGATCAATTTGATTATCAAGGAGCTATGAGTTTAGTTAAAGAGTTAAGCATAAACAATGGGAACCTTTATCAATATCCCGTTCCTGCTATGAAAAATCTTCGTCAACATCAAGCAGAATTTAAAACACAACTTCAAACTAACAACACCTATGAATTAGAATTACTAGTTCCTAGAAACGATCTTTCTTCATTTGTTCTCTTTGCTAATCCGAAAGGACAAGGACTATCCATTACTATTGATACTGCAAAGGGGAAAGTTATCGTTGACCGCTCACAAGCCGGACAGCAGTACGCCACAGAATTTGGTACTAGTCGCCAGTGTGACATTCCAAAAGATGCTACTAGTGTCAATATTTTTGTCGATAAGTCCATCTTTGAAATCTTTATAAATAAAGGAGAAAAAGTATTTACGGGACGAGTCTTTCCAGATGCAGAACAATCAGGAATTCAACTAAAAGAAGGACACGTTCATGGTAAATATTTTGAATTAAAATAT

SEQ ID NO: 12012 - protein, 339 aa, Streptococcus agalactiae
MTSDGKITKFDKVLISQPNDVTEHFRDPQIFNYDNQFYAVIGAQNSKKCGFIKLYKALNNDIHHWEFVGDLDFGGTGSEYMIECPNIILVKGKPVLLYSPQGLDKNELDYQNIYPNTYKIGQYFDANSSKIVEPSPIYNLDYGFEAYATQGFNTSDGRAFIVSWIGLPDIDYPSDQFDYQGAMSLVKELSINNGNLYQYPVPAMKNLRQHQAEFKTQLQTNNTYELELLVPRNDLSSFVLFANPKGQGLSITIDTAKGKVIVDRSQAGQQYATEFGTSRQCDIPKDATSVNIFVDKSIFEIFINKGEKVFTGRVFPDAEQSGIQLKEGHVHGKYFELKY

SEQ ID NO: 12013 - protein, 960 aa, Streptococcus agalactiae
ATGGTTGCAAAATTAACAGATGTTGCTGCACTTGCCGGTGTTAGCCCAACGACTGTATCACGCGTTATTAACAAAAAAGGCTATTTATCTCAAAAAACAGTCACCAAAGTCAATGAAGCCATGAGAACCCTTGGTTATAAACCTAATAATTTAGCACGTAGCTTACAGGGAAAGTCCGCTAAATTAATTGGACTCATTTTCCCCAACATCCGTAACATTTTTTACGCTGAATTAATTGAACACCTTGAAATTGAGTTGTTTAAGCATGGTTATAAAACTATCTTATGTAATAGTGAAAAGGATCCTATCAAAGAAAAAGAATACCTCGAAATGCTAGGAGCAAATCAAGTAGACGGTATCATTTCAAGTAGTCACAACCTAGGAATTGATGATTACGAGAAAGTTGAGGCTCCCATAGTAGCATTCGATAGAAATTTAGCTCCACACATCCCTATCGTCTCATCTGATAATTTCTTTGGAGGAAAAATGGCTGCTCAAACCCTTAAAAAACATGGCTGTCAAAAGATGATTATGATTACAGGGAATGATAATTCAGATTCTCCTACTGGACTTAGGCGGCTAGGTTTTTCCTATGAATCAAAGGAATCCAAAGTTATCACAGTCACAAATGGGCTATCTAACATGAGACGTGAGATGGAATTAAAATCAATTATCTCAACTCACAAACCAGATGGTATTTTTACATCAGACGACTTAACTGCTTTATTAGTAATCAAACTTATCAGCCAACTAGGGTTGTCCATTCCAGAAGATATCAAAGTGATTGGATATGATGGTACAAGTTTCATTCAAGATTACGTCCCACATCTAACCACTATTAAACAACCTATTCGAGAAATTGCGCAATTGATGGTTGAAATACTCCTAGCTAAAATTGAGGGGCAAAAGACAAATAAGGATTATATTTTACCAGTCAGTCTCATCCCTGGTAGTAGTGTT

SEQ ID NO: 12014 - protein, 320 aa, Streptococcus agalactiae; identical to SEQ ID NO: 3092

SEQ ID NO: 12015 - protein, 432 aa, Streptococcus agalactiae
ATGACTAGTGTATTTAAAGATTCAAGACGTGATTTACGTGAACGTGCTTTTCAAACACTATTTAGCTTAGAAACTGGTGGAGAGTTTATTGATGCGGCTCACTTTGCTTATGGTTATGATAAAACAGTATCTGAAGACAAAGTTTTAGAGGTTCCAATCTTTTTACTTAATCTTGTTAATGGTGTTGTAGATCACAAGGATGAATTAGATACTTTGATTTCTAGTCACTTAAAATCAGGATGGAGCTTAGAACGTCTAACATTGGTTGATAAATCTCTCTTACGCTTAGGCCTCTATGAAATTAAATATTTTGATGAAACGCCTGATCGTGTAGCTCTAAATGAGATTATCGAGATTGCTAAAAAATATTCAGATGAGACGTCAGCAAAATTTGTCAATGGTTTATTAAGCCAATTTATAACAAATGAAAAT

SEQ ID NO: 12016 - protein, 144 aa, Streptococcus agalactiae; identical to SEQ ID NO: 3094

SEQ ID NO: 12017 - protein, 387 aa, Streptococcus agalactiae
ATGACAACTGAAAATCTTGGAGAAATTGTCATTTCACCACGTGTACTTGAGGTAATTACAGGTATTGCTGCAACTAAAGTTGATGGTGTTCATTCGTTACGTAACAAAGCGGTAACGGATAGCCTTAGTAAGAAATCTCTAGGTAGAGGTGTCTACCTTAAAAATGAAGAAGATGATACAGTAGCTGCAGATATTTATGTTTACTTGCAGTATGGTGTAAATGTACCAGCAGTTTCAATTGCTATTCAACAAGCTGTCAAAACAGCTGTATATGACATGGCAGAAGTAAAAATTTCTTCGGTCAATATCCATGTTGAAGGTATTGTTCCAGAGAAAACACCAAAACCAGACTTGAAGTCATTGTTTGATGAGGATTTCTTAGATGAC

SEQ ID NO: 12018 - protein, 129 aa, Streptococcus agalactiae; identical to SEQ ID NO: 3096

SEQ ID NO: 12019 - protein, 553 aa, Streptococcus agalactiae
ATGATTGAAGCAAGTAAGCTTAAAGCAGGCATGACTTTTGAAACGGCTGATGGGAAATTATCGTGTTCTTGAGCTAGCCACACAAACAGGTAAAGGTAACACAATCATGCGTATGAAATTGCGTGATGTTCGTACTGGTTCAACTTTTGATACAAGTTACCGTCCTGAAGAAAAATTTGAGCAAGCTATTATTGAAACTGTACCTGCTCAATACCTTTATAAGATGGATGATACAGCTTACTTCATGAATAATGAAACTTACGATCAATATGAAATTCCAACTGTTAACATTGAAAATGAATTACTCTACATTCTTGAAAACTCAGAAGTAAAAATTCAATTCTATGGAACAGAAGTTATTGGTGTTCAAATTCCAATAACTGTTGAATTGACAGTTGCTGAAACTCAACCATCAATCAAAGGTGCTACTGTAACTGGTTCAGGAAAACCTGCAACTATGGAAACAGGACTTGTTGTTAACGTTCCAGACTTTATTGAAGCTGGACAAAAGTTAGTAATCAATACAGCAGAAGGAACTTACGTTTCACGCGCC

SEQ ID NO: 12020 - protein, 186 aa, Streptococcus agalactiae
  VARIANT 20: Xaa = Any Amino Acid
MIEASKLKAGMTFETADGKXIRVLEASHHKPGKGNTIMRMKLRDVRTGSTFDTSYRPEEKFEQAIIETVPAQYLYKMDDTAYFMNNETYDQYEIPTVNIENELLYILENSEVKIQFYGTEVIGVQIPITVELTVAETQPSIKGATVTGSGKPATMETGLVVNVPDFIEAGQKLVINTAEGTYVSRA

SEQ ID NO: 12021 - protein, 144 aa, Streptococcus agalactiae
GTGAAGATGCTATTGATAGATGTCATGATACACTTATCAGAAGAAAACGAAAAAGGCTTTACTAAATTACAATTCTTTACTCGACAAATTGTGGTTGGTGTAAACTGGTATGTACTTCCCAAAATTGATAACTATTTCAACCCC

SEQ ID NO: 12022 - protein, 48 aa, Streptococcus agalactiae
MKMLLIDVMIHLSEENEKGFTKLQFFTRQIVVGVNWYVLPKIDNYFNP

SEQ ID NO: 12023 - protein, 90 aa, Streptococcus agalactiae
ATGGGGAATGGCATTGTGGGACGAAAACTTTTCAAACTTATTTTTATTTGGATTTATTTTTTCAAACAGTTTATTTTTTATAAAGTTCAT

SEQ ID NO: 12024 - protein, 30 aa, Streptococcus agalactiae
MGNGIVGRKLFKLIFIWIYFFKQFIFYKVH

SEQ ID NO: 12025 - protein, 228 aa, Streptococcus agalactiae
ATGGGAATAAAAAGTTATAGACGGGTTGAGCTTGTAGCAAAACTTAATTTTAGATATTATCTAGTTAGTATTAGTGGACGTTATTACATTATTGATTATGCCAATCCTAGTGATATAAAAGATTATTTTATAGGTATTTTTCCAGAAAGAGTAGAAAAATATCAAATTTATGATGTGAATGCGGATTATAAGACTTTTTTAGTAAACAAAAAAAGTCGCCTTTATCTT

SEQ ID NO: 12026 - protein, 76 aa, Streptococcus agalactiae
MGIKSYRRVELVAKLNFRYYLVSISGRYYIIDYANPSDIKDYFIGIFPERVEKYQIYDVNADYKTFLVNKKSRLYL

SEQ ID NO: 12027 - protein, 123 aa, Streptococcus agalactiae
TTGAAAACGGAAATAGAAACAAATAATCTTATTAATTTAGGATGGTTTCATGATAATGCTGTTTATTATGATATGAAAACGAAAAAATTATATAAATCTAATCTAAAAAAAATAGCACAGGTA

SEQ ID NO: 12028 - protein, 41 aa, Streptococcus agalactiae; identical to SEQ ID NO: 3100

SEQ ID NO: 12029 - protein, 144 aa, Streptococcus agalactiae
TTGTTGCTGACCTCAATAGATGTAAATCCAGTTTATGCTAATATGGCATTTGATTGGGTGTATGATAACTATAAAGATGATATCATCAATATGGACAAGGAACTATCAAAAATATTGGTAAGTCCATTTCAGCTAATAATAGTT

SEQ ID NO: 12030 - protein, 48 aa, Streptococcus agalactiae
MLLTSIDVNPVYANMAFDWVYDNYKDDIINMDKELSKILVSPFQLIIV

SEQ ID NO: 12031 - protein, 449 aa, Streptococcus agalactiae
ATGAATAGACTTTCTTGGGAAGATTATTTTATGGCAAATGCAGAGTTGATTTCTAAACGTTCTACCTGTGACCGTGCTTTGTTGGAGCTGTTTTAGTCAAAAATAATCGCATCATTGCTACAGGTTATAACGGAGGAGTCTCTGAGACAGATAACTGTAACGAAGTAGGACATTATATGGAAGATGGTCACTGTATTAGGACTGTTCATGCTGAGATGAATGCCCTTATTCAGTGTGCTAAAGAAGGTATTTCTACTAATAATACAGAAATTTATGTGACGCATTTTCCTTGTATCAATTGCACCAAGGCGCTCTTGCAAGCCGGGGTTAAGAAAATTACTTATAAAGCTAATTATCGCCCACACCCATTTGCTATTGAACTTATGGAAGCAAAAGGAGTTGCTTATGTTCAACATGATGTTCCAGAGGTAACACTAGGGATGGAAGAG

SEQ ID NO: 12032 - protein, 150 aa, Streptococcus agalactiae; identical to SEQ ID NO: 7818

SEQ ID NO: 12033 - protein, 1065 aa, Streptococcus agalactiae
ATGGGTTTTGAACAACGTCTAACTAGATGTCAAACAGCAATTTCACAATTATCATGTGACGCACTCTTAATAACGAATTTAACAAATATTTTTTATTTGACTGGTTTTTCAGGAACTAATGCAACGGTACTCATTAGTCCAAAACACCGGATTTTTGTTACAGATTCACGATACGCCTTGATAGCAAAGAATACTGTAAGAGAGTTTGATATTATCATTAGCAGAGAACCACTTGCGGCTATTTTGAAAATTATTCGAGATGACGCCTTGATGGCGATTGGTTTTGAAACTGATATCTCTTATCATATGTACAAACATATGGTGGAAGTTTTTGAAGATTATAGCTTGATAGAAGCTCCATCTGTTGTTGAAAAGTTACGTATGATTAAAGATGCAACAGAACTTGCGATCATCCGTCAAGCCTGTCGTATTTCGGACCAAGCTTTTTTAGATGTGTTGGATTTTATAAAACCTGATCGAACAACTGAATTGCAAGTTGCTAATTTTTTAGACTTTCGCATGAGAGAATTAGGAGCAACTAGTCCTTCATTTGATTTTATTGTAGCATCTGGACATCGATCAGCGATGCCACATGGGGTTGCGAGTCAGAAGACTATTCAATCGGGAGAAACTCTGACTTTAGATTTTGGTTGTTACTATCAGCACTATGTTAGTGATATGACACGTACGATTCATATCGGTCATGTCACTGATGAGGAACGCGGGATTTACGATATCGTTTTGAAAAGTAATCAAGCTATTATTGATAATGTAAAATCAGGAATGAAGCGTTGTGATTATGATTACTTGGCGCGACAAGTAATTGAAAATTCTGGATACGGTAATCATTTTACCCACGGTATAGGGCATGGTATGGGGCTTGATGTTCATGAAATTCCTTATTTTGGTAAGTCAGAGGGAGTGATTGCATCTGGGATGGTAGTGACTGACGAGCCAGGAATATATCTCGATAATAAATACGGTGTTCGTATTGAAGATGATTTATTAATAACGGAAACAGGTTGCGAAGTATTGACATCTGCACCTAAAGAATTAATTGTACTT

SEQ ID NO: 12034 - protein, 355 aa, Streptococcus agalactiae
MGFEQRLTRCQTAISQLSCDALLITNLTNIFYLTGFSGTNATVLISPKHRIFVTDSRYALIAKNTVREFDIIISREPLAAILKIIRDDALMAIGFETDISYHMYKHMVEVFEDYSLIEAPSVVEKLRMIKDATELAIIRQACRISDQAFLDVLDFIKPDRTTELQVANFLDFRMRELGATSPSFDFIVASGHRSAMPHGVASQKTIQSGETLTLDFGCYYQHYVSDMTRTIHIGHVTDEERGIYDIVLKSNQAIIDNVKSGMKRCDYDYLARQVIENSGYGNHFTHGIGHGMGLDVHEIPYFGKSEGVIASGMVVTDEPGIYLDNKYGVRIEDDLLITETGCEVLTSAPKELIVL

SEQ ID NO: 12035 - protein, 714 aa, Streptococcus agalactiae
ATGATTATTTTGATTATTGCACTGGCAACTATTTTGACATTTGTCACATGGATGTTGATTCATCCAAAAGCTCTACGGTATATTCTAGGTCTTCTCTCATTAGCTTTGTTATTTGCCTCAGTTTGGATGTTAACGGATCACTTTGTTAATCATACAGGTATGACTATTGAAACTAAGACAAAGACACGTGAGATTTATAGTGCGGGTGATAGTAAGGCTCCATTTGGTCTCATGATTTATAAAGAGATTGGTACTCATTCGAGTAATAATGTTTTAGTTTATCGAACAGATTTAAATCAAAAAGAAGCAAAAGCTCACTTTGTTCCAAATACAAAAGAAGTGATAAGTGCTGTGAAAAAATCTGCTAGCTACCAATTAGCTGATGTGAAAAAAGCCACAGTAACAACAAAGACTAAACGTTATGTGTGGAAAGATAGTCTTTCGAAACTACTTTATGGCTTTGCAGGTGAAAATGGAGAATTGATTTCTCAGAAATCAGTTGCTAAAATACCACGAAAAACTTGGCTAGTTTTGACTAAAGAGCAGTCTGAACACTTAGAATCGGCTGCGGCTAAACTAAAAGAACAGATGACTTTGCAAGCAAAAGTAAACCCAGTGAAAGCTATGGAGATAAAGACATTAGCTAAGACAAATCCAGAAGCGTATGCTGAGATGCAAGTTAAAGCATTAAAAGAAGCTCTTAATATAAAAGAA

SEQ ID NO: 12036 - protein, 238 aa, Streptococcus agalactiae
MIILIIALATILTFVTWMLIHPKALRYILGLLSLALLFASVWMLTDHFVNHTGMTIETKTKTREIYSAGDSKAPFGLMIYKEIGTHSSNNVLVYRTDLNQKEAKAHFVPNTKEVISAVKKSASYQLADVKKATVTTKTKRYVWKDSLSKLLYGFAGENGELISQKSVAKIPRKTWLVLTKEQSEHLESAAAKLKEQMTLQAKVNPVKAMEIKTLAKTNPEAYAEMQVKALKEALNIKE

SEQ ID NO: 12037 - protein, 447 aa, Streptococcus agalactiae
ATGATTGGTTTTACCATACTAGGTGTAGCGACGTTACCTTTTGTTTTCTTAACGACTACAACACCAGATCATTTTATTACCCTCTTATATGCAGTACGTATGTTTGGTATTGCTATGGTTATGATGCCATTGACAGCAAGTGCGATGAGCGCACTTCCACCACATGAGGCCGCACATGGAACAGCAGCTAATAATACTGCTCGTCAAATTGCTTCAGCAGTTGTAGTTGCATTGCTTTCAAGTGTTGCTCAAAATATTATCACCAACAATAAACCATCAAAAGATTTGCTAACAATGAATCCTTTAAAATATGCAAATCAGATGTTGAATGCTAGTCTTGATGGCTTCCATGTTTCTTTTGCCATTGGTTTTGTATTCGCGGTTCTTGGTTTACTGGTATCTCTTTTCCTGAGAAAAGGGAAAATTATTGAGACGGAAAAGGAGGTA

SEQ ID NO: 12038 - protein, 149 aa, Streptococcus agalactiae
MIGFTILGVATLPFVFLTTTTPDHFITLLYAVRMFGIAMVMMPLTASAMSALPPHEAAHGTAANNTARQIASAVVVALLSSVAQNIITNNKPSKDLLTMNPLKYANQMLNASLDGFHVSFAIGFVFAVLGLLVSLFLRKGKIIETEKEV

SEQ ID NO: 12039 - protein, 612 aa, Streptococcus agalactiae
ATGATCACCTTATTGTTGATTGCTACATTTGCAGGGGTGTTAAATCAGACAAGTTTGGGAACGGCTATCCCAACTTTGATGAATAGCTTTAACATTTCGTTGTCAACGGCTCAACAAGCAACAACATGGTTTTTATTAGCGAATGGGATTATGATTCCTGTTTCAGCTTATTTAGCGACACGTTTTTCAACAAAATGGTTGTATGTGACATCCTACGTTGTTTTACTTATTGGACTGTTAATGACGACGTTAGCACCTACATCTAACTGGAACCTTTTTTTAGTAGGACGTATTATTCAAGCGATTTCTGTAGGAATTTCTATGCCTTTGATGCAGGTTGTTATGGTGAATGTTTTTCCTCCAGAGCAGCGTGGTGCCGCTATGGGACTTAATGGTTTGGTGGTTGGTCTTGCCCCAGCTATTGGGCCTACATTAGCAGGGTGGATTTTAAAACAAGAATTTCATTTTGCAGGGCATGATTTGACATGGCGTGCAATTTTCCTTCTTCCTTTACTAATTTTAACGGTCACTACAATTTTATCCCCCTTTGTTCTAAAAGATGTGGTTGATAATAAGTCAGTTAAATTGGAAGTGCCCTTCCTTATCCTTTCA

SEQ ID NO: 12040 - protein, 204 aa, Streptococcus agalactiae
MITLLLIATFAGVLNQTSLGTAIPTLMNSFNISLSTAQQATTWFLLANGIMIPVSAYLATRFSTKWLYVTSYVVLLIGLLMTTLAPTSNWNLFLVGRIIQAISVGISMPLMQVVMVNVFPPEQRGAAMGLNGLVVGLAPAIGPTLAGWILKQEFHFAGHDLTWRAIFLLPLLILTVTTILSPFVLKDVVDNKSVKLEVPFLILS

SEQ ID NO: 12041 - protein, 2811 aa, Streptococcus agalactiae
ATGATAAGAGGAGCAAGAGCTCACAATTTAAAAAATATAAGTGTCGACATTCCACGAGACAAGTTAGTTGTCGTTACGGGACTATCAGGATCAGGTAAGTCTAGTTTGGCCTTTGACACTATCTATGCAGAAGGACAACGTCGTTACGTTGAAAGTCTTTCTGCTTACGCGCGCCAATTTTTGGGAAATATGGAAAAGCCTGATGTAGATTCTATTGATGGCCTTAGTCCAGCTATTTCTATTGATCAGAAAACAACAAGTAAGAATCCTCGCTCTACTGTTGGGACTGTAACAGAAATTAACGATTATTTACGTTTGCTTTATGCTCGTGTTGGAACTCCATATTGTATCAATGGTCACGGAGCCATCACAGCATCTTCTGTAGAGCAAATTGTGGATAAGGTACTATCGCTTCCAGAGCGAACAAAGATGCAAATTTTAGCCCCAATTATACGTCGAAAAAAAGGACAACACAAATCAACATTTGAGAAAATACAAAAAGATGGTTACGTTCGTGTTCGTATTGATGGTGATATTCACGATGTTACTGAGGTGCCTGAATTATTAAAAAGTAAGATGCACAATATTGATATTGTAGTAGATCGATTAATTAATAAAGAGGGCATTCGTTCCCGCTTATTTGATTCCGTTGAAGCGGCTCTACGTTTGTCGGATGGTTATGTCGTTATTGATACAATGGATGGCAATGAGTTATTGTTTTCAGAGCATTATTCTTGTCCTGAATGTGGTTTTACTGTTCCTGAATTAGAGCCACGCCTTTTTTCTTTTAATGCACCCTTTGGTTCTTGTCCGACCTGTGATGGCTTAGGAATTAAGTTAGAAGTAGATATAGATTTGGTTATTCCAGATAAAAGCAAGACCCTTAGAGAAGGGGCCTTAGTTCCTTGGAATCCAATTTCATCAAATTATTATCCAACGATGCTAGAGCAAGCTATGACTCAATTTGGTGTTGATATGGATACGCCATTTGAAAAATTAAGCAAGGCGGAGCAGGACCTAGCCCTATATGGTTCAGGCGAACGAGAGTTCCATTTCCATTATATTAACGATTTTGGAGGCGAGAGAAATATTGATTTGCCTTTTGAAGGGGTTGTCAATAATATTAATCGTCGTTACCATGAAACTAATAGCGATTATACACGCAATGTTATGCGAGAATATATGAACGAGCTAAAATGTAACACTTGTCATGGCTATCGTCTCAATGATCAAGCACTTTGCGTAAGAGTTGGGGGAGAAGAAGGTCTTAATATTGGGCAAGTCTCAGATTTATCGATAGCAGACCATTTAGAACTTTTAGAAACGTTGCGTTTATCTTCAAATGAACAATTAATTGCTCGACCAATTATCAAAGAAATCCATGACCGCCTAAGTTTCTTAAATAATGTTGGGCTTAATTATTTAAATCTGTCACGTTCTGCAGGAACACTTTCCGGGGGCGAGAGTCAACGTATTCGTTTGGCTACTCAAATTGGGTCTAATTTATCAGGTGTCCTTTATGTACTTGATGAGCCGTCCATTGGACTTCATCAGCGAGACAATGACCGTTTGATTGATAGTCTTAAGAAAATGCGTGATTTGGGTAATACGCTTATTGTTGTTGAACATGATGAAGATACAATGATGGCAGCTGATTGGTTAATCGATGTGGGACCTGGTGCTGGTGCGTTTGGTGGTGAGATTGTGGCCTCTGGCACACCGAAGCAAGTAGCTAAAAATACTAAATCCATTACAGGACAATATTTGTCAGGTAAGAAAGTGATTCCTGTGCCATCTGAACGAAGAGTAGGCAATGGTCGCTTTTTAGAAATCAAAGGTGCGGCAGAAAACAACCTACAAAATTTAGATGTCAAGTTCCCTCTCGGTAAATTTATTGCCGTAACTGGTGTCTCAGGTTCTGGAAAATCAACCTTAATTAATAGTATTTTGAAAAAAGCTGTTGCGCAGAAGCTTAACCGTAACTCAGATAAACCAGGTAAATATGTTTCTTTAGAAGGCATTGAATATGTTGATCGATTGATTGATATTGACCAAAGTCCAATTGGTCGGACTCCACGTTCTAATCCCGCAACCTATACAGGTGTTTTTGATGATATTCGTGATCTTTTTGCTCAAACTAATGAGGCAAAAATTCGAGGTTATAAAAAAGGACGCTTCTCATTTAACGTCAAAGGTGGACGTTGTGAGTCTTGTTCTGGCGATGGTATCATCAAAATTGAGATGCATTTTTTACCAGATGTCTACGTTCCTTGTGAGGTATGCCATGGCACGCGCTATAATAGTGAGACTCTGGAAGTACATTATAAAGAAAAAAATATTGCACAAATTCTTGATATGACAGTGAATGATGCAGTTACATTTTTTGCAGCTATTCCTAAAATTGCTCGTAAGTTACAGACTATTAAGGATGTTGGTTTGGGATATGTCACTTTGGGGCAACCAGCTACAACCTTATCAGGAGGAGAAGCTCAGCGAATGAAGCTGGCAAGTGAATTACATAAGCGTTCGACAGGTAAGAGTCTTTACATATTAGATGAACCAACAACGGGGCTTCATGCAGATGATATTGCTCGTTTACTTAAGGTTTTGGATCGTTTTGTAGATGATGGTAATACAGTGCTTGTTATTGAGCATAACCTTGATGTTATTAAAACTGCTGACCACATTATTGATCTCGGCCCTGAAGGAGGTATTGGTGGCGGACAAATTGTAGCTATCGGAACACCAGAAGAGGTTGCTGAAAATTCTAAATCCTATACAGGATATTATTTAAAAGAGAAGTTAGCAAGA

SEQ ID NO: 12042 - protein, 937 aa, Streptococcus agalactiae
MIRGARAHNLKNISVDIPRDKLVVVTGLSGSGKSSLAFDTIYAEGQRRYVESLSAYARQFLGNMEKPDVDSIDGLSPAISIDQKTTSKNPRSTVGTVTEINDYLRLLYARVGTPYCINGHGAITASSVEQIVDKVLSLPERTKMQILAPIIRRKKGQHKSTFEKIQKDGYVRVRIDGDIHDVTEVPELLKSKMHNIDIVVDRLINKEGIRSRLFDSVEAALRLSDGYVVIDTMDGNELLFSEHYSCPECGFTVPELEPRLFSFNAPFGSCPTCDGLGIKLEVDIDLVIPDKSKTLREGALVPWNPISSNYYPTMLEQAMTQFGVDMDTPFEKLSKAEQDLALYGSGEREFHFHYINDFGGERNIDLPFEGVVNNINRRYHETNSDYTRNVMREYMNELKCNTCHGYRLNDQALCVRVGGEEGLNIGQVSDLSIADHLELLETLRLSSNEQLIARPIIKEIHDRLSFLNNVGLNYLNLSRSAGTLSGGESQRIRLATQIGSNLSGVLYVLDEPSIGLHQRDNDRLIDSLKKMRDLGNTLIVVEHDEDTMMAADWLIDVGPGAGAFGGEIVASGTPKQVAKNTKSITGQYLSGKKVIPVPSERRVGNGRFLEIKGAAENNLQNLDVKFPLGKFIAVTGVSGSGKSTLINSILKKAVAQKLNRNSDKPGKYVSLEGIEYVDRLIDIDQSPIGRTPRSNPATYTGVFDDIRDLFAQTNEAKIRGYKKGRFSFNVKGGRCESCSGDGIIKIEMHFLPDVYVPCEVCHGTRYNSETLEVHYKEKNIAQILDMTVNDAVTFFAAIPKIARKLQTIKDVGLGYVTLGQPATTLSGGEAQRMKLASELHKRSTGKSLYILDEPTTGLHADDIARLLKVLDRFVDDGNTVLVIEHNLDVIKTADHIIDLGPEGGIGGGQIVAIGTPEEVAENSKSYTGYYLKEKLAR

SEQ ID NO: 12043 - protein, 669 aa, Streptococcus agalactiae
ATGACTTTACAAGACTTAACTAAAAAGAATCAAGAGTTTGTTCATATTGCAACTAATCAACTTTTAGCTGATGGAAAATCAGATGCAGAAATCAAAGCTATTTTAGAAGAACATCTCCCAGAGATTATAGATAATCAGAAAAAAGGAATTACCGCACGCTCACTCTTAGGAGCACCAACTACTTGGGCAGCCTCATTCACTGAGCGACCTGAGGATAAAGCTAGAGTATCTGTACAAAAAAATACCAATCCTTGGTTGATGTGGTTAGATACTTCCTTACTATTTCTTGGCTTAGTAACTGCTTTGAATGGATTAATGTTGTTATTTGGTCAATCTAATGTCAATACAGGGCTTATTTCAATTTTAACTCTTGGTTTTGGTGGTGGTGCGGCCATGTACGTTACTTATTACTATATTTATCGCCATATGGGTAAACCAAAATCTGAAAGACCAGGCTGGCTTAAATCTTTCGCAGTACTGGCACTAGTTATGTTAGTTTGGTTTGCCTTATTTGCAGTAGTACCTCTTCTACCTGCCACTATTAATCCTAAACTTCCTGAGGCTGTTTTGTTTATTATTGCTTTAGCATCGTTTAGTTTGCGCTTTTATTTACAACGTAAATATAATATTCAAAGCTCAATGGCACCAGTGGCACCACAACAAAGAAGA

SEQ ID NO: 12044 - protein, 223 aa, Streptococcus agalactiae
MTLQDLTKKNQEFVHIATNQLLADGKSDAEIKAILEEHLPEIIDNQKKGITARSLLGAPTTWAASFTERPEDKARVSVQKNTNPWLMWLDTSLLFLGLVTALNGLMLLFGQSNVNTGLISILTLGFGGGAAMYVTYYYIYRHMGKPKSERPGWLKSFAVLALVMLVWFALFAVVPLLPATINPKLPEAVLFIIALASFSLRFYLQRKYNIQSSMAPVAPQQRR

SEQ ID NO: 12045 - protein, 687 aa, Streptococcus agalactiae
ATGACTATTCCTATGGGCATTATCGTTACTGACAACGCTGTTATTACTACTTGCCTAGAACATTTGACGCTGTTTGATCACTTTTATAGACGACGTGTCAAAAATTTTTATACCTTTATGAAGACACGTTTTGTTTTCCAATTGCTTTATCGCAATGCCGAATTATACTTACAGGCTTTGCGTACTATCGATAGGCAGAGCGATAAAATTGAAGCACAACTAGAGAGTGCAACTCGAAATGAGCAATTGATCGACATGATGGAATTGGAAAAATCTATTGTCTATCTAAAGGCCTCTTTAAAATTTAATGAGCGAATCGTCAAAAAATTGACCAGTAGTACCAGTAGTTTAAAAAAATACATTGAAGATGAAGATCTGCTTGAAGATACATTGATCGAAACTCAGCAGGCTATTGAAATGGCAAATATCTATGAAAATGTCTTAAATGCCATGACAGAAACGACTGCTTCAATCATCGGTAATAATCAGAATACCATTATGAAAACCTTAGCCCTAGTAACCATGACATTGGATATTCCAACGGTTATTTTTTCGGCGTATGGGATGAACTTTCAAAATAATTGGATGCCTTTGAATGGTCTCGCACATGGATTTATCTATGTTGTTCTTTTGGCCTTTTTGATGAGTTCATTTGTTGTATTTTATTTTATTCGTAAAAAATGGTTT

SEQ ID NO: 12046 - protein, 229 aa, Streptococcus agalactiae
MTIPMGIIVTDNAVITTCLEHLTLFDHFYRRRVKNFYTFMKTRFVFQLLYRNAELYLQALRTIDRQSDKIEAQLESATRNEQLIDMMELEKSIVYLKASLKFNERIVKKLTSSTSSLKKYIEDEDLLEDTLIETQQAIEMANIYENVLNAMTETTASIIGNNQNTIMKTLALVTMTLDIPTVIFSAYGMNFQNNWMPLNGLAHGFIYVVLLAFLMSSFVVFYFIRKKWF

SEQ ID NO: 12047 - protein, 237 aa, Streptococcus agalactiae
ATGGCTCAACAACGTCGTGGCGGATTCAAACGCCGTAAAAAAGTTGATTATATCGCAGCTAACAAGATTGAATATGTTGATTACAAAGATACAGAGCTTCTTAGCCGTTTCGTTTCAGAACGTGGAAAAATTTTACCACGTCGTGTAACAGGAACTTCAGCTAAAAACCAACGTAAAGTAACAACAGCAATCAAACGTGCTCGTGTTATGGCTCTTATGCCTTACGTAAATGAAGAT

SEQ ID NO: 12048 - protein, 79 aa, Streptococcus agalactiae; identical to SEQ ID NO: 3120

SEQ ID NO: 12049 - protein, 489 aa, Streptococcus agalactiae
ATGATTAATAATGTAGTACTTGTAGGTCGCATGACCCGTGATGCAGAACTTCGTTATACACCAAGTAATCAAGCGGTAGCCACTTTTTCACTTGCAGTTAATCGTAATTTTAAAAATCAATCTGGCGAACGTGAGGCTGATTTTATTAACTGTGTTATTTGGCGCCAACAAGCTGAAAACTTGGCTAACTGGGCAAAAAAAGGTGCTTTGGTTGGAATTACAGGTCGTATCCAAACACGTAATTATGAAAACCAACAAGGTCAACGTGTCTATGTAACAGAAGTTGTTGCGGAAAGTTTCCAATTATTGGAAAGTCGTGCTACACGAGAAGGTGGTTCATCTAACTCTTATAATAACGGTGGCTATAACAATGCTCCGTCAAATAATAGTTATTCAGCTTCTTCTCAACAAACGCCTAATTTTAGTCGTGATGAGAGTCCGTTTGGTAACTCAAATCCAATGGATATTTCAGATGATGATCTACCATTC

SEQ ID NO: 12050 - protein, 163 aa, Streptococcus agalactiae
MINNVVLVGRMTRDAELRYTPSNQAVATFSLAVNRNFKNQSGEREADFINCVIWRQQAENLANWAKKGALVGITGRIQTRNYENQQGQRVYVTEVVAESFQLLESRATREGGSSNSYNNGGYNNAPSNNSYSASSQQTPNFSRDESPFGNSNPMDISDDDLPF

SEQ ID NO: 12051 - protein, 285 aa, Streptococcus agalactiae
ATGGCTAAATACGAAATTCTTTATATTATTCGTCCAAACATTGAAGAAGAAGCTAAAAACGCTTTGGTAGCACGTTTTGATTCTATCTTATCTGACAACGGTGCAACTGTTGTTGAATCAAAAGATTGGGAAAAACGTCGTCTTGCATACGAAATCCAAGATTTCACTGAAGGACTTTACCATATCGTTAACGTTGAAGCTGAAGATGCAGTAGCTCTTAATGAGTTTGACCGTCTTTCAAAAATCAACGGTGACATTCTTCGTCACATGATCGTTAAAGTAGAC

SEQ ID NO: 12052 - protein, 95 aa, Streptococcus agalactiae; identical to SEQ ID NO: 3124

SEQ ID NO: 12053 - protein, 1121 aa, Streptococcus agalactiae
ATGTGGCCTGAAGATAGGATCGCTTCTTTTCGTCGCACACTTTTAGGGTGGTATGATCAGAAAAACGTGATCTCCCTTGGCGAAGAACTACTAATCCATACTATATTTGGGTTTCTGAAATCATGTTGCAACAAACACAAGTTAATACGGTAATCCCTTATTATAAACGTTTTCTAGAGTGGTTTCCTCAAATAAAAGATTTGGCAGACGCTCCTGAAGAACAATTACTAAAGGCATGGGAGGGACTAGGCTATTATTCTCGGGTGCGTAATATGCAAAAGGCTGCACAGCAAGTGATGGTTGATTTTGGTGGCATATTTCCTCACACTTATGATGATATTGCTTCATTAAAAGGGATTGGTCCTTATACTGCAGGTGCTATCGCCAGCATCTCATTCAACTTACCAGAGCCTGCTGTTGATGGTAATGTGATGCGTGTCATGGCTCGTTTGTTTGAAGTTAATTATGACATCGGTGACCCTAAAAATCGTAAAATTTTTCAAGCTATTATGGAAATACTAATTGACCCTGACAGACCCGGTGATTTTAACCAAGCACTTATGGATCTGGGTACAGACATCGAATCCGCTAAGACACCTAGACCTGATGAAAGCCCTATTCGTTTCTTTAATGCTGCTTATTTGAATGGTACTTATGGTAAATACCCCATAAAAAATCCTAAGAAAAAGCCTAAACCAATGCGAATTCAGGCTTTTGTCATTCGTAACCAAAATGGCCAGTATCTACTGGAGAAAAATACTAAAGGGAGACTTCTAGGAGGATTTTGGTCATTTCCTATTATCGAAACGTCACCTCTTTCTCAACAATTAGATTTATTTGATGACAATCGATCCAACCCCATAATCTGGCAAACCCAAAATGAAACTTTCCAAAGAGAATATCAATTAAAGCCCCAATGGACTGATAATCACTTTCCAAATATTAAGCACACTTTTAGTCACCAGAAGTGGACAATAGAACTCATAGAGGGGGTGGTCAAAGCAACAGATTTACCTAATGCTCCTCACCTAAAGTGGGTAGCAATTGAGGACTTTTCTCTGTATCCCTTTGCAACACCACAAAAGAAAATGCTAGAGAACTACTTAAAACAGAAAAATGCT

SEQ ID NO: 12054 - protein, 374 aa, Streptococcus agalactiae
  VARIANT 20: Xaa = Any Amino Acid
MWPEDRIASFRRTLLGWYDXEKRDLPWRRTTNPYYIWVSEIMLQQTQVNTVIPYYKRFLEWFPQIKDLADAPEEQLLKAWEGLGYYSRVRNMQKAAQQVMVDFGGIFPHTYDDIASLKGIGPYTAGAIASISFNLPEPAVDGNVMRVMARLFEVNYDIGDPKNRKIFQAIMEILIDPDRPGDFNQALMDLGTDIESAKTPRPDESPIRFFNAAYLNGTYGKYPIKNPKKKPKPMRIQAFVIRNQNGQYLLEKNTKGRLLGGFWSFPIIETSPLSQQLDLFDDNRSNPIIWQTQNETFQREYQLKPQWTDNHFPNIKHTFSHQKWTIELIEGVVKATDLPNAPHLKWVAIEDFSLYPFATPQKKMLENYLKQKNA

SEQ ID NO: 12055 - protein, 591 aa, Streptococcus agalactiae
ATGGAAATTGGTCAGCAAATTATTCGCTACCGTAAACAACAAGCGCTCTCGCAAGAAGAATTAGCCGAGAAAGTCTATGTAAGCCGTCAGAGCATATCTAACTGGGAAAATGACAAAACTTACCCAGACATCCATAGCCTCTTACTCCTAAGTCAAATTTTTCAAGTGAGCTTAGACCAACTAATTAAAGGAGACATTGAGAAAATGAAATATACCATCACTCAGGTTGATAAAAAGAATTTTGAACGAGATACCAAAGTAATGGTAACATTGATGATACTATTAATGATTTCAAGTTATCCATTAGTCTATTTCTTAGAGTGGCTAGGACTTGGCATTTTTGTTTTATTATCGATAATTACTATGACTTATGCTAATCGTGTGGAACGTTTTAAGAAAAAATATGATGTGCAAACTTATAAGGAAATCCTAGCTGTTTCAAATGGAAAATTATTAGACGAAATCGAAAAACGGGAAGAAAGAGCAAAACTTCCTTATCAGAAACCCCTTATTGTCACTGTATTTTTCCTCATTACTATTGCCACCTTTTTTGCAAGTCGTTTTATTTTTACATGGTTGTTCCATTTAAGT

SEQ ID NO: 12056 - protein, 197 aa, Streptococcus agalactiae
MEIGQQIIRYRKQQALSQEELAEKVYVSRQSISNWENDKTYPDIHSLLLLSQIFQVSLDQLIKGDIEKMKYTITQVDKKNFERDTKVMVTLMILLMISSYPLVYFLEWLGLGIFVLLSIITMTYANRVERFKKKYDVQTYKEILAVSNGKLLDEIEKREERAKLPYQKPLIVTVFFLITIATFFASRFIFTWLFHLS

SEQ ID NO: 12057 - protein, 312 aa, Streptococcus agalactiae
ATGGCATTAGAAGTAACAGATGCTACATTTGTAGAAGAAACTAAAGAAGGTTTAGTACTCATTGATTTTTGGGCAACTTGGTGTGGTCCATGTCGTATGCAAGCACCAATTTTAGAACAGTTATCTCAAGAAATCGATGAAGATGAACTCAAAATTTTGAAAATGGATGTTGATGAAAATCCGGAAACTGCTCGTCAGTTTGGTATTATGTCAATTCCAACATTGATGTTTAAAAAAGACGGAGAAGTGGTTAAACAAGTTGCAGGTGTTCATACTAAAGACCAACTGAAAGCTATTATTGCTGAATTGAGT

SEQ ID NO: 12058 - protein, 104 aa, Streptococcus agalactiae; identical to SEQ ID NO: 3130

SEQ ID NO: 12059 - protein, 498 aa, Streptococcus agalactiae
ATGGAATCATATGAACAATTTTATGCCAAACTATCTCAACCTTTTAGAAAAAAACCACAGTTAATAATTCTTTTAAATTTTTTACTAAAAATAGTCACAGGAATGATGTACATACTCTACCCATCTTTTCTGATATTTACTCTTTGGCAAGGGATGACATTTCAATTATGGTTAAGGATATTAATTATCCCTGCTGTTGGCTTTATAGCTTTGTCTTACATTAGGAAACGCCTTGATTTTCCACGACCATATGAAAAATGGAATATTAAACCTTTAATTTATAAGGATACTGAGGGAAGGTCGATGCCTAGCAGACATGTTTTTTCAGCTACGATGATTAGTATGTGTTTGTTACGATATTATGTTTACTTTGGAATAGTTTGTTTAATATTATCGGTTCTATTGGCAATTTGCCGTGTGATAGCAGGTGTTCACTATCCTAAGGATGTTATTGTAGGTTACCTTATTGGCTTGATTTTAGGGCTTTGTTTATTTATT

SEQ ID NO: 12060 - protein, 166 aa, Streptococcus agalactiae
MESYEQFYAKLSQPFRKKPQLIILLNFLLKIVTGMMYILYPSFLIFTLWQGMTFQLWLRILIIPAVGFIALSYIRKRLDFPRPYEKWNIKPLIYKDTEGRSMPSRHVFSATMISMCLLRYYVYFGIVCLILSVLLAICRVIAGVHYPKDVIVGYLIGLILGLCLFI

SEQ ID NO: 12061 - protein, 2336 aa, Streptococcus agalactiae
ATGAATAACAAGATTTTAGAACAGTTAGAATTTAACAAAGTTAAGAATTGATATTACCTTATCTCAAGACAGAACAATCACAAGAAGAATTATCAGAGCTGGAGCCGATGACGGAGGCTCCTAAAATAGAAAAAAGTTTTAATGAAATTTCTGACATGGAACAGATTTTTGTTGAACATCACTCATTTGGCATAGTCAGCCTAAGTTCAATCTCTGAGAGTTTAAAACGCTTAGAGCTTTCAGCTGATCTTAATATCCAAGAACTTTTGGCTATCAAAAAAGTTTTACAGAGTTCTTCGGATATGATTCACTTTTATTCTGATTTGGATAATGTTTCTTTCCAATCTTTGGATCGTTTGTTTGAAAATTTGGAACAATTCCCTAATCTGCAAGGGTCTTTTCAAGCTATCAATGATGGTGGTTTTTTAGAACATTTTGCGAGTCCAGAATTAGAGCGTATCCGTCGTCAATTAACAAACAGTGAACGACGGGTTCGTCAGATTTTACAGGATATGCTTAAGGAAAAAGCAGAGCTTTTATCAGAGAATCTAATCGCTAGTCGTAGTGGACGAAGTGTCCTACCAGTAAAAAATACTTATCGGAATCGTATTTCTGGTGTGGTTCATGACATCTCTTCTTCAGGAAGTACTGTTTATATTGAGCCTCGTGCTGTAGTTACACTAAACGAAGAGATAACGCAGCTTAGAGCTGACGAACGTCATGAAGAAAGTCGTATTTTACACGCATTTTCAGACTTGTTAAGACCCCATGTCGCCACTATTAGAAATAATGCATGGATTCTTGGGCATCTTGATTTTGTAAGGGCTAAATATCTTTTTATGACTGATAATAAGGCGACGATACCTGAGATTTCTAATGACAGCACGTTAGCATTAATCAATGTTCGTCATCCTCTGTTAAGTAACCCTGTGGCTAATGACTTACATTTTGATCAAGATTTAACTGCAATTGTCATCACTGGTCCCAATACTGGTGGTAAGACGATTATGCTAAAAACACTCGGTTTAGCACAATTAATGGGACAGTCTGGTTTGCCAGTATTAGCGGATAAAGGTAGTAAAATTGCAGTATTTAACAATATCTTTGCAGATATTGGCGATGAGCAATCTATTGAACAAAGTCTATCAACTTTTTCTAGTCATATGACGCATATAGTCAGTATTTTAAACGAGGCTGACCACAATAGTTTAGTTCTCTTCGATGAACTGGGAGCAGGAACGGATCCTCAAGAAGGTGCTAGTTTGGCTATGGCTATTTTAGAACACCTTAGGTTAAGTAATATCAAAACGATGGCGACCACGCACTATCCAGAATTAAAAGCTTATGGGATTGAGACAAATTTTGTAGAGAATGCGAGCATGGAATTTGATGCCGAAACGCTTAGCCCTACGTATCGCTTTATGCAAGGAGTTCCTGGACGATCAAATGCATTTGAAATTGCTTCTCGCCTTGGTTTAGCTCCATTTATTGTTAAACAAGCTAAGCAGATGACAGATTCTGACTCAGATGTTAACCGTATTATTGAACAGTTAGAGGCACAGACACTTGAGACACGTAGAAGACTGGATCATATTAAAGAAGTTGAACAAGAAAACCTCAAATTCAATCGTGCGGTTAAGAAACTCTATAATGAATTTTCACATGAGCGCGATAAAGAGTTAGAAAAAATCTATCAAGAAGCTCAAGAAATTGTAGATATGGCTTTGAATGAGAGTGATACTATCTTAAAAAAACTCAATGATAAGAGTCAATTAAAACCTCACGAAATTATAGATGCTAAGGCACAAATAAAAAAATTAGCACCTCAAGTTGATTTATCAAAAAATAAAGTCTTAAATAAGGCTAAAAAAATCAAAGCAGCTCGTGCTCCTAGAATTGGTGATGATATTATAGTGACTAGCTATGGACAGCGAGGTACTTTAACTAGTCAATTAAAAGATGGTCGTTGGGAAGCACAAGTGGGAATTATCAAAATGACATTAACACAAGATGAATTTACCCTTGTTAGAGTCCAAGAAGAACAGAAAGTCAAAAGTAAACAGATTAATGTGGTTAGAAAGGCTGATAGTTCTGGACCAAGAGCTCGACTTGATCTTAGAGGTAAAAGATACGAAGAAGCTATGCAAGAGTTAGATAATTTTATTGATCAAGCATTGCTTAACAATATGGGACAAGTTGATATCATTCATGGTATTGGTACAGGCGTTATCCGTGAGGGAGTGACAAAATATCTTCGTCGTAATAAGCACGTTAAGCATTTTGCTTATGCCCCACAAAATGCAGGGGGATCTGGCGCCACAATTGTAACGTTAGGG

SEQ ID NO: 12062 - protein, 779 aa, Streptococcus agalactiae
MNNKILEQLEFNKVKELILPYLKTEQSQEELSELEPMTEAPKIEKSFNEISDMEQIFVEHHSFGIVSLSSISESLKRLELSADLNIQELLAIKKVLQSSSDMIHFYSDLDNVSFQSLDRLFENLEQFPNLQGSFQAINDGGFLEHFASPELERIRRQLTNSERRVRQILQDMLKEKAELLSENLIASRSGRSVLPVKNTYRNRISGVVHDISSSGSTVYIEPRAVVTLNEEITQLRADERHEESRILHAFSDLLRPHVATIRNNAWILGHLDFVRAKYLFMTDNKATIPEISNDSTLALINVRHPLLSNPVANDLHFDQDLTAIVITGPNTGGKTIMLKTLGLAQLMGQSGLPVLADKGSKIAVFNNIFADIGDEQSIEQSLSTFSSHMTHIVSILNEADHNSLVLFDELGAGTDPQEGASLAMAILEHLRLSNIKTMATTHYPELKAYGIETNFVENASMEFDAETLSPTYRFMQGVPGRSNAFEIASRLGLAPFIVKQAKQMTDSDSDVNRIIEQLEAQTLETRRRLDHIKEVEQENLKFNRAVKKLYNEFSHERDKELEKIYQEAQEIVDMALNESDTILKKLNDKSQLKPHEIIDAKAQIKKLAPQVDLSKNKVLNKAKKIKAARAPRIGDDIIVTSYGQRGTLTSQLKDGRWEAQVGIIKMTLTQDEFTLVRVQEEQKVKSKQINVVRKADSSGPRARLDLRGKRYEEAMQELDNFIDQALLNNMGQVDIIHGIGTGVIREGVTKYLRRNKHVKHFAYAPQNAGGSGATIVTLG

SEQ ID NO: 12063 - protein, 540 aa, Streptococcus agalactiae
ATGCTATCATTGCTTTTGCTGATTATTGTTATTTGGCATTTTTATATTGGCTACAGTAGAGGTATTTTTTTACAAGTCTTTTACGTGTTAATGTCAATGGTATCTTTGATGATTGCTAGTCAATTTTACCAAGAATTAGCTAGTCAGATTACGTTATGGGTACCGTATTCTAATCCTGTACAAGGAGTAGAAGTTTACTTTTTTAAAGATATTAGCAAATTTCAATTGAGTCATGTTTATTATGCAGGTGTTGCCTTTGTTTTTATCTACAGTTTATCCTACTTAGTAGGTCGCTTGCTAGGTGTTTTACTACATTTAGCACCAGTTGAACATTTTGATAGCTTGCAAAATAATATTATTAGTGGTTTTTTAGCCGTTCTGGTTTGTCTCTTATTTATGAGTATGTGTTTGACTATTCTGGCAACAGTCCCTATGTCATTTGTTCAAGAAAAGTTATGGAATAGTCTGTTTGTTAGATTTTTAATTAACGACTTACCATTCTTCTCTCAGTTTTTGGTAAGGACTTGGGCGGTAGGTCTT

SEQ ID NO: 12064 - protein, 180 aa, Streptococcus agalactiae; identical to SEQ ID NO: 3136

SEQ ID NO: 12065 - protein, 309 aa, Streptococcus agalactiae; identical to SEQ ID NO: 7849

SEQ ID NO: 12066 - protein, 103 aa, Streptococcus agalactiae; identical to SEQ ID NO: 3138

SEQ ID NO: 12067 - protein, 891 aa, Streptococcus agalactiae
ATGAACACAATCGTCATGCAAGCAGATAAAAAATTGCAAGAAAAGATAAGAACCGATTTAGCTCAACATCATATAAGTAATAATAATCCTTATGTGGTATTTTCAGCTAAAATATCAGGAACTACTGTTCTTTTATATACTTCTGGAAAACTTGTCTTCCAGGGTTCTAACGCTTCACATATCGCCCAAAAGTATGGTTATATTGAGCAAAAAGAAAGTTGTTCCTCTGAGAGTCAAGATATTCCCATAATTGGTACTGATGAAGTGGGAAATGGCTCTTACTTTGGTGGACTGGCAGTGGTAGCTAGTTTTGTAACTCCTAAGGACCATGCTTACCTCAAAAAATTAGGTGTTGGTGATTCAAAAACACTTACTGATCAAAAAATTAAGCAAACCGCGCCTCTTTTGGAAAAAGCAATTCCACACAAAGCATTATTGTTATCGCCTCAAAAATATAATCAAGTGGTTGGTCCAAATAACAAACATAATGCTGTCTCCGTAAAAGTTGCTTTACACAACCAAGCTATCTTCCTTCTTCTTCAAGATGGTTTTGAACCAGAAAAAATCGTTATTGATGCTTTTACTAGCTCCAAAAACTATCAAAACTATTTGAAAAATGAAAAGAATCAATTTAAACAAACGATTACTCTGGAAGAAAAAGCTGAAAATAAATATCTAGCTGTAGCGGTCAGTTCTATTATTGCACGTAATCTATTCTTAGAAAATCTTAACAAATTAAGCGACGACGTAGGATATAAACTTCCAAGTGGAGCTGGTCACCAATCTGATAAGGTCGCTAGCCAATTGCTCAAAGCTTATGGTATCTCTTCGCTTGAACACTGCGCAAAACTTCATTTTGCCAACACCAAAAAAGCACAAGCATTATTAAAA

SEQ ID NO: 12068 - protein, 297 aa, Streptococcus agalactiae
MNTIVMQADKKLQEKIRTDLAQHHISNNNPYVVFSAKISGTTVLLYTSGKLVFQGSNASHIAQKYGYIEQKESCSSESQDIPIIGTDEVGNGSYFGGLAVVASFVTPKDHAYLKKLGVGDSKTLTDQKIKQTAPLLEKAIPHKALLLSPQKYNQVVGPNNKHNAVSVKVALHNQAIFLLLQDGFEPEKIVIDAFTSSKNYQNYLKNEKNQFKQTITLEEKAENKYLAVAVSSIIARNLFLENLNKLSDDVGYKLPSGAGHQSDKVASQLLKAYGISSLEHCAKLHFANTKKAQALLK

SEQ ID NO: 12069 - protein, 591 aa, Streptococcus agalactiae
ATGAAAGAATTTATTAAAGAATGGGGTATCTTTATCCTCATCCTCTCACTTTTTTTACTATCGCGTATCTTTTTATGGCAATTCGTTAAAGTTGACGGACACTCCATGGATCCAACTTTAGCTGACAAGGAACAGCTAGTAGTTCTCAAACAAACAAAAATCAATCGATTCGATATTGTAGTGGCTAACGAAGAAGAAGGCGGCCAAAAGAAAAAAATTGTTAAACGTGTCATTGGTATGCCGGGTGATGTCATCAAATATAAAAATGACACCTTAACTATTAACAATAAAAAAACAGAAGAACCTTACCTCAAGGAATATACTAAATTATTTAAAAAGGATAAATTACAGGAAAAATATTCGTATAACCCACTTTTCCAAGACCTAGCACAAAGCTCTACCGCTTTCACTACTGACAGCAATGGCAGCAGCGAATTTACTACTGTCGTGCCTAAAGGCCACTACTATCTTGTTGGTGATGACCGAATTGTCTCTAAAGATAGTCGTGCCGTCGGTCCCTTCAAAAAATCAACGATTGTGGGAGAGGTTAAATTCCGCTTCTGGCCAATTCGTCGTTTTGGAACTATCAAC

SEQ ID NO: 12070 - protein, 197 aa, Streptococcus agalactiae
MKEFIKEWGIFILILSLFLLSRIFLWQFVKVDGHSMDPTLADKEQLVVLKQTKINRFDIVVANEEEGGQKKKIVKRVIGMPGDVIKYKNDTLTINNKKTEEPYLKEYTKLFKKDKLQEKYSYNPLFQDLAQSSTAFTTDSNGSSEFTTVVPKGHYYLVGDDRIVSKDSRAVGPFKKSTIVGEVKFRFWPIRRFGTIN

SEQ ID NO: 12071 - protein, 2418 aa, Streptococcus agalactiae
ATGGAAGTATTTTTTACAGGAACCATTGAACGCATTATATTTGAAAATGCCAGCAATTTTTTTAAAATATTACTTCTGGAAATCGAAGATACGGATAGCGATTTTGATGATGTAGAAGTAATTATTACTGGTACTATGGCCGACGTTATAGAGGGAGAAGAATATACTTTTTGGGGAACACTAACCCAACATCCAAAATACGGCGAGCAACTACAAAGTGTACGCTATGAAAGAGCCAAGCCTACTTCAGGTGGCCTTGTGAAATACTTTTCTAGCGAACAATTTAAAGGAATTGGTAAAAAGACTGCCCAACGCATCGTAGAACTCTATGGAGATAATACCATTGATAAAATCCTTGAATCCCCTGAACAGTTAAGCACAATCTCAGGACTATCAAAAATTAATAGAGAAGCATTCATCGCTAAACTGAAACTCAATTATGGAACAGAGCAAGTTTTAGCTAAACTCGCTGAATATGGGTTAAGCAATCGTGCTGCTATTCAAATATTTGATCACTATAAAGAAGAATCGCTTGAAGTGATAAACGAAAATCCTTATCAACTTGTTGAGGATATCCAAGGTATCGGTTTTAAAATAGCTGATCAACTTGCTGAACAAGTCGGTATTGAAAGTGATTCTCCTAAACGCTTTCGTGCTGCTATTATTCATACTTTAGTTGAGTCTTCTATGGAGCAAGGAGATACCTATATTGAGGCTCGTACTCTCTTGGAAAAAACCATTACTCTCCTTGAAGAAGCTCGTCAAATCGAACTAGATCCTTCAATTGTTGCTAAGGAATTGACAAATTTAATTGCAGAAGATAAAGTGCAACATATTGGAACTAAAATTTTTAGTAATACTCTATTTTTTGCCGAAGAAGGCATCAAAAAAAACTTACAACGAATACTAAATCAACCCTTTGATAAACAACTAAGTCACAAAGATATTGACCGTGAAATCAGAGATATTCAAAAATCTTTAAATATCCACTACGATAATATCCAAGAAAAAGCTATTAGAGAAGCTTTACTAAGTAAGGTATTTATCTTGACTGGTGGCCCAGGAACAGGTAAAACAACAGTTATAAATGGTATTATTGAAGCCTATTCCGAGTTACATCATATTGATTTAAACAAAAATGATATTCCTATTGTACTTGCTGCTCCTACAGGTCGTGCTGCTAGACGCATGAATGAACTTACCGGTTTACCGAGTGCTACTATTCATAGGCATTTGGGATTAAACGGAGATAGTGACTATCAAAGTCTAGATGACTATCTAGATTGTTCCTTAATTATCATTGATGAATTTTCAATGGTTGACACTTGGCTTGCTAATCAATTATTTGACGCTTTGGACTCGCACACACAAGTTATTATTGTCGGAGATAGTGATCAATTACCGTCTGTAGGTCCAGGACAAGTTCTAGCAGATCTTTTAAATATAAATGCACTTCCACACGTTAAACTTGAAAAGATTTTTAGACAATCAGAAGAATCAACTATTGTGACTTTAGCTAATCAAATGAGACAGGGCTTTTTGCCAGAGGACTTTACAGCTAAAAAAGCCGATCGCTCATACTTTGAAGCATCTGCTAATATCATCCCAAATATGATTTCTAAAATTGTTCAATCTGCACTTAAGAGCGGTATTGAAGCTCATGAAATTCAAATTTTAGCTCCTATGTATCGCGGCCAAGCAGGTATTAATAATCTTAACCTTATCATGCAAAATCTCCTCAATCCATTAAAAGATAATAACCAATTTACTTTTAATGATATAAATTTCCGAATAGGAGATAAAGTGTTACATTTAGTCAACGATACAGAGCTTAATGTTTTTAATGGGGATATTGGTTACATAACGGATCTTATACCAGCCAAATATACTGAGAGCAAGCAAGATGAGATTTATATGACTTTTGATGGTCAAGAAGTTATCTACCAACGCAAAGAATGGCTTAAAATAACACTAGCCTATGCTATGAGTATTCATAAATCACAGGGTTCTGAATTTCAAGTTGTTATTCTGCCAATAACGAGACAGAGTGGTCGAATGTTACAGCGAAACCTTATTTATACAGCCATTACGAGATCTAAAAGTAAACTAATACTTTTAGGAGAAATTGGTGCATTTGATTTCGCTGTTAAAAACGAGGGGGCAAAGCGCAATACTTATCTGATAGAAAGATTTGAAAACAAGCAAGAAATAGCTAATTCTCAAAAAATTGAAGATAGCTCAATAGATCAAAAGATTGACAGCACAATAATTAATACGTCCATTCCAAAAACAGCAACGCCAATTGAGCAGACTAATCTTTCAAAAATAACTTATCGCCTAACTGAAGAAAATTATTTAACAATCGATCCAATGATTGGTATTAATCAACAAGATATAAGTGCAATTTTTGATAGTAAA

SEQ ID NO: 12072 - protein, 806 aa, Streptococcus agalactiae
MEVFFTGTIERIIFENASNFFKILLLEIEDTDSDFDDVEVIITGTMADVIEGEEYTFWGTLTQHPKYGEQLQSVRYERAKPTSGGLVKYFSSEQFKGIGKKTAQRIVELYGDNTIDKILESPEQLSTISGLSKINREAFIAKLKLNYGTEQVLAKLAEYGLSNRAAIQIFDHYKEESLEVINENPYQLVEDIQGIGFKIADQLAEQVGIESDSPKRFRAAIIHTLVESSMEQGDTYIEARTLLEKTITLLEEARQIELDPSIVAKELTNLIAEDKVQHIGTKIFSNTLFFAEEGIKKNLQRILNQPFDKQLSHKDIDREIRDIQKSLNIHYDNIQEKAIREALLSKVFILTGGPGTGKTTVINGIIEAYSELHHIDLNKNDIPIVLAAPTGRAARRMNELTGLPSATIHRHLGLNGDSDYQSLDDYLDCSLIIIDEFSMVDTWLANQLFDALDSHTQVIIVGDSDQLPSVGPGQVLADLLNINALPHVKLEKIFRQSEESTIVTLANQMRQGFLPEDFTAKKADRSYFEASANIIPNMISKIVQSALKSGIEAHEIQILAPMYRGQAGINNLNLIMQNLLNPLKDNNQFTFNDINFRIGDKVLHLVNDTELNVFNGDIGYITDLIPAKYTESKQDEIYMTFDGQEVIYQRKEWLKITLAYAMSIHKSQGSEFQVVILPITRQSGRMLQRNLIYTAITRSKSKLILLGEIGAFDFAVKNEGAKRNTYLIERFENKQEIANSQKIEDSSIDQKIDSTIINTSIPKTATPIEQTNLSKITYRLTEENYLTIDPMIGINQQDISAIFDSK

SEQ ID NO: 12073 - protein, 480 aa, Streptococcus agalactiae
ATGGTTTCATATGAAAAAGTCCGCCGCTCTCTGCGCACAGCTACAATCACTATCATTGTATTAAATAGTTTGTCTTTAGTATTCAGATTGTTTACAGGAATTTCAGTGCAGCTAGCCAAAACTGAAATTAATAAAGGGAACACAGGTAATCTTCCTAAAGAACATATCGAAGCAGTCTTGAGCGCCACAACACCATTTATGCTATTTGTCACTGCTTTAATAGTATTAGTCAACATTGCCATTGTTATTTTCTGTATTAAAAATTTAAGAGCAATTAAAAGAAATCAAATGGTTAATTACCTTCCTTATTACCTTGGCTTCGCCATTACTGTAGGACTTGTTATTTTGGGTTTTCTAACTACTAAAGCACCATGGGCAATAGCTATAAATATCGTCTTCCAAGCTATTTTCGGTCTTCTTTATTTCCATGCTTATCAAAAAGCACAAAAACTCAACGAACGTGATCTTGAAGAGACTAAC

SEQ ID NO: 12074 - protein, 160 aa, Streptococcus agalactiae; identical to SEQ ID NO: 3146

SEQ ID NO: 12075 - protein, 1092 aa, Streptococcus agalactiae
ATGTTAATTTTTCCTTTAATAAATGATACGTCGCGTAAAATTATCCACATTGATATGGATGCTTTTTTTGCATCTGTGGAAGAGCGTGACAATCCCTCTCTTAAAGGAAAGCCTGTTATTATTGGTTCTGATCCCAGAAAAACCGGCGGCAGAGGGGTTGTTTCTACTTGTAATTATGAGGCTCGAAAGTTTGGAGTTCATTCAGCTATGTCTTCAAAAGAAGCGTATGAACGATGTCCTCAAGCTATCTTTATTTCGGGAAATTACCAAAAATATCGCCAAGTAGGAATGGAAGTACGAGATATATTTAAAAAGTATACGGATTTGGTTGAACCGATGAGTATAGACGAAGCTTATTTAGATGTAACTGAAAATAAAATGGGAATAAAATCTGCTGTTAAACTTGCTAAAATGATACAATACGATATTTGGAATGATGTCCATTTGACCTGTTCAGCGGGTATTTCCTACAATAAATTTTTGGCAAAATTGGCTTCTGACTTTGAGAAACCAAAAGGACTTACCCTCATCCTACCAGATCAAGCTCAAGATTTCTTGAAGCCCTTACCAATAGAGAAATTTCATGGTGTTGGTAAACGCTCCGTCGAAAAATTACATGCTTTAGGGATTTATACTGGTGAGGACCTCCTTTCCTTATCTGAAATCTCTTTAATTGATATGTTTGGTCGTTTCGGGTATGACCTTTATCGTAAGGCAAGAGGGATTAATGCTTCCCCGGTAAAACCTGATAGAGTTCGTAAATCAATAGGAAGTGAGAAAACCTATGGGAAATTACTATATAACGAAGCAGATATCAAAGCTGAGATTTCAAAGAACGTTCAGAGAGTTGTTGCTTCTCTGGAGAAAAATAAGAAAGTTGGTAAGACAATCGTTTTAAAAGTTAGATATGCGGATTTTGAAACATTGACGAAACGTATGACATTAGAAGAGTATACTCAAGATTTTCAAATCATTGATCAAGTTGCTAAAGCGATATTTGATACCTTAGAAGAGTCAGTTTTTGGCATACGACTCTTAGGTGTTACAGTAACGACCCTGGAAAATGAACATGAAGCTATCTATTTAGATTTT

SEQ ID NO: 12076 - protein, 364 aa, Streptococcus agalactiae
MLIFPLINDTSRKIIHIDMDAFFASVEERDNPSLKGKPVIIGSDPRKTGGRGVVSTCNYEARKFGVHSAMSSKEAYERCPQAIFISGNYQKYRQVGMEVRDIFKKYTDLVEPMSIDEAYLDVTENKMGIKSAVKLAKMIQYDIWNDVHLTCSAGISYNKFLAKLASDFEKPKGLTLILPDQAQDFLKPLPIEKFHGVGKRSVEKLHALGIYTGEDLLSLSEISLIDMFGRFGYDLYRKARGINASPVKPDRVRKSIGSEKTYGKLLYNEADIKAEISKNVQRVVASLEKNKKVGKTIVLKVRYADFETLTKRMTLEEYTQDFQIIDQVAKAIFDTLEESVFGIRLLGVTVTTLENEHEAIYLDF

SEQ ID NO: 12077 - protein, 2310 aa, Streptococcus agalactiae
ATGGCAACAGTTAAAACAAACACAGATATCTTTGAACAAGCTTGGGAAGGCTTTAAAGGTGTTGATTGGAAAGAAAAAGCAAGTATTGCTCGCTTCGTTCAAGCAAACTATGCACCTTACGATGGAGATGAAAGCTTCTTAGCTGGAGCAACTGAACGTTCACTTCACATCAAAAAAGTGATTGAAGAAACAAAAGCTCACTATGAAGAAACTCGCTTCCCAATGGATACTCGTGTTGCTTCAATTTCTGAATTACCAGCTGGTTTTATCGACAAAGATAACGAACTTATCTTTGGTATTCAAAACGACGAGCTTTTCAAATTGAACTTCATGCCTAAAGGTGGTATCCGTATGGCGGAAACTACACTTAAAGAAAATGGTTATGAACCTGATCCAGCTGTTCACGAAATCTTCACTAAGTACGCTACAACAGTAAATGATGGTATCTTCCGCGCTTATACTTCTAACATTCGTCGTGCTCGCCATGCACACACTGTTACTGGTCTTCCAGACGCTTATTCACGCGGACGTATCATTGGTGTATATGCTCGTCTAGCTGTTTACGGTGCTGACTACTTGATGCAAGAAAAAGTTAATGACTGGAATGCATTGAATGATATTGATGAAGAGTCAATTCGTCTTCGTGAAGAAATCAACCTTCAATACCAAGCTCTTGGTGAAGTTGTAAAACTTGGTGACCTTTACGGCGTAGATGTTCGTAAACCAGCCATGAACACTAAAGAAGCCATTCAATGGGTGAATATTGCTTTCATGGCTGTATGTCGTGTTATCAATGGTGCTGCAACATCACTTGGACGTGTTCCTATTGTCCTTGATATCTTTGCAGAACGTGACCTCGCTCGCGGTACATTCACAGAATCAGAAATCCAAGAATTTGTTGATGATTTTGTCCTTAAACTCCGTACTGTAAAATTTGCTCGTACTAAAGCTTATGATGCCCTTTACTCAGGTGACCCAACCTTTATCACAACTTCAATGGCAGGTATGGGAGCTGATGGACGTCATCGTGTTACCAAAATGGACTATCGTTTCTTAAATACACTTGACAATATCGGTAACTCACCAGAACCAAACTTAACTGTTCTTTGGTCAGACCAATTACCATATGCTTTCCGTCGCTACTGTATGTCAATGAGTCATAAACACTCTTCAATCCAATATGAAGGTGTATCAACAATGGCTAAAGAAGGCTACGGTGAAATGTCATGTATTTCATGTTGTGTATCACCACTTGATCCAGAAAACGAAGACAAACGTCACAACCTTCAATATTTTGGTGCTCGTGTTAACGTTATGAAAGCACTTCTTACTGGTCTTAACGGTGGTTATGATGATGTTCATAAAGATTACAAAGTATTTGACATTGACCCAATTCGTGACGAAGTACTCAACTTTGACACTGTAAAAGCTAACTTTGAAAAATCTCTTGACTGGTTGACTGATACTTATGTTGATGCGATGAATATCATCCACTACATGACTGATAAATACAACTATGAAGCTGTACAAATGGCATTCTTACCTTCACATGTACGTGCTAATATGGGATTTGGTATCTGTGGTTTTGCAAATACTGTCGATTCATTATCTGCGATTAAATACGCTACTGTTAAACCAATCCGTGACGAAGATGGTTACATCTACGACTACGAAACAGTTGGTGACTTCCCACGTTATGGTGAAGATGATGATCGTGTTGACTCAATCGCTGAATGGTTACTTGAAGCCTTCCATGGACGCCTTGCTAAACACAAACTTTATAAAGATGCTGAAGCAACTGTTTCTCTTCTTACAATCACATCAAACGTTGCTTACTCTAAACAAACTGGTAACTCACCGGTACATAAAGGAGTATATCTCAATGAAGATGGTAGTGTAAACCTTTCTAAAGTAGAATTCTTCTCACCAGGTGCTAACCCTTCTAACAAAGCTAAAGGTGGCTGGTTACAAAACTTGAATTCACTTTCTAAACTTGATTTCGCTCATGCAAATGATGGTATTTCATTGACAACTCAAGTTTCTCCACGCGCTCTTGGTAAAACATTTGATGAACAAGTTGATAACTTGGTAACAGTCCTTGATGGTTACTTTGAAAACGGTGGTCAACACGTTAACTTGAATGTCATGGACCTTAAAGATGTCTATGACAAGATCATGAATGGTGAAGACGTTATCGTTCGTATCTCAGGTTACTGTGTCAATACTAAATATCTAACTCCTGAGCAAAAAACTGAGTTAACACAACGTGTCTTCCATGAAGTACTTTCAATGGACGATGCATTAACTAAC

SEQ ID NO: 12078 - protein, 770 aa, Streptococcus agalactiae; identical to SEQ ID NO: 3150

SEQ ID NO: 12079 - protein, 372 aa, Streptococcus agalactiae
ATGTTAAATCACAAATTTCTTCAAGTTCTAAAATATGAGGGTGTCGTTTCGATAACAAGCTGGACCGAATTAGCTCCTCACGTTACAAACACTTGGAATAGTTACCTGACTATTACAGATGACCAGCGTATATTAGCTCCTGCAGCAGGAATGACTCATCTTGAAAATGATCTCAATAATAATTCTAACATTATTATGACTCTGGGCAGCCGTGAAGTTGAGGGTCGTGATGGTTATCAAGGTACAGGCTTTAGAATTGAAGGAACTGCTAAGCTATTAGAAGCAGGAAGCGATTTTGAAATTGTTAAAGAAAAATATCCTTTTCTGCGTAAAGTATTGGAAGTAACTCCCATAAATGTTATACAACTTTTA

SEQ ID NO: 12080 - protein, 124 aa, Streptococcus agalactiae
MLNHKFLQVLKYEGVVSITSWTELAPHVTNTWNSYLTITDDQRILAPAAGMTHLENDLNNNSNIIMTLGSREVEGRDGYQGTGFRIEGTAKLLEAGSDFEIVKEKYPFLRKVLEVTPINVIQLL

SEQ ID NO: 12081 - protein, 942 aa, Streptococcus agalactiae
TTGGATTTCAAAAGAATGATTAAAACTAATACCGTTTTAGAACTCATTAAAGAGCAAATCAAAGATAATCTTTATCATGGTGCAAGCTTAGCTATTTATGAAAATGGAGAGTGGCACGAACATTACTTGGGGACAATTGATGGCAATGAGAAAGTTAAAGCGGGATTAGTCTATGATCTAGCCAGTGTATCAAAAGTTGTCGGCGTGGGAACTTTACTAGCAAAGTTAGTTTATCACGGGACTATTGATATTGATAAGCCATTAAGGTATTATTACCCTAGGTTTCATCATCAGACGTTAACTGTAAGGCAACTAGCTACACATAGCAGTGGGATTGATCCTTTTATTCCAAATCGTGATCAGTTGAATGCTACTCAGTTGAAAGATGCCATTAATCATATCAAGGTTTTGGAAGATAAATCGTTTAAATACACTGATATTAATTTTCTTTTACTTGGTTTTATGTTAGAAGAGGTATTAGGGGATGGTTTGGATAAACTTTTCAAACGTTATATTTTCACTCCTTTTCAGATGAAAGAAACCTCTTTTGGTCCTAGAGTAGAAGCTGTTCCAACTGTAGCCGGTATTAACGATGGTATTGTACACGATCCTAAAGCTAAGGTATTAGGAAAGCATACTGGTTCTGCAGGTTTATTTTCAACTATTGATGATTTACAAAGATTTTCTATTCATTATTTAAAAGATGATTTTGCGAAACCTTTGTGGAATAATTATAGTTTGAGTAAATCAAGATCATTAGCTTGGGATATAGATAAGGATTGGATAAACCATACTGGTTATACTGGTCCTTTTATTGCACTAAATTATCAAAAGCAGGCAGCAGCTATTTTTTTGACAAACAGAACATTTTCCTATGATGACCGTCCACTTTGGATTGAGAAACGACGACATATACAAGAGGCGATAACATCGTGCTTTGAA

SEQ ID NO: 12082 - protein, 314 aa, Streptococcus agalactiae
MDFKRMIKTNTVLELIKEQIKDNLYHGASLAIYENGEWHEHYLGTIDGNEKVKAGLVYDLASVSKVVGVGTLLAKLVYHGTIDIDKPLRYYYPRFHHQTLTVRQLATHSSGIDPFIPNRDQLNATQLKDAINHIKVLEDKSFKYTDINFLLLGFMLEEVLGDGLDKLFKRYIFTPFQMKETSFGPRVEAVPTVAGINDGIVHDPKAKVLGKHTGSAGLFSTIDDLQRFSIHYLKDDFAKPLWNNYSLSKSRSLAWDIDKDWINHTGYTGPFIALNYQKQAAAIFLTNRTFSYDDRPLWIEKRRHIQEAITSCFE

SEQ ID NO: 12083 - protein, 753 aa, Streptococcus agalactiae
ATGACGTTATTTCATTCATTGACATTTAAACACCCAGTATTACGTGTTAATAATAGAGACTTGAATATTACATTTTATCAGGAGTCTCTTGGATTTAAATTGATAAGTGAAGAAAATGCAATCGCAGTTTTCTCAGCATGGCAGAACAAAGAGGCTAGCTTTATTATTGAGGAATCCCCAACTTATCGTACTCGTGCGGTGAATGGTACTAAGAAGTTAGCAAAGATTATTGTTAAGTCTCAAGATGCAAAAGATATTGAAAAGCTTTTGGCAAATGGTGCGCAAGCCATTCAAGTATATCAAGGTCAAAATGGTTATGCCTATGAAACAGTTTCGCCCGAGGGAGATCTTTTCTTACTTCATGCTGAAGATGATTTGTCACAATTAGTAGCAATTGAGCGCCCAGAGTTAGAAAAAAATGATGACACTACAGGTCTATCAAACTTTGTTTTCCAATCTATTAGTTTGAATGTACCTGATGCCGTGAAAGCTGAAGCTTTTTACGATAAAGTATTTGCTGGGAAGTTCCCAATTAATTTATCTTTCAAAGAAGCACAAGGACAAGATTTGCAAATTGCTCCAAATGAAACTTGGGATATTGAGATACTAGAATGCTGTGTTAATGAAGATACTAATTTAAATGACTTGAAATCAACTTTTGAATCATTGGGACTTGATGTTTACCTTGATTCTAAAGAAAAGATTTTAGTCATCTCTGACACTAGTAATATTGAGATTTGGATTTCAAAAGAA

SEQ ID NO: 12084 - protein, 251 aa, Streptococcus agalactiae
MTLFHSLTFKHPVLRVNNRDLNITFYQESLGFKLISEENAIAVFSAWQNKEASFIIEESPTYRTRAVNGTKKLAKIIVKSQDAKDIEKLLANGAQAIQVYQGQNGYAYETVSPEGDLFLLHAEDDLSQLVAIERPELEKNDDTTGLSNFVFQSISLNVPDAVKAEAFYDKVFAGKFPINLSFKEAQGQDLQIAPNETWDIEILECCVNEDTNLNDLKSTFESLGLDVYLDSKEKILVISDTSNIEIWISKE

SEQ ID NO: 12085 - protein, 957 aa, Streptococcus agalactiae
TTGTGCTCTCAATACCATAAAGTCAAATTGACAGTTTCACTATTTTTTTGTAGACTGGATATTATGAATGAAACACTACTATTACATGGGATTCAGCTTATTCTGATTATCGCCATGATTATCACTTTTTATCAGATTGTTAGACATATTAGGTCTCAAAAAATAAATCCTTTCAAACGATTTTTCACTGGTTTGTGGATCGGTTTTGTAACTGATGCTCTCGATACTCTTGGTATCGGCTCTTTTGCAACAACGACCACATTTTTTAAACTAACTAAGCTTGTTGAAGACGATCGTAAGATACCCGCAACAATGACAGCTGCACACGTACTTCCAGTTTTGTTGCAGTCACTCTGTTTTATTTTTGTTGTAAAAGTAGAGGCTTTAACACTAATAACAATGGCTGGTGCAGCTTTTATTGGGGCTTTTGTTGGAGCTAAAATGACTAAAAATTGGCACGCTCCTACTGTTCAACGTATTCTAGGAACACTGCTCATCACAGCTGCTATTATTATGCTCTATCGTATGATCACTAACCCTGGAGCTGGTATTTCAGATTCAGTGCATGGTCTACACGGCATTTGGTTATTTGTTGGTATCGTCTTCAATTTTATTATTGGTGTATTAATGACTATGGGACTAGGTAATTATGCTCCTGAACTTATCTTCTTCTCCCTAATGGGACTGAGTCCTGCAGTTGCTATGCCTGTCATGATGCTAGATGCAGCTATGATAATGACAGCTTCTAGTACACAATTTATCAAGAGTGGTCGTGTTAATTGGAACGGCTTTGCCGGTCTGGTTACTGGGGGAATATTAGGCGTTATTGTCGCTGTTCTCTTCTTAACTAACCTTGACCTTAATAGTTTGAAGACACTGGTTGTAGGTATTGTTTTATTTACTGGAGCAATGTTAATACGTTCTTCCTTTAAAAAAACTATGCCCAAAAGTCATCAT

SEQ ID NO: 12086 - protein, 319 aa, Streptococcus agalactiae; identical to SEQ ID NO: 7870

SEQ ID NO: 12087 - protein, 825 aa, Streptococcus agalactiae
GTGAAGTATATCACAGAATTTATCGCAACCGCTTTTCTTATCATCTTAGGAAATGGGGCTGTAGCTAACGTTGACTTAAAAGGCACAAAAGGAAATAATTCAGGTTGGATTATTATTGCAATTGGTTATGGTTTAGGTGTTATGATGCCAGCGCTTATGTTTGGTAATGTCTCTGGAAACCATATTAACCCAGCTTTCACACTTGGATTGGCATTTTCAGGTCTTTTCCCTTGGGCACACGTTGGACAATACATTCTTGCACAAATTTTGGGAGCAATGTTTGGACAGTTAGTTGTCGTTATGGTTTATCAACCTTACTTTGTTAAGACAGAAAATCCAAATCATGTTCTTGGATCATTTTCAACTATTTCTGCATTAGATGATGGACAGAAATCAAGTCGTAAAGCGGCTTACATTAATGGTTTCTTAAATGAATTCGTTGGTTCTTTTGTTCTTTTCTTTGGAGCTTTGGCTTTAACGAAGAACTATTTTGGTGTAGAACTTGTTGGTAAACTTGTTCAAGCTGGTTATGACCAAACGACAGCAGCAACAAGGATTTCACCATACGTAACTGGTTCACTTGCTGTAGCTCACTTAGGTATTGGTTTCTTGGTAATGACTCTAGTTGCTTCTTTAGGTGGACCGACTGGACCTGCATTGAACCCTGCGCGTGACCTTGGTCCACGTATTGTTCACCGCTTATTACCAAAACAAATTCTTGGACAAGCTAAAGAAGATTCAAAATGGTGGTATGCATGGGTGCCAGTTTTAGCACCAATCGTAGCAAGTATACTCGCTGTAGCCTTGTTCAAACTATTATATCTT

SEQ ID NO: 12088 - protein, 275 aa, Streptococcus agalactiae; identical to SEQ ID NO: 3160

SEQ ID NO: 12089 - protein, 450 aa, Streptococcus agalactiae
ATGACACAAAAATATGAGCGTATTCTTATTGCTATCGATGGGTCTTACGAGTCAGAATTGGCGGTAGAAAAAGGGATAAATGTTGCTCTTCGTAATGATGCTGAATTACTGCTAACGCATGTTATAGATGCTCACGCTTACCAAAGTGAGGGAGTCTTTAGTGACTATGTTTTTGATAGGCAAGAACAAGAGTCAGCAGATGTGCTAGCCTATTTTGAGAAATTAGCACATTCAAAAGGCCTTACAAAGATCAAAAAAATTACTGAAATCGGAAATCCTAAGACTCTTTTGGCAAAGGATATCCCCATAAGGGAAAAAGCAGATTTAATTATGGTAGGCGCAACAGGATTAAACACTTTTGAAAGACTATTGATCGGCTCAACTTCAGAATACATTTTACGTCATTCGAAAGTTGATATGCTAGTCGTTCGTGATAGTAAGAAAACCTTA

SEQ ID NO: 12090 - protein, 150 aa, Streptococcus agalactiae; identical to SEQ ID NO: 3164

SEQ ID NO: 12091 - protein, 664 aa, Streptococcus agalactiae
GTGTTGGGAGCATTTGTTTTCCCAGTCAAAAATATTACTTAAATCCAGAACAGTTAGCTAAATCAAAATCATGGACTATTGATAGTTTCATTGAGAAAAAAGCAATTTTTATCACAATTATTGCATTTTTGATGGGTATCTCCTATGCTTCCGTGTTAGGTTTCCAAAATTATATACAACAGAAATTAATTTGATGACAGTAGGAGCTTATTTCTTTATTGTTTATGCACTTGTCATCACTTTAACCAGACCATCTATGGGAAGATTAATGGACGCTAAGGGAGATAAGTGGGTGCTTTATCCAAGTTATCTGTTCTTAACTTTGGGACTTGCTTTATTAGGGAGTGCTATGGGAAGTGTTACCTACCTTCTATCAGGTGCTTTGATTGGTTTTGGTTATGGTACCTTTATGTCTTGTGGCCAAGCAGCATCAATCAAAGGTGTTGAGGAACATCGTTTCAATACAGCCATGTCAACTTACATGATAGGTCTTGATTTAGGGTTAGGTGCTGGACCTTACATTTTGGGACTTGTTAAAGATGGTTTTCTTGGAGCTGGTGTGCAATCCTTTAGAGAATTATTCTGGATAGCAGCGATTATTCCTGTTGTTTGTGGTATTCTATATTTCTTAAAATCATCTAGACAAGTTGAAACTAAAACTATA

SEQ ID NO: 12092 - protein, 222 aa, Streptococcus agalactiae
  VARIANT 14: Xaa = Any Amino Acid
MLGAFVFPVKNITXNPEQLAKSKSWTIDSFIEKKAIFITIIAFLMGISYASVLGFQKLYTTEINLMTVGAYFFIVYALVITLTRPSMGRLMDAKGDKWVLYPSYLFLTLGLALLGSAMGSVTYLLSGALIGFGYGTFMSCGQAASIKGVEEHRFNTAMSTYMIGLDLGLGAGPYILGLVKDGFLGAGVQSFRELFWIAAIIPVVCGILYFLKSSRQVETKTI

SEQ ID NO: 12093 - protein, 600 aa, Streptococcus agalactiae
TTGGAAGACAAATTATTCAACAAACATTTTATAGGCATTACTATCTTAAACTTTATTGTTTATATGGTCTATTATTTGTTTACCGTTATCATAGCTTTTATTGCGACTAAAGAGTTAGGTGTTAGCACTAGCCAAGCAGGATTAGCGACGGGGATTTATATTGTAGGGACTTTGATTGCTCGTCTTATATTTGGCAAGCAATTAGAAGTTCTAGGACGTAAGTTAGTTTTACGTGGAGGGGCTATTTTTTACTTACTAACAACTTTAGCTTATTTTTATATGCCAAGTATCGGAGTAATGTATTTAGTTCGTTTCCTAAATGGTTTTGGTTATGGCGTCGTGTCAACAGCAACTAATACTATTGTAACAGCTTATATACCAGCTGATAAAAGAGGTGAGGGGATTAACTTTTACGGTCTATCAACAAGTTAGCCGCAGCTATTGGTCCTTTTGTAGAACATTTATGCTAGACAACCTTCATATTAACTTTAAAATGGTATTGTATTATGTAGTATTTTAATTGCGATTTGTAGTGTGGGAGCATTTGTTTTCCAGTCAAAATATTACTTTAAATCAGAACAGTTAGCTAANNNNNTTAAT

SEQ ID NO: 12094 - protein, 201 aa, Streptococcus agalactiae
  VARIANT 153, 198, 199, 200: Xaa = Any Amino Acid
MEDKLFNKHFIGITILNFIVYMVYYLFTVIIAFIATKELGVSTSQAGLATGIYIVGTLIARLIFGKQLEVLGRKLVLRGGAIFYLLTTLAYFYMPSIGVMYLVRFLNGFGYGVVSTATNTIVTAYIPADKRGEGINFYGLSTSLAAAIGPFVXTFMLDNLHINFKMVIVLCSILIAICSVGAFVFQSKYYFKSEQLAXXXN

SEQ ID NO: 12095 - protein, 657 aa, Streptococcus agalactiae; identical to SEQ ID NO: 7877

SEQ ID NO: 12096 - protein, 219 aa, Streptococcus agalactiae; identical to SEQ ID NO: 3170

SEQ ID NO: 12097 - protein, 2283 aa, Streptococcus agalactiae
ATGCGTTATAATCAATTCAGCTACATTCCAACTAAACCTAACGAAGCTTTTGAAGAGCTAAAAGGACTAGGTTTTCCATTAAACAAAAAGAATTCTGATAAAGCTAATTTGGAAGCTTTTCTCAGACATTCTTTTTTAAATCAAACTGATACTGATTACGCTCTTAGTCTCCTTATCGTTGATGCAAAAACCGATGCTCTAACCTTTTTTAAATCAAATAGTGACTTAACACTAGAAAATTTACAATGGATTTATTTACAGTTATTAGGCTTTGTCCCCTTTGTAGACTTTAAAGACCCTAAAGCTTTCTTACAAGATATTAACTTCCCAGTCTCATATGACAATATTTTTCAAAGTCTACATCACTTACTCGCCTGTCGTGGAAAATCTGGCAATACATTAATCGACCAATTAGTTGCTGATGGTTTACTTCATGCAGATAATCACTACCATTTTTTCAATGGGAAGTCTCTGGCCACTTTCAATACTAACCAATTGATTCGCGAAGTTGTCTATGTTGAAACATCCTTAGATACTATGTCTAGTGGTGAACATGATTTAGTAAAAGTTAACATTATCAGACCCACTACCGAGCATACTATCCCCACGATGATGACAGCTAGCCCCTATCATCAAGGTATCAATGATCCTGCCGCAGACCAAAAAACATACCAAATGGAGGGTGCGCTAGCAGTTAAACAGCCTAAACACATACAAGTTGACACAAAACCATTTAAAGAAGAAGTAAAACATCCTTCAAAATTACCCATCAGCCCTGCAACTGAAAGCTTCACACACATTGACAGTTATAGTCTCAATGACTATTTTCTTTCTCGTGGTTTTGCTAATATATACGTTTCAGGTGTGGGTACTGCTGGCTCTACGGGTTTCATGACCAGTGGGGATTACCAACAAATACAAAGCTTTAAAGCAGTCATTGATTGGTTAAATGGTAAGGTTACTGCATTCACAAGTCATAAACGAGATAAACAAGTCAAGGCTGATTGGTCAAATGGCCTTGTAGCAACCACAGGTAAATCTTATCTCGGTACCATGTCAACTGGTTTAGCAACAACTGGCGTTGAGGGGCTGAAAGTCATTATCGCTGAAGCCGCAATCTCCACATGGTATGATTATTATCGAGAAAATGGGCTTGTGTGTAGTCCAGGCGGCTACCCCGGTGAAGATTTAGACGTTTTAACAGAATTAACATACTCACGAAACCTCTTAGCTGGTGATTACATCAAAAACAACGATTGCTATCAAGCATTGTTAAATGAACAATCAAAAGCAATTGACCGTCAAAGTGGGGATTACAACCAATACTGGCATGACCGTAATTACCTAACTCACGTCAATAATGTCAAAAGTCGAGTAGTTTACACTCATGGACTACAGGATTGGAATGTTAAGCCAAGACATGTCTACAAAATTTTCAATGCATTGCCTCAAACCATCAAAAAACACCTTTTTTTACATCAAGGTCAACATGTGTATATGCATAATTGGCAGTCGATTGATTTTCGTGAAAGCATGAATGCCTTACTAAGCCAAGAACTACTTGGCATTGACAATCATTTCCAATTAGAAGAGGTCATTTGGCAAGATAATACTACTGAGCAAACTTGGCAAGTTTTAGATGCTTTCGGAGGAAACCATCAAGAGCAAATTGGCTTAGGTGATAGTAAAAAACTTATTGATAACCATTATGACAAAGAAGCCTTTGATACTTATTGTAAAGACTTCAATGTGTTCAAAAATGATCTTTTCAAGGGAAATAATAAAACCAATCAAATCACTATTAATCTTCCTCTAAAGAAAAATTATCTCCTGAATGGACAGTGCAAACTCCATCTACGTGTTAAAACTAGTGACAAAAAGGCCATTTTATCAGCCCAAATCTTAGACTATGGTCCTAAAAAACGATTCAAAGATACACCAACCATCAAATTCTTAAACAGCCTTGATAATGGTAAAAATTTTGCCAGAGAAGCTTTACGTGAACTCCCGTTTACTAAAGATCATTATCGTGTCATCAGTAAAGGTGTCTTGAACCTTCAAAATCGTACAGACTTACTTACAATTGAGGCTATCGATCCAGAACAATGGTTTGATATCGAGTTTAGCCTCCAACCAAGTATATATCAATTGAGTAAAGGTGATAATCTAAGGATTATCCTTTATACAACTGATTTTGAACATACCATTCGAGATAATGCTAGTTACTCTATAACAGTAGATTTGAGTCAATCTTATTTAACTATCCCAACTAATCAAGGAAAT

SEQ ID NO: 12098 - protein, 761 aa, Streptococcus agalactiae
MRYNQFSYIPTKPNEAFEELKGLGFPLNKKNSDKANLEAFLRHSFLNQTDTDYALSLLIVDAKTDALTFFKSNSDLTLENLQWIYLQLLGFVPFVDFKDPKAFLQDINFPVSYDNIFQSLHHLLACRGKSGNTLIDQLVADGLLHADNHYHFFNGKSLATFNTNQLIREVVYVETSLDTMSSGEHDLVKVNIIRPTTEHTIPTMMTASPYHQGINDPAADQKTYQMEGALAVKQPKHIQVDTKPFKEEVKHPSKLPISPATESFTHIDSYSLNDYFLSRGFANIYVSGVGTAGSTGFMTSGDYQQIQSFKAVIDWLNGKVTAFTSHKRDKQVKADWSNGLVATTGKSYLGTMSTGLATTGVEGLKVIIAEAAISTWYDYYRENGLVCSPGGYPGEDLDVLTELTYSRNLLAGDYIKNNDCYQALLNEQSKAIDRQSGDYNQYWHDRNYLTHVNNVKSRVVYTHGLQDWNVKPRHVYKIFNALPQTIKKHLFLHQGQHVYMHNWQSIDFRESMNALLSQELLGIDNHFQLEEVIWQDNTTEQTWQVLDAFGGNHQEQIGLGDSKKLIDNHYDKEAFDTYCKDFNVFKNDLFKGNNKTNQITINLPLKKNYLLNGQCKLHLRVKTSDKKAILSAQILDYGPKKRFKDTPTIKFLNSLDNGKNFAREALRELPFTKDHYRVISKGVLNLQNRTDLLTIEAIDPEQWFDIEFSLQPSIYQLSKGDNLRIILYTTDFEHTIRDNASYSITVDLSQSYLTIPTNQGN

SEQ ID NO: 12099 - protein, 357 aa, Streptococcus agalactiae
ATGAAACTTCTCACTAAAGAACTGTTTGATGATTCTCAACACTTTTGGTACCAGATCAATTTATCACAAGAGAGTAACTTCGGAGCAGTTTTTGACCATGATAATAAAAACATTCCACAGGTTGTTGCAACTATTGTTGATGATTTACAAGGTTCCGGAAGTTCGAATCATTTCTGGTATTTTGGCAATACTACTGATACTTCCATCCTTATGATTGCTCATTTAAATCGAAAATTCTATATTCAGGTTAATTTAAAGGACTTTGACTTTGCACTCAATTTAATAACTATAAATAATTGGAAGAGTCTCCTCCAAACTCAACTCGAAGCTCTAAACGATACCCTAGCAATATTTCAA

SEQ ID NO: 12100 - protein, 119 aa, Streptococcus agalactiae
MKLLTKELFDDSQHFWYQINLSQESNFGAVFDHDNKNIPQVVATIVDDLQGSGSSNHFWYFGNTTDTSILMIAHLNRKFYIQVNLKDFDFALNLITINNWKSLLQTQLEALNDTLAIFQ

SEQ ID NO: 12101 - protein, 978 aa, Streptococcus agalactiae
ATGTCATCTTATTGGAATAACTATCCTGAACTTAAAAAAAATATTGATGAAACCAATCAACTAATTCAAGAAAGAATACAGGTCAGAAATAAAGATATTGAAGCGGCGCTAAGCCAACTCACAGCTGCGGGAGGAAAACAGCTCAGACCAGCATTCTTTTACCTTTTTTCTCAACTTGGTAATAAGGAGAATCAAGATACTCAGCAACTAAAGAAAATCGCTGCTTCTTTAGAAATCCTTCACGTTGCTACATTAATCCATGATGATGTCATTGATGACTCACCACTAAGACGTGGAAATATGACCATTCAAAGCAAGTTTGGCAAAGACATCGCAGTTTATACTGGGGATTTACTTTTCACAGTCTTTTTCGATCTTATTTTAGAATCTATGGCTGATACACCATTTATGACGATTAATGCAAAATCTATGCGTAAAATTCTCATGGGAGAATTGGACCAGATGCACCTTCGTTACAATCAACAACAAGGTATCCATCACTATTTACGTGCGATTTCAGGTAAGACAGCCGAACTCTTTAAATTAGCTAGCAAAGAAGGAGCTTACTTTGGTGGTGCAGAGAAGGAGGTTGTTCGTCTAGCAGGCCATATCGGCTTTAATATTGGTATGACATTCCAAATTTTGGATGATATTCTGGATTATACTGCAGATAAAAAAACATTTAACAAGCCTGTCTTAGAAGATTTAGCACAAGGCGTTTACAGCCTTCCTCTACTTCTTGCCATTGAAGAAAATCCTGATATTTTCAAACCTATTTTAGATAAAAAAACAGATATGGCTACTGAAGACATGGAAAAAATTGCTTATCTCGTCGTTTCCCATAGAGGTGTTGACAAAGCTCGCCATCTAGCTCGTAAATTTACTGAAAAAGCTATTAGTGACATAAATAAGCTACCCCAGAGCTCTGCAAAAAAACAGTTGCTACAATTAACTAATTACCTTTTAAAACGCAAAATT

SEQ ID NO: 12102 - protein, 326 aa, Streptococcus agalactiae
MSSYWNNYPELKKNIDETNQLIQERIQVRNKDIEAALSQLTAAGGKQLRPAFFYLFSQLGNKENQDTQQLKKIAASLEILHVATLIHDDVIDDSPLRRGNMTIQSKFGKDIAVYTGDLLFTVFFDLILESMADTPFMTINAKSMRKILMGELDQMHLRYNQQQGIHHYLRAISGKTAELFKLASKEGAYFGGAEKEVVRLAGHIGFNIGMTFQILDDILDYTADKKTFNKPVLEDLAQGVYSLPLLLAIEENPDIFKPILDKKTDMATEDMEKIAYLVVSHRGVDKARHLARKFTEKAISDINKLPQSSAKKQLLQLTNYLLKRKI

SEQ ID NO: 12103 - protein, 1746 aa, Streptococcus agalactiae
ATGTTTAAAATCCCTTTGTTTAAAGAATTAAAGACAGATCAATGGGTAAAACCATTTTTCAAACAATATAAAGTTTCCTTAGTAATTGCTCTTTTCCTTGGTTTTATGACTTTCTTTTCTGCCAGTGCTCTTATGTTTAATTCGGGCTATCTGATTAGTAAGTCAGCTTCACTACCGAGTAATATTCTTCTAGTGTATGTTCCAATTGTACTAACACGTGCTTTTGGTATTGGACGTCCTGTTTTTCGTTATATAGAACGCCTAACGAGTCACAATTGGGTATTACGAATGACTTCACAACTGCGCTTGAAGCTTTACCATTCCTTAGAAAGCAATGCTATCTTTATGAAGCGTGATTTTCGTTTAGGAGATGTTATGGGGCTTTTAGCGGAGGATATTAATTATTTGCAAAATTTGTATCTTAGGACAATATTTCCAACGATTATAGGGGGGTTATTATATAGCTTTATTATTATTGCAACAGGCTTCTTTTCTCTATGGTTCGCTTTAATGATGTTGCTTTATTTAGCTATTATGATTTTTGTTTTTCCACTTTGGTCGATTTTAGCTAATGGTGCTCGTCAGACTCGTGAAAAAGAATTAAAAAATCATCTTTATACTGATTTGACGGATAATGTCTTAGGTATTTCAGACTGGATTTTTAGTCAACGTGGTCAAGAGTACGTCGCCTTGCATGAGCGTTCGGAAAGTGAACTCATGGCTGTTCAGAAAAAAATTCGTTCCTTTGATAATCGTAGAGCTCTTATTGTGGAATTAGTTTTTGGCTTTCTAGCTATTTTGGTTATTATTTGGGCTAGTAATCAGTTTATTGGTCACAGAGGTGGCGAAGCTAACTGGATTGCAGCATTTGTTCTAACAGTATTTCCCTTGTCAGAGGCATTTGCTGGTTTGTCTGCTGCTGCTCAAGAAACAAATAAATATTCTGATTCAATTCATCGTCTTAATGAATTATCAGAAACGTATTTTGAAACAACTCAAAATCAATTGCCTAATAAGCCATATGATTTTTCCGTCAAGAATTTAAGTTTCCAGTATAAGCCACAAGAGAAATGGGTTTTGCATCATTTAGATTTGGATATTAAAGAAGGAGAAAAAATTGCTATTTTAGGGCGTAGTGGTTCTGGCAAGAGTACCTTAGCTAGTCTACTTCGTGGCGACTTGAAAGCAAGTCAAGGGGAGATTACCCTAGGCGGTGCTGATGTTTCAATAGTTGGTGATTGCATTTCTAACTATATTGGAGTGATACAACAAGCGCCCTACCTTTTTAATACAACCCTGCTAAATAACATTCGCATTGGAAACCAAGATGCTAGTGAAGAAGATGTATGGAAAGTTCTTGAACGAGTTGGATTGAAAGAGATGGTCACTGATTTATCAGATGGTCTCTATACAATGGTTGATGAAGCTGGACTTAGGTTTTCAGGTGGCGAAAGGCATAGAATTGCTTTGGCTAGAATCTTACTAAAAGATGTCCCAATTGTTATCTTAGATGAGCCAACTGTTGGACTTGATCCTATTACTGAACAAGCCTTACTAAGGGTATTTATGAAAGAATTGGAAGGTAATACCTTAGTTTGGATTACACATCACTTAAAAGGTATTGAACATGCTGATCGTATCTTATTTATAGAAAATGGGCAATTAGAGTTGGAAGGTTCTCCTCAAGAATTGTCTCAAAGTAGCCAACGTTACCGTCAGCTGAAAGCCGCTGATGATGGTGATCTA

SEQ ID NO: 12104 - protein, 582 aa, Streptococcus agalactiae
MFKIPLFKELKTDQWVKPFFKQYKVSLVIALFLGFMTFFSASALMFNSGYLISKSASLPSNILLVYVPIVLTRAFGIGRPVFRYIERLTSHNWVLRMTSQLRLKLYHSLESNAIFMKRDFRLGDVMGLLAEDINYLQNLYLRTIFPTIIGGLLYSFIIIATGFFSLWFALMMLLYLAIMIFVFPLWSILANGARQTREKELKNHLYTDLTDNVLGISDWIFSQRGQEYVALHERSESELMAVQKKIRSFDNRRALIVELVFGFLAILVIIWASNQFIGHRGGEANWIAAFVLTVFPLSEAFAGLSAAAQETNKYSDSIHRLNELSETYFETTQNQLPNKPYDFSVKNLSFQYKPQEKWVLHHLDLDIKEGEKIAILGRSGSGKSTLASLLRGDLKASQGEITLGGADVSIVGDCISNYIGVIQQAPYLFNTTLLNNIRIGNQDASEEDVWKVLERVGLKEMVTDLSDGLYTMVDEAGLRFSGGERHRIALARILLKDVPIVILDEPTVGLDPITEQALLRVFMKELEGNTLVWITHHLKGIEHADRILFIENGQLELEGSPQELSQSSQRYRQLKAADDGDL

SEQ ID NO: 12105 - protein, 1716 aa, Streptococcus agalactiae
ATGCTAGATAAAGCGGTTATGCGCTTGTCAGGTATTCATAAGTTGTTAGGATTGCTTGCGGGACTTGATGTTCTTCAAGCAATCTTTATTATCGGACAAGCTTATTATTTGAGTCTTTCTATAACTGGTTTGTGGGAAGGGCAAAAACTTTCTTCTCAAACGGTTTATATTTTGTTATTTATGGTCTCATATTTAGGCCGTCATGTTATTGATTACATCAAAAATAGAAAACTTGATGACTTTTCAACAGCACAATCTAGTCTTTTGAGACGTCAATTATTAGATAAGTTATTTGATCTAGGTCCTAAAGTCGTTCAAGAACAAGGAACTGGTAATGTTGTTACAATGGCATTAGATGGCGTTTCTTTAGTTGAAAATTATTTACGTTTAGTCTTGAATAAGATGATTAACATGTCTATTATCCCATGGATTATTCTAGCTTATATTTTCTATTTAGATATTGAATCAGGTGCAATTTTACTTATCGTTTTTCCTTTAATTATCATCTTTATGATTATTTTAGGCTATGCGGCTCAAGCTAAAGCAGATAAACAATATGAATCCTATCAAGTACTTTCTAATCATTTTTTAGATTCATTACGAGGCATTGATACTCTCAAATATTTTGGTCTTAGTAAACGTTATGGTAAAAGCATTTATCAAACTAGTGAATCTTTTCGTAAAGCAACAATGAGTACTTTGAAAATTGGTATTTTATCAACGTTTGCTTTAGACTTTTTTACAACTTTATCCATTGCTATCGTTGCTGTTTTTCTAGGTTTACGATTATTAAATGAGCAGATTTACCTTTTACCGGCTTTAACAATTTTGATTTTATCCCCTGAATACTTTTTACCCGTAAGAGATTTTTCTAGTGATTATCATGCAACGTTAGACGGGAAAAATGCATTTCAAGCGATTCAAAAAGTTCTAAACAAAACTGGTATTAAAGGTGAGCAATTAGTCATAGATGATTGGTCTAAAGAGAGTCATTTGGATTTAGAAAACATTGCTATTGCGTACGACCAAAAACGTGTTGTTGAGGATGTAACCTTACGATTTAGAGGACATCAAAAGGTTGCTTTAGTAGGAGTTAGTGGTTCAGGTAAGTCTAGCTTAATTAACCTTCTGAGTGGTTTTTTAGGGCCTGATAAAGGTTCTTTAAAAGTGGATGGTAGAGAAGTGGTTAACCTTGATCAAGAAGATTGGCATAAACAGATGATCTATATTCCTCAAACTCCTTATGTTTTTGAAATGTCATTACGTGATAATATTACCTTCTATACTCCCAATGCTAGTGACGAAGAGGTGATAAGAGCGATTCATATGGTAGGTTTAGATAGCTTACTAAGCGAGTTACCCGATGGTTTAGAAACGCGTATTGGTAATGGAGCGCGTCCACTTAGTGGAGGACAAGCCCAGCGTATAGCTCTGGCTCGTGCTTTTCTTGATCAAAATCGTCGTATTATGGTTTTTGATGAACCAACTGCTCATTTAGATATTGAAACAGAGTTAGAATTAAAAGAGAAAATGTTGCCACTGATGTCAGATCGTTTAGTTATCTTTGCAACTCATCGTCTTCACTGGTTGAACCAAATGGATGTTATAGTCGTTATGGAGAAGGGGAGAGTTGCAGAAGTAGGCTCTTATCAGGAATTATTAGCTAAAAAAGGATATCTCTATCAACTGAAGCATGCTATGGGAGGAAATAATGTT

SEQ ID NO: 12106 - protein, 572 aa, Streptococcus agalactiae
MLDKAVMRLSGIHKLLGLLAGLDVLQAIFIIGQAYYLSLSITGLWEGQKLSSQTVYILLFMVSYLGRHVIDYIKNRKLDDFSTAQSSLLRRQLLDKLFDLGPKVVQEQGTGNVVTMALDGVSLVENYLRLVLNKMINMSIIPWIILAYIFYLDIESGAILLIVFPLIIIFMIILGYAAQAKADKQYESYQVLSNHFLDSLRGIDTLKYFGLSKRYGKSIYQTSESFRKATMSTLKIGILSTFALDFFTTLSIAIVAVFLGLRLLNEQIYLLPALTILILSPEYFLPVRDFSSDYHATLDGKNAFQAIQKVLNKTGIKGEQLVIDDWSKESHLDLENIAIAYDQKRVVEDVTLRFRGHQKVALVGVSGSGKSSLINLLSGFLGPDKGSLKVDGREVVNLDQEDWHKQMIYIPQTPYVFEMSLRDNITFYTPNASDEEVIRAIHMVGLDSLLSELPDGLETRIGNGARPLSGGQAQRIALARAFLDQNRRIMVFDEPTAHLDIETELELKEKMLPLMSDRLVIFATHRLHWLNQMDVIVVMEKGRVAEVGSYQELLAKKGYLYQLKHAMGGNNV

SEQ ID NO: 12107 - protein, 1017 aa, Streptococcus agalactiae
ATGAGTGCTTTACAATTCTTTTGGTTTTTCCTAATCGGCCTCCTATTTTCAGGATTCTTCTTCCTTGAAGGATTCGACTTTGGGGTTGGGATGGCTGTTCAAACTTTAACACATAATGAGCATGAAAAAGATCAAGTAGTAGAAACCATTGGCCCAGTTTGGGATGGTAATGAAGTTTGGCTTCTTACCGGTGGTGGAGCAATGTTTGCTTCTTTTCCATACTGGTATGCTTCACTATTTAGTGGTTACTATTTGATTCTCCTTACGATTCTCTTTGGATTAATTATTCGTGGTGTTTCCTTCGAATTTAGACATAAAGTTCCTGCAGAGAAAAAGCAGTTTTGGAACTGGACCTTAACAATTGGTTCCGCTATTGTTCCATTCTTCTTTGGGATTATGTTTATAAGTTTGATTCAAGGTATGCCACTTGATGCCAGTGGTAACTTATCAGCTCAATTCAGTGATTACTTTAATATATTCTCGTTGGTTGGTGGAGTTGCAATGGTATTGCTAGCCTATCTTCATGGTTTAAACTACATTGCATTGAAGACAGAAGGGCCGATTAGAGAGCGTGCCCGTAATTATGCTCAGTTGCTTTATTGGGTACTCTATCTTGGTTTAGCCTTGTTTGCAGTTCTCTTGTATTTCAAGACAGATTTCTTTAGCAATCATCCGATAGTTACGACAATTATGGTCTTGGTTATTGTTGTATTAGCTGTATTAGCGCATGCTTCAACTTTTAAAGGAGCAGAGATGACAGCATTTTTAGCGAGTGGTCTCAGTCTTGTTTCAGTGGTTGTTCTGTTGTTCCAAGGTCTATTCCCACGAGTTATGATTTCATCAATTAGCCCTAAATATGATTTGCTGATTCAAAATGCATCCTCAACGCCATATACTTTAAAAGTAATGTCGATTGTCGCAATTACTCTAGTTCCCTTTGTTCTAGCTTATACAGCATGGGCATATTATATCTTTAGAAAACGTATTACCTTGCCAGTGATTGTGACAGGAGAAAAA

SEQ ID NO: 12108 - protein, 339 aa, Streptococcus agalactiae; identical to SEQ ID NO: 3184

SEQ ID NO: 12109 - protein, 1425 aa, Streptococcus agalactiae
ATGACAATTGAAACTTTAGCTCGTTTTCAATTTGCGATGACTACAGTTTTCCACTTTTTCTTTGTACCATTTACAATTGGTACATGCCTAGTGGTTGCTATTATGGAGACAATGTATGTTATCACAAAAAATGAAGAGTATAAAAAATTGACAAAATTTTGGGGTAATATCATGCTCCTTAGTTTTGCAGTTGGTGTTGTGACAGGTATCATTCAAGAGTTCCAATTTGGAATGAACTGGTCAGACTATTCACGTTTCGTAGGTGATATTTTTGGAGCTCCATTGGCTATTGAAGCTTTATTAGCTTTCTTTATGGAATCTACTTTCCTTGGTTTATGGATGTTTACATGGGATAACAAGAAAATTAGTAAAAAATTACATGTGACATTCATTTGGCTAGTGGTTTTTGGCTCATTAATGTCAGCGATGTGGATTCTTACTGCTAATAGCTTCATGCAACATCCTGTTGGTTATGAAGTTGTAAACGGTAGAGCGCAAATGACTGATTTTCTTGCACTTGTAAAAAATCCACAGTTCTTCTATGAATTTACCCATGTTATTTTTGGTGCCATTACGATGGGCGGTACAGTGGTTGCTGGTATGTCAGCCTTCCGCCTCTTAAAATCAGAACAGCTGAAAGATACAACGGTTGAACTTTATAAGAAATCAGTTCGTATTGGTTTAGTAGTAGCACTTCTTGGTTCAATTTCAGTTATGGGAGTTGGGGATTTACAAATGAAAGCCTTGATTCACGATCAACCAATGAAATTTGCTGCTATGGAAGGTGATTATGAAGATTCGGGTGATCCTGCAGCTTGGAGTGTAGTTGCTTGGGCAAATGAAGCAGAACACAAACAAGTTTTTGGGATCAAGATTCCCTATATGTTGAGTATTTTATCTTACGGAAAACCATCTGGTTCTGTGAAAGGTATGGATACAGCTAATAAAGAATTGGTTGCTAAGTATGGTAAAGATAACTACTACCCAATGGTTAACCTACTTTTCTATGGTTTCCGTACAATGGCGGCGATGGGAACAGCTATTATGGGTGTTTCTGTTTTAGGCCTCTTTTTAACTCGTAAGAAAAAACCAATTCTTTATAAACACAAATGGATGCTTTGGATTGTTGCTTTAACAACCTTTGCACCATTCTTAGCCAATACATTTGGTTGGATTGTGACAGAACAAGGACGATACCCTTGGACTGTCTATGGTCTTTTCAAGATTAAGGACTCTGTCTCTCCAAACGTTTCAGTTGCATCATTATTTGTTTCCAATACTGTGTACTTCTTGTTGTTTGGTGGTTTAGCGGTGATGATGATAAGCCTAACAATAAGAGAATTGAAGAAAGGGCCAGAGTATGAAGATGAACATGGACATCATGGTGCATATACTTCAATTGATCCCTTTGAGAAAGGAGCATAC

SEQ ID NO: 12110 - protein, 475 aa, Streptococcus agalactiae; identical to SEQ ID NO: 7900

SEQ ID NO: 12111 - protein, 1206 aa, Streptococcus agalactiae
ATGAAAGAAATCCTAGTTTTAGGTGCTGGTTATGCCGGTTTGAAAGCAGTTCGTAATTTACAAAAACAATCAGGTGATTTTCATATTACCCTTGTTGACATGAATGATTATCACTACGAAGCTACAGAATTACATGAAGTAGCTGCAGGATCTCAGCCAAAAGAAAAAATTACATTCCCAATTAGGGATGTTATCAACACTAATAAGGTTAACTTCATGCAAGATGAGGTGCTTAGAGTCGATGCTGAAAATAAAACAGTAACAGTTAAAAATAACGGTGAACTCCATTATGATTATGTCGTAGTTGCCTTAGGCTTTGTATCTGAAACTTTTGGCATCAAGGGTGCTATGGAGAATGCTTTGCAGATGACCAATATTTCGCAAGCAGAAAACATCCATAATCACATTGTTAATACAATGAAGTTGTATCGTGAGACAAAAGATGAAAATCTTCTCAAACTCTTAGTATGTGGTGCTGGTTTTACAGGTATTGAGTTAGCCGGAGCTATGGTTGATGAGCGACCAAAATATGCTGCTTTAGCGGGTGTAAAACCTGAACAAATTGAAATTATTTGTGTAGAGGCAGCAACTCGCATCCTACCAATGTTTGATGATGAATTAGCGCAATATGGTGTCAACTTAATTAAGGATTTAGGTATTAATTTGATGCTTGGAAGTATGATTAAGGAAATCAAACCGGGTGAAGTTGTTTATGGTACTAGTAAAGAGGATGAAGAACTCAAATCTATTACCGCAGGTACTATCATTTGGACAACAGGTGTTAGTGGAAGTCCGGTTATGGGAGAATCAGGATTTGATCAACGTCGTGGACGTGTAATGGTCAACAGTGATTTGCGTGATCCAAAATATGATAATGTTTATGTTATCGGTGATGTGTCTGCATTTATGGACACTGAGTCTGGTCGCCCATTCCCAACAACAGCTCAAATTGCAACTCGTATGGGAGCTCATGTTGCTAAAAACCTTTTACATCAAATCAAAGGTGAAGCCACAGAAGACTTTTCGTATAGTCCGCAAGGCACAGTTGCTTCAGTAGGAAATACGCATGGACTTGGTGTTGTTGGAAAAACTAAAATTAAAAAATACCCTGCATCGGTTATGAAGAAGATTATCATGAACAAATCACTTGTTGATATGGGTGGACTTAAAGAACTTCTAGCTAAGGGACGTTTTGATTTATATCAT

SEQ ID NO: 12112 - protein, 402 aa, Streptococcus agalactiae
MKEILVLGAGYAGLKAVRNLQKQSGDFHITLVDMNDYHYEATELHEVAAGSQPKEKITFPIRDVINTNKVNFMQDEVLRVDAENKTVTVKNNGELHYDYVVVALGFVSETFGIKGAMENALQMTNISQAENIHNHIVNTMKLYRETKDENLLKLLVCGAGFTGIELAGAMVDERPKYAALAGVKPEQIEIICVEAATRILPMFDDELAQYGVNLIKDLGINLMLGSMIKEIKPGEVVYGTSKEDEELKSITAGTIIWTTGVSGSPVMGESGFDQRRGRVMVNSDLRDPKYDNVYVIGDVSAFMDTESGRPFPTTAQIATRMGAHVAKNLLHQIKGEATEDFSYSPQGTVASVGNTHGLGVVGKTKIKKYPASVMKKIIMNKSLVDMGGLKELLAKGRFDLYH

SEQ ID NO: 12113 - protein, 897 aa, Streptococcus agalactiae
ATGACATTACCAATCTTTCTAGAGTTGGTAGAAATGAAAGCCAAAACAGCTAGTGTTTTACCATTTTTGATTGGTTTGTGTTTTAGTGCTTATTACTACAATTCAGTACACCCTGTATATGTCGGTTTATTCTTCGTTGCTATGTTTTTATTCAATATGTTCGTTGACATTTGGAATAATTACAATGATTATCGGAATGCTGTGGATTTGGATTATAAGAATGACACTAACATTATTGGTCGTGAGAACCTATCCCTACGCCAAATAGAAGTTATTATGGCAAGTTTAGTCATTACTTCTAGTATGATTGGTTTAGTTTTAGTTTCCCAAGTCGGTCTGCCTCTTTTATGGATGGGACTTTTTTGTTTTGGAATTGGTGTTTTATATTCCTTTGGTCCAAGACCTTTATCTAGTCTGCCCTTAGGAGAAGTATTTTCTGGCTTGACAATGGGATTTATGATTAGTTTAATTTGTGTATATCTAAACACTTATCAAAACTTTTCGTGGGATATCCTCAACTTAAGCAAAATTTTCTTGATTTCCTTGCCGAACACCTTATGGATTGCCAACCTAATGTTGGCGAATAATCTGTGCGACAAAGAAGAAGATGAAAAAAATCATCGCTATACCCTTGTACATTATACAGGGATAAGAGGTGGACTCTTGCTGTTTGCTATTTCTAATAGTATAGCTTTATTGGCAATTGTTTTTGAATTTCTTTTTGGACTTGCGCCTGTTACAGTACTCTTGAGTTTGTTATTAATACCATTTATTTATAAGCAGACAAAACTATTGTGGCAAAAACAGGTTAAGAGAGAAACATTTGTTTGTGCGGTACGTATTCTAGCACTGGGATCTGCAACCCAAGTCTTAACGTATCTAATTGGAATCATTTTT

SEQ ID NO: 12114 - protein, 299 aa, Streptococcus agalactiae
MTLPIFLELVEMKAKTASVLPFLIGLCFSAYYYNSVHPVYVGLFFVAMFLFNMFVDIWNNYNDYRNAVDLDYKNDTNIIGRENLSLRQIEVIMASLVITSSMIGLVLVSQVGLPLLWMGLFCFGIGVLYSFGPRPLSSLPLGEVFSGLTMGFMISLICVYLNTYQNFSWDILNLSKIFLISLPNTLWIANLMLANNLCDKEEDEKNHRYTLVHYTGIRGGLLLFAISNSIALLAIVFEFLFGLAPVTVLLSLLLIPFIYKQTKLLWQKQVKRETFVCAVRILALGSATQVLTYLIGIIF

SEQ ID NO: 12115 - protein, 657 aa, Streptococcus agalactiae
TTGTTGTTATACTTAGTTCATAAAATAAATAACCCAAAAGAAAGAGGTAATTCTTATGAAAAAACTTATTACAGAAAAAAAGTCAACAACGTCTCAACTGCTAACTATTTGAAACTCGGTCTTGTCTCAGCAATGTTTGCTGGAGGAGCATTCGTAGCTCTTGGTTCTACACAAGGTGTTTCAGCTTCAACTTTCACAGCACCGCAAGCAACACCTCCAAAAGCAGAACGTCAGTTAACAGATGCAGAACTTTATGAACGTGCCCAAAAACAAGTATTGCCAAAATATATCCAAGGTTCTCTTTCAGGTATTCTCAACCAACATTCAACACTTTACAAACAACAAAACGCAGCAGCGACACCGCAAGTATCAAGCCCCAAAGCAGAACGTCAGTTAACAGATTCAGAACTTTATGAAAGTGCCCAAAAACAAGTATTACCAAAATATATCCAAGGTTCTCTTTCAGGTATTCTCAACCAACATTCAACACTTTACCAACAACAAAACGCAGCAGTGACACCGCAAGTATCAAGCCCCAAAGCAGAACGTCAGTTAACAGATTCAGAAATCTATGAACGTGCCCAAAAACAAGTGTTGCCAAAATATATTCAAGGTTCTCTCTCAGGTATCCTTAACCAGCATTCAACTTTAAATGTT

SEQ ID NO: 12116 - protein, 219 aa, Streptococcus agalactiae
MLLYLVHKINNPKERGNSYEKTYYRKKVNNVSTANYLKLGLVSAMFAGGAFVALGSTQGVSASTFTAPQATPPKAERQLTDAELYERAQKQVLPKYIQGSLSGILNQHSTLYKQQNAAATPQVSSPKAERQLTDSELYESAQKQVLPKYIQGSLSGILNQHSTLYQQQNAAVTPQVSSPKAERQLTDSEIYERAQKQVLPKYIQGSLSGILNQHSTLNV

SEQ ID NO: 12117 - protein, 1578 aa, Streptococcus agalactiae
ATGGCAGAGAAAATAACTTCACTACGGCAAGCACTATGGAATTCGGCCGATCAATTACGTGGTCAAATGGATGCCAATGACTATAAAAACTATCTTCTTGGACTCATCTTTTATAAACACTTATCTGATAAATTACTCTTGGCTGTTTGTGATAATTTAGAAGAACACTTTAATACCTTTACAGATACTCAAAAAATCTTTGAAGATGCCTATCAAGATGAAGACCTAAAAGATGACCTCATTTCTGTTGTTACTGGTGATTTAGGTTACTTTATTGAACCGACACTGACCTTTGAAAAACTCATCCAAGATGTTTATCACAATACTTTCCAATTAGAATCATTAGCTCAAGGTTTTCGCGATATTGAACAAAGTGGTGAAGATTTTGAAAACTTATTTAAAGATATTGATCTTTACTCTAAAAAACTAGGTTCTACTCCTCAAAAACAAAACCAAACCATTGCCAATGTCATGAAAACATTAAATGAGATTGACTTTGAGTCAGTTGATGGGGATACTTTAGGCGATGCTTATGAGTACTTGATTGGTGAATTTGCCAGTGAATCAGGGAAAAAAGCAGGTGAGTTCTATACCCCACAAGCTGTCTCTCACTTAATGACTCAGATTGTCTTTTCAGGTCGTGAAGATCAAAAAGGAATGACTCTCTATGACCCTGCTATGGAATCTGGAACACTCCTTCTAAATGCTAAAAAATATAGTCATCAATCAGATACCGTTTCTTACTATGGTCAAGAAATCAATACTTCTACTTATAACCTGGCTCGCATGAACATGATGCTTCATGGCGTTGCCATCGAAAACCAACACTTAAGTAATGCTGATACCTTGGATGCGGACTGGCCAACAGATGAGCCAACCAATTTTGATGGGGTGTTGATGAACCCACCTTATTCTTTAAAATGGTCAGCGACTGCTGGTTTCTTAACGGATCCACGTTTTTCAAGTTACGGTGTATTAGCACCAAAATCAAAAGCTGACTTTGCCTTTTTACTTCATGGTTTCTATCATTTAAAAAATACAGGAACTATGGCAATTGTCTTACCACATGGAGTTCTTTTCCGTGGAGCTGCAGAAGGTAAAATTCGCCAAAAACTACTCGAACAAGGGGCTATCGATACTATTATCGGACTTCCATCAAATATCTTTTATAATACAAGCATCCCTACGACTATTATCATATTAAAGAAGAACAGAACCAACAAAGATGTCTTCTTTATAGATGCTTCAAAAGAGTTTGATAAGGGCAAAAATCAAAACACAATGACAGATGCTCATATCAAGAAGATTCTTGATGCTTATAAGAGTCGTGATAATTCTGATAAGTTTTCATATTTAGCTTCATTTGATGAAATCATTGAAAATGACTATAACTTAAATATCCCACGCTATGTCGATACTTTTGAGGAAGTCCCTGTTAAACCACTTCCAGAATTAGCGAAACAACTCAATGATATTGATCAAGAAATTGCCAAAACAAATGCCAAACTAGATCAACTCATGAAACGACTAGTCGGAACAACTAAGGAAGCTCAAGATGAATTGGATGCTTTTAGAAAA

SEQ ID NO: 12118 - protein, 526 aa, Streptococcus agalactiae
MAEKITSLRQALWNSADQLRGQMDANDYKNYLLGLIFYKHLSDKLLLAVCDNLEEHFNTFTDTQKIFEDAYQDEDLKDDLISVVTGDLGYFIEPTLTFEKLIQDVYHNTFQLESLAQGFRDIEQSGEDFENLFKDIDLYSKKLGSTPQKQNQTIANVMKTLNEIDFESVDGDTLGDAYEYLIGEFASESGKKAGEFYTPQAVSHLMTQIVFSGREDQKGMTLYDPAMESGTLLLNAKKYSHQSDTVSYYGQEINTSTYNLARMNMMLHGVAIENQHLSNADTLDADWPTDEPTNFDGVLMNPPYSLKWSATAGFLTDPRFSSYGVLAPKSKADFAFLLHGFYHLKNTGTMAIVLPHGVLFRGAAEGKIRQKLLEQGAIDTIIGLPSNIFYNTSIPTTIIILKKNRTNKDVFFIDASKEFDKGKNQNTMTDAHIKKILDAYKSRDNSDKFSYLASFDEIIENDYNLNIPRYVDTFEEVPVKPLPELAKQLNDIDQEIAKTNAKLDQLMKRLVGTTKEAQDELDAFRK

SEQ ID NO: 12119 - protein, 1770 aa, Streptococcus agalactiae
TTGGTAAACAATAGAAAAATAGAAACGTTAGGATTGTCTTATTTACGTACTGTTCTTGATAAGAACAACTACTTACAAACTTACTTTGATGAGAATGATAAAACACCACTTTGGGATGGAGAGATTCACCTTCTAAGAGCACCTAGCGAGAAAAAGTCTGATATTATAGGAAAAGTTCCTGTTCAAATTAAAGCAACTCAACAAAAGAAAAAGAATAATAGATTTTTGATAAGTCTGAGTGATTTAGAATTGTATCAAAAAAATGGTGGATTTGTACTGTTTGTAGTATGGATTGATGAAGAGAATAATATAAAAGAGATATTATACAAATCTCTTCCACCTCTTTCAATAAAAAATCTTATAAAGAGAAGTAAAAGAAAATTGACTACAGGGGCACCTAAAAAAGTGTCAATTGAAATCCATTCCTTATCAGAAAATAAGGTTTACCCAATGCTGATGGATTTTATCAATTCAAGTCGCAAGCAGTATAGTTTTGCTACTAGTCGCGGATTGACTATGGACAAACTGCCGAAAGAGCCAAAATTGAAATTTTATCATTACGGAAAAAGTCCAATTGATGTTTTTGATTATCAAGAAGAACATGAACTTTTTGCTTATATGGTAGATGATGATACAGGTATTGAAATCCCAATTGAGAATCCAATAAAAATTGTTGAAACTGCTGAAAAGACAGATCTTACCTTTACTATTGGAAATTATACTATAAAAAATGTGGTTCGATGTCGTTTTCCAAACGGTAATGTAGAATTACAGATTGGTTCAGGTTTTAAATTGCAAGCCGATGAAAAAGCAGGAAAATTTAGATTAAATTATTCGAGACCAGATTTATTAAATCAATCAATAGAATGCACTAAAGCCCTTCAAGAATTACAAAATGTGGGTTATGTTAAATTAAATGAAGCAAAAATTGAATTTGATCCACAATCACTAGATAAAATTAAAGATATGAATCTAAGTGAGCAGTTAGATGAACTTCTTCAGGTTTCAACTTTTATGGAAAAAATGGGAGTGAAAAAGGAAATAGATTTGTCACTTTTTGATAACCAGTCACAGAGAAATTTATATTTTCTTAATAAAGGTCTTGTTTTAGGAGAAAAAGTTTCTTCAAATTATGACGAATCAAAATTATTACATCTAAGAGTTGCTAATGCAAATTTTCTCACTTTCTATCAATTTGAAAAAACTAACTCAGGTAGACTAATTAATATATTTTTGGAAACACCTTGGTGTAAAAAAGGGGATAGTATAGTTGATGAGAATGCAGAAGATGTTTCGATTTTTGAGGTTTTTGAGCCAAATGATTGGTTAAAGATAGATAATTGTGATTTTGATGCAGTAATTGCCTCATATCAGAGATTAGTTGACACAGGAAACTTTGTTTCAAGTGCCGATGAAACCCTTATTAGAATTATTTCTGCTTCAGATTTATCAGAAGATGTGGGAAGAAAGAATTTACTTCTTGATTGGGCTCAGCAGCTTTCAAATTGGAATACGACACATTCCAAAGGCTATGAAAGAGCATTGATAAATGATTTACAAATTAAAATCAGAAGACGTCCTCTGAATGATAAAGAAAAAGAGAAATTAAATGAAATATTGACTAGCAATATTGAAGATTCTGAAGTTTGTTTTGGTGTGACGGTCCTACTGAAATCAAAATCTCAAGCAGATTATTATTGGAACAAATTAGAGGAAGAATTACAGAAAAGATATCAGGAATTCCCTATTTATAAGTTGTATCGAGAACTT

SEQ ID NO: 12120 - protein, 590 aa, Streptococcus agalactiae
MVNNRKIETLGLSYLRTVLDKNNYLQTYFDENDKTPLWDGEIHLLRAPSEKKSDIIGKVPVQIKATQQKKKNNRFLISLSDLELYQKNGGFVLFVVWIDEENNIKEILYKSLPPLSIKNLIKRSKRKLTTGAPKKVSIEIHSLSENKVYPMLMDFINSSRKQYSFATSRGLTMDKLPKEPKLKFYHYGKSPIDVFDYQEEHELFAYMVDDDTGIEIPIENPIKIVETAEKTDLTFTIGNYTIKNVVRCRFPNGNVELQIGSGFKLQADEKAGKFRLNYSRPDLLNQSIECTKALQELQNVGYVKLNEAKIEFDPQSLDKIKDMNLSEQLDELLQVSTFMEKMGVKKEIDLSLFDNQSQRNLYFLNKGLVLGEKVSSNYDESKLLHLRVANANFLTFYQFEKTNSGRLINIFLETPWCKKGDSIVDENAEDVSIFEVFEPNDWLKIDNCDFDAVIASYQRLVDTGNFVSSADETLIRIISASDLSEDVGRKNLLLDWAQQLSNWNTTHSKGYERALINDLQIKIRRRPLNDKEKEKLNEILTSNIEDSEVCFGVTVLLKSKSQADYYWNKLEEELQKRYQEFPIYKLYREL

SEQ ID NO: 12121 - protein, 1983 aa, Streptococcus agalactiae
ATGACATTCGATGCAGTTGACCAGTTGGCAGTAAACACTGTCCGTACGCTTTCAATGGATGCTATCCAAGCAGCTAATTCAGGCCACCCCGGTTTACCAATGGGGGCAGCTCCAATGGCTTATGTTCTATGGAATAAATACATGAACATTAATCCTAAAACAAGCCGTAACTGGACAAACAGAGACCGTTTTATTCTTTCTGCAGGACATGGATCTGCAATGCTATACAGCTTATTACATTTAGCTGGTTACGACCTTTCAATCGATGATTTGAAAAATTTCCGTCAATGGGGTTCAAAAACGCCAGGACATCCTGAAGTCAATCATACAGATGGTGTAGAAGCAACAACAGGACCGCTAGGACAAGGTATCGCAAACGCTGTAGGTATGGCAATGGCAGAAGCTCACCTTGCTGCAAAATACAACAAACCAGGTTTCAATATCGTTGACCATTATACTTTTGCTTTAAATGGTGATGGTGACTTAATGGAAGGTGTCAGTCAAGAAGTCGCAAGTTTAGCAGGTCACTTAAAACTTGGAAAATTAATCACTTTATATGATTCAAATGACATTTCTCTAGATGGCCCTACATCTATGGCCTTCACTGAGGATGTTAAAGGACGTTTTGAAGCTTATGGATGGCAACATATCCTCGTTAAAGACGGCAATGACTTAGATGCTATTGCCAAAGCTATCGAAGAGGCAAAAGCTGAAACTGAAAAACCAACTATTATTGAAGTTAAAACAATTATTGTTTTTGGATCTGAAAAACAAGGAACTTCAGCAGTTCATGGTGCCCCACTTGGAGCAGAAGGCATTGTCTTTACTAAAAATGCTTACAAATGGACCTATGAAGATTTCATCGTTCCTGACGAAGTGAAAGCTCGTTTCCAAGAAGGATTACAAGCACGTGGTGAACAAGCTGAAAATGCTTGGAATGAACTCTTTGCAAAATATGAAGCGGAATATCCAGAACTTGCTAAAGGCTATAAAGAAGTCTTTTCAAATGAACCAGTTTCAGTAGAATTAGCTGCGCATGAACTTGGGTCATCAAAAGCTAGCCGTGTTTCAAGTCAAGAGGCTATCCAACAAATCTCTGAACAAGTCGCATCATTCTGGGGTGGTTCGGCAGACCTTTCAGCCTCAAACAACACAATGGTTAAAGTTGAAAAAGACTTCCAACCAGGTCAATATGAAGGCTGCAATATCTGGTTTGGTGTACGTGAATTTGCCATGGCAGCTGCGATGAACGGTATTGCTCTTCATGGTGGTACTCGCGTTTATGGTGGTACATTCTTCGTCTTCTCAAACTATCTATTACCTGCAGTACGTATGGCAGCACTGCAAAGCTTACCAACCATGTATGTCATGACACATGACTCCATTGCCGTTGGTGAAGACGGTCCAACTCATGAACCAATTGAACAGTTAGCAAGTGTCCGTTCAATGCCAAACTTGAACGTCATTCGTCCAGCGGATGGTAATGAAACCAATGCCGCATGGAAACATGCCTTAGCAGAAATAGATAAACCAACAATGCTAGTGTTAACACGACAAAACTTGCCAGTTCTTGAAGGAACAAAAGAATTAGCAGAAGAAGGTTTAAATAAGGGTGCTTATATCTTGTCAGAAGCCAAAGGCGAAATGGATGGTATCATCATTGCGACGGGATCTGAAGTAAAATTAGCCATGGATACACAGGCTGCGCTAGCAGAAGAAGGGATCCATGTTCGTGTTGTATCAATGCCATCACAAAATATCTTTGATGCGCAAAGCGACGCTTATAAAGAAGAGATTTTACCAGCCACAATCACAAAACGCTTGGCAATTGAAGCAGCATCAAGCTTTGGTTGGGCAAAATATGTAGGCTTAGCTGGCAAAACCTTAACCATTGACACATGGGGAGCTTCGGCACCAGGAAATCGTATCTTTGAAGAATATGGTTTCACAACAGAAAATGCTACAGTCCTATATAAAGCATTA

SEQ ID NO: 12122 - protein, 661 aa, Streptococcus agalactiae
MTFDAVDQLAVNTVRTLSMDAIQAANSGHPGLPMGAAPMAYVLWNKYMNINPKTSRNWTNRDRFILSAGHGSAMLYSLLHLAGYDLSIDDLKNFRQWGSKTPGHPEVNHTDGVEATTGPLGQGIANAVGMAMAEAHLAAKYNKPGFNIVDHYTFALNGDGDLMEGVSQEVASLAGHLKLGKLITLYDSNDISLDGPTSMAFTEDVKGRFEAYGWQHILVKDGNDLDAIAKAIEEAKAETEKPTIIEVKTIIVFGSEKQGTSAVHGAPLGAEGIVFTKNAYKWTYEDFIVPDEVKARFQEGLQARGEQAENAWNELFAKYEAEYPELAKGYKEVFSNEPVSVELAAHELGSSKASRVSSQEAIQQISEQVASFWGGSADLSASNNTMVKVEKDFQPGQYEGCNIWFGVREFAMAAAMNGIALHGGTRVYGGTFFVFSNYLLPAVRMAALQSLPTMYVMTHDSIAVGEDGPTHEPIEQLASVRSMPNLNVIRPADGNETNAAWKHALAEIDKPTMLVLTRQNLPVLEGTKELAEEGLNKGAYILSEAKGEMDGIIIATGSEVKLAMDTQAALAEEGIHVRVVSMPSQNIFDAQSDAYKEEILPATITKRLAIEAASSFGWAKYVGLAGKTLTIDTWGASAPGNRIFEEYGFTTENATVLYKAL

SEQ ID NO: 12123 - protein, 642 aa, Streptococcus agalactiae
ATGAAATTTTTTTTAGACACAGCTAATGTTGAAGCTATTAAAACTATCAATGAACTTGGTTTGGTGGATGGTGTAACGACAAATCCAACGATTATCTCTCGCGAAGGTCGTGATTTTGAAACGGTTATTAAAGAAATTTGTGACATCATTGATGGTCCAGTTTCAGCAGAAGTAACGGGATTAACAGCTAATGAAATGGTGGACGAAGCGCGTGCACTATCTAAATGGCATGACAATGTTATTGTTAAAATTCCAATGACTGCAGAAGGATTGAAAGCAACCAGTATTTTGTCAAAAGAAGGCATTAAAATCAATGTCACCCTTATCTTTACGGTTTCACAAGGTCTTATGGCCATGAAAGCTGGCGCATCATATATCAGTCCATTTATTGGGCGTTTAGAAGATATCGGTACAGACCCTTATCAATTAATTGAGGCTCTTCGCGACATTATTGACATATATGGTTTTGGCACAGAAATTATTTCTGCTAGCATCCGCAGTGCAGCTCATGTTGAAGCAGTTGCTAAATTGGGATCACATATCGCAACAATTCCGGAAACCATTTTTGACAAGATGGTACAACACCCCTTAACAAAAAGTGGTATTGATCAATTTATGAATGATTGGGCTTCATTTAAAAAA

SEQ ID NO: 12124 - protein, 214 aa, Streptococcus agalactiae
MKFFLDTANVEAIKTINELGLVDGVTTNPTIISREGRDFETVIKEICDIIDGPVSAEVTGLTANEMVDEARALSKWHDNVIVKIPMTAEGLKATSILSKEGIKINVTLIFTVSQGLMAMKAGASYISPFIGRLEDIGTDPYQLIEALRDIIDIYGFGTEIISASIRSAAHVEAVAKLGSHIATIPETIFDKMVQHPLTKSGIDQFMNDWASFKK

SEQ ID NO: 12125 - protein, 687 aa, Streptococcus agalactiae
ATGCAAAAAGTAGAAATATCTCCCTCGTTGATGTGTATGAATCTTGACAAATTCCAAGAAGAAATCTGTTTTTTAGATTCACATGTTGATTCCTACCATATTGATATAATGGATGGACATTTTGTACCTAATATTACACTGTCTCCTTGGTTTGTGGAAGAAGTTAGAAAGCTATCCTCCTTACCAATGTCAGCTCATTTGATGGTAAAAGATCAACCGTTTTGGGTGCAACAAATGATTGATATAAAATGTGAATGGATTTGTATGCATGCTGAAGTGATAAATGGTCTGGCGTTTAGGTTAATTGATCAAATTCATAATGAAGGTTTAAAAGCAGGGGTAGTTTTAAATCCCGAAACCCCTATTGAAGTAATAATGCCCTATATTGAACTGTTAGATAAAGTTACTATTATGACAGTGGATCCTGGTTTTGCTGGACAAAGGTTTTTAGATTCAACTTTAGATAAAATTGTAGATCTAAGAAGATTGAGAGAAGAAAATAATTATAATTACTTAATTGAGATGGATGGTTCATCTAGCCGTAAAACATTTAAAAAAATTGATGAGGCTGGCCCTGATATATACATTGTTGGACGAAGTGGTTTATTCGCATTAACAGATAATATTTCAGAATCATGGGACATTATGACCAATGACTACTTTGAAATGACTGGAAAAAAATTAAAC

SEQ ID NO: 12126 - protein, 229 aa, Streptococcus agalactiae
MQKVEISPSLMCMNLDKFQEEICFLDSHVDSYHIDIMDGHFVPNITLSPWFVEEVRKLSSLPMSAHLMVKDQPFWVQQMIDIKCEWICMHAEVINGLAFRLIDQIHNEGLKAGVVLNPETPIEVIMPYIELLDKVTIMTVDPGFAGQRFLDSTLDKIVDLRRLREENNYNYLIEMDGSSSRKTFKKIDEAGPDIYIVGRSGLFALTDNISESWDIMTNDYFEMTGKKLN

SEQ ID NO: 12127 - protein, 1101 aa, Streptococcus agalactiae
ATGAAAGATATGATTAAAAAGGCTAATTTTAAAGGTCACTTGCTAACAGCAATTTCTTATTTAATTCCAATTGTTTGTGGAGCAGGTTTCTTAGTCGCTATTGGTATGGCTATGGGCGGTAGAGCACAAGATGCACTAGTTATTGGCAATTTTTCTTTTTGGGATACGATGGCCACAATGGGTGGTAAAGCTCTCGGTTTGTTACCTGTTATTATTGCGACTGGTATTGCTTTTTCAATCGCTGGTAAACCAGGGATTGCCCCAGGGTTTGTTGTCGGATTGATTGCAAACGCTATCAGTGCAGGGTTTATTGGTGGTATTTTAGGTGGCTATATTGCAGGATTTATCGCCTTAGGTATTTTAAAAAATGTAAAAGTACCAAATTGGGCAAAAGGACTGATGCCAACACTTATTGTTCCATTTTTTGCAGCTTTATTGAGTAGTCTTATCATGATTTATCTGATTGGTGGTCCCATTTCAGCCTTTACTGGTTGGTTAACTGATTTTCTAAAAAGCTTAGGAAATACCTCAAATCTTGTTATGGGTGCTGTTATTGGTGTCCTTTCAGGGGTAGACCTTGGAGGACCATTGAATAAAACTGTTTATGCATTTGTATTGACCTTACAAGCTGAAGGAGTAAAAGAACCACTTACTGCTTTACAATTAGTTAATACAGCGACACCAGTAGGATTTGGTTTAGCCTATTTTATTGCTAAATTATTCAAGAAAAACATTTATACTAACGATGAGATTGAAACCTTAAAATCTGCAGTGCCAATGGGGATTGTGAATATTGTTGAAGGGGTAATCCCTATTGTAATGAACAACTTAATGCCTGCAATTTTAGCAATTGGTGTCGGTGGAGCTGTAGGAGGAGCTGTTTCAATGACAATGGGAGCTGATTCTGCAGTGCCATTCGGTGGAATTTTAATGATTCCTACAATGACTAGGCCAATTGCCGGAATTTGTGGCTTGTTATCTAATATCTTGGTAACAGGATTAGTATATTCATTGGCTAAAAAGCCAGTTGATCGTAATGAAGTTACAATTGTTTCTGCTGAAGACGAAGAAGATATCGCACTTGATGATATCGAGATCATG

SEQ ID NO: 12128 - protein, 367 aa, Streptococcus agalactiae
MKDMIKKANFKGHLLTAISYLIPIVCGAGFLVAIGMAMGGRAQDALVIGNFSFWDTMATMGGKALGLLPVIIATGIAFSIAGKPGIAPGFVVGLIANAISAGFIGGILGGYIAGFIALGILKNVKVPNWAKGLMPTLIVPFFAALLSSLIMIYLIGGPISAFTGWLTDFLKSLGNTSNLVMGAVIGVLSGVDLGGPLNKTVYAFVLTLQAEGVKEPLTALQLVNTATPVGFGLAYFIAKLFKKNIYTNDEIETLKSAVPMGIVNIVEGVIPIVMNNLMPAILAIGVGGAVGGAVSMTMGADSAVPFGGILMIPTMTRPIAGICGLLSNILVTGLVYSLAKKPVDRNEVTIVSAEDEEDIALDDIEIM

SEQ ID NO: 12129 - protein, 447 aa, Streptococcus agalactiae
ATGGAAGCAAGAGATGCTATTAAACGTAAATTAATTAAAACTAATATGAATGTCACCACAAAAGATGAAGCATTTTCAGAATTAGTGTCGCTTTTAAAAAATGAAGGGTTTGTTTCTGATGAAGGAGGATTTATAAAAGACATCTATCTTAGAGAGTCTGAAGGACAAACTGGCATTGGAAATTATATTGCCATTCCGCATGGTAAAAGCTCACATGTAACAGAGCCTGCAGTCGTAATTGGGATTAATTCTTCAGAAATCCCATGGGAAACTTTAGATGATAATGGTGTAAAAGTTATTGTTTTATTTGCAGTAGGAAATGATTCAATCGCTGCACAAGAACATTTAAAAATATTATCACTATTTGCTAGAAAACTAGGAAATGATCAAATTGTAGAAAAATTAATTAATGCTAAAAATGAAGATGATGTTATAGAAGCATTTTCG

SEQ ID NO: 12130 - protein, 149 aa, Streptococcus agalactiae
MEARDAIKRKLIKTNMNVTTKDEAFSELVSLLKNEGFVSDEGGFIKDIYLRESEGQTGIGNYIAIPHGKSSHVTEPAVVIGINSSEIPWETLDDNGVKVIVLFAVGNDSIAAQEHLKILSLFARKLGNDQIVEKLINAKNEDDVIEAFS

SEQ ID NO: 12131 - protein, 309 aa, Streptococcus agalactiae
ATGAAAATTGTTGGAGTAGCAGCATGTACAGTAGGAATTGCTCACACTTATATTGCTCAAGAAAAATTGGAAAATGCTTCGAAAGCAGCTGGTCATGATGTCAAGATTGAAACACAAGGGACAATTGGTATTGAAAATCAACTAACATCAGAAGAAATAGCAGCAGCTGATATTGTTTTGTTAGCTGTTGATGTAAAAATTGCTGGTGAAGAAAGATTTGAAGGGAAAAAAGTAGTAAAAGTTCCAACAGAAGTTGCGATTAAGTCACCTAACAAATTAATCGCAAAACTTGTGGAAGTTGCGTCAAAT

SEQ ID NO: 12132 - protein, 103 aa, Streptococcus agalactiae
MKIVGVAACTVGIAHTYIAQEKLENASKAAGHDVKIETQGTIGIENQLTSEEIAAADIVLLAVDVKIAGEERFEGKKVVKVPTEVAIKSPNKLIAKLVEVASN

SEQ ID NO: 12133 - protein, 1887 aa, Streptococcus agalactiae
ATGCTGACTAGTAGACAAGTTAAACTTCTAAAAATTTTAGAAAGTGAGCAAAGCTATCAACCGATCGGTAAGTTTGCAAAAGAATTAGGTATTTCAGATAGAACAATTTATTCAGAAATAAAGTTGTTAATTGAAGAAGGGTATCAAATTAATTCTAAAAGAGGTAAAGGAATAAAATTAGTCAATCAAAGAGGGTTTGATGATAGACCAATTCTAAATATTTCAACTGATCCTGCTGAAACAAGGAGAATCGAGATTATGAAAAGTCTCCTCTTTGATCATGCAACTGTTACTTTAAAAGGACTTTCTGATCACTATTTTGTTAGTCAAACCTCTATTAAAAATGATTTAAAATTTATAGAAGGTACTTTATTTCAAAATAATTTAAGTTTCTTAAATAGTAATAAGAGTGGAACTAAAATTGAAAAAATGCCTCTAGACCAAAAAATACTTGTCTTGTTTAATTTCAATCAATACATTATGACATTTAAAGCAAATTTAGGGAATGATATTTTTGAAGATCGTATAGATTCATTAACTGAATATTACTCAAGTGAAGTTATTAGTGTTTGTAAAAATGTTCTTTACACTTTTATCAGATCAAATGTGATGACAATATTAGATACTTATATTGAGAGTCTCTTAAATATATATATCATATTTGTTAGTCAATTACTTACGGGGAATCATTTTGAAAAGACTATAAACCCTTTGGATAAAAAGCATCATGCCTTTTATGTGAGTACAGCTGTAACATTATTACATAAAGCTTCCTTACGATTAGGTTTTGAATATACAAATAGTGATATTGAGTACCTTTCTCAAATGTTATTGAATTATAGGTTTGAACCGATACCAGTTCAGCAAAATGATGATAAATTTGTCACTGCCCTATTGGAGGATGTTTCAAAGGCTATGTCCATCAATTTTTTGGAAGATCAATATCTTTTTGATCAACTTAGTCAACATATACCAGCCATGTTGTACCGATTGAAATACCATACGCATATACAAAATCCATTTACAGATAAAATAAAATTGGAGTTTGCCATAACGTATAATGTACTTTGGTTGGTGTTACAGGACTTAGGTCAAGAGTTAGATGTTGTTTTTAATGAAGATGAAGTAGCCTACTTAACCATTTATTTTCAACTTTCCATTGAAAAAATTGGGAAAAGTAGAAAAATCTTAATAGTATGTCAAACTGGGATTGTGACTTCTGAATTACTAATTAATAGAATAAAAAAAGTTGTGCCTTCACTAGATCAAGTTGAAATTGCATCCTTAAGTGAGATGTATGAGAAAGATTTGACTTGTTATGACTTTGTCCTTACAACTATTGAAACCAATTTAGATTTGCCTAATCTTTACTATGTCTCACCATTTATCAAAAATGAAGAAATTACCCAATTATTAACAGGAAACCCTTATAGTAATAACGTGACTATTGGGAAAAAAGATCAAATTGAAGCTAACTATTACATTCCGATGCTTAATCAAGATTTCAAAACGAAAGAAGAATTATTAAATTCTGTGGGACAAAATCTAGTAGAAATGGGATATGTCCAAAAAGAATTTGTTGCTAGTTTACTTGATAGGGAAAAAATGGGAAGTACAGAGTTTCCATTGGGAGTCGCTTTACCGCATGGAAGGCCAGAATTTGTCTTAAAAACAGTGGTTGTTTTTATTCAAAATACTCATAAAATTAAATGGAAAGAGTCATTGGTCGATACAGTATTTCTCATTGCGCTGTCAAGAGATGATATTAAAAACGTAAAAGACATTATTTTGAAAATTAATAAAACAATAAGTAATGAAGAAGTATTAAGACAATTAAAAAGTGAAACACGGGAATTAGAAGTTTATAAATTATTAAACCAAGCCGAT

SEQ ID NO: 12134 - protein, 629 aa, Streptococcus agalactiae
MLTSRQVKLLKILESEQSYQPIGKFAKELGISDRTIYSEIKLLIEEGYQINSKRGKGIKLVNQRGFDDRPILNISTDPAETRRIEIMKSLLFDHATVTLKGLSDHYFVSQTSIKNDLKFIEGTLFQNNLSFLNSNKSGTKIEKMPLDQKILVLFNFNQYIMTFKANLGNDIFEDRIDSLTEYYSSEVISVCKNVLYTFIRSNVMTILDTYIESLLNIYIIFVSQLLTGNHFEKTINPLDKKHHAFYVSTAVTLLHKASLRLGFEYTNSDIEYLSQMLLNYRFEPIPVQQNDDKFVTALLEDVSKAMSINFLEDQYLFDQLSQHIPAMLYRLKYHTHIQNPFTDKIKLEFAITYNVLWLVLQDLGQELDVVFNEDEVAYLTIYFQLSIEKIGKSRKILIVCQTGIVTSELLINRIKKVVPSLDQVEIASLSEMYEKDLTCYDFVLTTIETNLDLPNLYYVSPFIKNEEITQLLTGNPYSNNVTIGKKDQIEANYYIPMLNQDFKTKEELLNSVGQNLVEMGYVQKEFVASLLDREKMGSTEFPLGVALPHGRPEFVLKTVVVFIQNTHKIKWKESLVDTVFLIALSRDDIKNVKDIILKINKTISNEEVLRQLKSETRELEVYKLLNQAD

SEQ ID NO: 12135 - protein, 225 aa, Streptococcus agalactiae
ATGCCTCAAAAAAATGCCTTAACGGGAATGGATCAGTTTAGAAATGCATTGTTAAGTGAATTTTCCCAGGCAAAAATTATTGATGTACACCCAAACTTGATAACTATTCCCTTGGAGAGTGAATTCTCCTTACCTTATGATTTGATTTATAGTAATAATCCAAGTTCATCAACATTAGGATTTATTAAAACAATTGCAGATTCTAAGTTGACATTTTCGATCGAT

SEQ ID NO: 12136 - protein, 75 aa, Streptococcus agalactiae
MPQKNALTGMDQFRNALLSEFSQAKIIDVHPNLITIPLESEFSLPYDLIYSNNPSSSTLGFIKTIADSKLTFSID

SEQ ID NO: 12137 - protein, 447 aa, Streptococcus agalactiae
TTGCAGAAGAAGGTTCATTTAGCAAGGCTGCAAAAAAGCTTTATATTTCAACTTCTGCTGTTGCACAGCAAATCAATTTATTGGAAAACCGGTATCAGTTTAACACCTGCAGGTCAGTCTTTATACACGGATGGTCTTAATATTATCAAGATGTCTAAACTAGCGATTGAGAAAGGTCGATCTATTGCTAGTCAAAAAGAAATTATTAAAATTGGAACAGCAGATATTTTTAAACCTCGTTTGTTAATGAAATTTGTCAATTATTTTAAAGAGCACATTTTTCCCTATGACTTTGCCTTTCCGCACACTTCGGAAGCTGAGTGTGATGTAGTTGAAGCGATATATTGTGATATTGCTTGGAAGGGACATTGCCAATTCTACGAACTCTTTCAAACTCCTTTAGCAGTTGCGGTTAATAGTAATCATCCATTAGCTCTCAAAAAAAGG

SEQ ID NO: 12138 - protein, 149 aa, Streptococcus agalactiae
MQKKVHLARLQKSFIFQLLLLHSKSIYWKTGISLTPAGQSLYTDGLNIIKMSKLAIEKGRSIASQKEIIKIGTADIFKPRLLMKFVNYFKEHIFPYDFAFPHTSEAECDVVEAIYCDIAWKGHCQFYELFQTPLAVAVNSNHPLALKKR

SEQ ID NO: 12139 - protein, 348 aa, Streptococcus agalactiae
ATGGAGGGCCTCAGCTATGAACTTTATCCCTTTAATATTTATTGTAAGTTGATTGAACCTGGCGGGATACAAACAGATTTTTGGAACCGTTCTTTAGAAATAACAGATGGTGTAAAAGAAAGCCCATATTCAACATATGCAGAAAAATACCTGGAGGATATGACTGAACCAGTCTCTTCTAATCGTTCAAGTCCTGATTTGGTAGCAGAAACTATTTACATCGCTGCTACTGATAACATTAAACAATGGCGTTATCTTGTTGCGTCAGAAGAATTTATCAACTACCGTAAGTCTATGACTGATCAAGAATGGATAGCATCAATGATGAAAAATTATTTAGGAAAGGAT

SEQ ID NO: 12140 - protein, 116 aa, Streptococcus agalactiae
MEGLSYELYPFNIYCKLIEPGGIQTDFWNRSLEITDGVKESPYSTYAEKYLEDMTEPVSSNRSSPDLVAETIYIAATDNIKQWRYLVASEEFINYRKSMTDQEWIASMMKNYLGKD

SEQ ID NO: 12141 - protein, 735 aa, Streptococcus agalactiae
ATGCCATTAAATCAATTTTTTATATTAAATAATGGAGTAAAAATACCAAGTCTTGGCTTTGGCGTTTTCCAAATAGATGACCCTCTAGAGTGCGAACAATCCGTCTTAGATGCACTTCAAGTTGGTTATCGCCTCATTGACACAGCTTCTGGATACCTTAATGAGGAGGCAGTTGGTCGTGCTATTAAGAAATCAGGAATCCCCAGAAAAGAAATTTTTGTCGTGACTAAACTTTGGATCCAAGATGCATCTGAGGAAAAGGCTGGACCTGCTATTGATAGAGCATTAAAAAGGTTACAACTAGACTATATTAACCTTTATTTAATCCATCAACCAATGGGGGATTATTATGGGGCATGTCGTGCATTAGAAAAAGCCTACGAGGAGAGAAAAGCTCTAGCAATTGGTGTTTCTAATTTTTCAAATGGACGAGTTCAAGATTTAATCTTACATAACAAGATTATCCCTGCGGTCAATCAGATACAAATGAACCCTTTTCATCCTGCAAAAGATCAAGTAGAGTGGTTAAGCAAAAAGGGCATCCATACTATGGCTTGGGGACCATTTGCAGAAGCGAAATACGGAATCTTTCAGCATCCTACTTTGGTAGAGATTGCGGAACGCTATAATAAAAACTGTGTCTCAAATAATCCTAGCTTGGGAAGTGAAAAACAAAGTAACAGTCATTTCAAAAACTGTGCACAAAGCTCGTATTATGGGAAATATGGACTTTTT

SEQ ID NO: 12142 - protein, 245 aa, Streptococcus agalactiae
MPLNQFFILNNGVKIPSLGFGVFQIDDPLECEQSVLDALQVGYRLIDTASGYLNEEAVGRAIKKSGIPRKEIFVVTKLWIQDASEEKAGPAIDRALKRLQLDYINLYLIHQPMGDYYGACRALEKAYEERKALAIGVSNFSNGRVQDLILHNKIIPAVNQIQMNPFHPAKDQVEWLSKKGIHTMAWGPFAEAKYGIFQHPTLVEIAERYNKNCVSNNPSLGSEKQSNSHFKNCAQSSYYGKYGLF

SEQ ID NO: 12143 - protein, 144 aa, Streptococcus agalactiae
ATGGGAAATATGGACTTTTTTGACATATTATTAACCGATGATGATATGACTAAAATAGCAAGCCTTGAAAAATCAGAATATCTATTTGGTGATGTAGAATCACTGGAGCTAATTGAATACTTATCAAATAATGTTTTTGATATA

SEQ ID NO: 12144 - protein, 48 aa, Streptococcus agalactiae
MGNMDFFDILLTDDDMTKIASLEKSEYLFGDVESLELIEYLSNNVFDI

SEQ ID NO: 12145 - protein, 528 aa, Streptococcus agalactiae
ATGAGAAAACGAGAAATGAAACTCGAACTATATAATAATAAATGGCCAGAGAAGTATCAAGAAATTAAAGAAGAACTTACTAAACTATTAAGTGGACTAGAAATTGAATGCCATCATTTTGGGTCAACTTCAATCAAAGGTATGGCCTCTAAACCGATAATTGATGTACTCATATTCGTTAACAATATTAATATGGTAGATACGTATAATAATTCCATGTTGAATTCTGGATATGTTGCTAAAGGTGAAAATGGAATTCTAGGAAGAAGATATTTTGTTAAATATGCAAAAGACAAAATAAATCACTTAGTACACCTACATTTTTATGAAAAGGAAGATCCGAAAGGTTTACAAGAGTTACAATTTAGAGATTACTTAATAGAAAATAAGACTGCTTTTGATCGTTATTTGGCTGTAAAAGTCGAAGCGAGTAAGAAATATAAAGATATGCCAGAAGCCTATCAAAATCATAAGTCTACGGTTATTGATGCCATTAATAAAGAGATAGTAAAGACAAAAGTCTCTAAA

SEQ ID NO: 12146 - protein, 176 aa, Streptococcus agalactiae
MRKREMKLELYNNKWPEKYQEIKEELTKLLSGLEIECHHFGSTSIKGMASKPIIDVLIFVNNINMVDTYNNSMLNSGYVAKGENGILGRRYFVKYAKDKINHLVHLHFYEKEDPKGLQELQFRDYLIENKTAFDRYLAVKVEASKKYKDMPEAYQNHKSTVIDAINKEIVKTKVSK

SEQ ID NO: 12147 - protein, 690 aa, Streptococcus agalactiae
ATGCAGAAAATAGCTAAAGAAAATAAACTATCTGAGACTGCATTTATTTTAAAAGAAAAAGATCTATATAAGATTAGATGGTTCACACCAGAAAAAGAAGTGGATTTATGTGGGCATGCGACTCTAGCAAGTACCTATGTTATTTCACGTTATCTTGAAGATGATTTAAGTCATATCACTTTCTCTTCAAAGTCAGGACTTCTAGAAGTAACTATTAGTGGTGAAGATATAACCTTATTTTTTACAATGGTTGACGTTAAGCAAGTTCCAATAACAGCGATGATGAGAGAATCGATTGAACCTACTATCCTGGAAGCTTATCGAACAGCAGATGAAGAGCATCTTGTTTTATATCTGGAAAATCAAGAATCTATAGAGAATTTCAAAATTGATTTAGAGAAAATTAGTCAATTAGCACCACATGGAGTGACACTTACAGCCCAAAGTTCAGAAAAAAATATTGATTATGTTCTTCGTTACTTTGCACCAAATTATGGTATCAATGAAGATCCTGTCACTGGCTCAGCACAGACACGTTTAGCACCAATTTGGACGAAAAAGCTTGGAAAGGAACAATTAGTATCCAAGCAATTATCTGAAAGACAAGGGTTGATGATGATTGAGTTGGAAGAGAATCTTGTTAAAATATCAGGACAAGCTAATTTATATCTTAAAGGCAATATTGATATT

SEQ ID NO: 12148 - protein, 230 aa, Streptococcus agalactiae
MQKIAKENKLSETAFILKEKDLYKIRWFTPEKEVDLCGHATLASTYVISRYLEDDLSHITFSSKSGLLEVTISGEDITLFFTMVDVKQVPITAMMRESIEPTILEAYRTADEEHLVLYLENQESIENFKIDLEKISQLAPHGVTLTAQSSEKNIDYVLRYFAPNYGINEDPVTGSAQTRLAPIWTKKLGKEQLVSKQLSERQGLMMIELEENLVKISGQANLYLKGNIDI

SEQ ID NO: 12149 - protein, 408 aa, Streptococcus agalactiae
ATGTGGGCTTATGATAAGAGTTTTACTGATCAAGATTGTCAGTACTGGTTAGATTGGAATATGAATTCTTACAGGTCTGATGGATTTGGTCTGTGGAAAATCATTCATAAAGAAACTTCAGAGGTCGTAGGTGAATGTGGCATTACAATGCAAACTGTTGAAGGAGAAAATTACCCTGAAATAGGTTACCATCTTAAAAAAGAGCATTGGAATAAAGGAATTGCGACAGAAGTTGCTAGGGCAGTACGAGATTATGCTTTCGAAGAGTTAAACCTTGAGGAACTCATTATCATAAGTCGAGATATTAATTTACAGTCAATGAATATTGCCATAAAATCAGGATTTACTATTAAAAAAAGATTTTTGAAGAATGATAGGTTTCCTCATTTTATGTTTTACTTGAAAAGA

SEQ ID NO: 12150 - protein, 136 aa, Streptococcus agalactiae
MWAYDKSFTDQDCQYWLDWNMNSYRSDGFGLWKIIHKETSEVVGECGITMQTVEGENYPEIGYHLKKEHWNKGIATEVARAVRDYAFEELNLEELIIISRDINLQSMNIAIKSGFTIKKRFLKNDRFPHFMFYLKR

SEQ ID NO: 12151 - protein, 297 aa, Streptococcus agalactiae
ATGATGAATATGCAAAATATGATGCGTCAAGCACAAAAGCTTCAAAAACAAATGGAACAAAAGCAAGCTGATTTAGCAGCTAGCCAGTTTACTGGAAAATCTGCTCAAGAGCTCGTTACTGTGACATTTACAGGCGATAAAAAGCTAATTTCAATTGATTACAAAGAAGCTGTGGTAGACCCTGAAGATATTGAAACACTACAAGACATGACAACTCAAGCTATCAATGACGCTTTAAGCCAAGTTGACGATGCTACAAAAAAAATTATGGGAGCATTTGCGGGGAAAATGCCATTC

SEQ ID NO: 12152 - protein, 99 aa, Streptococcus agalactiae; identical to SEQ ID NO: 3196

SEQ ID NO: 12153 - protein, 1187 aa, Streptococcus agalactiae
ATGGTTATGGATAGTCTGATCATAAAACAGTTGATTAAGAGTACATTTGATATACCCTTACAAGTCACTTATCCAAATGGGAATATTGAAACTTATAATGGTAACAATCCCCACGTCAAACTTAAACTAAACAAAAATTTCTCCGTCTCGGAGCTATCAAAAGACCCTTCTATAGTATTGGGTGAAGCCGTTATGGATGGAGACATTGAAATTGATGGTTCTATACAAGAATTAATTTTATCAGCTTACCGCTGTGGAGACAGCTTTCTACGTAATAGTAAATTTAGCAAATTGATTCCTAAACAATTTCATGATAAAAAACACAGTAAATCCGACATTCAAAAGCATTATGACATCGGAAATGATTTCTATAAACTTTGGCTTGATGATACCATGACTTATTCATGCGCCTATTTTAAACATGAAAATGACAGTCTAGAGCAAGCTCAACTAAACAAAGTACACCATATTCTTAATAAATTAAATGCTCATCCGGGAGGGAAATTACTAGATATCGGTTGTGGCTGGGGGACACTTATCATTACTGCTGCTAAAGAATATGGCTTAAATGCGACAGGTATCACCTTAAGTGAAGAGCAGGCTTCCTTCATTACTAAGCGTATCAAGGAAGAAGGATTGGAAAATAAAGTAACAGTCCTCATTAAAGATTATCGTGACATTCATGAAACATACGATTATATCACTAGTGTGGTATGTTTGAACATGTAGGAAAAGAAAATTTATCTCAATACTTCCAAACTATTTCTAAAAGACTCAACATTAATGGTCTAGCTCTTATTCATGGTATTACTGGACAAGTGGGTGGTAATCATGGTAGTGGAACTAATTCTTGGATTAATAAGTATATCTTCCCAGGAGGATATATCCCTCGTTTAACTGAAAATTTAAATCATATAGCTAGTGCTGGACTTCAAATTGCTGACTTAGAACCGCTTCGTCGTCACTATCAAAAGACTCTCGAATTATGGACAAAAAATTTCCATAATGCCCTTCCTGAAGTTCAGAAAACTCATGATAAGCGTTTTATCAATATGTGGGACCTCTATCTTCAATCTTGTGCGGCCTCTTTTGAATCTGGCAATATTGATATTTTTCAATACTTGCTTTCAAAAGGTGTTTCAAAAGACACTATGCCTATGACACGCGATTATATGTATTCTGCTAAT

SEQ ID NO: 12154 - protein, 396 aa, Streptococcus agalactiae
  VARIANT 237: Xaa = Any Amino Acid
MVMDSLIIKQLIKSTFDIPLQVTYPNGNIETYNGNNPHVKLKLNKNFSVSELSKDPSIVLGEAVMDGDIEIDGSIQELILSAYRCGDSFLRNSKFSKLIPKQFHDKKHSKSDIQKHYDIGNDFYKLWLDDTMTYSCAYFKHENDSLEQAQLNKVHHILNKLNAHPGGKLLDIGCGWGTLIITAAKEYGLNATGITLSEEQASFITKRIKEEGLENKVTVLIKDYRDIHETYDYITSXGMFEHVGKENLSQYFQTISKRLNINGLALIHGITGQVGGNHGSGTNSWINKYIFPGGYIPRLTENLNHIASAGLQIADLEPLRRHYQKTLELWTKNFHNALPEVQKTHDKRFINMWDLYLQSCAASFESGNIDIFQYLLSKGVSKDTMPMTRDYMYSAN

SEQ ID NO: 12155 - protein, 723 aa, Streptococcus agalactiae
ATGTCAGAAAAATATTCCACTGGTGACTTAGCTAAAGAAGCAGGAGTTACTGTTCGTACTGTTCAGTACTATGACAAAAGAGGAATTTTATCCCCATCAGAACTATCTGAAGGAGGTAGGAGGGTTTATAGTATTGCTGATTTAGAAAAGCTTAGACAAATTATTTATTTACGAGATTTAGATTTTTCAATTGATAATATCAAAAATCTATTTACTGAAGACAATGCTAGTCAGATTTTAGAGCTTTTTTTACAAGTGCAGATAAGAGAATTAAGGCTATCTATTGATAGTAAAAAAGACAAACTTGACAAAGCTGTCAACCTACTAAAAACCGTAGAAAAACAAGACAGTAAAACATTAGGCTATCTTTCTGACATTGTGCTTATGGAAGAAAACAAAAGAAAATGGGGTAAACTACAAAAAAGCATAGTGCTACAAGTCATTATGATTATTATGGTCTATATTACGTTAATAATGGCAGCAGTTTCTCTAAATCAAAGATGGCTTATGTGGATAGCAGTAACAGTATTCTTAATAGCTATGAATGGTATGGTTTGGTATTTTAAACAACAGGTTGTTTATCTTTGTCCAAATTGTCATCAAACCTTTACACCGACATATCAAGCATTTAATCTAGCGAAACATACCCCTAAGACGCGAAAAGTATTCTGTCCACATTGTCACCAAAAGTCACATTGTATAGAGTTAGCCAGAGAAGAACGT

SEQ ID NO: 12156 - protein, 241 aa, Streptococcus agalactiae
MSEKYSTGDLAKEAGVTVRTVQYYDKRGILSPSELSEGGRRVYSIADLEKLRQIIYLRDLDFSIDNIKNLFTEDNASQILELFLQVQIRELRLSIDSKKDKLDKAVNLLKTVEKQDSKTLGYLSDIVLMEENKRKWGKLQKSIVLQVIMIIMVYITLIMAAVSLNQRWLMWIAVTVFLIAMNGMVWYFKQQVVYLCPNCHQTFTPTYQAFNLAKHTPKTRKVFCPHCHQKSHCIELAREER

SEQ ID NO: 12157 - protein, 585 aa, Streptococcus agalactiae
ATGAAACAATTACAAGAATATATAGCTTTTGATTTAGAGTTTAACACGGTTGGTGAGCATAGCCATATTATTCAAGTGTCGTCCGTTAAATATTCTAATCATCAAGAGATTGCTTTATTTGATACTTATGTTCACACAAAAGTTCCATTACAAAGCTTTATTAATGGTTTAACAGGTATTACAGCTAGAGATATTATAGGGGCTCCTAAAATTGAGACAGTTTTGACAGACTTTCAGAGTTTTGTTGGAGACACACCGCTGATTGGTTATAATGGGCATAAATCGGATTTACCTCTTTTAGTTGAAAATGGTTTGGATCTAACTAGTCAATATCAGGTGGACTTATATGATGAAGCTTTTGTGAGACGTAGTACAGATTTAAATGGTATTGTCAACCTTAAATTGACTACTGTTGCTGACTTTTTAGGAATAAAGGGTAAGGCACATAATAGCTTAGAGGATGCCCGCATGACTGCGCGTGTTTATGAAAAATTTCTGGACTTGGATGAAAATAAAATCTATTTAAAACAGCAAAAAGAGGTAGCAGTTGATAGCCCATTTGCGACTTTAGGAAATTTGTTTGAT

SEQ ID NO: 12158 - protein, 195 aa, Streptococcus agalactiae
MKQLQEYIAFDLEFNTVGEHSHIIQVSSVKYSNHQEIALFDTYVHTKVPLQSFINGLTGITARDIIGAPKIETVLTDFQSFVGDTPLIGYNGHKSDLPLLVENGLDLTSQYQVDLYDEAFVRRSTDLNGIVNLKLTTVADFLGIKGKAHNSLEDARMTARVYEKFLDLDENKIYLKQQKEVAVDSPFATLGNLFD

SEQ ID NO: 12159 - protein, 129 aa, Streptococcus agalactiae
ATGGTGTCATATGTAGGCCGTCATGTTATTGATTACATCAAAAATAGAACACTTGATGACTTTTCACCAGCACAATGTAGTCTTTTGAGACGTCAATTATTAGATAAGTTATATGATGTNNNNNTTAAT

SEQ ID NO: 12160 - protein, 43 aa, Streptococcus agalactiae
  VARIANT 41, 42: Xaa = Any Amino Acid
MVSYVGRHVIDYIKNRTLDDFSPAQCSLLRRQLLDKLYDVXXN

SEQ ID NO: 12161 - protein, 468 aa, Streptococcus agalactiae
ATGACAGTTGAAAAGACGGTTAGTGAATTAGCTGAAATTTTAGGGGTTAGTCGTCAAGCGATGAATAACAGAGTTAAAACACTCCCTGAAGAATGTGTGGAAAAGAATAGTAAAGGCGTTACAGTTGTTAATCGTGATGGCTTGATTAAATTGGAAGAAATCTATAAAAAAACTATTTTGGAAGAGGAACCAATTGATGAAGAAGCATCAAGACGAGAACTTTTAGAAATTCTCGTTGATGAGAAGAATACTGAAATCACACGTTTATATGAACAGTTAAAAGCAAAAGATATTCAGATTGCTTCAAAAGACGAGCAGTTACATGTAAAAGATATTCAAATAGCAGAGAAAGATAAGCAATTAGATCAACAACAGCAATTGACTTTAACTGCTATGGAAGATACGCAACGTCTGCAACTTGAGTTAAATGAAGCTAAAGCAGAGGTGAAGAGATCAAGAAGCNNNNNT

SEQ ID NO: 12162 - protein, 156 aa, Streptococcus agalactiae
  VARIANT 155, 156: Xaa = Any Amino Acid
MTVEKTVSELAEILGVSRQAMNNRVKTLPEECVEKNSKGVTVVNRDGLIKLEEIYKKTILEEEPIDEEASRRELLEILVDEKNTEITRLYEQLKAKDIQIASKDEQLHVKDIQIAEKDKQLDQQQQLTLTAMEDTQRLQLELNEAKAEVKRSRSXX

SEQ ID NO: 12163 - protein, 1170 aa, Streptococcus agalactiae
ATGAAGCATTATGACACAATAATTATAGGTGGTGGACCTGCTGGAATGATGGCAGCTATTTCCTCAAATTTTTACGGCAACAAAACACTTCTTATTGAGAAAAATAAACGTTTAGGCAAAAAACTAGCTGGAACAGGTGGTGGCCGCTGTAATGTTACCAATAATGGAAACCTTGATGAGCTCTTAGCTGGTATACCTGGAAATGGCCGTTTCCTATATAGCGTCTTCTCACAATTTGATAACCATGATATTATTAACTTCTTTCAAGACAACGGCGTCACACTTAAAGAAGAAGATCATGGGCGTATGTTCCCTACTACTGATAAATCTCGTACTATCATTAACGCCCTTGAAAATAAAATAAAAGAACTTGGTGGTCAAATTATGACTGACACAGAAGTTGTCTCTGTCAAAAAGATAGGAGATTCATTCTATATCAAAACTAAAGATACACAGTTCGCATCCGATAAACTTGTCGTAACAACTGGTGGTAAATCCTATCCGTCTACAGGTTCTACTGGTTTCGGTCATGACATTGCTCGTCACTTTAAATTAGAAGTCACAGATATGGAAGCCGCCGAAAGCCCTCTTTTAACTGATTTTCCCCATAAAAAACTACAAGGTATCTCCTTAGATGATGTCACTTTGTCATTTGAAAAGCATATTATTACACACGATCTTCTCTTTACTCATTTTGGATTATCAGGACCAGCAGCCTTGCGAATTTCCAGCTTTGTCAAAGGCGGAGAAACTATATACCTAGATGTTTTGCCCAATATCTCTGTTAAAGAATTGGAAACACACTTCCAAAATGAAAGAGAAAAATCTTTGAAAAACGCTCTTAAAATACTTCTTCCTGAGCGTTTAGCTGAATTTTACGCTGAAGACTTACCCGAAAAAGTAAAACAAGTATCTGTAAAAGACTTAGAAACGTTAATTCAAAAACTTAAAAAACTTCCTATTTTAGTAACTGGCAAGATGTCTCTAGCAAAATCCTTTGTAACAAAAGGTGGAGTTGATCTTAAAGAAATAAACCCCAAAACACTTGAAAGTAAAAAGGTAGCTGGTTTACATTTTGCTGGTGAAGTCCTAGACATCAATGCTCATACGGGAGGGTTTAACATTACTTCTGCCTTATGTACAGGCTGGGTAGCTGGTAGCTTACACTAT

SEQ ID NO: 12164 - protein, 390 aa, Streptococcus agalactiae
MKHYDTIIIGGGPAGMMAAISSNFYGNKTLLIEKNKRLGKKLAGTGGGRCNVTNNGNLDELLAGIPGNGRFLYSVFSQFDNHDIINFFQDNGVTLKEEDHGRMFPTTDKSRTIINALENKIKELGGQIMTDTEVVSVKKIGDSFYIKTKDTQFASDKLVVTTGGKSYPSTGSTGFGHDIARHFKLEVTDMEAAESPLLTDFPHKKLQGISLDDVTLSFEKHIITHDLLFTHFGLSGPAALRISSFVKGGETIYLDVLPNISVKELETHFQNEREKSLKNALKILLPERLAEFYAEDLPEKVKQVSVKDLETLIQKLKKLPILVTGKMSLAKSFVTKGGVDLKEINPKTLESKKVAGLHFAGEVLDINAHTGGFNITSALCTGWVAGSLHY

SEQ ID NO: 12165 - protein, 780 aa, Streptococcus agalactiae; identical to SEQ ID NO: 6297

SEQ ID NO: 12166 - protein, 260 aa, Streptococcus agalactiae; identical to SEQ ID NO: 6298

SEQ ID NO: 12167 - protein, 267 aa, Streptococcus agalactiae
ATGGCTAAGAAATCAAAAATTGCTAAATTTCAAAAACAGCAAAAACTCGTAGAACAATATGCTGAACTACGTCGTGAGTTAAAAGAAAAGGGTGATTACGAAGCACTTCGTAAACTTCCTAAAGATTCTAACCCTAACCGACTTAAAAATCGTGATTTAATCGATGGCCGTCCTCACGCTTACATGCGTAAATTCGGTATGAGTCGTATTAACTTCCGTAACCTAGCTTACAAAGGCCAAATTCCTGGCATTAAAAAAGCAAGCTGG

SEQ ID NO: 12168 - protein, 89 aa, Streptococcus agalactiae
MAKKSKIAKFQKQQKLVEQYAELRRELKEKGDYEALRKLPKDSNPNRLKNRDLIDGRPHAYMRKFGMSRINFRNLAYKGQIPGIKKASW

SEQ ID NO: 12169 - protein, 1023 aa, Streptococcus agalactiae
ATGTTACATTTTGAAAATGATTATAATAAAGGAGCTCATCCAGAGCTTTTGAATGCCCTTATTGAAACTAATGATCAAGGTCTATCGGGATATAGGACAGATAGTTACTGTCAACAAGCGGCAGATAAAATTCGAGAAGTCTGTTTCTGTCCACAAGCTGAAGTTGAGTTTTTAGTGGGTGGTACTCAAACAAATCAAGTAGTTATCAGTAGTATGCTTGCTTCTTATGAAGGAGTTATTGCTGCAGAAACAGGTCATGTGAGTAGTCATGAAGCAGGAGCCATAGAATTTTCAGGTCATAAGGTATTGACTTTACCTTCTCATAATGGGAAATTACTCGCAAGCGAAGTTGCAACTTATATTGAGACTTTTTATGCTGATGGTAATTACCAACACATGGTTTTTCCAGGAATGGTTTATATATCACATCCAACAGAATATGGAACACTTTATAGTAAAGCAGAACTAGAAGAGTTGTCGAAGATTTGTAAACATTATCAAATCCCCTTATTTATTGACGGTGCTCGTCTGGGGTATGGTTTGGCTGCGAAAGATACAGATGTTGATTTCCCAACGATTGCAGCCTTATCAGATGTTTTTTATATTGGCGGAACTAAAATGGGGGCTCTTGCTGGGGAAGCAGTTGTTTTCACAAAGAAAAATCGTCCAAAACAGTTTACTACAATTGTAAAGCAGCATGGTGCGTTATTAGCCAAGGGAAGATTGCTGGGACTTGCTTTTGATCGTTTCTTTACGGATGACCTTTACTTAAAAATTGGAAAGCATGCGATCGACTTAGCAGAGGAATTAAAAATCATTTTAGAAGAAAAAGGTTACTCATTCTATTTAAAATCACCAACTAATCAACAATTTATTATTGTAGAAAATACAAAACTAGCAGATTTAGCAAAGAATGTAGCTTATAGTTTTTGGGAAAAATATGATGACCATCATACTGTAATACGTCTAGCAACTAGTTGGTCAACTAGTCGCGAAGATGTAACTGCTTTAAGAAATGTCTTG

SEQ ID NO: 12170 - protein, 341 aa, Streptococcus agalactiae
MLHFENDYNKGAHPELLNALIETNDQGLSGYRTDSYCQQAADKIREVCFCPQAEVEFLVGGTQTNQVVISSMLASYEGVIAAETGHVSSHEAGAIEFSGHKVLTLPSHNGKLLASEVATYIETFYADGNYQHMVFPGMVYISHPTEYGTLYSKAELEELSKICKHYQIPLFIDGARLGYGLAAKDTDVDFPTIAALSDVFYIGGTKMGALAGEAVVFTKKNRPKQFTTIVKQHGALLAKGRLLGLAFDRFFTDDLYLKIGKHAIDLAEELKIILEEKGYSFYLKSPTNQQFIIVENTKLADLAKNVAYSFWEKYDDHHTVIRLATSWSTSREDVTALRNVL

SEQ ID NO: 12171 - protein, 1008 aa, Streptococcus agalactiae
ATGAAAGATAGATATATTTTAGCAGTGGAAAGTTCATGTGATGAAACTAGTGTTGCTATTTTAAAAAATGATAAAGAATTACTAGCTAATATTATTGCAAGTCAAGTTGAAAGTCACAAACGTTTTGGTGGTGTTGTTCCTGAAGTGGCAAGCCGTCATCACGTTGAAGTAGTAACAACCTGTTTTGAGGATGCTCTTCAAGAAGCAGGTATTGTTGCTAGCGATTTGGATGCTGTTGCTGTAACATATGGTCCGGGATTAGTAGGAGCCTTATTGGTAGGTATGGCTGCAGCAAAAGCTTTCGCTTGGGCAAATAAATTACCTCTAATTCCTGTAAACCACATGGCGGGTCATTTAATGGCAGCACGTGACGTTAAGGAACTTCAATACCCATTGTTAGCTTTGCTTGTCAGTGGAGGACATACAGAATTAGTATATGTTTCTGAACCGGGAGATTACAAAATAGTAGGAGAAACTCGGGATGATGCTGTTGGAGAAGCTTATGATAAAGTAGGCCGTGTTATGGGCTTAACTTATCCAGCAGGTCGCGAGATTGATCAGTTAGCTCATAAGGGTCAAGATACTTACCATTTTCCTAGAGCGATGATCAAAGAAGATCATCTTGAATTTTCTTTTTCTGGATTAAAATCTGCATTTATCAATTTACATCATAATGCAGAACAAAAGGGTGAAGCATTGGTTCTTGAAGATTTATGTGCTTCCTTTCAGGCGGCTGTTTTGGATATTTTATTGGCTAAAACTCAAAAAGCTTTGTTAAAGCATCCAGTGAAAACTTTAGTCGTTGCTGGTGGAGTTGCAGCTAATCAAGGACTTCGGGAACGCTTGGCTACTGATATTTCTCCTGATATTGATGTGGTTATTCCTCCTCTTAGATTATGTGGGGATAATGCAGGAATGATTGCATTAGCAGCAGCGATAGAGTTTGAAAAAGAGAATTTTGCTTCTTTAAAATTGAATGCCAAACCTAGCTTAGCTTTTGAGAGTTTA

SEQ ID NO: 12172 - protein, 336 aa, Streptococcus agalactiae
MKDRYILAVESSCDETSVAILKNDKELLANIIASQVESHKRFGGVVPEVASRHHVEVVTTCFEDALQEAGIVASDLDAVAVTYGPGLVGALLVGMAAAKAFAWANKLPLIPVNHMAGHLMAARDVKELQYPLLALLVSGGHTELVYVSEPGDYKIVGETRDDAVGEAYDKVGRVMGLTYPAGREIDQLAHKGQDTYHFPRAMIKEDHLEFSFSGLKSAFINLHHNAEQKGEALVLEDLCASFQAAVLDILLAKTQKALLKHPVKTLVVAGGVAANQGLRERLATDISPDIDVVIPPLRLCGDNAGMIALAAAIEFEKENFASLKLNAKPSLAFESL

SEQ ID NO: 12173 - protein, 405 aa, Streptococcus agalactiae
ATGGAATCATCAGAACAAGCACTGGCTATATGGAGCGTACTATCTGATGTCTATGACAAATCTCCGTGGAGTTTATCGCAGATTTCAGAAGATTTAAAAAAAGATTCAACAGATTATTTTTTTGTTTATAATGACGGTGAAGTCATTGGTTTTTTGGCTCTTCAACAATTGGTAGGTGAAGTAGAAATTACTAATATTGCTGTTAAAAAAAATTATCAAGGTAAAGGTTATGCTTACCAGTTAATGTCAATGATCGCTGATATAGAGGTGCCAGTTTTTCTTGAGGTTCGTTATTCAAATATCGTAGCACAAAAACTTTATGAGAGGTGTGGTTTTGTAGTTTTAGGAAAGCGCAAAAATTATTACCATGATCCAATTGAAGATGCTATAGTGATGCGCAAGGGA

SEQ ID NO: 12174 - protein, 135 aa, Streptococcus agalactiae
MESSEQALAIWSVLSDVYDKSPWSLSQISEDLKKDSTDYFFVYNDGEVIGFLALQQLVGEVEITNIAVKKNYQGKGYAYQLMSMIADIEVPVFLEVRYSNIVAQKLYERCGFVVLGKRKNYYHDPIEDAIVMRKG

SEQ ID NO: 12175 - protein, 690 aa, Streptococcus agalactiae
ATGATGAAAGTTTTAGCCTTTGATACTTCAAGCAAAGCACTATCAGTGGCTGTACTAAACAATATGGAATGTTTAGCGACTGTCACTATCAATATCAAAAAGAATCATAGCATTAATTTGATGCCAGCCATTGATTTTTTAATGCAATCAATTGATTTAGAACCTCAAGATTTGGACCGTATCGTAGTAGCAGAGGGTCCAGGATCTTATACGGGCTTACGTGTAGCTGTTGCTACAGCAAAAATGCTAGCTTATACGCTTAAGATTGACTTAGTTGGAGTATCTAGCCTGTACGCTTTAACAAATGGATTTTCAGAAAATGATTTATTGGTACCACTTATAGATGCACGACGTAACAATGTTTATGTTGGTTTCTATCAAAATGGAGATACTGTTAAACCAGACTGTCACACTTCTCTTGAAGAAGTCTTACAAGAGGTGGGGAATAAAGCCAATGTTCATTTTGTCGGAGAGGTTGCAGCATTTGTTGACCAGATTAAGAAAGTTTTACCACATGCTAAAATTACAGAAACTTTACCTTGTGCAGTGGCAATTGGGCGCAAAGGACAAAAAATGAAAAGCGTTAATGTAGATGCGTTTGTTCCACGATACTTAAAACGTGTTGAAGCTGAGGAAAATTGGTTAAGAAACCACTGTGAAACGAATACAGAAGAATATATTAAGAGAGTT

SEQ ID NO: 12176 - protein, 230 aa, Streptococcus agalactiae
MMKVLAFDTSSKALSVAVLNNMECLATVTINIKKNHSINLMPAIDFLMQSIDLEPQDLDRIVVAEGPGSYTGLRVAVATAKMLAYTLKIDLVGVSSLYALTNGFSENDLLVPLIDARRNNVYVGFYQNGDTVKPDCHTSLEEVLQEVGNKANVHFVGEVAAFVDQIKKVLPHAKITETLPCAVAIGRKGQKMKSVNVDAFVPRYLKRVEAEENWLRNHCETNTEEYIKRV

SEQ ID NO: 12177 - protein, 228 aa, Streptococcus agalactiae
ATGATTTATAAAGTTTTCTATCAAGAAACAAAAGAACGCAACCCACGTCGTGAGCAAACCAAAACACTTTACATTACTATTGATGCAGCTAATGAATTAGAAGGTCGCATTGCTGCACGTAAACTAGTTGAAGAAAATACAGCTTACAATATCGAATTCATCGAGTTACTTTCAGACAAACACCTTGAATATGAAAAAGAAACTGGTGTTTTCGAGCTCACTGAGTTC

SEQ ID NO: 12178 - protein, 76 aa, Streptococcus agalactiae
MIYKVFYQETKERNPRREQTKTLYITIDAANELEGRIAARKLVEENTAYNIEFIELLSDKHLEYEKETGVFELTEF

SEQ ID NO: 12179 - protein, 1677 aa, Streptococcus agalactiae
ATGTCAAATATCAACTTAAAACCCGAAGAAGTTGGGGTTTATGCGATTGGTGGTCTCGGTGAAATCGGAAAAAATACTTACGGTATCGAATATCAAGACGAAATTATTATTGTAGACGCTGGTATTAAATTCCCTGAAGATGATCTTTTGGGAATAGATTATGTTATCCCAGACTATTCATATATCGTTGAAAACATTGACCGTATCAAGGCCCTTGTTATAACTCATGGGCACGAGGACCACATCGGTGGTATTCCTTTTCTATTAAAACAAGCTAATTTACCGATTTATGCAGGCCCTCTCGCTCTTGCTCTAATCAAAGGTAAGTTAGAAGAACATGGTTTACTTCGTGACGCTACATTATACGAAATCCACGCTAATACAGAGCTGACTTTTAAAAACTTAAGCGTTACATTTTTCCGCACTACTCACTCCATTCCTGAACCATTAGGTATTGTTATTCATACCCCTCAAGGTAAGGTTATTTGTACAGGTGACTTCAAATTTGACTTTACACCTGTTGGGGAGCCCGCTGACTTACATCGTATGGCTGCTCTAGGTGAAGACGGTGTCCTCTGCCTTTTATCAGACTCAACAAATGCTGAAGTTCCAACCTTCACTAATTCCGAAAAAATTGTTGGGCAATCTATTATGAAGATTATCGAAGGTATCGAGGGACGTATTATTTTCGCCTCTTTTGCTTCAAACATCTTCCGACTCCAACAGGCTGCTGAAGCTGCTGTTAAAACTGGTCGTAAAATTGCTGTTTTTGGACGGTCAATGGAAAAGGCAATTGTTAACGGTATTGAACTTGGCTATATTAAAGTTCCAAAAGGTACCTTCATTGAGCCAAGCGAACTTAAACATCTTCATGCTAGTGAAGTTTTAATTATGTGTACAGGTAGTCAAGGTGAGTCTATGGCAGCACTTGCTCGTATCGCTAACGGTACTCATCGTCAAGTTACTTTGCAACCTGGTGATACTGTGATTTTCTCATCAAGCCCAATCCCTGGTAATACAACAAGTGTCAATAAATTAATCAATACCATTCAAGAAGCTGGTGTCGATGTTATTCATGGTAAAATTAACAATATCCATACCTCCGGCCATGGTGGTCAACAAGAACAAAAATTAATGTTACGCTTGATTAAACCAAAGTATTTCATGCCCGTACACGGTGAGTATCGCATGCAAAAAGTCCATGCTGGTTTAGCAGTTGACACAGGTATTCCTAAAGAGAATATCTTCATTATGGAAAACGGTGATGTTTTAGCTTTAACGAGCGACTCTGCTCGCATTGCTGGACATTTCAATGCTCAAGATATCTACGTTGATGGGAATGGTATTGGCGATATTGGTGCGGCAGTTCTACGTGACCGCCACGACTTATCTGAAGATGGTGTTGTCCTTGCCGTTGCTACCGTTGATTTCGATTCAAAAATGATTTTAGCTGGACCAGACATCCTTAGCCGAGGCTTTATCTATATGAGAGAATCTGGGGACCTTATTCGCGAAAGCCAACATATCTTATTCAATGCTATTCGTATTGCACTGAAAAATAAAGATGCAAGTATCCAATCAGTAAATGGAGCTATTGTTAATGCCTTACGACCATTCTTATATGAAAAAACTGAGCGTGAGCCTATCATTATTCCTATGGTCCTTACCCCTGATAAA

SEQ ID NO: 12180 - protein, 559 aa, Streptococcus agalactiae
MSNINLKPEEVGVYAIGGLGEIGKNTYGIEYQDEIIIVDAGIKFPEDDLLGIDYVIPDYSYIVENIDRIKALVITHGHEDHIGGIPFLLKQANLPIYAGPLALALIKGKLEEHGLLRDATLYEIHANTELTFKNLSVTFFRTTHSIPEPLGIVIHTPQGKVICTGDFKFDFTPVGEPADLHRMAALGEDGVLCLLSDSTNAEVPTFTNSEKIVGQSIMKIIEGIEGRIIFASFASNIFRLQQAAEAAVKTGRKIAVFGRSMEKAIVNGIELGYIKVPKGTFIEPSELKHLHASEVLIMCTGSQGESMAALARIANGTHRQVTLQPGDTVIFSSSPIPGNTTSVNKLINTIQEAGVDVIHGKINNIHTSGHGGQQEQKLMLRLIKPKYFMPVHGEYRMQKVHAGLAVDTGIPKENIFIMENGDVLALTSDSARIAGHFNAQDIYVDGNGIGDIGAAVLRDRHDLSEDGVVLAVATVDFDSKMILAGPDILSRGFIYMRESGDLIRESQHILFNAIRIALKNKDASIQSVNGAIVNALRPFLYEKTEREPIIIPMVLTPDK

SEQ ID NO: 12181 - protein, 507 aa, Streptococcus agalactiae
ATGGAGGAAAACATGAACATAAAACAATTAAAGTCTAAAACAATGCTTGGAACAGTGGCTTTGGTGTCCGCTTTTTCATTTGCTTCAACAAATGCAGATGCGAATACATATAACTATGCAGTAGATGTAGACTACCTAGCAAGTGCGGAGGAAATTGCTCAAGCACATCCAGCTAGTAATACGTTTCCACTAGGTCAATGCACATGGGGTGTAAAGGAGATGGCAACATGGGCAGGTAACTGGTGGGGAAACGGTGGTGATTGGGCTGCGAGCGCCGCATCAGCTGGTTATACAGTAGGAACACAACCTCGCGTGGGTTCTATCGTATGTTGGACTGATGGTAGTTATGGACATGTGGCTTATGTTACAGCTGTAGATCCTGTCACTAATAAAATTCAGGTTTTAGAATCTAATTATGCAGGTCATCAATGGATTGATAATTATCGTGGTTGGTTTGATCCACAAAATACAGTAACACCAGGGGTAGTTAGCTACATTTATCCGAAT

SEQ ID NO: 12182 - protein, 169 aa, Streptococcus agalactiae; identical to SEQ ID NO: 3222

SEQ ID NO: 12183 - protein, 1344 aa, Streptococcus agalactiae
ATGACTATCACAGCAGAAGATATTCGTCGCGAAGTTAAGGAAAAAAATGTTACCTTCCTCCGTTTGATGTTCACAGATATTTTAGGAGTAATGAAAAATGTCGAAATTCCGGCTACAGATGAACAATTAGACAAAGTTTTATCAAATAAAGCAATGTTTGATGGATCTTCTATTGAGGGCTTTGTTCGTATCAATGAATCTGATATGTATTTATATCCTGATTTAGATACTTGGATTGTCTTTCCTTGGGGAGATGAAAATGGAGCTGTTGCAGGTCTAATCTGTGATATCTATACAGCAGAAGGAGAACCTTTTGCCGGAGATCCACGTGGAAATCTTAAGCGTAATATGAAACGTATGCAAGAGATGGGCTATAAGTCATTTAACTTAGGACCAGAACCTGAATTTTTCCTATTTAAAATGGATGAAAATGGTAACCCAACACTTGATGTTAATGACAAAGGAGGCTACTTTGACTTAGCTCCAACAGACTTAGCAGATAATACACGTCGTGAAATTGTTAATGTCTTAACACAAATGGGCTTTGAAGTTGAAGCTAGTCATCATGAAGTAGCAGTTGGACAGCATGAAATTGACTTTAAATATGATGATGTTTTAAAAGCCTGTGACAATATTCAATTATTTAAATTGGTTGTTAAAACAATTGCTCGTAAGCATGGTTTATATGCTACTTTTATGGCAAAACCTAAGTTTGGTATCAATGGTTCAGGTATGCATTGTAATATGTCTCTTTTTGATAATGAAGGGAACAATGCTTTCTTTGATCCAGAAGATCCACGTGGAATGCAATTATCAGAGGATGCCTACTACTTTTTAGGTGGGTTAATGAAACACGCTTACAATTACACAGCTATCATTAATCCAACTGTTAATTCTTATAAACGTTTGGTACCAGGATACGAAGCACCAGTTTACATTGCTTGGGCAGGTCGCAATCGTTCGCCACTTATTCGTGTACCTGCATCTCGAGGTATGGGAACACGTCTAGAATTGCGCTCGGTTGACCCAACAGCAAATCCTTATCTTGCTTTATCAGTACTTTTGGGATCAGGACTTGAGGGAATCGAGAATAAAATTGAAGCACCAGAACCAATTGAGACAAATATCTATGCTATGACTGTAGAAGAACGTCGTCAAGCAGGTATTGTTGATTTACCATCTACTCTTCATAATGCTCTTAAAGCACTTGAAGAAGATGAAGTGGTAAAAGCGGCCCTAGGAACTCATATCTATACTAATTTCTTAGATGCTAAGCGTATTGAATGGGCAAGTTATGCGACTTATGTTTCACAATGGGAAATTGATAATTACCTAGATTTATAT

SEQ ID NO: 12184 - protein, 448 aa, Streptococcus agalactiae
MTITAEDIRREVKEKNVTFLRLMFTDILGVMKNVEIPATDEQLDKVLSNKAMFDGSSIEGFVRINESDMYLYPDLDTWIVFPWGDENGAVAGLICDIYTAEGEPFAGDPRGNLKRNMKRMQEMGYKSFNLGPEPEFFLFKMDENGNPTLDVNDKGGYFDLAPTDLADNTRREIVNVLTQMGFEVEASHHEVAVGQHEIDFKYDDVLKACDNIQLFKLVVKTIARKHGLYATFMAKPKFGINGSGMHCNMSLFDNEGNNAFFDPEDPRGMQLSEDAYYFLGGLMKHAYNYTAIINPTVNSYKRLVPGYEAPVYIAWAGRNRSPLIRVPASRGMGTRLELRSVDPTANPYLALSVLLGSGLEGIENKIEAPEPIETNIYAMTVEERRQAGIVDLPSTLHNALKALEEDEVVKAALGTHIYTNFLDAKRIEWASYATYVSQWEIDNYLDLY

SEQ ID NO: 12185 - protein, 369 aa, Streptococcus agalactiae
ATGAAAGAAAGAGAACTTAGGCGTACAATGGCTGTATTCCCAATTGGAGCTGTTATGAAGTTGACAGATTTGACTGCCAGACAAATTCGCTATTATGAGGATCAAGGGTTAATCACACCTGAACGTACTGAAGGTAACCGCCGCATGTTTTCACTGAATGATATGGACCGCTTACTGGAAATAAAAGACTTCATTAGCGATGGTTTGCATATTTCTGATATTAAAAATGAATACATGCAAAGACAACATAAGTCCAAAGAGAAACAAAAGTCATTATCAGATGCCGAGGTTCGTCGACTTTTACAAGATGAGCTCCGTAATCAAGGGCGTTTTTCAAGTCCTTCACAGCACATTGGAAATATGCATTTG

SEQ ID NO: 12186 - protein, 123 aa, Streptococcus agalactiae; identical to SEQ ID NO: 3226

SEQ ID NO: 12187 - protein, 537 aa, Streptococcus agalactiae
ATGAAAACGTTAAAAAAATTATTATCTAATTACAAATTTGATATTAAAAAGTTTAAATTGGGAATGAGAACATTTAAAACAGGCTTATCGGTCTTTTTAGTTTTATTGGTTTTTCATTTATTTGGTTGGAAAGGGCTTCAAATTGGTGCTCTAACTGCTGTATTTAGTTTAAGAGAAGACTTTGATAAAAGCGTGCACTTTGGTTTTTCTAGAATTATTGGTAATAGTATAGGTGGCTTACTCTCCTTAGTATTTTTTGCATTCAATGAGATATTTCATCAAGCTTTTTGGGTTACTTTATTAATTGTTCCTATTTGTACCATGTTATGTATCATGATTAATGTTGCTTGTAATAATAAATCAGGTATTATTGGGGGGACAGCCGCATTACTTATTATAACTTTATCAATCCCAAGCGGAGAGACAATTCTATACGTTTTTGCACGTATTTTTGAAACTTTTTGTGGTGTTTTTATTGCAATGATGGTTAATACAGATATTGAAATACTTCGGAAAAAACTAAAAAATAACAAATTA

SEQ ID NO: 12188 - protein, 179 aa, Streptococcus agalactiae; identical to SEQ ID NO: 6320

SEQ ID NO: 12189 - protein, 1194 aa, Streptococcus agalactiae
ATGGCTAAATTGACTGTTAAAGACGTTGATTTGAAAGGTAAAAAAGTCCTCGTTCGTGTTGACTTTAATGTGCCTTTGAAAGACGGCGTTATCACTAACGACAACCGTATCACTGCGGCTCTTCCAACAATCAAGTATATCATCGAACAAGGTGGTCGTGCTATCCTCTTCTCTCACCTTGGACGTGTTAAAGAAGAAGCTGACAAAGAAGGAAAATCACTTGCACCGGTAGCTGCTGATTTAGCTGCTAAACTTGGTCAAGATGTTGTATTCCCAGGTGTTACTCGTGGTGCAAAATTAGAAGAAGCAATCAATGCTTTGGAAGATGGACAAGTTCTTTTGGTTGAAAACACTCGTTTTGAAGATGTTGACGGTAAGAAAGAATCTAAGAATGACGAAGAACTTGGTAAATACTGGGCTTCACTTGGAGATGGAATCTTCGTTAACGATGCATTTGGTACAGCACACCGTGCTCACGCATCAAACGTAGGTATCTCAGCAAACGTTGAAAAAGCTGTAGCTGGTTTCCTTCTTGAAAACGAAATTGCTTACATCCAAGAAGCAGTTGAAACTCCAGAACGTCCATTCGTAGCTATCCTTGGTGGTTCAAAAGTTTCTGATAAGATTGGTGTTATCGAAAACCTTCTTGAAAAAGCTGATAAAGTTCTTATCGGTGGTGGTATGACTTACACATTCTACAAAGCTCAAGGTATCGAAATCGGTAACTCACTTGTAGAAGAAGACAAATTGGATGTTGCTAAAGACCTCCTTGAAAAATCAAACGGTAAATTGATCTTGCCAGTTGACTCAAAAGAAGCAAACGCATTTGCTGGTTACACTGAAGTTCGCGACACTGAAGGTGAAGCAGTTTCCGAAGGGTTCCTTGGTCTTGACATCGGTCCTAAATCAATCGCTAAATTTGATGAAGCACTTACTGGTGCTAAAACAGTTGTATGGAATGGACCTATGGGTGTCTTTGAAAACCCTGACTTCCAAGCTGGTACAATCGGTGTAATGGACGCTATCGTTAAACAACCAGGCGTTAAATCAATCATCGGTGGTGGTGATTCAGCAGCAGCTGCTATCAACCTTGGCCGTGCTGACAAATTCTCATGGATCTCTACTGGTGGTGGAGCAAGCATGGAATTGCTCGAAGGTAAAGTATTACCAGGTTTGGCAGCATTGACTGAAAAA

SEQ ID NO: 12190 - protein, 398 aa, Streptococcus agalactiae; identical to SEQ ID NO: 3230

SEQ ID NO: 12191 - protein, 351 aa, Streptococcus agalactiae
ATGCGACTAAAGAAATTTAGAGAAAGAAGGATACCTGTTCAAGGGAAAGACCACTTGCTTTTCCTTAAAAAAGGAATGAAATCTAAAGAGAGTCGCCGTCAGGCAGTTCAAAAAGATACCAATTTAATTATGCTTTTTGGAGATAATTTAGTTGATTTTGCTGATTTTTCTAAATCATCTAGTACAGATAGAGAACAACTACTAACTAAACTTCAAAGTGAGTTTGGTAGTAAATTTATTGTTTTCCCAAATCCTATGTACGGTTCTTGGGAAAGTGCTATTTATCAAGGAAAACATCTGGATGTTCAAAAACAATTGAAAGAACGACAAAAAATGTTGCATTCGTATGAT

SEQ ID NO: 12192 - protein, 117 aa, Streptococcus agalactiae
MRLKKFRERRIPVQGKDHLLFLKKGMKSKESRRQAVQKDTNLIMLFGDNLVDFADFSKSSSTDREQLLTKLQSEFGSKFIVFPNPMYGSWESAIYQGKHLDVQKQLKERQKMLHSYD

SEQ ID NO: 12193 - protein, 770 aa, Streptococcus agalactiae
ATGTCTCCAGATAAGGTGGAGCAAAAGACGAAATTTAAAAATATTTCTCTAAGTTCTAATAAACTGTTGGCTAAGGAAAACACTATGTCTGTCCTTTGGTATCAAAATTCTGCAGAAGCCAAGGCTTTATATTTACAAGGTTATAATGTTGCTAAAATGAAGTTAGATGATTGGTTACAAAAGCCCAGTGAAAAACCATATTCAATTATCTTAGATTTAGATGAAACAGTTTTAGATAATAGCCCATATCAAGCAAAGAATATTAAAGATGGCTCTAGTTTCACGCCAGAGAGTTGGGATAAATGGGTGCAAAAGAAATCAGCTAAGGCTGTTGCGGGTGCCAAAGAATTTTTGAAGTATGCTAATGAAAAGGGAATAAAAATTTATTATGTCTCAGATCGTACAGATGCCCAAGTTGATGCGACTAAAGAAAATTTAGAGAAAGAAGGTATACCTGTTCAAGGGAAAGACCACTTGCTTTTCCTTAAAAAAGGAATGAAATCTAAAGAGAGTCGCCGTCAGGCAGTTCAAAAAGATACCAATTTAATTATGCTTTTTGGAGATAATTTAGTTGATTTTGCTGATTTTTCTAAATCATCTAGTACAGATAGAGAACAACTACTAACTAAACTTCAAAGTGAGTTTGGTAGTAAATTTATTGTTTTCCCAAATCCTATGTACGGTTCTTGGGAAAGTGCTATTTATCAAGGAAAACATCTGGATGTCAAAAACAATTGAAAGAACGACAAAAAATGTTGCATTCGTATGAT

SEQ ID NO: 12194 - protein, 257 aa, Streptococcus agalactiae
  VARIANT 242: Xaa = Any Amino Acid
MSPDKVEQKTKFKNISLSSNKLLAKENTMSVLWYQNSAEAKALYLQGYNVAKMKLDDWLQKPSEKPYSIILDLDETVLDNSPYQAKNIKDGSSFTPESWDKWVQKKSAKAVAGAKEFLKYANEKGIKIYYVSDRTDAQVDATKENLEKEGIPVQGKDHLLFLKKGMKSKESRRQAVQKDTNLIMLFGDNLVDFADFSKSSSTDREQLLTKLQSEFGSKFIVFPNPMYGSWESAIYQGKHLDXQKQLKERQKMLHSYD

SEQ ID NO: 12195 - protein, 146 aa, Streptococcus agalactiae
ATGAAGACTACAAAAGTTTTTTCAGTTTTATCGTATCTGTTGCTGTATTTATGATGACAGCATGTCAGTCAAACCACAGCACTAAAAAAGCTGATATGTCTCCAATAAGGTGGGCAAGACGAAATTTAAAATATTTCTCTAAGTTC

SEQ ID NO: 12196 - protein, 50 aa, Streptococcus agalactiae
  VARIANT 12: Xaa = Any Amino Acid
MKTTKVFSVLSXSVAVFMMTACQSNHSTKKADMSPDKVEQRRNLKYFSKF

SEQ ID NO: 12197 - protein, 1008 aa, Streptococcus agalactiae
ATGGTAGTTAAAGTTGGTATTAACGGTTTCGGTCGTATCGGTCGTCTTGCATTCCGTCGCATCCAAAACGTAGAAGGTGTTGAAGTTACTCGTATCAACGACCTTACAGATCCAAACATGCTTGCACACTTGTTGAAATATGACACAACTCAAGGTCGTTTCGACGGTACTGTTGAAGTTAAAGAAGGTGGATTCGAAGTTAACGGTCAATTTGTTAAAGTTTCTGCTGAACGCGAACCAGCAAACATTGACTGGGCTACTGATGGCGTAGAAATCGTTCTTGAAGCAACTGGTTTCTTTGCATCAAAAGAAAAAGCTGAACAACACATCCATGAAAATGGTGCTAAAAAAGTTGTTATCACAGCTCCTGGTGGAAACGACGTTAAAACAGTTGTTTTCAACACTAACCACGATATCCTTGATGGAACTGAAACAGTTATCTCAGGTGCTTCATGTACTACAAACTGTCTTGCTCCAATGGCTAAAGCTTTACAAGACAACTTTGGTGTTAAACAAGGTTTGATGACTACTATCCACGCATACACTGGTGACCAAATGATCCTTGACGGACCACACCGTGGTGGTGACCTTCGTCGTGCTCGTGCAGGTGCTGCAAACATCGTTCCTAACTCAACTGGTGCTGCAAAAGCTATCGGTCTTGTTATCCCAGAATTGAACGGTAAACTTGATGGTGCTGCACAACGTGTTCCTGTTCCAACTGGATCAGTAACTGAATTGGTTGCAACTCTTGAAAAAGACGTAACTGTTGAAGAAGTAAATGCAGCTATGAAAGCAGCAGCTAACGATTCATACGGTTATACTGAAGATCCAATCGTATCATCTGATATCGTTGGTATTTCATACGGTTCATTGTTTGATGCTACTCAAACTAAAGTTCAAACTGTTGACGGTAACCAATTGGTTAAAGTTGTTTCATGGTACGATAACGAAATGTCATACACTTCACAACTTGTTCGTACACTTGAATACTTTGCAAAAATTGCAAAA

SEQ ID NO: 12198 - protein, 336 aa, Streptococcus agalactiae; identical to SEQ ID NO: 3234

SEQ ID NO: 12199 - protein, 1939 aa, Streptococcus agalactiae
ATGGACTGGATGGAACAAGAACAAGAACGTGGTATCACAATTACATCAGCTGCAACAACAGCACAATGGGATGGTCACCGTGTTAACATCATCGATACACCAGGACACGTGGACTTCACAATTGAAGTTCAACGTTCACTTCGTGTACTTGATGGTGCGGTAACAGTTCTTGATGCTCAATCAGGTGTAGAACCTCAAACTGAAACAGTTTGGCGTCAAGCAACAGAATACGGAGTTCCACGTATCGTTTTTGCTAATAAAATGGATAAAATCGGTGCTGACTTCCTCTATTCAGTACAATCACTTCATGACCGTCTTCAAGCGAATGCACACCCAATTCAATTGCCAATTGGTTCAGAAGACGATTTCCGTGGTATCATTGACTTAATCAAAATGAAAGCTGAAATCTATACTAATGATCTTGGTACAGATATCCTTGAAGAAGACATTCCAGCAGAGTATGTTGATCAAGCAAATGAATACCGTGAAAAATTAGTAGAAGCAGTTGCTGATACTGATGAAGATTTGATGATGAAATACCTTGAAGGTGAAGAAATCACTAACGAAGAGTTGATGGCTGCTATTCGTAAAGCAACTATCAACGTTGAATTCTATCCTGTATTGTGTGGTTCAGCCTTCAAGAATAAAGGTGTTCAATTGATGCTTGATGCTGTTATTGATTACCTTCCAAGCCCACTTGATATTCCTGCAATCAAAGGTATTAACCCTGATACTGACGAAGAAGAAACACGCCCTGCTTCAGATGAAGAGCCATTTGCAGCGCTTGCCTTCAAGATCATGACAGATCCTTTCGTGGGTCGCTTAACATTCTTCCGTGTGTACTCAGGTGTTCTTAATTCAGGTTCATACGTGTTGAATACATCTAAAGGTAAACGTGAACGTATCGGACGTATCTTACAAATGCACGCAAATAGTCGTCAAGAAATTGAAACTGTTTATGCTGGTGATATCGCAGCGGCTGTTGGTTTGAAAGATACAACTACAGGTGATTCATTGACTGATGAAAAATCAAAAGTTATTCTTGAATCAATTGAAGTTCCAGAACCAGTTATCCAATGATGGTTGAGCCAAAATCTAAAGCTGACCAAGATAAAATGGGTATCGCCCTTCAAAAACTTGCTGAAGAAGACCCAACGTTCCGCGTTGAAACTAACGTTGAAACTGGTGAAACAGTTATCTCAGGAATGGGTGAACTTCACCTTGATGTCCTTGTTGACCGTATGAAACGTGAATTCAAAGTTGAAGCAAACGTTGGGGCACCCCAAGTATCATACCGCGAAACATTCCGCGCTTCTACACAAGCACGTGGATTCTTCAAACGCCAATCTGGTGGTAAAGGTCAATTTGGTGATGTTTGGATTGAATTTACACCAAACGAAGAAGGTAAAGGATTCGAATTCGAAAATGCTATCGTCGGTGGTGTGGTTCCTCGTGAATTTATTCCAGCCGTGAAAAAGGACTTGTAGAATCTATGGCAAACGGTGTTCTTGCTGGATATCCAATGGTTGACGTAAAAGCTAAACTTTACGATGGTTCATACCATGATGTTGACTCATCTGAGACAGCCTTCAAGATTGCTGCATCACTTGCACTTAAAGAAGCTGCTAAATCAGCGCAACCAGCTATCCTTGAGCCAATGATGCTTGTTACAATTACAGCTCCAGAAGACAATCTTGGTGACGTTATGGGTCACGTGACTGCACGTCGCGGTCGTGTTGATGGTATGGAAGCACGTGGTAACACACAAGTTGTTCGTGCCTTTGTTCCACTTGCTGAAATGTTTGGTTATGCAACAGTTCTTCGTTCTGCAACACAAGGACGTGGTACATTCATGATGGTATTTGACCACTACGAAGATGTTCCTAAGTCAGTTCAAGAAGAAATCATCAAGAAAAACTCTGGTGNNNNNTTAATTAAT

SEQ ID NO: 12200 - protein, 647 aa, Streptococcus agalactiae
  VARIANT 643, 644: Xaa = Any Amino Acid
MDWMEQEQERGITITSAATTAQWDGHRVNIIDTPGHVDFTIEVQRSLRVLDGAVTVLDAQSGVEPQTETVWRQATEYGVPRIVFANKMDKIGADFLYSVQSLHDRLQANAHPIQLPIGSEDDFRGIIDLIKMKAEIYTNDLGTDILEEDIPAEYVDQANEYREKLVEAVADTDEDLMMKYLEGEEITNEELMAAIRKATINVEFYPVLCGSAFKNKGVQLMLDAVIDYLPSPLDIPAIKGINPDTDEEETRPASDEEPFAALAFKIMTDPFVGRLTFFRVYSGVLNSGSYVLNTSKGKRERIGRILQMHANSRQEIETVYAGDIAAAVGLKDTTTGDSLTDEKSKVILESIEVPEPVIQLMVEPKSKADQDKMGIALQKLAEEDPTFRVETNVETGETVISGMGELHLDVLVDRMKREFKVEANVGAPQVSYRETFRASTQARGFFKRQSGGKGQFGDVWIEFTPNEEGKGFEFENAIVGGVVPREFIPAVEKGLVESMANGVLAGYPMVDVKAKLYDGSYHDVDSSETAFKIAASLALKEAAKSAQPAILEPMMLVTITAPEDNLGDVMGHVTARRGRVDGMEARGNTQVVRAFVPLAEMFGYATVLRSATQGRGTFMMVFDHYEDVPKSVQEEIIKKNSGXXLIN

SEQ ID NO: 12201 - protein, 104 aa, Streptococcus agalactiae
ATGGCTCGCGAATTTTCACTTGAAAAAACTCGTAATATCGGTATCATGGCTCACGTTGATGCGGTAAAACAACAACAACTGAGCGTATTCTTTACTATACTGGG

SEQ ID NO: 12202 - protein, 35 aa, Streptococcus agalactiae
MAREFSLEKTRNIGIMAHVDAGKTTTTERILYYTG

SEQ ID NO: 12203 - protein, 468 aa, Streptococcus agalactiae
ATGAGTCGTAAAAATCAAGCGCCTAAACGCGAAGTATTACCAGATCCATTGTATAACTCAAAAATCGTTACACGTCTTATCAACCGTGTAATGCTTGATGGTAAACGTGGTACTGCTGCAACTATCGTATATGATGCTTTTGAAGCAATTAAAGAAGCTACTGGAACAGATGCTCTTGAAGTATTCGAAACAGCTATGGAAAACATCATGCCTGTACTTGAGGTACGCGCACGCCGTGTTGGTGGATCAAACTACCAAGTTCCTGTCGAAGTTCGTCCAGAACGTCGTACAACTTTAGGACTTCGTTGGTTGGTTAACGCATCACGTGCTCGTGGTGAACACACTATGAAAGATCGTCTTGCAAAAGAAATCATGGATGCTGCAAACAACACAGGAGCATCAGTTAAGAAACGTGAAGATACTCACAAAATGGCTGAAGCTAACCGTGCCTTTGCACACTTCCGTTGG

SEQ ID NO: 12204 - protein, 156 aa, Streptococcus agalactiae; identical to SEQ ID NO: 3238

SEQ ID NO: 12205 - protein, 411 aa, Streptococcus agalactiae
ATGCCTACAATTAACCAGTTGGTACGTAAACCACGTAAATCTAAAGTTGAAAAATCAGATTCACCTGCTTTGAATATTGGTTACAACAGTCACAGAAAAGTTCACACTAAATTATCTGCACCACAAAAACGTGGTGTTGCAACTCGTGTTGGAACTATGACACCTAAAAAACCTAACTCTGCCCTTCGTAAATTTGCTCGTGTACGTTTGAGCAACCTTATTGAAGTTACTGCTTACATTCCAGGTATCGGACACAACTTGCAAGAACACAGTGTTGTGCTTATCCGTGGTGGACGTGTAAAAGACCTTCCAGGGGTACGTTACCATATCGTTCGTGGTGCACTTGATACTGCAGGTGTAGCTGATCGTAAACAAGGCCGTTCTAAATACGGTGCTAAACGTCCTAAAGGG

SEQ ID NO: 12206 - protein, 137 aa, Streptococcus agalactiae; identical to SEQ ID NO: 3240

SEQ ID NO: 12207 - protein, 810 aa, Streptococcus agalactiae
ATGAAATTAAGACGTAGCGAACGCATGGTTGTTATTTCAAATTACCTAATAAATAATCCCTATACATTAACTAGTTTAAATACATTTGCTAGTAAATACGGTGCCGCGAAATCTTCGATTTCAGAAGATATTGCTATTATCAAAAAAGCTTTTGAACAAGCTCAAATCGGAGATATTAAAACTGTGACTGGTGCAAGTGGAGGTGTTATCTTTACACCAACTATTGCTGAAGCAGAAGCGAAAGAAATCGTTGAAGAATTAAGACAGCGTTTATCTGAAAACGATCGTATTCTTCCGGGAGGTTACATTTATCTTTCAGATCTACTCAGTACACCAAAAATGTTACAAAGTATTGGTCGCATTATAGCGAACGCTTACAGAGGTCAAAAAATTGATGCTGTCATGACGGTTGCAACAAAAGGTGTTCCTTTAGCAAACGCAGTAGCAAATGTTTTAGATGTTCCTTTTGTTATTGTGAGACGTGATTTGAAGATTACGGAAGGTTCTACTGTGTCAGTAAACTACGCTAGTGGTTCAAGTGGCCGTATTGAAAAAATGTTTCTTTCTAAGCGTAGCTTAAAACCTAACAGTCGAGTTTTAATAGTTGATGATTTCTTGAAAGGTGGAGGTACTGTTTCGGGGATGATTAGTTTACTCTCAGAATTCGATAGCACATTAGTAGGTGTCGCTGTATTTGCAGAAAATGCTCAGGAACAACGTGAGAAGATGGCCTATAAATCTCTTCTGAGAGTATCTGAAATTGATGTAAAAAATAATAGAGTCTCTGTAGAAGCGGGGAATATATTTGAT

SEQ ID NO: 12208 - protein, 270 aa, Streptococcus agalactiae; identical to SEQ ID NO: 3242

SEQ ID NO: 12209 - protein, 939 aa, Streptococcus agalactiae
ATGAAAATTAACCAAATGAAAAAAGACGAGCTTTTTGAGGGGTTTTACCTTATAAAGAAAGCAGAAGTTCGTAAAACGCGTGCAGGTAAAGACTTTATTGCCTTTACCTTTCAAGATGATACTGGCGAAATTTCAGGAAATATGTGGGATGCACAAACCTATAATGTAGAAGAGTTTGTAGCCGGTAAAATTGTTCATATGAAAGGGCGTCGTGAAGTTTATAATGGAACTCCCCAAGTCAACCAAATTACATTAAGAAACATCAAAGATGGTGAACCTAATGATCCTAGAGATTTTAAAGAAAAACCTCCAATCAATGTTGACAACGTGAGAGAGTACATGGAACAAATGCTCTTTAAAATTGAAAATGCAACCTGGCAGCGTGTGGTAAGAGCACTTTATCGTAAATACAATAAGGAATTTTTTACCTATCCAGCCGCCAAAACAAACCACCACGCCTTTGAATCAGGATTGGCATATCACACGGCAACGATGGTTCGTTTGGCAGATAGTATCGGAGATATCTATCTAGAACTTAATAAAAGTTTGATGTTTGCTGGTATTATGCTACATGATTTAGCCAAGGTCATTGAGTTATCGGGTCCTGATAATACAGAATATACTATTCGAGGTAATCTTATCGGTCATATTTCACTTATTGATGAGGAATTAACAAAAATACTAGCAGAGCTTAATATTGATGATACAAAAGAAGAGGTTACAGTGTTACGCCATGTTATTCTGAGTCATCATGGACAATTAGAATATGGAAGCCCGGTTCGTCCTAGAATCATGGAGGCAGAAATTATCCATATGATCGATAACATTGATGCAAATATGATGATGATGACAACAGCTTTAAACCGTGTCAACGAAGGTGAAATGACAAATCGCATTTTTGCCATGGATAACCGTTCTTTTTATAAACCGAACATTAAA

SEQ ID NO: 12210 - protein, 313 aa, Streptococcus agalactiae
MKINQMKKDELFEGFYLIKKAEVRKTRAGKDFIAFTFQDDTGEISGNMWDAQTYNVEEFVAGKIVHMKGRREVYNGTPQVNQITLRNIKDGEPNDPRDFKEKPPINVDNVREYMEQMLFKIENATWQRVVRALYRKYNKEFFTYPAAKTNHHAFESGLAYHTATMVRLADSIGDIYLELNKSLMFAGIMLHDLAKVIELSGPDNTEYTIRGNLIGHISLIDEELTKILAELNIDDTKEEVTVLRHVILSHHGQLEYGSPVRPRIMEAEIIHMIDNIDANMMMMTTALNRVNEGEMTNRIFAMDNRSFYKPNIK

SEQ ID NO: 12211 - protein, 1272 aa, Streptococcus agalactiae
ATGCTTGTCATCATTTTGATCATTGCACTAGCTAGTCTGACAGTGACGATAATTTCTTACCAAAAAATGACGGAATTAACAAAGTCCGTTGAAAAACAACTTGAAGATAATGCTGATAATCTATCAGACCAACTGACATACCAGATAGAAGCGGCGCAAAAAGATCAAATTCTAACGTTGACTAATCAGCTAAACCGTATGCAACAGGAAATTTATCAGTTGCTTACCGATATGCGTACAGAATTAAATCAGCATTTAACGGAGAGTCGAGATCGATCAGACAAACGCTTGGAATTGATTAACTCCAATTTATCTCAGTCAGTTCAGAAAATGCAAGATTCCAATGAAAAACGCTTGGATCAAATGCGCCAAACTGTTGAGGAAAAGCTAGAAAAAACGCTACAAACGCGTTTGCAAACTTCTTTTGAAACTGTATCGCGTCAACTAGAGAGTGTCAATCAAGGTCTTGGGGAGATGAAAACTGTTGCCCAAGATGTTGGTACACTGAACAAAGTCTTGTCAAATACTAAGACAAGGGGAATATTAGGGGAGTTACAACTCGGCCAAATTATAGAAGATATTATGACAGTTAGTCAATATGAGAGAGAATTTCCTACTGTGTCTGGCTCTTCTGAGCGTGTTGAATATGCTATTAAATTACCTGGAAATGGTCAGGGAGATTATATCTATTTGCCTATTGACTCTAAGTTTCCTCTAGAAGATTATTACCGATTGGAAGATGCTTATGAATTGGGTGACAAGGTTCAAATAGAACTCTATCGTAAATCTTTACTGGCAAGTATTCGTAAATTTGCAAAAGATATAAACAATAAGTACTTAAATCCTCCTGAAACGACAAATTTTGGTATCATGTTCTTACCAACTGAAGGGCTCTATTCTGAAGTGGTAAGAAATGCAACATTCTTTGATAGTCTAAGACGTGACGAAAATATTGTAGTAGCTGGACCGTCAACCTTATCTGCTTTACTAAATTCATTATCTGTTGGCTTTAAAACCTTAAATATTCAAAAGAATGCTAATGATATTAGTAAAATTTTAGGGAATGTCAAGGTTGAATTTGGAAAATTTGGTGGCATGTTATCAAAAGCTCAAAAACAATTAAATACAGCAAGTAAAAGTATTGATAGTTTACTCACAACGCGGACAAACGCTATTATCAGAGCCTTAAATACAGTTGAAGAACATCAAGATCAAGCAACCACTAGCTTGTTAAACCTTCCTATAACAGAAGAAGAGGAAATTAATGAAAAT

SEQ ID NO: 12212 - protein, 424 aa, Streptococcus agalactiae
MLVIILIIALASLTVTIISYQKMTELTKSVEKQLEDNADNLSDQLTYQIEAAQKDQILTLTNQLNRMQQEIYQLLTDMRTELNQHLTESRDRSDKRLELINSNLSQSVQKMQDSNEKRLDQMRQTVEEKLEKTLQTRLQTSFETVSRQLESVNQGLGEMKTVAQDVGTLNKVLSNTKTRGILGELQLGQIIEDIMTVSQYEREFPTVSGSSERVEYAIKLPGNGQGDYIYLPIDSKFPLEDYYRLEDAYELGDKVQIELYRKSLLASIRKFAKDINNKYLNPPETTNFGIMFLPTEGLYSEVVRNATFFDSLRRDENIVVAGPSTLSALLNSLSVGFKTLNIQKNANDISKILGNVKVEFGKFGGMLSKAQKQLNTASKSIDSLLTTRTNAIIRALNTVEEHQDQATTSLLNLPITEEEEINEN

SEQ ID NO: 12213 - protein, 630 aa, Streptococcus agalactiae
ATGACTAAAATTGCTTTATTTGCTGGCGGTGACTTAACTTATTTTGAATATGATTTTGACTATTTTGTCGGAATTGACCGTGGAAGCCTATTTTTATTAAAAAATGGGCTTTCTTTGGACATGGCAGTGGGTGATTTTGATTCTATAACAGAAGATGAACTGCTTTATATCAAACACTATTGTAGCAATATCGTTTCTGCTAGTGTAGAAAAAAATGATACAGATACAGAATTAGCTTTAAAAACTATTTTCAAAGAATTTCCAGAAGCTCAAGTGACCGTATTTGGAGCATTTGGTGGCAGGATTGACCATATGATGTCTAATATCTTTTTACCAAGTGACACAGATTTAGAACCATTTATGTCACAAATCAGACTCAAAGATGAACAAAACATAGTGACTTATCTACCATCCGGGAAAAATCAAGTCTCAAGGATTGAAGGGATGTCCTATGTCTCGTTCATGCCTGAGAGTGAGTCTACTTTGCAGATTTCTGGGGCTAAATATGAATTGAACAAAAGTAATTATTTTAAGAAAAAAATGTATTCCAGTAATGAATTTATGACTTCGCCAATTGAAGTAGAGCTCAAAGATGGTTACTTAATCATTATTTATAGTAAGGATAGAGGT

SEQ ID NO: 12214 - protein, 210 aa, Streptococcus agalactiae
MTKIALFAGGDLTYFEYDFDYFVGIDRGSLFLLKNGLSLDMAVGDFDSITEDELLYIKHYCSNIVSASVEKNDTDTELALKTIFKEFPEAQVTVFGAFGGRIDHMMSNIFLPSDTDLEPFMSQIRLKDEQNIVTYLPSGKNQVSRIEGMSYVSFMPESESTLQISGAKYELNKSNYFKKKMYSSNEFMTSPIEVELKDGYLIIIYSKDRG

SEQ ID NO: 12215 - protein, 660 aa, Streptococcus agalactiae
ATGTCAACCAATAAAATTGCTCCATCGATATTAGCAGCAGACTATGCTAATTTTGCTAACGAATTGAAACGTATTGAAGAGACAACAGCAGAATACGTTCATATTGATATCATGGATGGTCAATTTGTCCCTAATATTAGTTTTGGTGCGGATGTTGTATCCAGCATGCGTAAACACAGTAAACTTGTTTTTGATTGTCATCTGATGGTTGTTGATCCAGAACGTTATATTGAGGCTTTTGCTCAAGCTGGTACTGATATCATGACCATTCATGTTGAAGCAACGAAACATATACATGGTGCGCTTCAAAAGATAAAAGAGGCAGGAATGAAAGCAGGTGTGGTTATTAACCCAGGAACACCTGTAGAATCTCTTATTCCTATTTTAGATTTGGTTGACCAGATTTTAATTATGACTGTTAATCCTGGCTTTGGTGGACAAGCCTTTATTCCAGAAATGATGTCAAAAGTAAAGACAGTTGCAGCATGGCGCAAAGAGTACGGTCATCATTATGATATTGAAGTTGATGGCGGTATAGATAATACTACAATTAAGGCAGCAGCAGAGGCTGGTGCAAATGTCTTTGTTGCAGGTTCTTATCTCTTTAAAGCAAGTGATTTACCTGCACAAGTAGAAACCTTAAGGGTGGCGCTCGATGAC

SEQ ID NO: 12216 - protein, 220 aa, Streptococcus agalactiae
MSTNKIAPSILAADYANFANELKRIEETTAEYVHIDIMDGQFVPNISFGADVVSSMRKHSKLVFDCHLMVVDPERYIEAFAQAGTDIMTIHVEATKHIHGALQKIKEAGMKAGVVINPGTPVESLIPILDLVDQILIMTVNPGFGGQAFIPEMMSKVKTVAAWRKEYGHHYDIEVDGGIDNTTIKAAAEAGANVFVAGSYLFKASDLPAQVETLRVALDD

SEQ ID NO: 12217 - protein, 870 aa, Streptococcus agalactiae
TTGCAAGGTAGAATTGTCAAGTCGCTAGCAGGTTTTTATTATGTGGAATCTGACGGTGTTGTTTATCAGACACGTGCGCGTGGAAATTTTAGAAAAAAAGGTCAAATTCCCTACGTTGGGGATTGGGTTGAATTTTCTTCGCAAGATCAATCAGAAGGATATATTCTATCAATTGAAGAGCGTAAAAATAGCCTCGTACGACCACCTATTGTTAATATTGATCAAGCTGTCGTTATCATGTCTGCTAAAGAACCTGATTTTAACGCTAACTTATTAGACCGGTTCTTAGTACTTCTAGAATATAAGATGATTCAGCCTATCATTTATATTTCCAAGTTGGATTTGTTAGACGATTTGGTTGTTATTGATGATATTCGCGAACATTATCAGAATATAGGCTATGTTTTCTGTTATTCTCAAGAGGAACTCTTGCCTCTGTTAGCAGATAAAGTGACTGTTTTTATGGGGCAGACAGGTGTCGGAAAATCAACGCTTCTCAACAAAATTGCTCCTGAGTTGAAACTTGAAACTGGTGAAATTTCGGATAGTTTAGGCCGTGGCCGACACACCACAAGAGCAGTTAGTTTCTATAATGTTCATAAAGGAAAAATTGCAGACACTCCTGGTTTTTCTTCTTTGGACTATGAAGTGGACAATGCAGAGGACTTAAACGAATCCTTTCCAGAGCTTCGTAGACTTAGTCATTTTTGTAAATTCCGCTCGTGTACGCATACACATGAGCCTAAATGTGCTGTAAAAGAAGCCTTGACTCAAGGTCAGTTATGGCAAGTCCGCTATGATAACTACCTCCAATTTTTAAGTGAAATTGAGAACCGCCGTGAAACATATAAGAAAGTTATTAAAAGAAAG

SEQ ID NO: 12218 - protein, 290 aa, Streptococcus agalactiae
MQGRIVKSLAGFYYVESDGVVYQTRARGNFRKKGQIPYVGDWVEFSSQDQSEGYILSIEERKNSLVRPPIVNIDQAVVIMSAKEPDFNANLLDRFLVLLEYKMIQPIIYISKLDLLDDLVVIDDIREHYQNIGYVFCYSQEELLPLLADKVTVFMGQTGVGKSTLLNKIAPELKLETGEISDSLGRGRHTTRAVSFYNVHKGKIADTPGFSSLDYEVDNAEDLNESFPELRRLSHFCKFRSCTHTHEPKCAVKEALTQGQLWQVRYDNYLQFLSEIENRRETYKKVIKRK

SEQ ID NO: 12219 - protein, 849 aa, Streptococcus agalactiae
ATGTTGGTTGACAAGAAGTGGCGTTTTGAAGATAGTGCAAGTTATTTCGCTTGTCCTAAATGTCAAAATCCCTTGATAAAAGAAAGTAACAGCCTCAAATGCTCTGGTAATCATTGTTTTGATTTATCCAAATTTGGATATGTTAATCTTCTTGGAGGAAAGAAGGTAGATGAACATTATGATAAAAAATCATTTGAAAATCGGCAGCTTGTCTTAGAAAACGGGTATTATAATCATATTTTAGAAGCTATTTCAAAGGTTTTGGAAAATAATTCTCAGTTTCATTCGGTTTTAGATATTGGTTGTGGAGAGGGCTTTTATTCTCGTCAATTAGTTAACAAGCATGAGAAGACTTTCTTGGCTTTTGATATTTCTAAAGATTCGATTCAATTAGCTGCTAAAAGTGATCAGTCTAGGCTTGTGAAATGGTTTGTTTCTGATTTAGCTAACCTTCCTATTCAAGACTCATCAATTGATATCATTTTAGACATTTTTTCTCCTGCAAATTATAAAGAATTTAGGCGGGTGCTGAGTGATGATGGTATCCTTGTAAAGGTTGTTCCTGTAGCTGAACATGTTCAAGAATTGCGAGAAAAAGCTAGTCAATACTTGAAACAGAAAGATTACTCTAATCAAAAAATTCTAGATCACTTTAGAGAAAATTTTGAAATTATTTCTGAGCAGAAAGTTGTTCAAAGCTATAACTGTTCTCAACAAGAACGTCAAGCTTTTATTGATATGACACCGTTGTTATTCAGCGTAGATAAAACGACTATTGATTGGGCGAGTATATCAGAAATTACAGTAGGTGCCTTAATAGTAATTGGAAAAAAGCGCAGTGTATCTAAA

SEQ ID NO: 12220 - protein, 283 aa, Streptococcus agalactiae
MLVDKKWRFEDSASYFACPKCQNPLIKESNSLKCSGNHCFDLSKFGYVNLLGGKKVDEHYDKKSFENRQLVLENGYYNHILEAISKVLENNSQFHSVLDIGCGEGFYSRQLVNKHEKTFLAFDISKDSIQLAAKSDQSRLVKWFVSDLANLPIQDSSIDIILDIFSPANYKEFRRVLSDDGILVKVVPVAEHVQELREKASQYLKQKDYSNQKILDHFRENFEIISEQKVVQSYNCSQQERQAFIDMTPLLFSVDKTTIDWASISEITVGALIVIGKKRSVSK

SEQ ID NO: 12221 - protein, 870 aa, Streptococcus agalactiae
ATGAGAATCGCAGATAAAACCGTTACCCGCGCTATTTTGGAGCGTCATGGGTTTACATTTAAGAAATCATTCGGCCAGAACTTTTTGACCGATACGAATATTTTACAGAAGATTGTTGACACGGCAGAGATTGACAAGGGTGTCAACGTGATTGAGATTGGTCCTGGTATCGGGGCTTTGACAGAGTTTTTGGCTGAGAATGCAGCTGAGGTGATGGCTTTTGAGATAGATGATCGTCTCATTCCTATCCTTGCTGGTACGCTTGCGCGTTTTGACAATGTCCAAGTGGTCAATCAGGATATCCTCAAGGCTGATTTGCAGACGCAAATTCAAGCCTTCAAGAATCCTGATCTGCCTATCAAGGTGGTCGCAAACCTGCCTTACTACATCACAACACCAATCCTTATGCACTTGATTGAGAGCAAGATTCCTTTTGCGGAGTTTGTGGTCATGATGCAAAAAGAAGTGGCAGATCGTATTTCAGCTATGCCAAATACTAAAGCATACGGTTCTTTGTCAATCGCAGTGCAGTATTATATGACTGCCAAAGTATCATTTATCGTTCCGAGAACTGTTTTTGTTCCTGCTCCAAATGTAGATTCAGTTATTTTGAAAATGGTCCGTAGAGATCAACCAGTAGTGAGTGTTCAAGATGAGGATTTCTTTTTCAGAGTGTCAAAAGTAGCCTTCGTACATCGTCGTAAAACACTTTGGAATAATCTAACGAGTCATTTTGGAAAATCAGAAGATACTAAAGCAAAATTGGAAAAAGCATTAGAAATAGCAAAAATTAAGCCATCTATTCGCGGAGAAGCCTTATCTATCCCTGATTTTGCAAGTTTAGCAGATGCCTTGAAAGAGGTTGAGATA

SEQ ID NO: 12222 - protein, 290 aa, Streptococcus agalactiae
MRIADKTVTRAILERHGFTFKKSFGQNFLTDTNILQKIVDTAEIDKGVNVIEIGPGIGALTEFLAENAAEVMAFEIDDRLIPILAGTLARFDNVQVVNQDILKADLQTQIQAFKNPDLPIKVVANLPYYITTPILMHLIESKIPFAEFVVMMQKEVADRISAMPNTKAYGSLSIAVQYYMTAKVSFIVPRTVFVPAPNVDSVILKMVRRDQPVVSVQDEDFFFRVSKVAFVHRRKTLWNNLTSHFGKSEDTKAKLEKALEIAKIKPSIRGEALSIPDFASLADALKEVEI

SEQ ID NO: 12223 - protein, 447 aa, Streptococcus agalactiae
ATGTATCTTATTTGTCAACGTATTAATATGATTGAACAAAATGAGAATCCTTATTTTGTGAAGGAGTACGAAACGGGTTATCTTGTTTTGGGAGACTATCAATATTTTCAAGGTTATTGCCTTTTTCTTTCTAAAAAACACGTAACAGAGTTACATGAATTGCCTAGAGATTGGCGAAATCAGTATCTTTCCGAAATGGCAGATGCTTCTGAAATAGTTGCTAAGGCTTTTAGAGCAGATAAGATGAATATTGAGAGTTTGGGAAATGGAGACGCTCATCTACATTTTCATCTTTTTCCAAGAAAAACAGGTGATTTAAGGAACTATGGGCATAATGGAAAAGGTCCAGTTTGGTGGTATCCTTTTGAGAAGATGTATGCAGATAGTGTCAGAGCAACTGGTGCAGAAATAGAAAAATTAAAAGAGAAATTGTTAGATGTCTTAGGA

SEQ ID NO: 12224 - protein, 149 aa, Streptococcus agalactiae
MYLICQRINMIEQNENPYFVKEYETGYLVLGDYQYFQGYCLFLSKKHVTELHELPRDWRNQYLSEMADASEIVAKAFRADKMNIESLGNGDAHLHFHLFPRKTGDLRNYGHNGKGPVWWYPFEKMYADSVRATGAEIEKLKEKLLDVLG

SEQ ID NO: 12225 - protein, 564 aa, Streptococcus agalactiae
ATGAAAAAAATTGATATTCAAGAAGTGATCGTTGTCGAAGGGAAAGATGATACTGCTAATCTGCGACGCTTTTATAATGTTGATACCTATGAAACTAGAGGTTCAGCAATTGATGAAGAGGATTTAGAGCGTATCGAACGTTTGCACAATTTGCGGGGAGTTATCGTCTTTACAGACCCAGATTATAATGGCGAGCGTATCCGTAAAATCATCATGAATGCCATTCCGACAGTCCGCCATGCCTTCCTCAATCGAGACGAGGCAAAGCCAGGCTCAAAGACCAAGGGACGATCTCTGGGTGTCGAGCATGCCAGCTTTGAGGATTTGCAGAAGGCACTCTCAAAAGTGACCCAGCATTTCGATGATGAGGATAACTTTGATATCACCCAAGCAGACCTCATTCGCTGGGGGTTCATTACCGCTAGTGATAGCCGTAAACGCCGTGAGTATCTTGGAAATCAACTCCGTATCGGCTACTCAAATGGTAAACAACTCCTCAAACGCCTCAGACTCTTCGGAGTGACCAAGGCGGAAGTTGAAGAGTGTATGGAGGGGTATGAGGGA

SEQ ID NO: 12226 - protein, 188 aa, Streptococcus agalactiae
MKKIDIQEVIVVEGKDDTANLRRFYNVDTYETRGSAIDEEDLERIERLHNLRGVIVFTDPDYNGERIRKIIMNAIPTVRHAFLNRDEAKPGSKTKGRSLGVEHASFEDLQKALSKVTQHFDDEDNFDITQADLIRWGFITASDSRKRREYLGNQLRIGYSNGKQLLKRLRLFGVTKAEVEECMEGYEG

SEQ ID NO: 12227 - protein, 852 aa, Streptococcus agalactiae
ATGCTTCAGTCTTATGTTATAATAATAAAGATTAATGCTTGTAGCTACGATAAGCAAAGAAAGAACAGTGATATGATAAAAATATTTGATACCCATACCCACCTTAACGTGGAAAATTTTGAAGGAAAGATAGACGAGGAAATTAATTTAGCTAGCGAACTCGGTGTTATAAAAATGAATGTTGTCGGCTTTGACCAAGATACCATTTCAAAATCTTTGGAATTATCTTCCCAATATGCACAGGTATATAGCACAATAGGATGGCATCCAACTGAAGCTGGTTCTTATGATGATAATATTGAGTCAATGATTATCAGTCATTTAGAAAATCCCAAGGTTATTGCACTTGGTGAAATTGGTCTGGATTATTATTGGATGGAGGATCCCAAAGATATTCAGATCGAGGTGTTTAAGCGTCAAATTGAACTTTCAAAAGAGTATAACCTTCCTTTTGTCGTTCATACACGTGATGCGTTAGAAGACACTTATGAAGTCATTAAGGAATCTGGAGTTGGGCCTTTTGGTGGTATAATGCACTCTTTTTCTGGTTCTTTGGAAATGGCTCAGAAATTTATTGATTTAGGGATGATGATTTCCTTTTCTGGTGTTGTGACCTTTAAGAAGGCATTAGATGTACAAGAAGCTGCACGAGAGTTGCCATTAGATAAGATATTAGTGGAAACAGATGCTCCTTATTTGGCTCCTGTACCTAAAAGAGGTCGAGAAAACAAAACCGCTTATACGAGATATGTCGTTGAAAAAATAGCAGAGCTACGAGGCATAACTGTGGAAGAGGTAGCGGAGGCTACATACCAAAATGCAGTAAGGATATTTAGACTTGATGAAAAAAAT

SEQ ID NO: 12228 - protein, 284 aa, Streptococcus agalactiae
MLQSYVIIIKINACSYDKQRKNSDMIKIFDTHTHLNVENFEGKIDEEINLASELGVIKMNVVGFDQDTISKSLELSSQYAQVYSTIGWHPTEAGSYDDNIESMIISHLENPKVIALGEIGLDYYWMEDPKDIQIEVFKRQIELSKEYNLPFVVHTRDALEDTYEVIKESGVGPFGGIMHSFSGSLEMAQKFIDLGMMISFSGVVTFKKALDVQEAARELPLDKILVETDAPYLAPVPKRGRENKTAYTRYVVEKIAELRGITVEEVAEATYQNAVRIFRLDEKN

SEQ ID NO: 12229 - protein, 270 aa, Streptococcus agalactiae
ATGTGGGATGTCCTGACTGGTAAGGAGTCAGTAAGGACTTTAAAAAAACAATTGGATAAAGAATTGATACATAGCGTGTACGCGCCACGCAAGAGATCTAAGTTTCACGATATTATTACGTCGCATCATAAAGAAATAGACGAAGTAGCCATCAACACAAAGACAGCTATTCATAAAGTTGCTAATCAATTGGACGAGGCAATAAAAGGAGAATTTCGTTCAAGGGTTGAGGAGGCTATTGAAAGCAATCAGCAAAAATATAATCATTTA

SEQ ID NO: 12230 - protein, 90 aa, Streptococcus agalactiae
MWDVLTGKESVRTLKKQLDKELIHSVYAPRKRSKFHDIITSHHKEIDEVAINTKTAIHKVANQLDEAIKGEFRSRVEEAIESNQQKYNHL

SEQ ID NO: 12231 - protein, 390 aa, Streptococcus agalactiae
ATGGCACTGATTGATATCATTGAAAAACAATTAGCTGATACTCAGAGAAAAATATCAGATTTAGACGATGCCTATCACCATAGTTGTTGCCAGTTTGAAGAAAAATTAGACGATCTCTCAGTAAGAAAAAATAAGATTACTAATATGCTTCAAGAAACTTACGACGCTGTTGAATATGATTTGAGATATAGTAATGATAGCTCAGATATGATGACGCTCAATCGTATTTTAGATTCTTATCATGACGACTTAGAGCAAGCTTACCATAAAGAGTACTATGCCTTGTCCGCTCAAGAAGAAGAATATAGAGCTAACTATATTCGGCAACGTTCAGAACATGAACTAACCTTTGAAGAGTTGCAAAGGGAAAAGAAAAGAGAATTAATGAAG

SEQ ID NO: 12232 - protein, 130 aa, Streptococcus agalactiae; identical to SEQ ID NO: 7960

SEQ ID NO: 12233 - protein, 1290 aa, Streptococcus agalactiae
ATGGAAAAAGTCTTGACTGATTTAGATAGGGTAAATATAGCGAAGCAAGAGTATGAATTAGGTAGCCAACTTGATACACTAGTCAAAATAATGAGCCAAGATAAGGTACTCCCCATCGGTAAAGTTGCTCACGTTCAAGATGGAGGCAAAGAAACTGGGGAACAAATTTATACCATCACTCCAAATGGAACTTTAGACAAGCCAGAGGATGTTAAGGAAGTTACGGTTTTATTTAAGGGGTCAACAGCACCGTTTGGAGGAGATGATTGGAAAACAGACTGGTTTAAAAATGATATTCCAATAGCTAGTAAACTATTATTAAAGAAATTTGGTTCACAAAGTGTATCTCATAAACAAGGTACAAAGCAGTTAGAACAATCAGCTCATCTGCTAAAAGAAGTTATGAATAAATATCCTAATGCAAAAATTTCGGTCTACGGACACTCGTTAGGGTCAATGAATGCACAGTATGCTATTGCAGAATTGGATGATAATCAAATTTACCGAGTTCAAGGAGCTTGGATATATAACGGTCCAAACCTTTATAGTATTTTGACAGATAAACAAAAAGAACAGGTTGATAAAATAAAAGGGGTAGTCAATAATTACGTTGATTCCAAGGATAAAATTGGAATAGGTTATCCTAAAGAAGGAAGCGATAATGCTGTCGGAATTGTTAAAATAGTTGACAGTAAAGCTGTTTCAGGAGGTAGCTGGGTTGCTAATTTTACCAATCAACACATTTGGGGAGGCTACCAGTACAATCAAGATGGTTCTTTAAAATTAGCAGAAGATAAATTTGCTTACAAAGAAAACTATTCAGTAGTTCATACGAATGTGAATCAAAGAATGCATGCTATTAAAGCGAAACTTAGTAGCTTTAAAAGTACGGGAAAAGAAGTTAGTAAGAATCAAGCTATTTTCCTAGATAGTCAACAAGCAAAAGTGATTTCTAGTGGTTTGGTAACGATATCAAAAGAAGCAGTTGAAGAAGTAAAAAAAGTTGAGCAAAAAGCAGTTGCTAAAGCAGAAGAGCTTTATCAATCTTTAAAAGTAGCTCCTACAGGAGTTACTGAACTAAGTCCTCAAGAATTGGAAGAAGCGTATGCTCAGTCAGGTGTTAGCTATGCGAGCATTGTCGGAGAAGCTCAAACCTTTTTCTCAAATAAAATTCAAGCGGCAGAAAGCATTTCTCACGCTTACGTTGAATTAGAAAACCAAATTAATAAAGGGGTTGAAGCTATGTTGCAACAAGATAGTAACTTGTCAGGGGAGTTTAAACAATGGCAC

SEQ ID NO: 12234 - protein, 430 aa, Streptococcus agalactiae; identical to SEQ ID NO: 7962

SEQ ID NO: 12235 - protein, 390 aa, Streptococcus agalactiae
ATGAAGTCAATAAAATTACTTAGTTTTATTGTAATAATCCTTTTAGGGCTTGGTTTCACTGTAGGAGGTTTAAAAGTGACTGAAAACAATAAACAACAAGAATTATGGGAAATAGCTAATAGCAAGGACGCTAAAAATGCTTATCAAAAGTGGATTTATGCAGAAGATAAAGACGCTTTCAAAGAGAATGCTGTTATTAAGTCGTATGATATTGACAAAGAAAGTATCAAAAAAAATCCTATGGGAGGGATTTCGGTAAGGTTAATCATTAATAAAGATCCTAACTTATATATTACTTGTAATTTGGATAAGGATAATCAAGGGCATTTGGTCAGTCAAAGTAGCCATCAATCTCCCCAGTTAACTCATTTATTGGAAAGTAGAGGTCAT

SEQ ID NO: 12236 - protein, 130 aa, Streptococcus agalactiae
MKSIKLLSFIVIILLGLGFTVGGLKVTENNKQQELWEIANSKDAKNAYQKWIYAEDKDAFKENAVIKSYDIDKESIKKNPMGGISVRLIINKDPNLYITCNLDKDNQGHLVSQSSHQSPQLTHLLESRGH

SEQ ID NO: 12237 - protein, 1260 aa, Streptococcus agalactiae
ATGCTTAAACGTCTAGGTAAAGTATTTGGACCTCTAGTTTGTGCTTTACTATTGTTGGTAGGATTATATCTTGTTTTTCCTGTTTCTCAGCCTCATCATTTAGGTAAGGAAAAAAACAGTGCAGTAGCGTTGACGAAGGCAGGTTTTAAAAGCAGAGTTCAAAAAGTTAGAGCTTTCAGTGATCCTAAAGCCAATTTTGTCCCTTTCTTTGGTTCAAGTGAGTGGCTAAGATTTGATGCAATGCATCCATCAGTTTTAGCAGAGGCTTACAATAGACCTTATATCCCATATCTTTTAGGTCAAAAAGGGGCGGCTTCTCTGACACAATACTATGGCATTCAACAGATTAAAGGACAAATCAAAAATAAAAAAGCTATCTATGTTATTTCTCCGCAATGGTTTGTTCGCAAGGGAGCCAACAAAGGTGCTTTTCAAAACTATTTCAGCAACGATCAAACCATTCGATTTTTGCAAAATCAAACAGGGACAACCTACGATAGGTATGCTGCTCGTCGATTGTTAAAATTATATCCTGAAGCTTCTATGTCAGATTTGATAGAAAAAGTTGCAGATGGCCAAAAACTATCAAATAAAGACAAACAAAGACTAAAGTTTAATGATTGGGTATTTGAGAAGACAGATGCTATTTTTAGCTATCTACCACTAGGAAAAACTTATAATCAGGCAATAATGCCTCATGTTGGTAAATTACCGAAAGCATTCTCATATAATCATTTATCGCGTATTGCATCACAAGATGCTAAAGTAGCAACGAGATCAAATCAATTTGGTATTGATGATCGCTTTTACCAAACAAGAATTAAAAAGCACTTAAAAAAATTGAAAGGGTCACAACGACATTTCAATTATACTAAGTCACCAGAATTTAATGATTTACAGTTGGTTCTTAATGAATTCTCAAAACAAAATACAGATGTCCTTTTTGTCATACCACCAGTAAATAAAAAGTGGACAGACTACACAGGGCTTGATCAAAAAATGTATCAAAAATCTGTAGAAAAAATAAAACACCAACTTCAAAGTCAAGGTTTCAATCATATCGCTGACCTTTCTCGAGATGGAGGTAAGCCATACTTTATGCAAGATACAATCCATTTAGGTTGGAATGGTTGGTTAGAGCTAGATAAGCATATCAATCCATTTTTAACAGAGGAAAACAGCAAGCCGAATTATCACATTAATAATAAATTTTTGAAGAAATCTTGGGCAAAATATACAGGACGTCCAAGTGATTACAAG

SEQ ID NO: 12238 - protein, 420 aa, Streptococcus agalactiae
MLKRLGKVFGPLVCALLLLVGLYLVFPVSQPHHLGKEKNSAVALTKAGFKSRVQKVRAFSDPKANFVPFFGSSEWLRFDAMHPSVLAEAYNRPYIPYLLGQKGAASLTQYYGIQQIKGQIKNKKAIYVISPQWFVRKGANKGAFQNYFSNDQTIRFLQNQTGTTYDRYAARRLLKLYPEASMSDLIEKVADGQKLSNKDKQRLKFNDWVFEKTDAIFSYLPLGKTYNQAIMPHVGKLPKAFSYNHLSRIASQDAKVATRSNQFGIDDRFYQTRIKKHLKKLKGSQRHFNYTKSPEFNDLQLVLNEFSKQNTDVLFVIPPVNKKWTDYTGLDQKMYQKSVEKIKHQLQSQGFNHIADLSRDGGKPYFMQDTIHLGWNGWLELDKHINPFLTEENSKPNYHINNKFLKKSWAKYTGRPSDYK

SEQ ID NO: 12239 - protein, 237 aa, Streptococcus agalactiae
ATGGATATTAAATCAGAAGTATTAGCAATTATTGATGACCTATTTATGGAGGATGTTTCTTCTATGATGGATGAAGACTTATTTGACGCAGGAGTTCTAGACAGCATGGGTACTGTTGAACTAATTGTTGAGTTGGAAAGCCATTTTAATATTGATATTCCGATTGCGGAATTTGGTCGTAATGACTGGAACACAGCTAATAAAATTGTTGCTGGAGTAACGGAGCTCTGCAATGCT

SEQ ID NO: 12240 - protein, 79 aa, Streptococcus agalactiae; identical to SEQ ID NO: 3278

SEQ ID NO: 12241 - protein, 1263 aa, Streptococcus agalactiae
GTGATACAGGCATTTTTAGAAAAACTTCCTCACTTGGATGTTTATGGGAATCCACAATATTTCTTCTACCTTATCTTAGCTGTTCTACCAATTTACATCGGCTTATTCTTTAAGAAGCGTTTTGCCTTATATGAGATTATTTTTAGTCTAAGTTTTATTGTAATGATGTTGACTGGTAGTACTTTTAATCAATTGAAGTCACTATTGGCATACGTTGTCGGACAATCTCTGCTAGTTTTTATCTATAAAGCTTACCGGAAACGATTTAATCATACTTTGGTCTTTTATGTAACGGTTTGTTTATCTATTTTTCCGCTATTTTTGGTAAAATTAATTCCAGCTATATCTGAGGATGGGCATCAGTCACTTTTTGGGTTTCTAGGAATTTCTTACCTTACTTTTAGAGCTGTTGCTATGATTATTGAAATGAGAGACGGTGTTTTGAAAGAATTTACTTTATGGGAATTCTTAAGATTTTTACTCTTCTTTCCAACTTTCTCAAGTGGACCAATTGATCGTTTTAAACGATTCAATGAGGATTACATTAATATCCCAGATCGAAACGAACTCCTAGATATGTTAGGTCAAGCGATTCATTATTTGATGTTAGGTTTTCTCTATAAGTTTATTTTAGCCTATATTTTTGGAAGTCTGATTATGCCTCCTCTAAAAGAATTAGCGCTAGAACAGGGTGGTGTGTTTAATTGGCCAACACTTGGGGTTATGTATGCCTTTGGTTTTGATTTGTTCTTTGATTTTGCAGGTTACACAATGTTTGCGTTGGCTATTTCTAACCTAATGGGGATTAAGTCTCCGATTAACTTTGACAAACCTTTCAAATCACGCGACCTAAAAGAATTTTGGAATAGATGGCATATGAGCCTTTCTTTCTGGTTTAGAGACTTTGTTTTCATGAGGCTTGTTAAGCTTTTAGTTAAAAATAAAGTTTTTAAAAACCGTAATGTTACTTCAAGTGTAGCTTATATTATCAATATGCTTCTTATGGGATTCTGGCATGGGTTAACTTGGTACTATATAGCCTATGGTCTCTTTCATGGGATTGGCCTAGTTATTAATGACGCTTGGGTACGTAAGAAGAAAAATATTAATAAAGAAAGAAGATTGGCTAAAAAACCACTTTTACCAGAAAACAAATGGACTTATGCTTTGGGTGTCTTCATCACCTTTAATGTAGTTATGTTTTCTTTCTTGATTTTTTCAGGATTTTTAGATCTTTTGTGGTTCCCACAACCGCATAACAAA

SEQ ID NO: 12242 - protein, 421 aa, Streptococcus agalactiae; identical to SEQ ID NO: 3280

SEQ ID NO: 12243 - protein, 1533 aa, Streptococcus agalactiae
ATGATACATGATATGATTAAAACAATTGAGCATTTTGCTGAGACACAAGCTGATTTTCCAGTGTATGATATTTTAGGGGAAGTCCATACTTATGGACAACTTAAAGTAGACTCTGACTCTCTAGCTGCTCATATTGATAGCCTAGGCCTTGTTGAAAAATCACCTGTCTTAGTATTCGGTGGTCAAGAATATGAAATGTTGGCGACATTTGTTGCTTTAACAAAGTCAGGGCATGCTTATATACCGGTTGACCAACACTCTGCTTTGGATAGAATACAGGCTATTATGACAGTTGCTCAACCAAGCCTTATCATTTCAATTGGTGAATTTCCTCTTGAAGTTGATAATGTCCCAATCCTAGACGTTTCTCAAGTTTCAGCTATTTTTGAAGAAAAGACTCCTTATGAGGTAACACATTCTGTTAAAGGTGATGATAATTACTATATTATTTTCACTTCAGGGACTACTGGTTTACCAAAAGGTGTGCAAATTTCACATGACAATTTATTGAGCTTTACAAATTGGATGATTTCTGATGATGAGTTTTCAGTTCCTGAAAGACCGCAAATGTTGGCTCAACCGCCATATTCATTTGACTTATCAGTTATGTATTGGGCACCAACACTAGCTATGGGAGGCACCCTGTTTGCCCTACCAAAAACAGTAGTTAATGATTTCAAAAAACTATTCGCTACCATTAATGAATTGCCAATACAGGTTTGGACTTCGACACCATCATTTGCTGATATGGCGCTACTATCTAACGATTTCAATTCAGAGACCTTGCCACAGTTAACACATTTTTATTTTGATGGGGAAGAGTTAACTGTCAAGACTGCACAAAAACTTCGTCAACGTTTTCCAAAAGCTCGTATCGTTAATGCATATGGGCCAACAGAAGCAACAGTTGCTCTATCCGCAGTAGCAATTACTGATGAAATGTTAGAAACATGCAAACGCCTTCCAATTGGTTACACTAAAGATGACTCACCAACGTATGTGATTGATGAAGAAGGTCATAAATTACCAAACGGAGAGCAAGGTGAAATCATTATTGCTGGACCAGCAGTATCAAAAGGCTATCTTAACAATCCAGAAAAGACAGCTGAGGCATTTTTCCAATTCGAAGGTCTACCTGCTTACCATACCGGTGACTTAGGAAGTATGACCGATGAAGGTCTTCTGCTTTACGGTGGGCGTATGGATTTCCAAATTAAATTTAACGGCTATCGTATTGAATTAGAAGATGTTTCTCAAAACTTAAACAAATCGCAGTATGTAAAATCAGCAGTAGCAGTGCCACGTTATAACAAGGATCATAAAGTTCAAAACTTATTAGCCTATATTGTCTTAAAAGAAGGTGTAAGAGATGATTTTGAACGTGATTTGGATTTGACAAAAGCAATTAAGGAAGACTTAAAGGACATTATGATGGATTACATGATGCCATCTAAATTTATCTATCGAGAAGATTTACCTTTGACACCAAATGGGAAAATTGATATCAAAGGTCTTATGAGCGAGGTAAACAAG

SEQ ID NO: 12244 - protein, 511 aa, Streptococcus agalactiae [sequence omitted]

SEQ ID NO: 12245 - protein, 1184 aa, Streptococcus agalactiae
ATGTTTAGTGATTTACGCAAAAAATTTGTCTTTTTGACCATGTCAATCCTTATTGTCGTTGTTCTCTTTCTCTTTGCAGTGAGTAATCGCTACAATCAATATTGGGATGAATATGATGCATATAGGATTGTTAAATTAGTTGCTAAAAATGATTATTTAGGAATACCAGGCGATGAACCGATTGCTTTGGTGACTATAGATAACCAAAAGATGGTTAAGATTCAAAGCAATAATACTGATTTGACAAATGATGTTATCGAAAAATCTAGTTTAAAGCTCCTTGAGCAAGGAAAGAAGTCACGAAAATGGAAGTCTTTTATATATTCCATAAAAGAATATAAAGATAAAACTTACACCATAGCTATTATGGATTTGGCTAGTTATGAAGTCCCTTATGCAAGGCGTTTTCTCATTCTTGTTTTTACTATTTTTGGATTTTGTTTATTAGCAGCTGTAAGTCTTTATCTTTCTCGATTTATCGTAGGGCCTGTAGAGACAGAAATGACTCGCGAAAAACAGTTCGTTTCAGATGCGAGTCATGAGCTGAAGACCCCTATTGCAGCTATACGAGCCAACGTTCAGGTTCTGGAACAGCAAATTCCAGGAAATCGTTATCTGGATCATGTTGTTTCGGAGACTAAGCGAATGGAGTTTTTAATTGAAGATTTGCTTAATTTGTCTAGACTTGATGAAAAACGCTCCAAGGTAAATTTCAAAAAGTTAAACTTATCTGTCTTATGTCAGAAGTACTTCTAACATATGAAAGTTTGGCATATGAAGAAGAAAAATGTTTAAATGATACAATTGAAGATGATGTCTGGATTGTTGGAGAAGAGAGTCAAATTAAGCAAATTTTAATAATTCTTTTGGATAATGCTATTAGGCATTCTTTGTCAAAATCAGCAATCCAGTTTAGTCTTAAACAGGCTCGAAGAAAAGCTATTCTGACAATATCAAATCCAAGTGCTATCTATTCCAAAGAGGTTATGGATAATCTCTTTGAGCGTTTTTATCAAGCTAAAGATGATCATGCAGATTCTCTCAGTTTTGGTCTAGGCTTATCTATTGCTAAGGCAATCGTGGAACGCCATAAGGGGAGAATTAGAGCATATCAAGAAAAAGACCAATTACGTCTTGAAGTCCAGTTACCAATTGATGGATTTTGGACCAATACCATGATTAAT

SEQ ID NO: 12246 - protein, 395 aa, Streptococcus agalactiae; identical to SEQ ID NO: 3284

SEQ ID NO: 12247 - protein, 552 aa, Streptococcus agalactiae
TTGACAGGTCTCTATGATTTAGTCTTGTTGGATATTATGTTACCCAAACGCTCAGGATTATCTATTTTAAAAAGAGTGAGGGAAGCTGGTTTAGAAACCCCAATAATCTTTTTAACTGCAAAATCACAGACTTATGATAAAGTTAATGGTTTAGATTTAGGGGCAGATGATTATATCACAAAACCCTTTGAAGCAGATGAATTGCTAGCTAGAATTAGGTTGAGAACCAGACAATCTTCTCTGATCAGAGCAAATCAATTGCGGCTTGGAAATATAAGGCTTAACACAGATTCACATGAGCTAGAATCTAAAGAAAGTAGTGTAAAATTATCCAATAAAGAATTTCTCTTGATGGAAGTTTTTATGCGAAATGCAAAGCAGATTATTCCTAAAAACCAGTTGATTTCTAAGGTTTGGGGACCTTCAGACAATTCAGAATATAACCAGTTAGAAGTATTTATTTCTTTTTTGCGAAAAAAATTGCGCTTTTTAAAAGCAGACATTGAAATAATAACCACTAAGGGCTTTGGATATTCCTTGGAGGAGATGACA

SEQ ID NO: 12248 - protein, 184 aa, Streptococcus agalactiae
MTGLYDLVLLDIMLPKRSGLSILKRVREAGLETPIIFLTAKSQTYDKVNGLDLGADDYITKPFEADELLARIRLRTRQSSLIRANQLRLGNIRLNTDSHELESKESSVKLSNKEFLLMEVFMRNAKQIIPKNQLISKVWGPSDNSEYNQLEVFISFLRKKLRFLKADIEIITTKGFGYSLEEMT

SEQ ID NO: 12249 - protein, 156 aa, Streptococcus agalactiae
ATGGAAAAAGTCTTGACTGATTTAGATAGGGTAAATATAGCGAAGCAAGAGTATGAATTAGGTAGCCAACTTGATACACTAGTCAAAATAATGAGCCAAGATAAGGTACTCCCCATCGGTAAAGTTGCTCACGTTCAAGATGGAAGACAANNNNNT

SEQ ID NO: 12250 - protein, 52 aa, Streptococcus agalactiae
  VARIANT 51, 52: Xaa = Any Amino Acid
MEKVLTDLDRVNIAKQEYELGSQLDTLVKIMSQDKVLPIGKVAHVQDGRQXX

SEQ ID NO: 12251 - protein, 240 aa, Streptococcus agalactiae
GTGATTTATGCAGAAGATAAAGACGCTTTCAAAGAGAATGCTGTTATTAAGTCGTATGATATTGACAAAGAAAGTATCAAAAAAAATCCTATGGGAGGGATTTCGGTAAGGTTAATCATTAATAAAGATCCTAACTTATATATTACTTGTAATTTGGATAAGGATAATCAAGGGCATTTGGTCAGTCAAAGTAGCCATCAATCTCCCCAGTTAACTCATTTATTGGAAAGTAGAGGTCAT

SEQ ID NO: 12252 - protein, 80 aa, Streptococcus agalactiae
MIYAEDKDAFKENAVIKSYDIDKESIKKNPMGGISVRLIINKDPNLYITCNLDKDNQGHLVSQSSHQSPQLTHLLESRGH

SEQ ID NO: 12253 - protein, 141 aa, Streptococcus agalactiae
GTGAAACGTACTTATCAACCAAGTAAAATCCGTCGCCAACGTAAACACGGATTCCGTCACCGTATGTCAACTAAAAACGGACGTCGCGTGCTTGCTAGCCGCCGTCGTAAAGGACGTAAAGTGTTATCAGCTAAATATAGA

SEQ ID NO: 12254 - protein, 47 aa, Streptococcus agalactiae
MKRTYQPSKIRRQRKHGFRHRMSTKNGRRVLASRRRKGRKVLSAKYR

SEQ ID NO: 12255 - protein, 468 aa, Streptococcus agalactiae
TTGCCATCGATAAATCAAAAGCAAATGGGAAACATGAAGACTTTTGTCAATAATGCCTCTAAGACAGTACTTAGTTTATGGTTTGGCGTTATGCCAACAATTATGACTGTCGGAACAATAGCTTTGATTATTTCAGTATCAACACCTATTTTTAAAATTTTAGGCACACCATTCCTTCCGTTCCTTGAACTTTTAGGGATTCCAGAAGCAGATATTGCGAGTCAAACCATGATTGTTGGTTTTTCAGATATGGTTGTTCCTTCGATAATGGCGGCTGAAATTCACAGTGAGATGACAAGGTTTATTGTCGCAACAGTTTCTATTGTGCAATTAATTTATATGTCTGAGACTGGTGCGGTGATATTAGGTTCCAAGATCCCTATCAACATTCTAGAATTATTTATCATTTTTATAGAGAGAACAATTATTTCATTACCTATTATTGTTTTGATGGCACATCTTTTCTTT

SEQ ID NO: 12256 - protein, 156 aa, Streptococcus agalactiae
MPSINQKQMGNMKTFVNNASKTVLSLWFGVMPTIMTVGTIALIISVSTPIFKILGTPFLPFLELLGIPEADIASQTMIVGFSDMVVPSIMAAEIHSEMTRFIVATVSIVQLIYMSETGAVILGSKIPINILELFIIFIERTIISLPIIVLMAHLFF

SEQ ID NO: 12257 - protein, 656 aa, Streptococcus agalactiae
ATGAAAAAAGAAAGTATATCTATTAAAGATATCTTGTGGTTTATTATTCCGTCGTTATTTGGAGTATTATTATTAATGACTCCATTTAAATATAATGGTATGACAACAGTAGCTGTCTCTGTAATATCTAAGACAATTAATCAATGGATTAACGCTGTTTTTCCTATACATTATATTATTTTACTAATCATTTTTATTTCATGTGTGTTAGCACTTTGTTATCGTCTGTTTAGACCTAGCTTTATTGAAAAAAATGACTTGTTAAAAGAAATTTCTGACATTACCATTTTCTGGCTGATTATTCGTTTGATCGGTTTGGCACTTGGTCTGATGACGGTTTTACATATTGGTCCTGAAATGGTATGGGGGAAAGAGACAGGCGGCCTTATCCTTTTTGATTTGATTGGTGGTTTGTTTACCATTTTCCTTGCTGCGGGTTTTATTCTTCCATTTTTGACAGAATTTGGTCTACTGGAGTTTGTTGGTGTCTTCTTAACCCCCATTATGCGTCCATTCTTTCAGCTACCTGGTCGGTCAGCAGTTAATTGTGTAGCCTCATTTGTAGGTGATGGCACTATTGGAATTGCTTTGACCGATAAGCAGTATGTGAGGGTTATTATACCAGTAGAGAAGCTGCAACGANNNNNTTAATTAAT

SEQ ID NO: 12258 - protein, 219 aa, Streptococcus agalactiae
  VARIANT 215, 216: Xaa = Any Amino Acid
MKKESISIKDILWFIIPSLFGVLLLMTPFKYNGMTTVAVSVISKTINQWINAVFPIHYIILLIIFISCVLALCYRLFRPSFIEKNDLLKEISDITIFWLIIRLIGLALGLMTVLHIGPEMVWGKETGGLILFDLIGGLFTIFLAAGFILPFLTEFGLLEFVGVFLTPIMRPFFQLPGRSAVNCVASFVGDGTIGIALTDKQYVEGYYTSREAATXXLIN

SEQ ID NO: 12259 - protein, 1724 aa, Streptococcus agalactiae
TTGGAAAATTTATTACAACATAAGTTACCGGTCGCACCATTTGTAGAGTCAGCGACCAATTGGATTACGAAAACTTTTTCTGGTTTATTTGACTTTATCCAGACAATCGGTAATGCATTGATGGATTGGATGACAAAAACATTACTATTCATTAATCCTTTACTTTTTATTGTACTAATTACAGCTGCTGTATTTTTCTTAGCTAAGAAAAAATGGCAATTACCGACATTTACTTTCATTGGTTTGCTATTTATCTATAACCAAGGGCTGTGGGAGCAGTTGATTAACACTTTTAACTTGGTTTTAGTAGCAAGTTTAATTTCTATTATTATTGGTGTACCACTAGGTATTTGGATGGCAAAAAGTGATAAAGTTAAACAAGTTGTTAATCCAATTCTTGACTTTATGCAAACTATGCCAGCATTCGTTTACCTTATTCCTGCAGTAGCCTTCTTTGGTATCGGTATGGTACCAGGTGTCTTTGCCTCTGTTGTATTTGCTTTGCCTCCAACAGTGCGCTTTACTAACTTGGCTATTCGTGAAATCCCACTTGAGTTAATAGAAGCATCTGATTCATTTGGTTCAACAGCTAAGCAAAAATTATTCAAAGTTGAACTACCACTTGCTAAGAACACTATTATGGCAGGAATCAATCAAACTATGATGTTGGCTCTTTCTATGGTGGTTACAGGATCTATGATCGGTGCACCTGGACTTGGTCGTGAAGTGTTATCGGCGCTTCAACATGCTGACATTGGTACAGGGTTTGTTAGTGGTCTATCGCTAGTTATTTTAGCAATCGTGTTAGACCGTGTTAGTCAATTCTTTAATTCTAAACCGGGTGAGAAGCAAGCTAAAACATCAAAAGTTAAAAAATGGGTAGGTTTAGGGGCCCTGGCTCTCTTCATTCTAGCAGCTCTTGGTCGCATTGTTGTCAATATGACTTCAGGAAATGAAGCCAAAGGTCAAAAAGTGAAAATAGCTTATGTCCAATGGGATTCAGAAGTTGCTTCAACCAACGTTATTGCTGAAGTTTTAAAATCTAAAGGATATGATGTTGAATTGACACCACTTGATAATGCAGTCATGTGGCAAACAGTTGCCAATGGGAATGCTGATTTACAACAAGCGCTTGGTTACCAAAGACCCACGGGCAATATTTTAATAAATACAAAAATAGTTTAGATGACTTAGGTCCTCACGTTGAGAACGTCAAAATAGGTTTAGTTGTTCCTAAATACATGAACGTAAATAGTATTGAAGAATTATCAAATCAAGCAGATAAACAAATTACAGGTATCGAACCAGGTGCAGGTATTATGAAGTCTGCTAAACAATCCCTTAAAGATTATCCAAATCTTTCAAGTTGGAAGTTGTTATCAGCATCAACAGGAGCTATGACAACAACCTTAGGGAAGGCTATCAAAAACAAAGATCAAGTGGTCATTACAGGTTGGTCACCTCACTGGATGTTTGCTAAGTATGATTTAAAATACCTTAAAGATCCTAAGAAATCATTTGGTGGTGAAGAACATATCAATACAATAGCACGCAAGAATTTGAAAAAAGATATGCCAAAAGTATATAAAATTATCGATAAGTTCAAGTGGACTAAAGAAGATATGGAATCTATCATGTTAGATATGGATAAAGGTATGGAGCCTGCTAAAGCAGCTCAAAAATGGATTAAAAACCACAAAAAAGAAGTTTCAGAGTGGACTAAA

SEQ ID NO: 12260 - protein, 575 aa, Streptococcus agalactiae
MENLLQHKLPVAPFVESATNWITKTFSGLFDFIQTIGNALMDWMTKTLLFINPLLFIVLITAAVFFLAKKKWQLPTFTFIGLLFIYNQGLWEQLINTFNLVLVASLISIIIGVPLGIWMAKSDKVKQVVNPILDFMQTMPAFVYLIPAVAFFGIGMVPGVFASVVFALPPTVRFTNLAIREIPLELIEASDSFGSTAKQKLFKVELPLAKNTIMAGINQTMMLALSMVVTGSMIGAPGLGREVLSALQHADIGTGFVSGLSLVILAIVLDRVSQFFNSKPGEKQAKTSKVKKWVGLGALALFILAALGRIVVNMTSGNEAKGQKVKIAYVQWDSEVASTNVIAEVLKSKGYDVELTPLDNAVMWQTVANGNADFTTSAWLPKTHGQYFNKYKNSLDDLGPHVENVKIGLVVPKYMNVNSIEELSNQADKQITGIEPGAGIMKSAKQSLKDYPNLSSWKLLSASTGAMTTTLGKAIKNKDQVVITGWSPHWMFAKYDLKYLKDPKKSFGGEEHINTIARKNLKKDMPKVYKIIDKFKWTKEDMESIMLDMDKGMEPAKAAQKWIKNHKKEVSEWTK

SEQ ID NO: 12261 - protein, 1151 aa, Streptococcus agalactiae
ATGGTTAAGCAAGGAAAAAGTAAGACAGAAATTCTTGAAAAAACAGGAGCGACTGTAGGTGTCTATGATGCGAGTTTTGAAATAAAAGAAGGCGAAATTTTCGTTATCATGGGACTTTCTGGTTCAGGAAAATCAACTTTAGTTCGGATGTTAAACCGTTTGATTGACCCATCATCAGGAAATATCTATTTAGATGGTAAAGATATTGCAAAGATGAATGTAGAAGATTTACGTAACATTCGTCGTCACGATATCAACATGGTTTTCCAAAATTTTGGTCTTTTCCCACATCGTACAATTTTAGAAAATACAGAGTTTGGGTTAGAGATGCGTGGTGTTTCTAAGGAAGAACGTACAACGTTAGCTGAAAAAGCTTTGGACAATGCAGGTCTATTACCGTTTAAAGATCAATACCCCAGTCAATTATCAGGAGGAATGCAACAGCGTGTTGGTTTAGCACGTGCCCTTGCTAACAGCCCTAAAATCCTTCTGATGGATGAGGCCTTCTCAGCTTTAGACCCATTAATTCGTCGTGAAATGCAAGATGAGCTTCTTGATCTTCAAGACACGAATAAACAAACTATTATTTTTATCAGCCATGATTTGAATGAAGCGTTACGTATTGGTGATCGTATTGCTCTTATGAAAGATGGAGAAATTATGCAGATTGGTACAGGAGAAGAGATTTTGACTAATCCGGCTAATGATTTTGTTCGTGAGTTTGTTGAAGACGTTGATCGCTCAAAAGTGTTAACTGCTCAAAATATTATGATAAAACCTTTAACAACTGTTTTAAAATTGATGGCCCACAAGTTGCTTTAACAAGAATGCATCGTGAGGAAGTCTCAATGTTAATGGCAACGAATCGTCGTCGCCAACTTCTGGGATCCCTAACCGCAGATGCTGCAATTGAAGCTCGTAAGAAAGGTTTGCCGCTTTCTGAAGTGATTGATAAAGATGTTGTAACGGTCTCAAAAGATACAGTTATTACAGACATCATGCCTTTAATTTATGATTCATCTGCTCCGATAGCCGTTACTGATGATAATGATAGACTCCTAGGGGTTATCATTAGAGGACGTGTGATCGAAGCACTTGCTAACGTTCAAGATGAAACAGTAGTAGAATCGCCAAAAGAAACGGTAGAAGCT

SEQ ID NO: 12262 - protein, 384 aa, Streptococcus agalactiae
MVKQGKSKTEILEKTGATVGVYDASFEIKEGEIFVIMGLSGSGKSTLVRMLNRLIDPSSGNIYLDGKDIAKMNVEDLRNIRRHDINMVFQNFGLFPHRTILENTEFGLEMRGVSKEERTTLAEKALDNAGLLPFKDQYPSQLSGGMQQRVGLARALANSPKILLMDEAFSALDPLIRREMQDELLDLQDTNKQTIIFISHDLNEALRIGDRIALMKDGEIMQIGTGEEILTNPANDFVREFVEDVDRSKVLTAQNIMIKPLTTVLZIDGPQVALTRMHREEVSMLMATNRRRQLLGSLTADAAIEARKKGLPLSEVIDKDVVTVSKDTVITDIMPLIYDSSAPIAVTDDNDRLLGVIIRGRVIEALANVQDETVVESPKETVEA

SEQ ID NO: 12263 - protein, 2376 aa, Streptococcus agalactiae
ATGTCAGAATTTGATACAAAATCATATTTAGAAAAACTTGATGCATGGTGGAGAGCAGCTAATTATATTTCTGCAGCACAAATGTATCTAAAGGATAACCCTCTCTTGAGACGAGAGCTGGTTGAAAACGACTTAAAGGTTCATCCAATTGGTCACTGGGGCACTGTACCTGGACAAAATTTTATCTATGCTCACTTAAATCGCGCTATTAATAAATACGATTTAGACATGTTCTATATTGAAGGTCCAGGTCATGGTGGTCAAGTTATGGTATCTAATTCATATTTAGATGGTTCATATACTGAATTAAACCCCAATATTGAGCAAACAGAGGATGGCTTTAAGCAGTTATGTAAAATCTTCTCTTTCCCAGGTGGAATTGCATCCCATGCAGCACCAGAAACACCAGGGTCAATTCATGAAGGCGGTGAACTTGGTTACGCACTTTCTCATGCGACAGGTGCCATCCTGGACAATCCAGATGTTATTGCTGCGACTGTTATTGGTGATGGTGAAGGTGAAACAGGACCACTTATGGCTGGTTGGCTATCTAATACCTTTATCAATCCAGTAAATGATGGTGCTGTTCTACCAATCTTCTATTTAAATGGTGGTAAAATCCATAACCCAACTATCTTTGAACGTAAGACAGATGAAGAATTATCTCAGTTTTTTGAAGGATTAGGTTGGAAACCTATTTTTGCAGATGTTGTTGAACTCTCTGAGGATCATGCGGCTGCTCATGCTTTGTTTGCAGAAAAATTAGATCAAGCTATTCAAGAGATTAAAACCATTCAATCAGAAGCACGACAAAAACCAGCAGAAGAAGCTATCCAAGCAAAATTCCCTGTCTTAGTTGCACGTATTCCTAAGGGTTGGACTGGTCCAAAAGCTTGGGAAGGAACACCAATTGAAGGTGGCTTCCGCGCTCACCAAGTACCAATTTCAGTAGATGCCCACCATATGGAACATGTTGATTCTCTTTTGTCATGGCTTCAATCATACCGTCCAGAAGAATTATTTGATGAAAATGGTAAAATCGTTGATGAGATTGCTGCTATTTCACCAAAAGGTGATCGTCGCATGTCCATGAATCCAATAACCAATGCTGGTATTGTTAAAGCAATGGATACAGCAGATTGGAAGAAATTTGCTCTTGATATTAATGTTCCAGGTCAAATTATGGCACAAGATATGATTGAATTTGGAAAATATGCAGCAGATTTAGTAGATGCTAACCCAGATAATTTCCGTATTTTTGGTCCAGATGAAACGAAATCAAATCGTCTTCAAGAAGTGTTTACACGTACTAGCCGTCAATGGCTTGGTCGTCGTAAACCAGATTATGACGAAGCTTTAAGTCCAGCTGGACGTGTTATTGATTCCCAATTGTCTGAACATCAAGCAGAAGGTTTCTTAGAAGGTTATGTTTTAACTGGTCGTCACGGCTTCTTTGCTTCATACGAATCATTCCTTCGCGTTGTAGATTCAATGGTAACACAACATTTCAAATGGTTACGTAAATCAAAAACACACACAACATGGCGTAAAAATTATCCAGCGCTTAACCTAATTGCAGCTTCAACTGTTTTCCAACAAGATCATAATGGTTATACTCACCAAGATCCAGGTATTTTAACTCACTTAGCTGAAAAAACACCTGAATACATTCGTGAATATTTACCAGCAGATACTAACTCACTTCTAGCTGTTATGGATAAAGCGTTTAAAGCTGAAGATAAAATTAATTTAATTGTGACATCTAAGCACCCTCGTCCACAATTTTACTCTATTGCTGAAGCAGAAGAGTTAGTGGCAGAAGGATATAAGGTGATTGACTGGGCTTCAAATGTGTCGCTTAATCAAGAGCCAGATGTTGTCTTTGCTGCGGCGGGAACAGAACCTAACTTAGAAGCTTTGGCAGCAATTAGCATTCTTCATAAGGCTTTCCCAGAACTTAAGATTAGATTTGTTAATGTATTAGACATCCTAAAACTTCGTCATCCTTCACAAGATGCTCGCGGTTTATCAGATGAAGAGTTTAACAAAGTCTTTACCACAGATAAACCTGTTATTTTTGCTTTCCATGGTTATGAAGATATGATTCGAGATATTTTCTTTAGTCGTCACAATCATAATTTGCATACGCATGGTTACCGTGAAAATGGTGACATCACAACGCCATTTGATATGCGCGTGATGTCAGAATTGGACCGATTCCATCTGGCACAGGATGCAGCTCTTGCTTCTTTAGGACATGAAGCGCAAGCCTTCAGTGATGAAATGAATCAAATGGTTGCTTATCACAAAGACTATATTCGTGAACACGGAGACGATATCCCAGAAGTACAAAATTGGAAATGGGAAAATATCAAG

SEQ ID NO: 12264 - protein, 792 aa, Streptococcus agalactiae
MSEFDTKSYLEKLDAWWRAANYISAAQMYLKDNPLLRRELVENDLKVHPIGHWGTVPGQNFIYAHLNRAINKYDLDMFYIEGPGHGGQVMVSNSYLDGSYTELNPNIEQTEDGFKQLCKIFSFPGGIASHAAPETPGSIHEGGELGYALSHATGAILDNPDVIAATVIGDGEGETGPLMAGWLSNTFINPVNDGAVLPIFYLNGGKIHNPTIFERKTDEELSQFFEGLGWKPIFADVVELSEDHAAAHALFAEKLDQAIQEIKTIQSEARQKPAEEAIQAKFPVLVARIPKGWTGPKAWEGTPIEGGFRAHQVPISVDAHHMEHVDSLLSWLQSYRPEELFDENGKIVDEIAAISPKGDRRMSMNPITNAGIVKAMDTADWKKFALDINVPGQIMAQDMIEFGKYAADLVDANPDNFRIFGPDETKSNRLQEVFTRTSRQWLGRRKPDYDEALSPAGRVIDSQLSEHQAEGFLEGYVLTGRHGFFASYESFLRVVDSMVTQHFKWLRKSKTHTTWRKNYPALNLIAASTVFQQDHNGYTHQDPGILTHLAEKTPEYIREYLPADTNSLLAVMDKAFKAEDKINLIVTSKHPRPQFYSIAEAEELVAEGYKVIDWASNVSLNQEPDVVFAAAGTEPNLEALAAISILHKAFPELKIRFVNVLDILKLRHPSQDARGLSDEEFNKVFTTDKPVIFAFHGYEDMIRDIFFSRHNHNLHTHGYRENGDITTPFDMRVMSELDRFHLAQDAALASLGHEAQAFSDEMNQMVAYHKDYIREHGDDIPEVQNWKWENIK

SEQ ID NO: 12265 - protein, 1089 aa, Streptococcus agalactiae
ATGCCTAACGTTAAAGATATTACTAGAGAATCATGGATTTTATCAACATTCCCAGAATGGGGAACATGGCTAAACGAAGAAATTGAAGAAGAAGTTGTTGCTGAGGGCAACTTTGCAATGTGGTGGTTAGGAAACTGTGGTGTTTGGATTAAAACACCAGGTGGTGCTAATGTTGTTATGGACCTATGGTCAAACCGCGGTAAATCAACAAAAAAAGTAAAAGATATGGTTCGTGGACACCAAATGGCTAATATGGCAGGTGTTCGTAAACTCCAACCAAACTTACGCGCACAACCAATGGTTATTGATCCATTTGCTATTAATGAATTGGATTACTATCTTGTTTCACATTTCCACAGTGACCACATTGATATCAACACTGCGGCAGCCATTATTAATAATCCTAACTTAGACCATGTTAAATTTGTTGGGCCATATGAATGTGGTGAAATTTGGAAAAAATGGGGAGTTCCAGAAGAACGAATCATCGTGATTAAACCAGGTGAATCATTTGAGTTTAAAGACATCAAAGTTACTGCTGTTGAATCATTTGACCGCACTTGCTTAGTGACACTTCCAGTAGATGGTGCAGAAGAACATGATGGAGAACTTGCTGGTTTAGCCGTGACTGATGAAGAAATGGCTCGTAAAGCAGTTAACTATATTTTTGAAACACCAGGTGGAACAATCTATCATGGAGCTGACTCACATTTTTCAAATTATTTTGCTAAACATGGTAAAGACTACAAGATTGACGTAGCTATTAACAACTATGGTGATAACCCAGTTGGTATTCAGGATAAAATGACTTCAATCGATCTTCTTCGTATGGCAGAAAATCTCCGTGCCAAAGTCATTATTCCTGTACACTACGATATCTGGTCTAACTTCATGGCTTCTACAGACGAAATCTTACAATTGTGGAAAATGCGTAAAGAACGCCTTCAATATGACTTCCATCCATTTATTTGGGAAGTTGGAGGTAAATACACTTATCCACAAGATAAAGATAGAATTGAATACCATCACCCACGTGGTTTTGATGATTGCTTCGAACAAGAATCAAATATTCAATTTAAAGCACTTCTA

SEQ ID NO: 12266 - protein, 363 aa, Streptococcus agalactiae; identical to SEQ ID NO: 3304

SEQ ID NO: 12267 - protein, 1677 aa, Streptococcus agalactiae
TTGATTATTCTCGATAAAAAAAGTTATGACCTCCTCTTTTACCTATTGAAATTAGAGGAACCTGAAACAGTTATGGCAATTGCCAACGCACTTAATCAGTCTAGGCGTAAAGTGTATTATCACTTAGAGAAGATAAACGATGCACTGCCTAGCGATGTGCCTCAGATTGTTAGTTATCCACGTGTAGGAATCTTGCTAACAGAAAAACAAAAAGCAGCCTGTCGTCTTTTATTAGATGAAGTGACTGATTATAGTTACGTCATGAAAAGTAGTGAGAGGTTGCAGCTGTCTTTAGTATCTATCGTGGTAGCTAAGGACCGCATAACGATTGATAGGTTGATGCAACTAAACGATGTTTCTCGAAATACTATCTTAAACGATTTAAACGAATTAAGAAGTGAGTTAGCAGAGAAAGAATATAATTTACAGTTACAATCAACAAAATGTCGTGGTTATTTTTTAGATGGTCACCCATTGTCCATTATCCAGTACTTATATAAGCTCTTAGATGATATCTACCATAATGGAAGTAGTAGTTTTATAGACCTTTTTAATCATAAACTGTCTCAAGCTTTTGGTGCCAGCACATATTTTTCTAAAGAGGTTCTTGATTATTTTCACCATTATCTCTTCATTTCTCAACGAAGTCTAGGTAAGAAAATCAACAGTCAAGATGGTCAGTTTATGATTCAGATTTTGCCTTTTATACTAATGGCTTATCGTAAGATGCGATTAAGTCCTGAAGTACAGACCTCTCTTAATAGTGATTTTAGCTTGGTTTGGCAACGTAAGGAATATGAGATTGCTAAAGAGTTGGCTGATGAGCTGGAAGAAAATTTTCAGTTATCACTGGATGAGATTGAAGTGGGACTAGTAGCCATGCTTATGCTTAGTTTCCGCAAGGACCGTGACAATCATTTAGAGAGTCAGGATTATGATGATATGCGAGCTACTCTAACCAGTTTTTTGAAAGAATTGGAAGAACGATATCACCTTCACTTTGTTCATAAAGAGGACTTACTAAGACAACTTCTTACTCACTGCAAGGCACTCTTATATCGTAAACGTTATGGTATTTTTTCTGTTAATCCTTTAACAGAGCATATTAAAGACAAATATGAAGAACTTTTTGCCATAACCTCGTCTTCTGTAAAGCTTTTAGAGAAAGCTTGGCAAATCAAATTGACCGATGATGATGTAGCATATCTAACGATTCATTTAGGAGGGGAACTTCGTAATAGTCAACAATCTCCTAATAAACTTAAGTTAGTTATTGTATCTGATGAAGGAATAGCGATTCAGAAACTTCTTTTAAAGCAATGTCAACGCTACTTAACAAACAGTGATATAGAAGCTGTTTTTACAACCGAACAGTATCAAAGTGTGAGTGATCTTATGCATGTAGATATGGTTGTCTCTACTAGTGACGCTTTAGAATCTCGTTTTCCGATGTTAGTAGTTCACCCTGTTTTGACAGATGATGATATTATTCGCTTGATTCGCTTTTCTAAAAAAGGTAACTGTGCAAATAGTAATCAATTTACCAATGAACTTGAAAAAACGATTGCTCAATATGTCAAGGAAGATAGTGAACGCTACGTGCTGAAATCTAAGATTGAGAAACTTATTCATCAAGAATTGCTCCAAGACGTCCTTCCCCTTCAAAGTACAGTTTGT

SEQ ID NO: 12268 - protein, 559 aa, Streptococcus agalactiae
MIILDKKSYDLLFYLLKLEEPETVMAIANALNQSRRKVYYHLEKINDALPSDVPQIVSYPRVGILLTEKQKAACRLLLDEVTDYSYVMKSSERLQLSLVSIVVAKDRITIDRLMQLNDVSRNTILNDLNELRSELAEKEYNLQLQSTKCRGYFLDGHPLSIIQYLYKLLDDIYHNGSSSFIDLFNHKLSQAFGASTYFSKEVLDYFHHYLFISQRSLGKKINSQDGQFMIQILPFILMAYRKMRLSPEVQTSLNSDFSLVWQRKEYEIAKELADELEENFQLSLDEIEVGLVAMLMLSFRKDRDNHLESQDYDDMRATLTSFLKELEERYHLHFVHKEDLLRQLLTHCKALLYRKRYGIFSVNPLTEHIKDKYEELFAITSSSVKLLEKAWQIKLTDDDVAYLTIHLGGELRNSQQSPNKLKLVIVSDEGIAIQKLLLKQCQRYLTNSDIEAVFTTEQYQSVSDLMHVDMVVSTSDALESRFPMLVVHPVLTDDDIIRLIRFSKKGNCANSNQFTNELEKTIAQYVKEDSERYVLKSKIEKLIHQELLQDVLPLQSTVC

SEQ ID NO: 12269 - protein, 759 aa, Streptococcus agalactiae
ATGAAACAAGAAGATATTATTATCAATAGTATTGTATTCAAAAAACAGTTAGACAAAGGTTTTACACAAGTTCAGCTCATTAAGTTAGTAAAGGATTTAGGATTTTCACGATTTGAGATACGTCAAGAATTGCTTCAAGATCCAGATAGAGAGCTACCCGCTTTAAAAGCAGAGGCTGACTTTTATGATATCAATCTTTACTATAGTGCTAATGAAGACCTTATCAAAGGAGGGAAAGTTAATCCTTATCTTAATAAAGGCCTTAAAGAAGCATCACAGTTAGGAGCTCCTTTCATTAAGCTAAATGTTGGACAAACCAGAAACTTAAGTAAAGAAGAGTTAGAACCTCTTAAAGAGATATTGAAAAGCCAAACTATTGGTATAAAGGTGGAAAATAATCAAGACCCTAAAGCAGCTACAGTGGAGAATTGCCAATATTTTATGACTCTAGTGAAAGAATTACAAATACCAATAAGTTTTGTTTTTGATACTGCTAATTGGGCCTTTATCAACCAAGATCTATACCAAGCGGTAAATAGCTTAGCTTGTGATACCACCTACCTTCACTGTAAAAATTTTTTACAGGTAGCTGGAAAGCCTCACCTCTCGAAGAGCCTCTTCGAAGGAGAGATTGATCTGACTGATTTGTTAAAGAGTTTCTCTAATTGTGAGTATCTAGCTCTAGAATACCCCACAGAGTTGGAGGTATTAAAAAGGGATGTTCAACGTTTAATCTCTATCAGCAATAGTCAAAACTTT

SEQ ID NO: 12270 - protein, 253 aa, Streptococcus agalactiae; identical to SEQ ID NO: 7994

SEQ ID NO: 12271 - protein, 1515 aa, Streptococcus agalactiae
ATGACTTACTACCTTAGCATTGACTACGGCGGTACAAATACCAAGGCGCTTATTTTTGACAAATTAGGACACCAAATCGCTGTTTCGAGTTTTGAAACTTTAAAAAATGAGGCTCAATCTGGTCATCGTCAAGTAAACCTTGTTAAAACGTGGAATGCTATAACTTCTGCTATTAGAGAGGTTATTCAAATCTCAAAACTCAGCCCTGAGCAGATTAGTGCAGTAGCATGTATTGGACATGGGAAAGGTCTTTATCTGCTAGATAATAAGTTGGAGCCACTTGAACAAGGAATTTTGTCTACAGATAATCGTGCCAAAGATTTGGCGCAATATTTCGAATCTAAACTTGATAATATTTGGGAGTTGACTCGGCAACATATTTTCCCTTCACAAAGTCCAGTTATTTTACGTTGGCTTAAAGATTATCAGCCCGAAACCTATAAATCAATAGGGGCGGTCCTTTCTGCAAAGGACTTTATTCGGTATAAGCTTACAGGAAAAGTACAGCAAGAATATGGTGACGCTTCAGGTAATCATTGGATAAATTTCCAAACAGGAACTTATGATCCAGCTATTTTAGATTTTTTTGGCATTAGAGAGATAGAAAACTCACTTCCTGAACTTATAGATAGTGCAGATTTAGTTCCTGGGGGAATTAGTTCTCAAGCAGCAAAAGAGACTGGTCTTGTAGAAGGGACCCCCGTTGTTGGAGGGCTCTTTGACATCGATGCTTGTGCTCTTGGATCAGGTGTTTTAGAGTCAGATACTTTTAGTGTTATTTCGGGAACTTGGAATATTAATACTTATCCAAGTTTAAAACCAGCAAAGCAAGATAGTGGTCTTATGACTTCCTATTTTCCAGATCGTCGTTATCTCTTAGAGGCAAGTAGCCCTACTTCTGCAGGGAATCTTGATTTTATGTTAAAAATGCTCATGCATCAAGAAATTGATAACGCTAAATCTAGTGGAGGTTCTATCTATGATAATTTAGAAGAATTTCTCACTCATACTGATGCTACACATCATGGACTTATTTTCTTTCCGTTTCTTTACGGTAGTAACACATCACAAGATGCTAGCGCTTGCTTTTTTGGGCTAACAACTAAATCGACGAAATCTCAGATGATACGTGCGGTATATGAAGGTATTGCGTTTGCACATAAGCAGCATATCACTGATTTAATAAAAAGTAGGGGCGGTGTGCCAAAAATAATTCGTTTCTCTGGCGGAGCTACCAACTCACCAGCATGGATGCAAATGTTTTCTGATATCTTAAACCTTCCTATTGAAACAGTAGAAGGCACAGAATTAGGAGGATTAGGAGGAGCTATTTTAGCACATCATGCTTTAGATAAGATTTCGTTAAAGGAAGCAGTCCAAGATATGGTTCGTGTAAAAGCTATTTATAAACCTCAATTATCCGAAGTAAAGGGGTACGAAAAAAAATATCACGCTTACCAAAAATTATTAGAAACACTGGATCCTATTTGGTCGGAACTCGGTCATCTGAATAAG

SEQ ID NO: 12272 - protein, 505 aa, Streptococcus agalactiae
MTYYLSIDYGGTNTKALIFDKLGHQIAVSSFETLKNEAQSGHRQVNLVKTWNAITSAIREVIQISKLSPEQISAVACIGHGKGLYLLDNKLEPLEQGILSTDNRAKDLAQYFESKLDNIWELTRQHIFPSQSPVILRWLKDYQPETYKSIGAVLSAKDFIRYKLTGKVQQEYGDASGNHWINFQTGTYDPAILDFFGIREIENSLPELIDSADLVPGGISSQAAKETGLVEGTPVVGGLFDIDACALGSGVLESDTFSVISGTWNINTYPSLKPAKQDSGLMTSYFPDRRYLLEASSPTSAGNLDFMLKMLMHQEIDNAKSSGGSIYDNLEEFLTHTDATHHGLIFFPFLYGSNTSQDASACFFGLTTKSTKSQMIRAVYEGIAFAHKQHITDLIKSRGGVPKIIRFSGGATNSPAWMQMFSDILNLPIETVEGTELGGLGGAILAHHALDKISLKEAVQDMVRVKAIYKPQLSEVKGYEKKYHAYQKLLETLDPIWSELGHLNK

SEQ ID NO: 12273 - protein, 987 aa, Streptococcus agalactiae
ATGAAAAAAATTGATGGACATGCTCATATTGTTGATACAATTGCAGGATTTAATGGTAAAGGACGCCTTAATGCCCTTGGGAACGGTTATGCTATTTGGGATGATGGTGATTTAATTAAGCTCATCCCAGACGAATACGGTGACAAAGCATTTACAGCTGAAGCTTTTTTGAAGTATATGGATGCTAATGGTGTAGATAAAGCAGTCATTTTGCAAGGTCATCTTAATGGCTATCAAAATTATTATACGCATTTAGCTATTAAACGTTATCCAGAACGTTTTACAGGCGCATTCTCTGTTGATCCATTTGCAGATAATGCAATGCAAATTGTAAAACGTCATGTTGAAGTCCTTGGTTTTCGAGCTATTAAATTTGAAATTAGTCAAGGAGGGGGTATCCATGGATACCGTGGACAAAAAACGCCTTTCCGTCTTGATACAGACCCACATGTGAGTCGTATTTTGACTTATCTGTTAGACTATCCAGGATTTGTAGTTACAGTTGATTATGGCAATTGGGATCAAATTAGTCACCAACCTGATGCTATTGCTAATTTAGCTCGCCTTTATACGAGTCTCGATTTTGTTGTTTGTCACCTCTCTTTTCCACATGTTGAGCATTCAAATCGATTGCGTGCTGAACTTAATATGTGGAAAAACTTCAACAATATCTATACTGATATTTCAGCTATTCAAGATATTGATGCCCCAGATAGTTTTCCTTTTCCAAAATCAGAACAAAATGTACGTATTGCTAAAGAAGTTCTTGGGGCTAAGCGTATCATTTGGGGAACTGATTCTCCATGGTCAGCGACCTTCAATACTTACGAAGAATTAGCTACTTGGCTAGAGAATGTTGATATCTTCAGTCAAGAGGAACTAGAAGATGTTATGTACAATAATGCTGAGCGTGTTTACTTTAAAGAAGAACATGTAAAGGCTAACAGAGCAGGTATAGATGATACAACCAAAGAGCTCAATCTCTAT

SEQ ID NO: 12274 - protein, 329 aa, Streptococcus agalactiae; identical to SEQ ID NO: 3314

SEQ ID NO: 12275 - protein, 1449 aa, Streptococcus agalactiae
ATGCTAGAAGCTTTACATAAATTCTTTGAAGTTTTTGGTGCAGCAACTGTTGTACCCGCTATGATTTTTATTGTCAGCCTTTTTCTAAAGGTCAATCCAAGGCGAGCTTTCTTTAGCGCCTTACGAGCTGGTGTTGGACTCACAGGCTTTGGTTGGATTATATCAGCTTTTGCTCCTATGGTGACTAAGTATATCCAGCAGATGGTTAAAACTACTGGGCTCCATTTACCAATTGTAGATATTGGTTGGCAGGCTGGTTCTCTCACCGCCTTTTCTTCTGAGATTGGCCTCTCTTTCTTTGTTTTTGGCTTGCTAATTGAATTGGGGCTTTTCTTGCTCGGGATTACCCGAGTATTTGTCCCATCTAATCTTTGGAATAACTTTGGCTATATGATTTGGGGTACAATGGCCTATGCAGCAACAGGTAATTTTATATTGTCTTTCGCATTTATGGTTTTTGTCTTACTCTATTCATTAGTGATGTCAGAAGTATTGGCAGATCGATGGTCGGAGTATTACGGTGTTAAAAATGCAACGATCAACTCGATTCATAATATTGAAACCCTTATTCCAGCTCTTATTCTTGATCCTCTTTGGAACCTACTTAGTGTCAATAAGGTAAAGTTGAACCCAGAATCATTAAAGACTAAGTTAGGGATATTTGGTGAGCCAATGACACTTGGTTTTATACTTGGTGTGATTATTGGTGTATTAGGTAGTTTACGTAACCTTGCAAGTATTGATACTTGGGGAGGTATACTTGGTTTTGCAGTTGCTCTTGCAGCGGTTATGACTATTTTTCCTTTGATTACGGGGGTATTTGCTAGTGCTTTTGCTCCTCTTGCTGAAGCAGTTGAACGCAATAAGAAAAAAGAAAGTCAAGCTGAGCAAGGAGCACTGGATAAAAAACGTTGGTTTATTGCAGTAGATGACGGTGTTGGTTTTGGTGAACCAGCAACTATTATCGCAGGTCTCATTTTAGTACCAATAATGGTTGTTATTTCCTTGATTTTACCTGGAAATGAAGCTTTACCAGTCGTTGACCTTATTGCTATCCCTTTTATGATTGAAGCTATGATAGCTGTGTCAAAAGGAAATATTCTTAAAGCTATTTTGAATGGAATCATATGGTTTTCACTAGGTCTTTATGCTGCTAGTGCCCTAGGTCCAATCTACACAGAAGCTGTTAAGCATTTTGGAACTGCTTTACCAGCAGGGGTAACTTTGATTATGAGCTTTAATCTCCTAGCTCATCCTTTGACAGCTCTAGTCTTCTTTGCTTGGATATCTGGGAACCCACTCTATATTGGTGTGACAGTTGTTATTTATCTTGCTTTCTTGTTCTTGCTTCGTACTCGTCGTGAATCTATTTACGCATACCTTAAAACTATGGCTGATAAGAATAGCGGATATGAAGGTAGTTGTGAAAAAATCTTTATTGCTGAAGAT

SEQ ID NO: 12276 - protein, 483 aa, Streptococcus agalactiae
MLEALHKFFEVFGAATVVPAMIFIVSLFLKVNPRRAFFSALRAGVGLTGFGWIISAFAPMVTKYIQQMVKTTGLHLPIVDIGWQAGSLTAFSSEIGLSFFVFGLLIELGLFLLGITRVFVPSNLWNNFGYMIWGTMAYAATGNFILSFAFMVFVLLYSLVMSEVLADRWSEYYGVKNATINSIHNIETLIPALILDPLWNLLSVNKVKLNPESLKTKLGIFGEPMTLGFILGVIIGVLGSLRNLASIDTWGGILGFAVALAAVMTIFPLITGVFASAFAPLAEAVERNKKKESQAEQGALDKKRWFIAVDDGVGFGEPATIIAGLILVPIMVVISLILPGNEALPVVDLIAIPFMIEAMIAVSKGNILKAILNGIIWFSLGLYAASALGPIYTEAVKHFGTALPAGVTLIMSFNLLAHPLTALVFFAWISGNPLYIGVTVVIYLAFLFLLRTRRESIYAYLKTMADKNSGYEGSCEKIFIAED

SEQ ID NO: 12277 - protein, 954 aa, Streptococcus agalactiae
ATGGACAAGAAAAAAATCTTAGTAACGGGTATTGTGCCTAAAGAAGGTCTAAGAAAGCTTATGGACCGATTTGATGTTACTTATTCAGAAGATCGCCCATTTTCACGTGACTATGTGTTAGAGCATTTATCTGAATATGACGGATGGTTACTCATGGGACAAAAAGGCGATAAAGAGATGATTGATGCAGGTGAAAACTTACAAATTATTTCTTTAAATGCGGTTGGTTTTGATCATGTAGATACTGCGTATGCTAAAGAAAAAGGAATTGTAGTCTCTAATTCCCCTCAAGCAGTACGAGTTCCGACAGCGGAAATGACTTTTGCTTTAATTTTAGCTGCCAGTAAGCGCCTTGCATTTTATGATAGTATTGTAAGAAGTGGAGAGTGGATTGATCCGAGCGAACAACGTTATCAAGGTTTGACTTTGCAAGGTTCAACATTAGGTATTTACGGAATGGGACGCATCGGTTTGACAGTCGCAAATTTTGCTAAAGCATTTGGGATGACTGTTGTTTACAATGATGTTTATCGACTTCCTGAAGATAAGGAAAAAGAGCTTGGTGTAACCTATCTCGAATTTGATCAGCTTATTGAAACAGCTGATGTCATAACCATCCACGCCCCAGCATTACCATCAACAATCCACAAATTCAATAAAGATGTTTTTGCTAAGATGAAAAGTCGAAGCTACTTAATCAACGCTGCTAGAGGCCCAATCGTTTCTGAAGAAGCACTTATTGAAGCTCTGAAAGAAGGTGAAATCGCGGGTGCGGGATTAGATGTTTTTGAGAATGAACCGCAGGTATCTGAAGGATTGAGAAGTCTTGATAATGTTATCATGAGTCCACATGCTGGGACAGGTACTATTGAGGGACGTAGAACTTTGGCTGAAGAAGCAGCTGACAACATCATTGCCTTCTTTGATGGCAAGCCACAAAATATTGTCAATAAA

SEQ ID NO: 12278 - protein, 318 aa, Streptococcus agalactiae
MDKKKILVTGIVPKEGLRKLMDRFDVTYSEDRPFSRDYVLEHLSEYDGWLLMGQKGDKEMIDAGENLQIISLNAVGFDHVDTAYAKEKGIVVSNSPQAVRVPTAEMTFALILAASKRLAFYDSIVRSGEWIDPSEQRYQGLTLQGSTLGIYGMGRIGLTVANFAKAFGMTVVYNDVYRLPEDKEKELGVTYLEFDQLIETADVITIHAPALPSTIHKFNKDVFAKMKSRSYLINAARGPIVSEEALIEALKEGEIAGAGLDVFENEPQVSEGLRSLDNVIMSPHAGTGTIEGRRTLAEEAADNIIAFFDGKPQNIVNK

SEQ ID NO: 12279 - protein, 1017 aa, Streptococcus agalactiae
ATGAAGATTAATAAATTATTGTCAGACAGACTTGAAGCTTGTTATTCAGTTTGTCGTTTGCAAAATCAAGACTATGATTTTTTATTAGTAGCTTCAGAGGTTGATCAAGCCTGCTTTGCTTATGATTTGAATAGCGATTTAGCAAAAATTGTTGTTTGGGAAGATGTGGGAGGTACCATGAGTATTATTCCAATTCCCGGAACCATGGATTTTTTGGCAACCCAGAAATTTTACCCAGGGTTTAAGGCCAAAGATTGTCAGGTTGTTTATGCAAGTTTTCAAGGAGATCATTGGGACATTTGTAACGCATTTGATTTTCCGTATTTACATCGCTTTGATCTCATTAAAGGTAAAGAAAATCAACTTTACTTTATAGGTTGTACAATTGCTAACAGTAAAGCCTACACTGAGGATTGGAGTGATAAAGGCCGAATTTTTGTTGCTCGTTTTAATACTCAAAACCATACATTGGAAGGATTGCAACAATTGCCTCAAACTTTATTAAAAAATCATGGATACTATGCCATTCAGGATGAAGGATATTCATTGATTACTTCAGTGGAAGGGGTATTCAAACTCACTTATCCAGAATTTTCTACTACAGGCGACTGGCAATTAGAACGGCTTTTCGATGAGGAGACAAGCGATGTGGTGAAAGTGGATATTAATCAGGATGGCAAGGATGAGTATATGATTATCCAAGGTTTTCATGGAGATCGTTTACGTATCTTCACTGAAGATTTCGGTCGAGAATTATTCCATTATCCAGAAAAAACCCCATTTGGTCACGCTATTTGGAGTGGTCGTTTACTTAATCAGACTTGTTTTGTATTCGGGTGGCGATCAGAAAAAGCAGAATTAAGGCTTTTTCACTTTGTAGATGGGCACTTGGTTTCAGAATTAGTAGATGCAAAAGCAGCTTCTAGTAATGTCTTAGCTTTTGAAAAAGATGGAAAAGCTTATCTTTTCTCAGCCAATAACGGACGTGGCGAAGTTGCTCTTTATCAATTAGTAAAA

SEQ ID NO: 12280 - protein, 339 aa, Streptococcus agalactiae
MKINKLLSDRLEACYSVCRLQNQDYDFLLVASEVDQACFAYDLNSDLAKIVVWEDVGGTMSIIPIPGTMDFLATQKFYPGFKAKDCQVVYASFQGDHWDICNAFDFPYLHRFDLIKGKENQLYFIGCTIANSKAYTEDWSDKGRIFVARFNTQNHTLEGLQQLPQTLLKNHGYYAIQDEGYSLITSVEGVFKLTYPEFSTTGDWQLERLFDEETSDVVKVDINQDGKDEYMIIQGFHGDRLRIFTEDFGRELFHYPEKTPFGHAIWSGRLLNQTCFVFGWRSEKAELRLFHFVDGHLVSELVDAKAASSNVLAFEKDGKAYLFSANNGRGEVALYQLVK

SEQ ID NO: 12281 - protein, 981 aa, Streptococcus agalactiae
ATGTTTGAGAAGGTAACCATTAGTGATATTGCAAATTTAGTAGGTGTGTCAAAAGCTACAGTTTCCTATTATCTCAATGGGAACTATAAGAAAATGTCTCTGCAAACGAAAGAAAAAATACGTTTAGCTATTAAGGAGACTGGTTATCAACCAAGTAAGATTGCTCAAAGTTTAGTTACAAAAAATACCCGTACTATTGGGGTCGTTATTGCTGATATTACTAATCCCTTTATTTCGTCTGTGATGAAGGGAATACATGATACTTGTCAACAATTTGGTTACTCGGTTAACTTTACTAACTCGGATAATGATATTGACATTGAGTTGGAAAATTTAAACCGTTTAAATCAGCAAAACGTTTCAGGAATTATTTTAGATTCTGTAGATCCTAATCATTCATTTATAGAAACTTTGAGTAATGATCGTCTTGTCATGGTTGATAGACAAGCTAAAGATATTAAGGTAGATACTGTAGTATCCGACAATAAAGAATCGACTCAAATATTTCTTGAAAAAATGCAAGAAACTGGGTATCATGACATCTATTTTGTCACTTATCCCATTGAAGGAATTTCAACCCGTGAGCTTCGTTACGAAGGTTTTAAAGAAGTGGTCAGTTCAAATCCTGATAAGTTGATTATTATCACTGAAGATGGTAGTACACAGAGAATTCTTGATATTATTGAACATTCAGAGCAAAAACCAGGGTTCTTAATGATGAACGGTCCAACTCTTTTGAATTTTATGAAAAAATTAAATCAATCAACGGTCAGCTACCCTGAAGATTATGGTCTTGGGAGTTATGAAGATTTAGAATGGATGCAGGTACTTACACCAAACGTTTCCTGTATAAAACAGGATTCATATGGCATTGGTTGCCTGGCTGCCCAATGTTTAATTGAAAAAATTAGTCAAGGAAACGAGCCAACTACTGCAAGGTTACTAGAAGTAAAAAATCAAATCGTTATTCGTCAATCTTTT

SEQ ID NO: 12282 - protein, 327 aa, Streptococcus agalactiae
MFEKVTISDIANLVGVSKATVSYYLNGNYKKMSLQTKEKIRLAIKETGYQPSKIAQSLVTKNTRTIGVVIADITNPFISSVMKGIHDTCQQFGYSVNFTNSDNDIDIELENLNRLNQQNVSGIILDSVDPNHSFIETLSNDRLVMVDRQAKDIKVDTVVSDNKESTQIFLEKMQETGYHDIYFVTYPIEGISTRELRYEGFKEVVSSNPDKLIIITEDGSTQRILDIIEHSEQKPGFLMMNGPTLLNFMKKLNQSTVSYPEDYGLGSYEDLEWMQVLTPNVSCIKQDSYGIGCLAAQCLIEKISQGNEPTTARLLEVKNQIVIRQSF

SEQ ID NO: 12283 - protein, 645 aa, Streptococcus agalactiae
ATGAAATACTTTTTAGATACTGCCGATGTTTCTGAAATTCGTCGTCTTAATCGTTTAGGAATCGTTGATGGTGTTACTACCAATCCGACTATTATTTCACGTGAGGGGCGTGACTTTAAAGAAGTTATTAACGAAATTTGCCAAATCGTTGATGGTCCAGTTAGTGCAGAAGTGACAGGTTTAACTTGTGATGAAATGGTTACCGAAGCTAGAGAAATCGCTAAGTGGTCACCAAATGTTGTTGTTAAAATTCCAATGACTGAAGAAGGTTTAGCAGCAGTTTCACAATTATCAAAAGAAGGTATAAAGACAAATGTGACATTAATATTTACTGTGGCTCAAGGTCTTTCGGCAATGAAAGCTGGTGCAACCTTTATTAGTCCTTTTGTGGGTCGTCTTGAAGATATTGGAACAGATGCTTATGCTTTGATTCGTGACCTTCGTCACATTATTGATTTTTATGGTTTCCAATCTGAGATTATTGCTGCTAGCATTCGAGGATTGGCGCATGTGGAGGGCGTCGCTAAATGCGGTGCGCACATTGCCACTATTCCAGATAAAACATTTGCATCACTATTTACTCACCCGCTTACTGATAAAGGGATTGAAACTTTCTTAAAAGATTGGGATAGTTTCAAGAAGAAG

SEQ ID NO: 12284 - protein, 215 aa, Streptococcus agalactiae; identical to SEQ ID NO: 3326

SEQ ID NO: 12285 - protein, 714 aa, Streptococcus agalactiae
ATGGCAAAATCATTGCAAGAAATGCGTGAACGTGTGTGTGAAGCTAATAAATCACTACCAGTTCATGGTTTAGTTAAATTTACTTGGGGTAACGTTTCTGAAGTTGACCGCGAAGCAGGATTGATTGTTATCAAACCTTCAGGAGTTGACTATGACCAATTGACACCTGAAAATATGGTTGTCACAGACTTAGAGGGAAATATAGTGGAGGGGGATTTGAATCCATCATCTGATCTTCCAACTCATGTTCAACTTTATAAAGCATGGCCAGAAGTCGGTGGTATTGTTCATACTCATTCAACAGAAGCAGTTGGCTGGGCACAAGCGGGTCGCGATATTCCATTTTATGGAACAACACATGCAGATTATTTTTATGGGCCAGTACCATGTGCTAGGTCACTTAGTGAAGATGAAGTTAACACTGCTTATGAAAAAGAAACAGGTAGTGTTATTATAGAGGAATTTGAACGTCGGAATTTAGATCCAATGGCTGTTCCTGGTATTATTGTACGTAATCATGGACCATTTACTTGGGGGAAAGATCCAGCACAAGCAGTTTATCACTCAGTCGTTCTTGAAGAAGTTGCCAAGATGAATCGTTTCACTGAACAAATTAATCCACGTGTTGAACCAGCTCCAAAATATATTATGGATAAACACTATTTACGTAAGCATGGACCAAATGCTTATTATGGTCAAAAAGGACAAGAACAT

SEQ ID NO: 12286 - protein, 238 aa, Streptococcus agalactiae
MAKSLQEMRERVCEANKSLPVHGLVKFTWGNVSEVDREAGLIVIKPSGVDYDQLTPENMVVTDLEGNIVEGDLNPSSDLPTHVQLYKAWPEVGGIVHTHSTEAVGWAQAGRDIPFYGTTHADYFYGPVPCARSLSEDEVNTAYEKETGSVIIEEFERRNLDPMAVPGIIVRNHGPFTWGKDPAQAVYHSVVLEEVAKMNRFTEQINPRVEPAPKYIMDKHYLRKHGPNAYYGQKGQEH

SEQ ID NO: 12287 - protein, 861 aa, Streptococcus agalactiae
ATGACACGTCCAATAGGAATTTACGAGAAGGCAACACCAAAACATTTTAACTGGTTAGAACGCCTACAATTTGCTAAAGAATTGGGATTTGATTTTGTAGAATTATCCATTGATGAGTCAGATGAACGTTTGGCACGTTTGGAGTGGTCAAAAGAAGAACGACTTGAGTTGGTCAAAGCTATTTTTGAGACCGGAGTTCGTGTTCCAACAATTACATTTAGTGGTCATCGTCGTTTCCCAATGGGATCTAATGATCCTGAGAAAGAAGCGCGTGCGATGGATATGATGAAAAAATGTATCGTCTTTGCTCAAGATATTGGGATTCGTAATATTCAATTAGCAGGATATGATGTGTACTATGAAGAAAAATCTCCAGAGACACGTGCACGCTTTATTAAGAATCTTCGTCAAGCTTGTACTTGGGCCGAAGAAGCACAAGTTATTCTGTCTATTGAGATTATGGATGACCCATTTATGAATTCCATTGAAAAATATTTGGCTGTGGAAAAAGAGATTGATTCTCCTTATCTCTTTGTCTACCCAGATACTGGAAATGTATCAGCATGGCATAATGATCTTTGGAGTGAATTTTATAATGGACATCGCTCAATTGCAGCGCTTCATATTAAAGATACCTATGCTGTTACCGAAACATCTAAAGGTCAATTCCGTGATGTTCCATTTGGTCAAGGGTGTGTTGATTGGGAAGAAATGTTTGCTGTCATTAAGAAAACAAATTATAATGGTCCATTCTTGATTGAAATGTGGTCGGAGAACTGTGAGACTGTAGAGGAAACACGTGCAGCCATTAAAGAGGCGCAAGATTTTCTTTACCCATTAATGGAGAAAGCAGGAGTGAAA

SEQ ID NO: 12288 - protein, 287 aa, Streptococcus agalactiae
MTRPIGIYEKATPKHFNWLERLQFAKELGFDFVELSIDESDERLARLEWSKEERLELVKAIFETGVRVPTITFSGHRRFPMGSNDPEKEARAMDMMKKCIVFAQDIGIRNIQLAGYDVYYEEKSPETRARFIKNLRQACTWAEEAQVILSIEIMDDPFMNSIEKYLAVEKEIDSPYLFVYPDTGNVSAWHNDLWSEFYNGHRSIAALHIKDTYAVTETSKGQFRDVPFGQGCVDWEEMFAVIKKTNYNGPFLIEMWSENCETVEETRAAIKEAQDFLYPLMEKAGVK

SEQ ID NO: 12289 - protein, 663 aa, Streptococcus agalactiae
ATGACAAAACGTTTACCAAATTTACAAGTTGCACTTGACCACTCAGATTTACAAGGAGCTATCAAAGCTGCCGTATCAGTAGGACATGAAGTTGATGTTATTGAAGCTGGAACTGTTTGCCTTCTTCAAGTAGGTAGTGAATTAGTTGAGGTCCTTCGCAGTCTCTTCCCTGACAAAATAATTGTTGCTGATACAAAATGTGCTGATGCTGGTGGGACTGTTGCTAAAAATAATGCTGTTCGCGGTGCAGACTGGATGACTTGTATCTGTTGTGCTACTATTCCAACAATGGAAGCAGCCTTAAAAGCTATCAAAGAAGAACGCGGCGATCGTGGAGAAATTCAAATCGAACTATATGGTGATTGGACTTATGAGCAAGCGCAACAATGGTTGGATGCAGGTATTTCACAAGCCATTTATCACCAATCTCGTGATGCGCTTCTTGCTGGCGAAACATGGGGAGAAAAAGATCTTAATAAGGTTAAAAAATTGATTGATATGGGCTTCCGAGTTTCTGTAACTGGTGGTTTATCAACTGATACTCTTCAATTATTTGAAGGTGTTGATGTTTTTACTTTTATTGCGGGTCGTGGTATTACAGAGGCAGATGATCCAGCCGCAGCAGCACGTGCATTTAAGGATGAAATTAAACGTATTTGGGGG

SEQ ID NO: 12290 - protein, 221 aa, Streptococcus agalactiae; identical to SEQ ID NO: 3332

SEQ ID NO: 12291 - protein, 483 aa, Streptococcus agalactiae
ATGAATTTAAAACAAGCCTTTATCGAAAATGACTCAATTCGTCTTAAATTATCTGCAAGCGATTGGAAAGAAGCAATCAAATTATCAATTGATCCATTGATTGAAAGTGGTGCTGTTGATGCAGAATATTACGATGCCATTATTGAATCTACAGAGGAATTTGGTCCGTACTACATTCTTATGCCGGGTATGGCGATGCCTCATGCTCGTCCAGAAGCAGGCGTAAAACGTGATGCATTTTCATTAATTACATTAACAGAGTCAGTAGTCTTTCCAGATGGCAAAGAAGTCTCAGTATTGTTAGCACTTGCTGCAACAAGTTCAGCTATTCATACTTCTGTTGCTATCCCTCAAATTATTGCCCTTTTTGAATTGGAAAATTCAATTCAGCGCTTGACGGAATGCCAAGAAGCAAAAGAAGTCCTTGCAATGGTAGAGGAATCAAAAAACAGCCCATATTTAGAAGGTTTAGATTTAGAAAGC

SEQ ID NO: 12292 - protein, 161 aa, Streptococcus agalactiae
MNLKQAFIENDSIRLKLSASDWKEAIKLSIDPLIESGAVDAEYYDAIIESTEEFGPYYILMPGMAMPHARPEAGVKRDAFSLITLTESVVFPDGKEVSVLLALAATSSAIHTSVAIPQIIALFELENSIQRLTECQEAKEVLAMVEESKNSPYLEGLDLES

SEQ ID NO: 12293 - protein, 276 aa, Streptococcus agalactiae
ATGGTTAAAGTTCTTACAGCATGCGGAAACGGCATGGGATCATCAATGGTTATCAAAATGAAAGTTGAAAATGCGCTTCGTCAATTAGGCGTTAGCAACTTTGAGTCAGCATCTTGCTCAGTCGGAGAAGCAAAAGGTTTAGCTGCGAACTACGATATCGTGGTTGCTTCAAACCACCTTATCCATGAATTAGACGGACGTACAAAAGGTCATTTAGTAGGTCTTGATAACCTTATGGATGACAATGAAATAAAAACAAAACTACAAGAAATTTTG

SEQ ID NO: 12294 - protein, 92 aa, Streptococcus agalactiae; identical to SEQ ID NO: 3336

SEQ ID NO: 12295 - protein, 1437 aa, Streptococcus agalactiae
ATGGAAAACTTCCTAGCTCCCCTTAATTGGTTCTCGCAAAATATCTTGCAGAATCCAGCCTTCTTCGTAGGTCTATTGGTACTCATTGGGTATCTTTTATTGAAGAAACCACTTCATGATGTCTTTGCTGGTTTTATCAAAGCGACCGTTGGATATTTGATTTTGAACGTAGGTGCAGGAGGATTGGTTAATACATTCCGTCCAATCTTAGTTGCTCTTGCTAAAAAATTTAATTTAGAAGCTGCTGTTATTGACCCTTACTTTGGTTTAGCATCAGCAAATGCTAAGTTAGAAACAATGGGCTTTATCAGTGTTGCAACAACAGCACTCTTGATTGGTTTTGGGATTAACATTCTCTTGGTTGCTCTTCGTAAAGTAACTAAAGTCCGTACTCTTTTTATTACTGGTCATATCATGGTACAACAAGCTGCAACAATTTCAGTATTTGTACTGCTCTTGATTCCACAACTTCGTAATGGTTTTGGTGCATGGGCTGTTGGTATCATTTGTGGTCTATATTGGGCGGTAAGTTCTAATATGACCGTTGAAGCAACTCAACGCCTTACAGGTGGTGGTGGATTTGCCATTGGACACCAACAACAATTTGCAATTTGGTTTGTTGATAAGGTTGCGCCATTCTTCGGTAAAAAAGAAGAAAACCTTGATAACTTAAAATTACCAACATTCTTAAATATTTTCCATGATACAGTTGTTGCATCAGCAACATTGATGCTAGTTTTCTTTGGAGGAATCTTAGCTGTCCTTGGTCCAGACATTATGTCTAATGTTAAATTAATTGGACCTGGGGCATTTGTACCAACTAAGCAAGCTTTCTTCATGTACATCCTTCAAACATCATTGACATTCTCAGTTTACCTTTTCATTTTGATGCAAGGTGTACGCATGTTCGTTACAGAATTGACAAATGCCTTCCAAGGCATCTCAAACAAACTTCTTCCAGGATCATTCCCAGCGGTTGACGTTGCAGCTTCATATGGTTTTGGTTCTTCAAATGCAGTTCTTTCAGGATTTGCTTTTGGTTTGATTGGTCAATTAATTACAATCGCTCTACTTGTTGTCTTCAAAAATCCAATCTTGATTATCACAGGATTCGTTCCAGTATTCTTTGATAATGCGGCAATCGCTGTTTATGCAGATAAACGTGGTGGCTGGAAAGCAGCAGTAGCTCTATCATTTATCTCAGGTATTATTCAGGTGGCACTTGGTGCTGTTGCTGTAGGTCTTTTAGGACTTGCAGGTGGTTATCATGGAAATATTGACTTTGAATTCCCATGGTTAGCATTTGGTTACATCTTCAAGTATTTAGGTATCGCTGGTTACGTGATTGTATGTCTCTTCTTCTTAGCTATTCCACAACTTCAATTTATGAAATCTAAAGATAAAGAAGCATACTATCGTGGTGATGCGCCTGCAGAA

SEQ ID NO: 12296 - protein, 479 aa, Streptococcus agalactiae; identical to SEQ ID NO: 3338

SEQ ID NO: 12297 - protein, 615 aa, Streptococcus agalactiae
ATGCGTAAATTTTTCCAAGATGTTATTGTAGAGGTGGCTTATTATTTAGAGATTGCTTTGTCAGTTATTCTGGCAACAGCTATTATTTTCTTTAGTTTAGCACTCTTTCATGATTTGTTTAGCATGTTGTCTGTTGATCAAAATGTTGATAAGTTGTTCCAGACTTTCCTTGCTCGCGCCATGACAATAGCAGTCGGGATTGAGTTGATCAAAATGTTTTCAAAACCTTCCCCAGATACTTTAATTGAAGTGTTATTGTTTGCCTTAGCTCGTCAACTTGTAATTGAACATGGTAGTGTTTCAGATTACCTTATGGGGATTGCTTCAGTTGCTATTTTGTTTGCTGTTCGTAAATATCTTTTCACCCATTTTGATGGGTCAAGCAACATTGTTTTACGTGCTAATAACAAAGTCAAAAAAGCTAATATTTTAGCTAGGATTCAACTACCTTGTCAACCCAATGAAACTTTAGGAGACTTACTTGTTCGTCATTTAAATGATGAGGAAAAGGACGTTGCTATTGGTTCAGTAGTCTATATTAATAACGTTGCATTGCGTGTTGATAGTATGCACGATGGTCTTGTGACGCGTGTAGAAATCATTAGGAGTCTACAT

SEQ ID NO: 12298 - protein, 205 aa, Streptococcus agalactiae
MRKFFQDVIVEVAYYLEIALSVILATAIIFFSLALFHDLFSMLSVDQNVDKLFQTFLARAMTIAVGIELIKMFSKPSPDTLIEVLLFALARQLVIEHGSVSDYLMGIASVAILFAVRKYLFTHFDGSSNIVLRANNKVKKANILARIQLPCQPNETLGDLLVRHLNDEEKDVAIGSVVYINNVALRVDSMHDGLVTRVEIIRSLH

SEQ ID NO: 12299 - protein, 453 aa, Streptococcus agalactiae
TTGATTAATAAACGGTTAAGAACAATCTTCTTACTACATTATCTGTTAGCGCTACTACTTCTTATAGACATTATCCTTACGATTGATTTTATAATTCACACGTCAACAATTCCCAAAAATAGTCTATCATATATAGGTTTGGGTCAAGGATTTGGTTGGTCTATGATTCTTATTAATTTGATAGCTCTACCTATTTGTTTCCTAGCAGAATTGTTAGCTGGTCTACTATTAAAATTAGAAATGCATAAGCAACATGGCTACTATCCTCTGGAACGCTTATTGATGACTGGTAGTATTCTAACAGTTGTATCGCTAGTATTATTACATACTTTGATTCACAGTATCAATGCACTTCTTTTTTTATCATTTACAGTAGTTTTATTGATTTCTGGGAAGTTCTTAAGTCTTATTAGTATCTATCTATTAAAAAGAAAAAGTAAACATCAAAAAGTC

SEQ ID NO: 12300 - protein, 151 aa, Streptococcus agalactiae
MINKRLRTIFLLHYLLALLLLIDIILTIDFIIHTSTIPKNSLSYIGLGQGFGWSMILINLIALPICFLAELLAGLLLKLEMHKQHGYYPLERLLMTGSILTVVSLVLLHTLIHSINALLFLSFTVVLLISGKFLSLISIYLLKRKSKHQKV

SEQ ID NO: 12301 - protein, 123 aa, Streptococcus agalactiae
TTGAAATTAGAGGAACCTGAAACAGTTATGGCAATTGCCAACGCACTTAATCAGTCTAGGCGTAAAGTGTATTATCAGTTAGAGAAGATAAACGATGCACTGCCTAGCGATGTNNNNNTTAAT

SEQ ID NO: 12302 - protein, 41 aa, Streptococcus agalactiae
  VARIANT 39, 40: Xaa = Any Amino Acid
MKLEEPETVMAIANALNQSRRKVYYQLEKINDALPSDVXXN

SEQ ID NO: 12303 - protein, 1193 aa, Streptococcus agalactiae
ATGACTTCAGTTGTTGTAGTAGGTACCCAATGGGGTGACGAAGGTAAAGGTAAAATTACAGATTTTTTATCTGCTGACGCAGAAGTAATTGCACGTTATCAAGGTGGTGATAACGCTGGGCATACTATCGTTATTGATAACAAAAAATTTAAACTTCATTTAATTCCTTCAGGAATTTTCTTCAAAGAAAAAATTTCTGTCATTGGTAATGGTGTTGTCGTTAATCCGAAATCATTAGTTAAAGAGTTAGCTTATCTTCACGGAGAAGGTGTAACAACGGATAACCTTCGTATTTCAGATCGTGCGCATGTTATCTTGCCATACCACATCAAGCTTGACCAACTACAAGAAGATGCTAAAGGTGATAATAAAATTGGAACAACCATCAAAGGAATTGGGCCAGCTTACATGGACAAGGCTGCGCGTGTCGGTATCCGTATTGCTGACCTTCTTGATAGAGAAGTTTTTGCTGAGCGTTTGAAAATTAATTTAGCTGAGAAAAATCGTTTATTTGAAAAAATGTATGACAGTACACCTCTTGAATTTGATGATATTTTCGAAGAATATTATGAATATGGTCAACAAATTAAGCAATATGTGACTGATACATCCGTTATCTTAAATGATGCTCTTGATGCCGGTAAACGTGTTCTTTTTGAAGGAGCACAAGGAGTTATGCTCGACATTGATCAAGGAACATACCCATTTGTAACATCTTCCAATCCAGTAGCAGGTGGTGTCACAATTGGTTCGGGAGTTGGACCAAGTAAAATTAATAAAGTGGTAGGTGTATGTAAAGCTTACACTAGCCGTGTTGGCGATGGACCATTCCCAACAGAACTTTTTGATGAGGTTGGTGACCGTATTCGTGAGATTGGTAAAGAGTATGGTACAACGACTGGTCGTCCTCGTCGCGTTGGATGGTTTGATTCTGTTGTTATGCGTCACAGCCGTCGAGTATCAGGTATTACTAACCTCTCTCTGAATTCAATTGATGTTCTTTCAGGGCTTGATACGGTAAAAATTTGTGTGGCTTATGACCTTGATGGGAAACGTATTGACTATTACCCAGCAAGCCTTGAACAGCTAAAACGTTGTAAACCAATCTATGAAGATTACCGGGCTGGTCTGAAGAATTACAGCTTGCGTAGCTTAGATGGTCTTCCAGAATGCACGTAATACGTTCGNNNNNT

SEQ ID NO: 12304 - protein, 399 aa, Streptococcus agalactiae
  VARIANT 384, 398, 399: Xaa = Any Amino Acid
MTSVVVVGTQWGDEGKGKITDFLSADAEVIARYQGGDNAGHTIVIDNKKFKLHLIPSGIFFKEKISVIGNGVVVNPKSLVKELAYLHGEGVTTDNLRISDRAHVILPYHIKLDQLQEDAKGDNKIGTTIKGIGPAYMDKAARVGIRIADLLDREVFAERLKINLAEKNRLFEKMYDSTPLEFDDIFEEYYEYGQQIKQYVTDTSVILNDALDAGKRVLFEGAQGVMLDIDQGTYPFVTSSNPVAGGVTIGSGVGPSKINKVVGVCKAYTSRVGDGPFPTELFDEVGDRIREIGKEYGTTTGRPRRVGWFDSVVMRHSRRVSGITNLSLNSIDVLSGLDTVKICVAYDLDGKRIDYYPASLEQLKRCKPIYEELPGWSEDITACXSLDGLPEMHVIRSXX

SEQ ID NO: 12305 - protein, 1015 aa, Streptococcus agalactiae
ATGAATATCATTATTGGGACCAGTCTTTTAATACTTGTATTAGCGATTTTCACTTTATTTAATTATAAAGCACCTACGGAACAAAAGCAATGGGAGCATTGGCATCTGCGGCTTGTGCATCCTTCCTTGTAGAAGCTTTTCAAGATTCTTTCTTTGGTAAAGTTTTGGGATTTCAATTTTTAAGTGAAGTGGGTGGTGCTAATGGTTCACTTTCTGGTGTAGCTGCAGCTATATTGGTTACTATTGCTATTGGTGTAACCCCAGGATACGCAGTTTTAATTGGTTTATCTGTTTCTGGAACAGGTATTATTCCTGGTTTCCTTGCAGGATATTTAGTGGGATTTCTTGTTAAGTGGATGGAAAGAAATATTCCTGGTGGTTTAGATCTTATTTCAATTATTATTATTGGTGCACCATTAACACGTCTTGTGGCCAAACTGTTGACGCCGCTTATTAATAGCACTTTGCTCACCATTGGAGATATCTTAACATCAGGTGCTCATAGCAACCCTATTTTAATGGGGATTATACTTGGCGGGACAATTGTAGTAGTGGCGACAGCACCACTTTCTTCTATGGCATTGACAGCTATGCTAGGATTAACCGGAATGCCTATGGCTATAGGAGCCTTGTCTGTCTTTGGTTCGTCATTTATGAATGGTGTACTTTTCCATAAATTAAAACTTGGAAGTCGTAAAGATAATATAGCTTTTGCTGTTGAGCCTCTAACTCAAGCTGACGTGACTTCAGCTAACCCTATTCCAATCTATGTCACTAATTTTGTTGGTGGTGCAGCTTGTGGTATTTTAATTGCCTTGATGAAATTAGTTAATGATACTCCTGGAACAGCGACACCAATTGCAGGATTTGCTGTCATGTTTGCCTATAACCCATGATAAAGTACTAATAACCGCTCTAGGTTGTATTATCTATCTTACTAGCAGGCTATTTTGGAGGCATTGTTTTTAAAGATTATAAATTAGTTACAAAAGAAGAGCTACAGGCTAGAGATAAC

SEQ ID NO: 12306 - protein, 340 aa, Streptococcus agalactiae
MNIIIGTSLLILVLAIFTLFNYKAPYGTKAMGALASAACASFLVEAFQDSFFGKVLGFQFLSEVGGANGSLSGVAAAILVTIAIGVTPGYAVLIGLSVSGTGIIPGFLAGYLVGFLVKWMERNIPGGLDLISIIIIGAPLTRLVAKLLTPLINSTLLTIGDILTSGAHSNPILMGIILGGTIVVVATAPLSSMALTAMLGLTGMPMAIGALSVFGSSFMNGVLFHKLKLGSRKDNIAFAVEPLTQADVTSANPIPIYVTNFVGGAACGILIALMKLVNDTPGTATPIAGFAVMFAYNPMIKVLITALGCIILSLLAGYFGGIVFKDYKLVTKEELQARDN

SEQ ID NO: 12307 - protein, 381 aa, Streptococcus agalactiae; identical to SEQ ID NO: 6713

SEQ ID NO: 12308 - protein, 127 aa, Streptococcus agalactiae; identical to SEQ ID NO: 880

SEQ ID NO: 12309 - protein, 387 aa, Streptococcus agalactiae; identical to SEQ ID NO: 6711

SEQ ID NO: 12310 - protein, 129 aa, Streptococcus agalactiae; identical to SEQ ID NO: 882

SEQ ID NO: 12311 - protein, 672 aa, Streptococcus agalactiae
ATGGATAAAGAAAAATTAGACTATTGGAAGACGATAATAACGTTTCTCCATAATGTTTTAGGTGATAATTACGAAATTGTTTTGCATGTAGTAGATGAAAATGATATCTATATTGGTGAGTTGGTTAATAGTCACATTAGTGGACGAACCATAAGTTCACCTCTAACGACTTTCGCCCTTGATTTAATCAAGAATAAAGTTTATAAGGAAAAAGATTTTGTTACTAACTATAAGGCGATTGTCAGCCCTCTCAATAAAGAAGTTCGTGGATCTACTTTCTTCATCAAGAATGCTCAAAATGAACTTGAAGGGATGTTATGTATCAACCTTGATATTTCTGCATACCAAAATATTGCTTTGGATATTCTGGACTTAGTTAATTTAAATGTTAACAAAATACTACCTAAGTCCCCTCAAAAAATTTCTCTCCCTCAACAGGAGGAACCTGTAGAAGTTCTATCAGGCAATATTCAGGATATTATTAGTGAGATTGTTGATCCTAGTCTTTTAAATCAGAATATTCATTTAAGTCAAGAAGTTAAGGTAGAAATTGTTTCTAAACTTCACGAAAAAGGTGTATTCCAATTAAAAGGTGCCGTTTCAAAGGTCGCTGAAGTTCTCAACATCTCCGAACCAAGCGTCTATCGTTATCTTAAAAAAATTGAAACTCAT

SEQ ID NO: 12312 - protein, 224 aa, Streptococcus agalactiae; identical to SEQ ID NO: 3346

SEQ ID NO: 12313 - protein, 2250 aa, Streptococcus agalactiae
GTGATTATCGATCAACTGTTACAAAGAAGCCACTCTCATCTACCGATTCTACAAGCTACATTTGGCTTAGAGAGAGAAAGCCTTCGCATTCACCAACCCACTCAAAGGGTTGCTCAAACACCCCATCCCAAAACATTAGGGAGTCGTAACTATCATCCTTATATCCAAACGGATTATAGTGAACCTCAATTAGAACTCATTACACCTATTGCAAAGGATAGCCAAGAAGCCATTCGATTTTTGAAAGCTATAAGTGATGTTGCTGGACGCTCTATCAACCACGATGAATACTTATGGCCGCTTTCTATGCCACCCAAAGTGAGGGAAGAAGACATACAGATTGCCCAATTAGAGGATGCTTTTGAATATGATTATCGCAAATATTTGGAGAAAACTTATGGAAAACTAATACAATCCATCTCTGGAATTCACTATAATCTCGGTTTAGGTCAAGAGTTATTAACTTCTCTCTTTGAATTGAGTCAAGCAGACAATGCTATTGATTTTCAGAACCAGCTTTACATGAAATTGTCTCAAAATTTTTTACGTTACCGTTGGTTACTAACTTATCTATATGGAGCGAGCCCGGTAGCTGAAGAAGACTTTTTAAATCAGAAACTGAATAACCCTGTTCGGTCACTTAGAAATAGTCACTTAGGTTATGTGAATCATAAAGATATTCGTATTTCTTATACTAGCTTGAAGGATTATGTCAACGATCTAGAAAATGCTGTAAAAAGTGGGCAATTGATTGCTGAGAAAGAATTTTATTCACCTGTTCGTCTCCGTGGTAGTAAGGCCTGTCGTAATTATTTAGAAAAAGGAATTACATATTTAGAATTTCGCACTTTTGATCTCAACCCATTTAGTCCAATCGGTATAACGCAGGAAACTGTTGATACTGTTCACCTTTTCTTATTGGCGCTTTTGTGGATAGATTCTAGTAGTCATATTGACCAAGATATCAAGGAAGCCAATAGATTAAATGACCTTATAGCACTCAGTCATCCATTAGAAAAATTACCTAATCAAGCACCAGTTTCTGACTTAGTGGATGCTATGCAATCTGTTATCCAACATTTTAACTTACCACCTCACTATCAAGACCTATTGGAATCTGTAAAAAGGCAAATTCAGTCACCTGAATTAACGGTAGCTGGTCAACTTTTAGAAATGATTGAAGGACTTTCCTTAGAAACATTTGGACAAAGACAAGGACAAATTTATCACGATTATGCTTGGGAAGCTCCCTACGCCTTAAAGGGATATGAAACGATGGAACTTTCTACCCAATTGCTACTATTTGACGTTATCCAAAAAGGAGTCAACTTCGAAGTGCTGGATGAACAAGATCAATTCCTAAAATTATGGCACAATAGTCATATTGAGTACGTTAAAAATGGTAATATGACCTCAAAAGATAACTATATTGTACCGCTCGCTATGGCTAACAAAGTTGTTACAAAAAAAATCCTAGATGAAAAGCATTTCCCAACTCCTTTTGGAGATGAATTTACTGACCGTAAAGAGGCACTTAACTATTTTTCACAAATCCAAGATAAACCAATCGTCGTTAAGCCAAAATCAACAAACTTTGGTTTAGGCATTTCTATTTTTAAAACATCAGCTAACTTAGCTTCTTATGAAAAAGCAATTGACATCGCTTTTGCCGAAGATAGTGCTATTCTTGTGGAAGAATATATTGAGGGTACCGAATACCGTTTCTTCGTCCTTGAGGGGGACTGTATTGCTGTATTGCTTAGGGTAGCAGCTAATGTCGTTGGAGATGGTATTCATACTATTAGTCAGCTAGTTAAACTTAAAAACCAAAACCCTCTCAGAGGCTATGATCATCGCTCTCCTCTAGAGGTTATTGAGCTCGGAGAAGTAGAACAGTTAATGTTGGAACAACAAGGATACACTGTTAACAGTATCCCTCCAGAAGGAACAAAAATAGAACTTCGCCGTAATTCTAATATTTCCACTGGCGGTGACTCTATAGATGTAACAAATACAATGGATCCTACATATAAACAACTAGCAGCTGAGATGGCAGAGGCTATGGGGGCTTGGGTTTGTGGAGTTGATTTAATTATTCCTAATGCCACTCAAGCATACTCAAAAGATAAGAAAAATGCTACTTGCATTGAACTAAACTTTAACCCATTGATGTATATGCACACCTACTGTCAAGAGGGGCCTGGTCAATCTATTACACCTCGAATTTTGGCTAAACTGTTCCCAGAATTA

SEQ ID NO: 12314 - protein, 750 aa, Streptococcus agalactiae
MIIDQLLQRSHSHLPILQATFGLERESLRIHQPTQRVAQTPHPKTLGSRNYHPYIQTDYSEPQLELITPIAKDSQEAIRFLKAISDVAGRSINHDEYLWPLSMPPKVREEDIQIAQLEDAFEYDYRKYLEKTYGKLIQSISGIHYNLGLGQELLTSLFELSQADNAIDFQNQLYMKLSQNFLRYRWLLTYLYGASPVAEEDFLNQKLNNPVRSLRNSHLGYVNHKDIRISYTSLKDYVNDLENAVKSGQLIAEKEFYSPVRLRGSKACRNYLEKGITYLEFRTFDLNPFSPIGITQETVDTVHLFLLALLWIDSSSHIDQDIKEANRLNDLIALSHPLEKLPNQAPVSDLVDAMQSVIQHFNLPPHYQDLLESVKRQIQSPELTVAGQLLEMIEGLSLETFGQRQGQIYHDYAWEAPYALKGYETMELSTQLLLFDVIQKGVNFEVLDEQDQFLKLWHNSHIEYVKNGNMTSKDNYIVPLAMANKVVTKKILDEKHFPTPFGDEFTDRKEALNYFSQIQDKPIVVKPKSTNFGLGISIFKTSANLASYEKAIDIAFAEDSAILVEEYIEGTEYRFFVLEGDCIAVLLRVAANVVGDGIHTISQLVKLKNQNPLRGYDHRSPLEVIELGEVEQLMLEQQGYTVNSIPPEGTKIELRRNSNISTGGDSIDVTNTMDPTYKQLAAEMAEAMGAWVCGVDLIIPNATQAYSKDKKNATCIELNFNPLMYMHTYCQEGPGQSITPRILAKLFPEL

SEQ ID NO: 12315 - protein, 816 aa, Streptococcus agalactiae
ATGGTTAAAAAACGCTATTCCAAAAATTCTCATAATCTAATAACATTACTTGGTATTGTTGTTCTTGCTTCCCTGATTTCAGACTTTTGGAGTGAGGTGATTGCTACTCTGTTAATTATTGGTGGTGGTTATTGTGCCTATTACGTTTATGATAAAAAGCGTCTTAAACGTTTTACATCAAACCAACGTATTGAAGCTTTAAAATCCAATATTAAAGAGACTGACCAAGACATTAGACACTTGGAAATTTTAAAAAAAGACAATCTTTCTAAGGAATATATAAAATTAGCAAATCAAATATTACCTCAATTGGACCTAATTCGTAATGAAGCAAACCAACTACAAAAAGCCATTGAGCCTAATATCTATAAACGTATCACCAAAAAAGCAAATACATTTAGTAATGAGATTAACGAACAACTAATAAAGCTACATGCCTCTCCAGAACTAGAACCTATTTCTGATCAGGAAGATGAAATGATACGCATTGCTCCGGAATTAAAACCGTTCTATCACAATATTCAAGATGACCACTATGCTATCTTAAAAAAGATTGAAAAGGCAGATAACAAAGCTGAATTAGCAGCAATTCATCAAGCCAATATGAAACGTTTTACAGATGTTCTGGCTGGCTACATCAGAATCAAACAATCTCCTAAAAATTTTAACAATGCTAAGGAACGCCTAGAACAAGCATTACAAGCAATTAAAAAATTTAATTTAGATTTAGATGAAACGCTGCGCCAATTGAATGAAAGTGATATGAAAGATTTTGACGTTAGCCTAAGAATGATGCAAGACGAAAGGAACAATAAA

SEQ ID NO: 12316 - protein, 272 aa, Streptococcus agalactiae
MVKKRYSKNSHNLITLLGIVVLASLISDFWSEVIATLLIIGGGYCAYYVYDKKRLKRFTSNQRIEALKSNIKETDQDIRHLEILKKDNLSKEYIKLANQILPQLDLIRNEANQLQKAIEPNIYKRITKKANTFSNEINEQLIKLHASPELEPISDQEDEMIRIAPELKPFYHNIQDDHYAILKKIEKADNKAELAAIHQANMKRFTDVLAGYIRIKQSPKNFNNAKERLEQALQAIKKFNLDLDETLRQLNESDMKDFDVSLRMMQDERNNK

SEQ ID NO: 12317 - protein, 1254 aa, Streptococcus agalactiae
ATGAGCGATACCTTTAATTTTGATATTGACCAAATTGCAGACAATGCTATCACTAAAACAGATAAAACAACAGAAATTATTTCCAACCAGACAACAAGCCAAACTGGGCAAATTGCCTTTTTTGAAAAACTAACACCAGCACAAAAGTCTGCTATCTCTGAAAAAACACCAGCTTTGGTAGATACTTTTGTCGGTGACCAAAATGCGCTCCTTGATTTTGGACAATCCGCAGTAGAAGGCGTTAATACCACTGTTAATCATATCTTGTCTGAGCAGAAAAAAATTCAAATTCCTCAAGTTGATGATTTACTAAAAAATGCTAATCGCGAACTAAATGGATTTATTGCCAAATATAAAGATGCTACTCCGGCAGAATTAGAGAAAAAACCAAACTTGATTCAAAAATTATTCAAACAAAGCAAGACCTCGCTACAGGAATTTTATTTTGACTCACAAAACATCGAGCAAAAAATGGATATGATGGCAGCGAATGTTGTCAAACAAGAAGATACTTTGGCAAGAAATATCGTCTCTGCTGAAATGCTCATTGAAGATAATACTAAATCTATTGAAAATTTGGTTGGAGTTATTGCTTTTATTGAATCGAGTCAAGCCGAGGCTGCCAATCGTGCAAGCCACTTACAACAAGAAATTCTAGCATTAGATAGCCAAACGTCCGAGTATCAAATTAAAAGTAACCAATTAGCTCGAATGACTGAAGTTATCAATACCTTCGAACAGCAACATACTGAATATGTCAGCCGTCTCTACGTTGCATGGGCAACAACACCACAGATGCGAAACTTGGTCAAAGTATCGTCAGATATGCGTCAAAAACTTGGCATGTTACGTCGAAATACCATTCCAACAATGAAACTCTCAATCGCTCAGTTAGGCATGATGCAACAATCTGTCAAATCCGGTGTCACTGCTGATGCTATTGTCAACGCTAATAATGCAGCATTGCAGATGCTGGCTGAAACTAGTAAAGAAGCGATTCCGATGTTAGAGAAGACCGCACAAAGCCCCACTGTTTCTATTAAATCTGTCACTGCATTAGCTGAAAGCTTAGTGGCTCAAAATAATGGTATTATCGCTGCCATAGACAAAGGACGTAAAGAACGTGCCCAATTAGAATCTGCTGTTATTAAATCGGCTGAAACAATCAATGATTCTGTCAAAATTCGTGATAAAAAAATAGTTGAAGCCTTACTCAACGAAGGTAAATCTACCCAAGAAAAAGTTGATGAGTCT

SEQ ID NO: 12318 - protein, 418 aa, Streptococcus agalactiae
MSDTFNFDIDQIADNAITKTDKTTEIISNQTTSQTGQIAFFEKLTPAQKSAISEKTPALVDTFVGDQNALLDFGQSAVEGVNTTVNHILSEQKKIQIPQVDDLLKNANRELNGFIAKYKDATPAELEKKPNLIQKLFKQSKTSLQEFYFDSQNIEQKMDMMAANVVKQEDTLARNIVSAEMLIEDNTKSIENLVGVIAFIESSQAEAANRASHLQQEILALDSQTSEYQIKSNQLARMTEVINTFEQQHTEYVSRLYVAWATTPQMRNLVKVSSDMRQKLGMLRRNTIPTMKLSIAQLGMMQQSVKSGVTADAIVNANNAALQMLAETSKEAIPMLEKTAQSPTVSIKSVTALAESLVAQNNGIIAAIDKGRKERAQLESAVIKSAETINDSVKIRDKKIVEALLNEGKSTQEKVDES

SEQ ID NO: 12319 - protein, 873 aa, Streptococcus agalactiae
ATGGATAAAATTATAAAATCAATTTCAACTTCCGGTTCTTTCCGGGCTTATGTCCTTGATTGTACAGAAACTGTAAGAACAGCTCAAGAAAAACATCAGACACTTTCAAGTTCTACTGTAGCTCTTGGGAGAACATTAATTGCAAATCAAATTTTAGCAGCAAATCAAAAAGGAAATAGTAAAGTAACTGTCAAGGTTATTGGAGATAGCTCTTTTGGTCATATTATTTCTGTAGCTGATACTAAAGGAAATGTTAAAGGTTACATCCAAAATACGGGTGTTGATATCAAGAAAACAGCTACTGGAGAGGTCTTAGTTGGACCTTTCATGGGGAATGGACACTTTGTCGTTATTACCGATTACGGAACTGGGCAACCTTACACTTCAACAACTCCACTAATTACAGGAGAAATTGGAGAAGATTTTGCTTATTATTTAACCGAAAGTGAGCAAACACCTTCTGCCGTCGGTTTAAATGTCCTCTTAGATGACGAGGATAAGGTTAAAGTTGCAGGTGGATTCATGCTTCAGGTGCTCCCAGGTGCTTCTGACGAAGAAATTTCTCGCTATGAAAAACGCATTCAGGAGATGCCTTCTATTTCAAGTCTGCTAGAGTCTGAAAATCATATAGAATCTCTCCTTTCAGCTATTTACGGAGAAGACGACTACAAGCGCTTATCGGAAGACTCTTTAGCCTTCTACTGTGACTGTTCAAAAGAACGTTTTGAAGCCGCTCTATTGACTTTAGGAACTAAAGAATTGCAAGCCATGAAGGATGAAGATAAAGGTGTTGAAATTACTTGTCAATTTTGCAACCAGACTTACTATTTCACAGAAGAAGATTTGGAGAAGATAATTAATGACTCAATTAAA

SEQ ID NO: 12320 - protein, 291 aa, Streptococcus agalactiae
MDKIIKSISTSGSFRAYVLDCTETVRTAQEKHQTLSSSTVALGRTLIANQILAANQKGNSKVTVKVIGDSSFGHIISVADTKGNVKGYIQNTGVDIKKTATGEVLVGPFMGNGHFVVITDYGTGQPYTSTTPLITGEIGEDFAYYLTESEQTPSAVGLNVLLDDEDKVKVAGGFMLQVLPGASDEEISRYEKRIQEMPSISSLLESENHIESLLSAIYGEDDYKRLSEDSLAFYCDCSKERFEAALLTLGTKELQAMKDEDKGVEITCQFCNQTYYFTEEDLEKIINDSIK

SEQ ID NO: 12321 - protein, 975 aa, Streptococcus agalactiae
ATGACTCAATTAAATAGTTCATTTATGATTGGGAAGGTTGAAATTCCTCATCGTACCGTACTAGCACCGATGGCAGGTATTACTAATTCTGCTTTTCGTACTATCGCTAAAGAATTTGGTGCTGGTCTCGTTGTTATGGAAATGATTTCTGAGAAAGGGTTACTTTATAACAACGAAAAGACCTTACATATGCTCCATATCGATGAAAATGAACATCCTATGTCAATTCAACTATTTGGTGGCGATGCAGAAGGCTTAAAACGTGCAGCTGACTTTATCCAAAGTAATACGAAAGCAGATATCGTAGACATCAATATGGGATGTCCAGTTAACAAAGTTGTTAAAAACGAAGCTGGAGCTAAATGGCTACGTGACCCTGAAAAAATTTATCATATTGTTAAAGAGGTAACGTCTGTACTTGACATTCCATTAACAGTAAAAATGCGTACAGGATGGTCTGACTCATCTAATGCTGTAGAAAATGCACTCGCTGCCGAATCTGCTGGTGTATCTGCACTTGCTATGCACGGTCGAACGCGTGAACAAATGTATACTGGCACGTGTGACCATGAAACACTTGGCAAGGTCGCTAAAGCTGTTACTAGTATTCCTTTTATTGCCAATGGTGACATTCGTACTGTTCACGATGCCAAATTTATGATTGAAGAGATTGGAGCTGACGCTATAATGGTTGGACGTGGTGCTCGTAGCAATCCTTACATCTTTACACAAATTAATCATTTCTTTGAAACAGGCGAAATCCTTCCTGACCTACCATTTGAGAAGATGTTAGATGTTGCCGAGGATCATCTCACTCGACTAGTTAATTTAAAAGGTGAAACTATTGCCGTTCGTGAATTTCGAGGGTTAGCACCTCATTATCTGCGTGGAAAATCAGGCGCAGCAAAAATTAGAGGAGCTGTTTCACGTGCAGAAACACTAGCAGAAGTTCAAGAACTTTTTGCAGGTTTACGC

SEQ ID NO: 12322 - protein, 325 aa, Streptococcus agalactiae
MTQLNSSFMIGKVEIPHRTVLAPMAGITNSAFRTIAKEFGAGLVVMEMISEKGLLYNNEKTLHMLHIDENEHPMSIQLFGGDAEGLKRAADFIQSNTKADIVDINMGCPVNKVVKNEAGAKWLRDPEKIYHIVKEVTSVLDIPLTVKMRTGWSDSSNAVENALAAESAGVSALAMHGRTREQMYTGTCDHETLGKVAKAVTSIPFIANGDIRTVHDAKFMIEEIGADAIMVGRGARSNPYIFTQINHFFETGEILPDLPFEKMLDVAEDHLTRLVNLKGETIAVREFRGLAPHYLRGKSGAAKIRGAVSRAETLAEVQELFAGLR

SEQ ID NO: 12323 - protein, 639 aa, Streptococcus agalactiae
ATGTTGATTGTTTTAGCTGGAACCATTGGAGCAGGTAAAAGCTCCCTTGCAGCTGCTCTAGGACAACACCTAGGGACAGATGTTTTCTATGAGGCGGTTGATAATAACCCAGTTTTAGATCTTTACTATCAAGATCCCCAAAAATATGCTTTTTTACTACAAATATTCTTTTTAAATAAACGATTCCAATCTATAAAAGAAGCCTATAAGGCTAACAACAATGTTTTGGATCGTTCTATTTTTGAAGATGAACTATTCCTCACTCTAAATTATAAGAATGGAAATGTGACTAAAACAGAGCTAGATATCTATAAAGAACTTCTTGCAAATATGTTGGAAGAATTAGAAGGTATGCCTAAGAAGAGACCTGATTTGCTAGTCTACATTGATGTTTCATTTGATAAAATGTTAGAACGTATTGACAAACGAGGACGCAGCTTTGAGCAAGTTGATTCTAACCCAGAATTATACGACTACTACAAACAAGTCCATTCTAAATATCCAGAATGGTATGAAAATTACGACGTTTCACCTAAAATTCGGATCGATGGTAACAAACTTGATTTCGTCAAAAATCCAGAGGATCTTCAACACGTCCTTGACACTATTGATTCCGAATTGCAAAAACTTGATTTACTA

SEQ ID NO: 12324 - protein, 213 aa, Streptococcus agalactiae
MLIVLAGTIGAGKSSLAAALGQHLGTDVFYEAVDNNPVLDLYYQDPQKYAFLLQIFFLNKRFQSIKEAYKANNNVLDRSIFEDELFLTLNYKNGNVTKTELDIYKELLANMLEELEGMPKKRPDLLVYIDVSFDKMLERIDKRGRSFEQVDSNPELYDYYKQVHSKYPEWYENYDVSPKIRIDGNKLDFVKNPEDLQHVLDTIDSELQKLDLL

SEQ ID NO: 12325 - protein, 489 aa, Streptococcus agalactiae
ATGATTATAAGACCTGTCCTACCCTCAGATGCTAAAGAATTACTTGCTATCTATGCTCCCTACGTTACTGACACTACAATAACGTTTGAATACGATATTCCTAGTATATCGGAATTCACCAATCGTATCAAAAATATCAGCAAATCTTTCCCATATTTAGTTGCTGAAGAAAATGGGAAAATATTAGGTTATGCATATGCTTCAACTTACTACGCTAGAGCTGCCTATGACTGGACTTGCGAGCTTTCTATTTACCTTGATAAAGATGCACGTAGCAAAAAAATTAGTAGCCAACTATATGATACATTGGAGAAAGAATTAGTTAGCCAAGGGTATGTTAATCTACTCGCTTGTATCAGTTTACCAAATGATATAAGTATTGCATTCCACAAAAAAAGAGGATTTAATCAAGTCGCACATTTCCCAAAAATCGGATTTAAATTTGAACAATGGCATGACATTGTATGGTTACAAAAGCGATTGAAATCT

SEQ ID NO: 12326 - protein, 163 aa, Streptococcus agalactiae
MIIRPVLPSDAKELLAIYAPYVTDTTITFEYDIPSISEFTNRIKNISKSFPYLVAEENGKILGYAYASTYYARAAYDWTCELSIYLDKDARSKKISSQLYDTLEKELVSQGYVNLLACISLPNDISIAFHKKRGFNQVAHFPKIGFKFEQWHDIVWLQKRLKS

SEQ ID NO: 12327 - protein, 2445 aa, Streptococcus agalactiae
ATGAGTCATTATTCCATAAAATTACAAGAAGTATTCAGATTGGCGCAATTTCAAGCAGCACGCTATGAAAGTCACTATTTAGAAAGCTGGCATCTTCTTTTAGCAATGGTTTTAGTTCATGATTCAGTAGCTGGTTTGACATTTGCTGAATATGAGTCTGAAGTTGCAATTGAAGAGTACGAAGCAGCAACAATTTTAGCTTTAGGTAGAGCACCGAAAGAAGAGATTACCGATTATCAATTTTTAGAGCAATCATCGGCTTTGAAAAAGATCTTAAAGTTAGCAGAAAATATTAGTATCGTAGTAGGAGCTGAAGATGTGGGTACTGAACATGTCTTGCTTGCTATGTTGGTTAATAAAGATTTATTAGCCACACGTATCTTAGAATTAGTTGGTTTTAGAGGTCAAGACGATGGTGAATCAGTTCGTATGGTTGATTTACGTAAGGCTCTAGAACGTCATGCCGGTTTTACAAAAGATGATATCAAAGCAATTTATGAATTACGTAATCCTAAAAAAGCAAAGTCGGGTGCTTCTTTTTCTGATATGATGAAACCACCGAGTACTGCTGGTGATTTAGCTGATTTCACACGTGATTTATCACAGATGGCGGTTGATGGGGAAATTGAACCTGTTATTGGGCGTGATACAGAAATTTCACGTATGGTCCAAGTCTTAAGTCGTAAAACAAAGAATAATCCTGTCTTAGTTGGAGATGCGGGTGTCGGTAAAACAGCTTTGGCGTACGGTCTAGCACAACGTATTGCTAATGGAAATATTCCTTATGAGCTTAGAGATATGCGTGTTCTAGAGTTAGATATGATGAGCGTTGTTGCTGGAACTCGTTTTCGTGGTGATTTTGAGGAACGTATGAATCAAATCATTGCAGATATTGAAGAAGACGGTCATATTATTCTTTTCATTGATGAACTGCATACTATTATGGGTTCTGGCTCTGGTATTGATAGCACACTTGATGCTGCTAATATTTTAAAACCAGCTTTGGCCCGAGGCACTTTACGCACTGTTGGAGCAACAACTCAAGAGGAATATCAAAAGCATATTGAAAAAGATGCTGCTTTATCTCGTCGCTTTGCAAAAGTTTTAGTAGAAGAACCAAATCTTGAAGACGCTTATGAAATTCTACTTGGATTGAAGCCAGCGTATGAAGCCTTTCATAATGTTACTATTTCAGATGAAGCAGTTATGACTGCTGTAAAAGTGGCTCATCGTTATTTGACAAGTAAGAATTTACCAGACTCAGCTATAGACTTACTTGATGAAGCTTCTGCCACTGTGCAAATGATGATTAAGAAAAATGCTCCTTCGCTTTTAACAGAAGTTGACCAAGCTATTTTAGATGATGATATGAAATCTGCTTCTAAAGCTCTAAAAGCAAGCCATAAGGATAAAAAGCGTAAGCCTATTGCCGTAACCGAAGATCATATTATGGCAACTCTCAGCCGTCTATCTGGTATTCCTGTTGAAAAATTGACACAAGCTGATAGTAAAAAATACCTCAATTTAGAAAAAGAATTGCATAAACGTGTTATCGGTCAAGATGATGCAGTTACCGCCATTAGTCGTGCTATCCGTCGCAATCAATCTGGCATTCGTACTGGTAAGCGTCCTATTGGTTCCTTTATGTTCTTGGGACCAACTGGTGTTGGTAAGACAGAGTTAGCAAAAGCCTTGGCAGAAGTGTTGTTTGATGATGAATCAGCCCTAATTCGTTTTGATATGTCGGAATATATGGAAAAATTCGCAGCTTCTCGCCTGAATGGGGCACCTCCAGGTTATGTTGGTTATGATGAAGGAGGAGAGCTGACTGAAAAAGTACGCAATAAACCATATTCAGTTTTACTTTTTGATGAAGTTGAAAAAGCTCATCCAGATATTTTTAATGTATTATTACAAGTGCTTGATGATGGCGTTTTAACAGATAGTCGAGGACGAAAAGTTGATTTTTCAAATACTATAATCATTATGACTTCTAATTTAGGAGCAACTGCATTACGTGACGATAAAACAGTTGGTTTTGGAGCTAAGGATATCAGCCATGATTATACTGCTATGCAAAAACGTATTATGGAGGAGCTTAAAAAAGCTTATCGACCAGAATTTATCAATCGTATTGATGAGAAAGTTGTATTCCATAGTCTCAGTCAAGATAATATGCGTGAAGTTGTGAAAATTATGGTTAAACCTTTAATTTTAGCGCTTAAAGATAAAGGTATGGATCTGAAATTCCAGCCTTCAGCCTTGAAACACTTGGCAGAGGATGGCTATGATATAGAAATGGGTGCTCGTCCACTGCGTAGAACTATTCAAACGCAAGTAGAGGATCATTTATCAGAACTACTATTGGCAAATCAAGTGAAAGAGGGGCAAGTAATTAAGATTGGCGTATCCAAAGGCAAATTGAAATTTGATATTGCAAAATCA

SEQ ID NO: 12328 - protein, 815 aa, Streptococcus agalactiae
MSHYSIKLQEVFRLAQFQAARYESHYLESWHLLLAMVLVHDSVAGLTFAEYESEVAIEEYEAATILALGRAPKEEITDYQFLEQSSALKKILKLAENISIVVGAEDVGTEHVLLAMLVNKDLLATRILELVGFRGQDDGESVRMVDLRKALERHAGFTKDDIKAIYELRNPKKAKSGASFSDMMKPPSTAGDLADFTRDLSQMAVDGEIEPVIGRDTEISRMVQVLSRKTKNNPVLVGDAGVGKTALAYGLAQRIANGNIPYELRDMRVLELDMMSVVAGTRFRGDFEERMNQIIADIEEDGHIILFIDELHTIMGSGSGIDSTLDAANILKPALARGTLRTVGATTQEEYQKHIEKDAALSRRFAKVLVEEPNLEDAYEILLGLKPAYEAFHNVTISDEAVMTAVKVAHRYLTSKNLPDSAIDLLDEASATVQMMIKKNAPSLLTEVDQAILDDDMKSASKALKASHKDKKRKPIAVTEDHIMATLSRLSGIPVEKLTQADSKKYLNLEKELHKRVIGQDDAVTAISRAIRRNQSGIRTGKRPIGSFMFLGPTGVGKTELAKALAEVLFDDESALIRFDMSEYMEKFAASRLNGAPPGYVGYDEGGELTEKVRNKPYSVLLFDEVEKAHPDIFNVLLQVLDDGVLTDSRGRKVDFSNTIIIMTSNLGATALRDDKTVGFGAKDISHDYTAMQKRIMEELKKAYRPEFINRIDEKVVFHSLSQDNMREVVKIMVKPLILALKDKGMDLKFQPSALKHLAEDGYDIEMGARPLRRTIQTQVEDHLSELLLANQVKEGQVIKIGVSKGKLKFDIAKS

SEQ ID NO: 12329 - protein, 462 aa, Streptococcus agalactiae
GTGGCCATAAAAAATACTTCCGATAATATTGAAGAATATATAAAATCATTATTAGAACAATCAGGAATTGCTGAAATAAAGCGTTCCAATTTAGCTGATACTTTTCAAGTTGTTCCTAGTCAGATTAATTATGTCATTAAGACACGGTTTACTGAAAGCCGTGGTTATGTGGTTGAGAGTAAACGAGGTGGTGGAGGTTACATCCGCATTGCTAAGGTTCATTTTTCTGATCAACACCAATTATTTGGAAATATGTTATCAACGATTGGCGAGCGTATCAGTGAACAAGTCTTTGATGATTTGATTCAATTATTATTCGATGAAGAGATAATTACAGAACGTGAAGGAAATTTGATTCTGGCGACATCAGGTGATGACGTCTTAGGAGAGCAAGCCTCTGTTATTAGAGCTCGTATGCTCCGTAAATTATTACAACGATTAGATAGAAAAGGATTCCATTTA

SEQ ID NO: 12330 - protein, 154 aa, Streptococcus agalactiae; identical to SEQ ID NO: 3368

SEQ ID NO: 12331 - protein, 399 aa, Streptococcus agalactiae
GTGCCATTTGCAATCGCTAATGGAATACCTTTGTGGGAAGCGCTAGCTATCGGTGTTGTTGGAAACATGCTACCTGTACCTATCATCTTCTTCTTTGCTCGCAAAGTTCTAGAATGGGGAGCAGATAAACCTTATACTGGTAAGTTTTTCACATGGTGCCTTAAAAAAGGACATAGCGGTGGTCAAAAACTTGAAAAAGTAGCTGGAGAAAAAGGATTGTTTATTGCCTTGCTATTGTTTGTAGGCATTCCCTTACCCGGAACAGGAGCCTGGACTGGCACGCTTGCAGCTAGCCTCCTAGATTGGGAATTTAAACATAGTGTTATTGCTGTTATGCTAGGTGTTATACTAGCTGGATGCATCATGGGAACATTATCCATTATCGGCTTCAACCTATTC

SEQ ID NO: 12332 - protein, 133 aa, Streptococcus agalactiae; identical to SEQ ID NO: 3370

SEQ ID NO: 12333 - protein, 1038 aa, Streptococcus agalactiae
ATGGCAGAAATCACAGCTAAACTTGTAAAAGAATTGCGTGAAAAATCAGGTGCAGGCGTTATGGACGCTAAAAAAGCATTAGTAGAAACTGATGGTGACCTTGATAAAGCGATTGAATTACTTCGCGAAAAAGGTATGGCTAAAGCAGCTAAAAAAGCAGACCGTGTTGCTGCTGAAGGTTTAACAGGTGTTTATGTTGATGGTAACGTTGCAGCAGTTATTGAAGTTAACGCTGAGACTGACTTTGTTGCTAAAAACGACCAATTTGTAACATTAGTTAATGAAACTGCTAAAGTTATTGCAGAAGGACGTCCTTCAAACAATGAAGAAGCACTTGCTTTAACAATGCCTTCAGGTGAAACTTTAGAACAAGCATTTGTAACTGCAACTGCTACAATTGGTGAAAAAATTTCATTCCGTCGCTTCGCTTTAGTTGAAAAGACTGATGAGCAACATTTTGGTGCATACCAACATAATGGTGGACGTATCGGAGTAATTACTGTTGTTGAAGGTGGCGACGATGCACTTGCTAAACAAGTATCAATGCACGTTGCAGCTATGAAGCCAACTGTTCTTTCATATACTGAACTTGATGCACAATTTGTTCATGATGAGTTAGCTCAGTTGAACCACAAAATTGAGCAAGACAACGAGAGTCGTGCTATGGTTAACAAACCAGCTCTTCCATTCCTTAAATATGGATCAAAAGCTCAATTGACTGATGAAGTTATTGCCCAAGCAGAAGAAGACATCAAAGCAGAATTAGCTGCAGAAGGTAAACCAGAAAAAATCTGGGATAAAATCGTTCCAGGTAAAATGGATCGTTTCATGCTTGATAACACTAAAGTTGACCAAGAGTACACACTCCTTGCTCAAGTTTACATCATGGATGATAGCAAAACAGTTGAAGCTTATCTTGAGTCAGTAAATGCTAAAGCAGTTGCTTTCGTACGTTTTGAAGTTGGAGAAGGTATTGAGAAAGCTTCTAACGACTTTGAAGCAGAAGTTGCAGCTACAATGGCAGCAGCACTTGAAAAA

SEQ ID NO: 12334 - protein, 346 aa, Streptococcus agalactiae; identical to SEQ ID NO: 3372

SEQ ID NO: 12335 - protein, 768 aa, Streptococcus agalactiae
ATGGCAGTAATTTCAATGAAACAACTTCTTGAGGCTGGTGTTCACTTTGGTCACCAAACTCGTCGCTGGAACCCTAAGATGGCTAAGTACATCTTCACAGAACGTAATGGTATCCACGTTATCGACCTTCAACAAACTGTAAAATTAGCTGACCAAGCTTACGAATTTGTTCGTGATGCTGCAGCAAACGATGCAGTTATCTTGTTTGTTGGTACTAAGAAACAAGCAGCTGAAGCTGTTGCTGAAGAAGCTAAACGTGCTGGTCAATACTTCATTAACCACCGTTGGTTAGGTGGAACTCTTACTAACTGGGGAACTATCCAAAAACGTATTGCTCGTTTGAAAGAAATCAAACGTATGGAAGAAGAAGGAACTTTTGAACTTCTTCCTAAGAAAGAAGTTGCATTGTTAAACAAACAACGTGCACGTCTTGAAAAATTCTTGGGTGGTATCGAAGATATGCCACGCATCCCAGATGTAATGTATGTTGTTGACCCACATAAAGAGCAAATCGCTGTTAAAGAAGCTAAAAAGCTTGGTATTCCAGTTGTAGCTATGGTTGACACTAACGCTGATCCAGATGATATCGATGTTATCATCCCAGCAAACGATGACGCTATTCGCGCCGTTAAATTAATTACTTCTAAATTAGCTGATGCAGTTATTGAAGGTCGTCAAGGTGAAGATGCTGACGTTGACTTCGCTCAAGAAGCACAAGCAGATTCAATTGAAGAAATCGTTGAAGTAGTTGAAGGATCAAAAAACGAC

SEQ ID NO: 12336 - protein, 256 aa, Streptococcus agalactiae
MAVISMKQLLEAGVHFGHQTRRWNPKMAKYIFTERNGIHVIDLQQTVKLADQAYEFVRDAAANDAVILFVGTKKQAAEAVAEEAKRAGQYFINHRWLGGTLTNWGTIQKRIARLKEIKRMEEEGTFELLPKKEVALLNKQRARLEKFLGGIEDMPRIPDVMYVVDPHKEQIAVKEAKKLGIPVVAMVDTNADPDDIDVIIPANDDAIRAVKLITSKLADAVIEGRQGEDADVDFAQEAQADSIEEIVEVVEGSKND

SEQ ID NO: 12337 - protein, 558 aa, Streptococcus agalactiae
ATGTCATTAGTCGGAAAAGAAATTATTGAATTTTCAGCTCAAGCTTATCACGATGGAAAATTCATCACTGTTACAAATGAAGACGTTAAAGGAAAATGGGCAGTTTTTTGTTTCTACCCAGCAGACTTTTCATTTGTTTGCCCAACTGAACTTGGTGACCTTCAAGAGCAATACGAAACACTTAAATCTCTTGATGTAGAAGTTTATTCTGTCTCTACTGATACTCATTTTGTTCATAAAGCATGGCATGATGACTCAGATGTCGTTGGTACTATCACATATCCTATGATTGGTGACCCTTCACACCTTATTTCACAAGGTTTTGATGTCCTTGGACAAGATGGTCTAGCACAACGTGGTACATTTATCATTGATCCAGACGGTGTCATCCAAATGATGGAAATTAATGCTGATGGCATCGGACGTGATGCAAGTACTCTCATTGATAAAGTCCGTGCTGCTCAATACATCCGCCAACATCCAGGTGAAGTTTGTCCAGCTAAATGGAAAGAAGGAGCTGAAACTTTAACTCCTAGTTTAGACCTTGTAGGTAAAATT

SEQ ID NO: 12338 - protein, 186 aa, Streptococcus agalactiae
MSLVGKEIIEFSAQAYHDGKFITVTNEDVKGKWAVFCFYPADFSFVCPTELGDLQEQYETLKSLDVEVYSVSTDTHFVHKAWHDDSDVVGTITYPMIGDPSHLISQGFDVLGQDGLAQRGTFIIDPDGVIQMMEINADGIGRDASTLIDKVRAAQYIRQHPGEVCPAKWKEGAETLTPSLDLVGKI

SEQ ID NO: 12339 - protein, 1530 aa, Streptococcus agalactiae
ATGGTCTTAGATAAAGAAATCAAGGCTCAATTAGCACAATATTTAGATTTGCTAGAATCTGATATTGTATTACAAGCTGATTTAGGAGATAACGATAATTCTCAAAAAGTAAAGGATTTTCTAGATGAAATTGTCGCTATGTCTGATCGCATCAGCCTTGAATCAACACATTTAAAACGTCAACCTAGTTTTGGGATTGCAAAAAAAGGGCATGAAAGTCGCGTTATTTTTTCAGGCTTGCCAATGGGGCATGAATTCACATCTTTCATTTTAGCTTTGTTGCAAGTCTCTGGTCGCGCACCAAAAGTTGATGAAGACATTATCAAACGAATTAAGGGCATTGAGAAAACTATCAATCTAGAAACTTATGTTTCATTAACTTGCCATAATTGTCCAGATGTCGTTCAAGCCTTTAATATAATGGCTGTTTTGAATCCGAATATCACTCATACTATGATTGAAGGAGGCATGTATCAAGACGAAGTCAAATCAAAAGGTATCATGTCTGTTCCTACTGTTTATAAGGACCAAGAAGAATTTACTTCTGGCCGTGCTACAATTGAACAGCTTTTAGAACAACTAGATGGACCTCTTGATGCTGAAGCATTTGCTGACAAAGGTGTCTATGATGTTCTAGTTATTGGTGGTGGTCCTGCAGGTAACAGTGCTGCAATTTATGCCGCCCGTAAAGGGTTAAAAACAGGTATTTTAGCAGAAACTTTTGGTGGACAAGTTATCGAAACAGTTGGTATTGAGAACATGATTGGTACATTGTACACCGAAGGCCCTAAATTGATGGCTCAAATTGAAGAGCATACCAAATCTTACGATATTGATATTATCAAGAGTCAATTAGCAACTGGCATTGAAAAAAAAGAATTAGTTGAGGTAACACTGGCTAACGGAGCTATTTTACAAGCTAAAACTGCTATCCTAGCTCTGGGTGCTAAGTGGCGAAATATCAACGTTCCTGGCGAGGAAGAATTCCGCAATAAAGGTGTTACTTACTGTCCACATTGTGATGGCCCTCTTTTCGAAGGAAAAGATGTTGCTGTTATAGGTGGTGGTAATTCAGGTATGGAAGCTGCTTTAGATCTAGCCGGTGTCACTAAACATGTTACAGTCCTAGAATTCTTACCTGAGCTCAAAGCAGACCAAGTACTGCAAGAACGAGCAGCTAAAACTGATAATTTAACTATTCTTAAGAATGTTGCTACTAAAGATATCGTTGGTGAAGATCATGTCACTGGTTTAAACTATACCGATCGTGATACAAACGAAGAAAAACACATTGATTTAGAAGGTGTTTTTGTACAAATTGGTCTTGTACCAAGTACATCTTGGCTCAAGGATAGCGGCATTGAACTCAATGAACGTCAAGAAATTGTCGTTGATAAATTTGGCTCAACAAATATCCCTGGTATTTTTGCTGCAGGTGACTGTACAGATGCTGCCTACAAGCAAATCATTATTTCCATGGGGTCTGGTGCCACAGCTGCCATTGGCGCATTTGATTATTTAATCAGACAA

SEQ ID NO: 12340 - protein, 510 aa, Streptococcus agalactiae; identical to SEQ ID NO: 3378

SEQ ID NO: 12341 - protein, 2067 aa, Streptococcus agalactiae
ATGGAAGAAACTATTCTAATAGTCAGCTTTCTCCTGTTTTTGATTTTATCTAATGTTATCAATAGGATATTTCCTAAATTACCATTACCATTTATCCAGTTGGTCTTTGGGATTCTCTCTGGCTTAGTTTTTCATAAGTCACAAGTCCATATCGATCCTGAGTTATTTCTTGCCTTTGTTATTGCCCCTTTGAACTTTAGAGAAGGTCAAGAAAGTGATATTGGTAGTTTTATAAAGTATCGGACTATTATTCTTTACTTAATCTTACCAACGGTATTTTTAACAGCTATTGTCGTTGGTTATGTAGCAGGGCACCTTTTGCCAGTTAGTTTACCACTTGCGGCATGCTTTGCGCTTGGAGCAGCCTTAGGTCCAACAGATGCCGTTGCCTTTATATCGATTGCTAAGAGGTTTCAATTTCCTAAACGAGCAGAGAATATCCTCAAATTGGAAGGTCTTTTAAATGACGCTAGTGGTCTAGTTTCCTTCCAGTTTGCTTTAACAGCCCTTTTAACAGGTTATTTTTCCTTAACAAAAGCTAGTCTCAAGTTAGCATTGGCCATAATGGGTGGTTTTTTAATTGGCTTGCTTTTTGCTTTTCTAACGAGGTTATGTCTCACTGTCCTAGAGAAATTTGATGCTGCTGATGTTACAGGGGCTCTACTTTTGGAATTAACCTTACCTTTTGTTGCTTATTTCGTTGCTGATTTGTTGGGATTTTCAGCTATTATTGCGGTGGTAGTGGCAGGAGTAATGCAAGCAAATCGTTTGAAAAAAGTGACTCTCTTTGATGCTCAAGTAGATCGCGTTACCTCTGTTATTTGGGAAACCTTAAATTTTATTTTAAATGGTTTAGTTTTCTTAATATTTGGAAGAGAACTGACACGTATCATTGGTCCTCTTTTAACAAGTAACGCTTATAGTAATTTTGATCTTATTAGTATTGTTGTTTTAGTTACTTGCACACTTTTTCTAGTTCGCTTTCTAGCAGTTTCTTGCTTTTATGCTTGGAGATCTTTCAAATACCATAAATCATTTAAAAAGTATTGGAGAGAGATTCAACTGTTGACTTTTTCAGGAGTTAAAGGAAGTGTTTCCATAGCAACAATACTCTTATTACCCAAGCACTCAGTCATAGGAGAGTTGGGGTATAGTTTGATTCTTTTCACTGTTGGTGCAGTAACACTAATGAGTTTTTTAACGGGACTTTTAGTATTACCAAAGTTAGCGCCTCCCTTACAGGTGAAAGATGATTATTTAATACGTCTATCGATTTTAACAAAAGTATTATCTGTCTTAGAAGAAGACGGTAAGATTTCTGAAAATCAAGCTTCATTTTATGCAGTTATAGATAATTATAATAGCCGTATTCGTCATCTCATTTTAGAACAAGAATCTAGTGACATTAAGAAGGACTTAGCTGAATTGCAACTGATGATGCTTAGTATAGAAAGCGACGGGCTTGAAGCTGCTTATCGTTATGGCAATATTTCTATCAAAGAATATCGTATTTACCAGCGTTATTTAAAATACTTAGAACGTCAAGTTAATCGTAGCTTTGTGTCAAATATCACTTATAGTTTAACGATTCTTATGCGTGTTATTCGTGGTATTGTTCATGAGTTTTTAACATTTGGACAAGGAATACGAAATCGGAAAAAACATTTCAAAAATAGGAAACGGTTGCTAGCAGAAGTCAATCGTCAGCACTTAACAGATTTGTACTTATCAAATAATGATCTCATTTTAGAAACGCTAGAAGATATGGAAGGTTATTATAATGCAACTTTGATAGATTTCTTACAAAATGAACGCATTCGAGACGCAGAATTAATTAAATCAGGTTTATTTGTAGAACGTGTCATTGCACGCATAACGCCAGATATTTTAAATGAAACCCTAAGAGGATATTACTTGGAACGCAGAACAATCTCTGAATTTGAAAGGGACGGTTTAATTAGTTCTAAAGAGTCTCAAATTTTAAGGGATAATGTCAATGAATTAGAAAGCTATTCATTAAGAGATAGTCAATCTTCTATACCTTATCAATTATTGGATTTAAAAAAA

SEQ ID NO: 12342 - protein, 689 aa, Streptococcus agalactiae
MEETILIVSFLLFLILSNVINRIFPKLPLPFIQLVFGILSGLVFHKSQVHIDPELFLAFVIAPLNFREGQESDIGSFIKYRTIILYLILPTVFLTAIVVGYVAGHLLPVSLPLAACFALGAALGPTDAVAFISIAKRFQFPKRAENILKLEGLLNDASGLVSFQFALTALLTGYFSLTKASLKLALAIMGGFLIGLLFAFLTRLCLTVLEKFDAADVTGALLLELTLPFVAYFVADLLGFSAIIAVVVAGVMQANRLKKVTLFDAQVDRVTSVIWETLNFILNGLVFLIFGRELTRIIGPLLTSNAYSNFDLISIVVLVTCTLFLVRFLAVSCFYAWRSFKYHKSFKKYWREIQLLTFSGVKGSVSIATILLLPKHSVIGELGYSLILFTVGAVTLMSFLTGLLVLPKLAPPLQVKDDYLIRLSILTKVLSVLEEDGKISENQASFYAVIDNYNSRIRHLILEQESSDIKKDLAELQLMMLSIESDGLEAAYRYGNISIKEYRIYQRYLKYLERQVNRSFVSNITYSLTILMRVIRGIVHEFLTFGQGIRNRKKHFKNRKRLLAEVNRQHLTDLYLSNNDLILETLEDMEGYYNATLIDFLQNERIRDAELIKSGLFVERVIARITPDILNETLRGYYLERRTISEFERDGLISSKESQILRDNVNELESYSLRDSQSSIPYQLLDLKK

SEQ ID NO: 12343 - protein, 234 aa, Streptococcus agalactiae
ATGTCTCAATTATCTTTGGAAGAACGATTGAATCGACTAAAAGATAAATACCTTTCTTCTAAAAATCAAGAATTTTCAAATGTTCACTCAAGTAAAGTAAAGAAGAAAAAGAAGAAATTAATAATACTTGAAAAAGAAAGATGTCGCTGTCGATTGGAGAGAGAAGATACTAAAAAAATCGATGATAAAATTGAGAAATTGAAGAAAGAATTGATAGATGTTATGAAGGAGGAA

SEQ ID NO: 12344 - protein, 78 aa, Streptococcus agalactiae
MSQLSLEERLNRLKDKYLSSKNQEFSNVHSSKVKKKKKKLIILEKERCRCRLEREDTKKIDDKIEKLKKELIDVMKEE

SEQ ID NO: 12345 - protein, 951 aa, Streptococcus agalactiae
ATGAAAAAATTAACAAAAGGCAGCCACATTCGTGTTCTTAGTCCCTCTTCTTCCATTGAACGTCTGGGTGGTTTTGAGGCTAACCTATTAGCCAAAGAAGTACTAGAAAAGCTGGGATTTCAAGTGTCATTCTCTAAGCACTATCTAGAAAATGATATCCTCTATTCTGCTTCGATTGCTAGCCGCGTAGAAGATTTACATGAAGCATTTGCCGACCCTTCTGTTGATGCCATATTAGCAACCATTGGCGGATTCAATTCCAACGAGCTTTTACCATATTTAGATTATGATTTAATCTCTAAGAATCCCAAAATAATTTGTGGTTACTCAGATTCAACGGCATTCCTTAATGCTATTTTTGCTAAAGCAAAAATCCAAACTTACATGGGTCCTGCTTATTCTTCTTTCAAAATGAAGGAAGGTCAACCTTACCAAACACAAACTTGGCTTACTGCCATGACAGAAAACCACTATGAACTTTGGCCTAGTGAAGAATGGTCTAGTGATCCCTGGTATGATCCCAGCAAACCACGCCAATTTTTCCCAACAGAATGGAAAATTTATAATCACGGAAAAGCTTCCGGTACGATTATCGGAGGTAATCTCTCTACGTTTGGCCTACTTCGAGGTACTCCTTATGCACCGAAAATTGAACGCTATGTCCTCTTGATTGAAGAGGCTGAGGAAAGTAATTTTTATGAATTTGACCGCAACCTTGCTGCAATTTTACAAGCTTATCCTCATCCACAAGCTATTCTTATGGGGCGCTTTCCTAAAGAATGCGGCATGACTCCACAAGTCTTTGAATATATCCTTTCAAAACATGCTATTTTCAAGGAAATTCCTGTTATTTATGATATGGATTTTGCGCATACCCAACCTCTTTTGACAGTGACTATTGGAGCTGAGATAAGCGTTGACACTACTACATTATCTTTATCTATAAAAGAA

SEQ ID NO: 12346 - protein, 317 aa, Streptococcus agalactiae
MKKLTKGSHIRVLSPSSSIERLGGFEANLLAKEVLEKLGFQVSFSKHYLENDILYSASIASRVEDLHEAFADPSVDAILATIGGFNSNELLPYLDYDLISKNPKIICGYSDSTAFLNAIFAKAKIQTYMGPAYSSFKMKEGQPYQTQTWLTAMTENHYELWPSEEWSSDPWYDPSKPRQFFPTEWKIYNHGKASGTIIGGNLSTFGLLRGTPYAPKIERYVLLIEEAEESNFYEFDRNLAAILQAYPHPQAILMGRFPKECGMTPQVFEYILSKHAIFKEIPVIYDMDFAHTQPLLTVTIGAEISVDTTTLSLSIKE

SEQ ID NO: 12347 - protein, 1893 aa, Streptococcus agalactiae
ATGATAAAATATCAAGATGATTTTTACCAAGCGGTTAATGGGGAGTGGGCTAAGACAGCTGTTATTCCTGATGACAAACCAAGGACAGGTGGTTTTTCTGATCTTGCTGATGACATTGAAGCATTAATGCTGTCAACGACAGATAAGTGGCTGGCTGATGAAAATAAACCAAGTGATACGATTTTAAATCATTTTATTGCTTTTCATAAAATGACAGCTGATTATCAAAAACGTGAAGAGGTAGGAGTATCACCAGTATTACCATTAATTGAAGAATATAAAGGCCTACAATCTTTCTCTGAGTTTGCATCAAAAGTTGCAGAATATGAACTAGAAGGTAAACCAAATGAATTTCCATTTGGTGTGGCTCCTGACTTTATGAATGCTCAATTGAATGTACTCTGGGCTGAAGCGCCTGGGATTATTTTACCAGATACAACTTATTATAGTGAAGATAATGAAAAAGGAAAGGAACTCTTTGCTCTTTGGCGTAAAAGTCAAGAAGACTTACTGCCTTTGTTTGGCCTTTCAGAACAGGAAATTAAAGATATCTTGGATAAGGTTTTAGCATTGGATGCAAAATTGGCACAATATGTCTTATCTCGCGAAGAGAGTTCGGAATATGTTAAACTTTACCATCCTTATAACTGGGAAGATTTCACAAAATTAGCACCTGAACTTCCATTAGATGCGATTTTCCAAAAGATATTAGGACAAAAACCAGATAAAGTTATTGTTCCTGAAGAACGTTTCTGGACAGAATTTGCATCTGACTATTACTCAGAATCTAATTGGGAATTATTAAAGGCAGATCTTATTTTATCAGCTGCGAATGCCTATAATGCTTACTTAACTGATGATATTCGTATCAAATCGGGAGTTTACAGTCGAGCTTTATCAGGCACACCACAAGCAATGGATAAGAAAAAAGCAGCTTACTACCTTGCTTCAGGACCTTACAATCAAGCTCTAGGTTTGTGGTATGCAGGGGAAAAATTCTCTCCAGAAGCTAAAGCTGATGTTGAGCATAAGATTGCAACGATGATTGATGTCTATAAGTCACGCTTAGAAAAGGCGGATTGGCTTGCACAGTCAACGCGAGAAAAAGCTATTGTGAAACTTAATGTTATCACGCCACACATTGGATACCCTGAGAAACTACCAGAGACTTATACTAAAAAAATCATTGATCCTAAACTATCGCTTGTCGAAAATGCTACTAATTTAGACAAAATTTCAATAGCCTATGGTTGGAGTAAATGGAATAAACCAGTTGATAGAAGTGAATGGCATATGCCTGCCCACATGGTCAATGCGTATTATGATCCACAACAAAACCAAATTGTCTTCCCAGCAGCCATTTTACAAGCACCATTTTATGCTTTAGAGCAAAGTTCATCAGCAAATTATGGGGGAATTGGTGCAGTGATTGCACATGAAATATCACACGCTTTTGACACTAATGGAGCTTCATTTGATGAACATGGAAGTTTGAATAATTGGTGGACTGATGAAGATTTTGAAGCTTTCAAAAAACTTACAGATAAAGTAGTTGAGCAGTTTGATGGACTAGAATCTTATGGCGCAAAAGTCAATGGTAAACTAACAGTATCAGAAAATGTTGCAGATTTAGGTGGAGTTGCTTGTGCTTTAGAAGCTGCGCAGCGTGAGTCAGATTTTTCAGCGAGGGATTTCTTTATTAACTTTGCGACAATTTGGCGTATGAAGGCACGTGATGAGTATATGCAAATGTTAGCTAGTGTAGATGTTCACGCCCCAGCACAATGGCGAACTAATATTACAGTAACGAATTTTGAAGAATTCCATAAAGAGTTTGATGTTAAAGATGGTGATAACATGTGGCGTCCAGTTGAAAAACGTGTTATTATTTGG

SEQ ID NO: 12348 - protein, 631 aa, Streptococcus agalactiae
MIKYQDDFYQAVNGEWAKTAVIPDDKPRTGGFSDLADDIEALMLSTTDKWLADENKPSDTILNHFIAFHKMTADYQKREEVGVSPVLPLIEEYKGLQSFSEFASKVAEYELEGKPNEFPFGVAPDFMNAQLNVLWAEAPGIILPDTTYYSEDNEKGKELFALWRKSQEDLLPLFGLSEQEIKDILDKVLALDAKLAQYVLSREESSEYVKLYHPYNWEDFTKLAPELPLDAIFQKILGQKPDKVIVPEERFWTEFASDYYSESNWELLKADLILSAANAYNAYLTDDIRIKSGVYSRALSGTPQAMDKKKAAYYLASGPYNQALGLWYAGEKFSPEAKADVEHKIATMIDVYKSRLEKADWLAQSTREKAIVKLNVITPHIGYPEKLPETYTKKIIDPKLSLVENATNLDKISIAYGWSKWNKPVDRSEWHMPAHMVNAYYDPQQNQIVFPAAILQAPFYALEQSSSANYGGIGAVIAHEISHAFDTNGASFDEHGSLNNWWTDEDFEAFKKLTDKVVEQFDGLESYGAKVNGKLTVSENVADLGGVACALEAAQRESDFSARDFFINFATIWRMKARDEYMQMLASVDVHAPAQWRTNITVTNFEEFHKEFDVKDGDNMWRPVEKRVIIW

SEQ ID NO: 12349 - protein, 981 aa, Streptococcus agalactiae
ATGATTGACAAATATTATAATTGGGCAACGCTTGGAACCGGCGTTATTGCCAACGAATTAGCCCAAGCACTGGAAGCACGTGGACAAAAATTATATTCTGTAGCTAATAGAACTTACGACAAAGGACTTGAATTTGCTAACAAATATGGTATCCAAAAAGTTTATGATCACATAGATCAAGTATTTGAAGACCCTAAAGTGGATATCATTTATATCTCTACTCCCCACAATACTCACATCTCATTTTTACGAAAGGCTTTAGCAAATGGTAAGCACGTTCTTTGCGAAAAATCTATTACTTTAAACAGCACTGAACTTAAAGAAGCCATAGATTTAGCCGAAACTAACCATGTTGTCTTAGCTGAAGCCATGACTATTTTTCATATGCCAATTTACCGCCAATTAAAAACATTAGTTGATAGTGGAAAATTAGGACCGTTAAAAATGATTCAAATGAATTTCGGAAGTTATAAAGAATATGATATGACTAACCGTTTTTTCAGTCGTGACCTAGCAGGAGGTGCTTTGCTGGACATTGGTGTTTATGCACTTTCTTGTATTCGCTGGTTTATGTCAGAAGCACCTCACAACATTACCTCTCAAGTTACATTTGCACCAACAGGGGTTGATGAACAAGTTGGTATCCTACTAACCAATCCAGCAAATGAGATGGCGACTGTCAGCCTTAGTTTACATGCAAAACAACCTAAACGAGCAACTATCGCTTACGATAAAGGCTACATTGAACTTTTTGAATATCCGCGAGGACAAAAGGCAGTTATTACTTATACTAAGGATGGGCATCAAGATATTATCGAAGCTGGCAAAACTGAAAATGCTCTCCAATATGAGGTAGCTGATATGGAAGAAGCCGTTTCAGGAAAAACTAACCACATGTACTTAAACTATACCAAAGACGTTATGGATATCATGACACAGCTACGTCAAGAATGGGGATTTACCTACCCAGAAGAAGAAAAA

SEQ ID NO: 12350 - protein, 327 aa, Streptococcus agalactiae
MIDKYYNWATLGTGVIANELAQALEARGQKLYSVANRTYDKGLEFANKYGIQKVYDHIDQVFEDPKVDIIYISTPHNTHISFLRKALANGKHVLCEKSITLNSTELKEAIDLAETNHVVLAEAMTIFHMPIYRQLKTLVDSGKLGPLKMIQMNFGSYKEYDMTNRFFSRDLAGGALLDIGVYALSCIRWFMSEAPHNITSQVTFAPTGVDEQVGILLTNPANEMATVSLSLHAKQPKRATIAYDKGYIELFEYPRGQKAVITYTKDGHQDIIEAGKTENALQYEVADMEEAVSGKTNHMYLNYTKDVMDIMTQLRQEWGFTYPEEEK

SEQ ID NO: 12351 - protein, 1074 aa, Streptococcus agalactiae
ATGATATCTTATTATAGAGATAAGGGCTTACCATCACCCCAAGTTGAATTATTATTTTCAATTCCTTCGATGGCTATTATCTTCATCTTGCTTATCACACCTTGGTTAAGTAAAAAACTTTCTGAGAAACATATGATTATCTTTGGGCTATTGCTAACAGCATTAGGGGGAGGATTGCCGGTTGTCAGTCAGAACTACCTTTTAGTATTTGTATCGCGTCTTTTATTGGGGAGTGGTATTGGTTTTATTAATGCTAGGGCCATTAGTGTGATTAGTGAATATTATCAAGGCAAAGAAAGAAGAAAACTCTTAGGATTAAGGGGGTCTTTTGAAGTTTTAGGAAATGCTGGTTTGACAGCTTTAGTTGGGCTATTGTTGACTTTTGGTTGGTCCAAATCATTTATGATTTATTTTTTAGCTTTACCAATCTTAGTTCTATATCTTGTTTTTGCGCCTAAGAAAGTGGTGAAAGGTACAAATGATAAGATTAAAACTAAAGGTCAAAAAGTCCCTAAAGCTGATTTGACTTATATTGTCGCCTTAGCTATTTTAGCAGGATTTGTCATAACTATAAATACTGGGATTAATCTTAGGATACCTCTGCTAGTAGTAGAATTTGGTTTGGGTACGCCAGCTCAAGCTAGTCTTGTTCTTAGTGCGATGATGCTTATGGGAATAATAGCAGGTATGAGTTTTGGTCAGTTGATAGCTATGTTTCATAAGCAATTAATTCCAATCTGCCTCGTCTTATTTTCTTTAACATTGCTTGGAGTTGGATTGCCTTCTAATCTAATGGTACTAACAATTAGTGCGATGGCATCAGGTTTCCTTTACAGCCTGATGGTCACTGCTGTGTTTAGCCTAGTAGCAGACCGTGTTGAATATTCGTTGGTTGGTTCTGCAACGACATTAGTTTTAGTATTTTGTAATATTGGTGGAGCTAGTGCGGCTATTCTTCTGTCTTGTTTTGATCATTTACTAGGACAAATAAATGCAGTTTTCTATGTTTATGCTATTTTGAGTTTAGCAGTTGGTATGATTTATTTCTTTAAATGCCTATTTTTTAAGAAAATG

SEQ ID NO: 12352 - protein, 358 aa, Streptococcus agalactiae
MISYYRDKGLPSPQVELLFSIPSMAIIFILLITPWLSKKLSEKHMIIFGLLLTALGGGLPVVSQNYLLVFVSRLLLGSGIGFINARAISVISEYYQGKERRKLLGLRGSFEVLGNAGLTALVGLLLTFGWSKSFMIYFLALPILVLYLVFAPKKVVKGTNDKIKTKGQKVPKADLTYIVALAILAGFVITINTGINLRIPLLVVEFGLGTPAQASLVLSAMMLMGIIAGMSFGQLIAMFHKQLIPICLVLFSLTLLGVGLPSNLMVLTISAMASGFLYSLMVTAVFSLVADRVEYSLVGSATTLVLVFCNIGGASAAILLSCFDHLLGQINAVFYVYAILSLAVGMIYFFKCLFFKKM

SEQ ID NO: 12353 - protein, 177 aa, Streptococcus agalactiae
ATGTCATATATTTCTAGTTTAATATTGATTATACTTTATTTATATAAAAAAAGACATCAGAAAGAGGTATTGTCACTTGAAAATCTTTATGGAGAAGCTAAGTTTACTCTCTTTATCACTTATCTTGCTATCAACTTTTTCGACATCACCAGCCCTACCACAAATGATATCTTATTA

SEQ ID NO: 12354 - protein, 59 aa, Streptococcus agalactiae
MSYISSLILIILYLYKKRHQKEVLSLENLYGEAKFTLFITYLAINFFDITSPTTNDILL

SEQ ID NO: 12355 - protein, 642 aa, Streptococcus agalactiae
ATGGATATAGAAAACTACTGCCAAGACTACTGTTTGGAGACTATCTTTCCAAAACATTATTTCAAGGATTTACAAGTAATCACCCTAACTGCTGGCCAACCCGTCTGTAAACAGGGAGAACAATTAGAATACTTGCACTACATCGTCAAGGGACGTTTTAAAATTGTACGTCGACTCTTTAATGGCAAAGAACATATTTTAGATATTAAAACAAAACCAACACTGATTGGTGATATTGAACTTTTGACTAATAGACAAATTGTATCATCTGTTATTGCCTTAGAGGATCTTACAGTCATTCAATTATCACTTAAAGGACGGAAAGAGAAACTGTTAACAGACGCAACTTTCCTCCTAAAACTTAGTCAAGAGCTAGCTCAGGCTTTTCATGATCAAAACATCAAAGCGTCTACTAATCTAGGGTATACCGTCAAAGAGTTACTTGCAAGTCATATTTTAGCAATTGAAGAACAAGGTTACTTTCACCTTGAGTTAAGTAGTTTAGCTGATTCGTTTGGCGTCAGTTATCGTCATTTATTAAGAGTTATCCACGATATGGTCAAAGAAGGCCTTATCCAAAAAGAAAAACCAAAATACTTTATCAAAAATCGTTTCGCACTAGAATCATTAAATATTCAGCCA

SEQ ID NO: 12356 - protein, 214 aa, Streptococcus agalactiae
MDIENYCQDYCLETIFPKHYFKDLQVITLTAGQPVCKQGEQLEYLHYIVKGRFKIVRRLFNGKEHILDIKTKPTLIGDIELLTNRQIVSSVIALEDLTVIQLSLKGRKEKLLTDATFLLKLSQELAQAFHDQNIKASTNLGYTVKELLASHILAIEEQGYFHLELSSLADSFGVSYRHLLRVIHDMVKEGLIQKEKPKYFIKNRFALESLNIQP

SEQ ID NO: 12357 - protein, 612 aa, Streptococcus agalactiae
ATGTCTGCTATTGATAAATTAGTAAAAGCTAGTCATTTAATTGACATGAATGACATTATCCGCGAAGGCAATCCAACCCTTCGCAAAGTGGCTGAAGAAGTCACATTCCCACTTTCTGAGAAAGAAGAAATTCTCGGAGAAAAAATGATGCAATTTTTAAAACACTCTCAAGATCCAATTATGGCTGAGAAGCTAGGCTTACGTGGTGGTGTTGGTTTAGCCGCACCACAATTAGACATCTCAAAACGCATCATTGCCGTCCTTGTTCCAAACGTTGAGGATGCTCAAGGAAATCCACCTAAAGAAGCTTATAGCCTCCAAGAAGTAATGTACAACCCTAAAGTTGTATCGCATTCTGTTCAAGATGCTGCTTTATCTGACGGGGAGGGATGCCTATCAGTAGATCGTGAAGTACCTGGCTATGTCGTCCGCCACGCGCGTGTAACTATTGAATATTTCGACAAAACTGGTGAAAAACATCGACTCAAATTAAAAGGTTACAACTCTATTGTTGTTCAACATGAAATTGACCACATTGATGGTATTATGTTTTACGACCGTATCAATGAGAAAAATCCTTTCGCTGTCAAAGAAGGCTTACTTATTTTAGAA

SEQ ID NO: 12358 - protein, 204 aa, Streptococcus agalactiae; identical to SEQ ID NO: 3398

SEQ ID NO: 12359 - protein, 999 aa, Streptococcus agalactiae
ATGTCTAAAAAAATGACCATTAATGACATCGCTCAATTATCAAAAACTTCCAAAACAACGGTTTCTTTTTTCTTGAATCAAAAATTTGAAAAAATGTCGGATGAGACGAGGCAACGTATTCAAGAGGTGATTGATGAAACAGGTTATAGACCAAGTACGATAGCAAGAAGTCTAAATTCTAAAAAAACAAAACTACTAGGTGTCTTAATTGGAGATATAACAAACACATTTTCAAATCAAATTGTAAAAGGAATTGAGCATATCACCAAACAAAAAGGCTATCAAATTATTGTGGGTAATAGTAATTACGATGCCAAAAGTGAAGAAGATTATATTGAAAATATGTTAAATTTAGGTGTTGATGGTTTCATTATTCAGCCTACATCAAATTTTCGAAAGTATTCTCGTATTTTAAAAGAAAAAAAGAAACCAATGGTATTTTTTGATAGTCAACTTTATGAACATAAGACGAGTTGGGTTAAGGCTAATAACTATGATGCTGTTTATGATATGACACAGGAGTGTCTAAATCGAGGGTATAAAAAGTTTATTATGATTACTGCTGATACGAGCTTGCTTAGTACACGTATTGAGAGAGCTTCGGGATTCATGGATGCTTTAAAGGACAATGGTTTCGGTTATGACACTTTGGTGATTGAAGATGATGATCATTCAAAAAGTGATATAGAAGACTTTCTAAAAGCGGTAGTTCCAGATAAGGAGGAGACATTAGTATTTGCACCAAATTGTTGGGCTTTACCAATGGTTTTTACTGCCATGAAGAATCTCAATTTTGATATGCCACGAGTTGGTTTAGTTGGGTTTGACAATATTGAATGGACAGACTTTTCATCTCCTAAAGTGTCAACAATTGTCCAGCCGGCTTATGAAGAAGGCGAACAAGTAGCACAGATTTTGATTAATCGTATTGAAGGAGATGACTCCGTCGATAACCAACAGATTGTAGATTGCCAGATGTTTTGGAAAGAGTCGACTTTT

SEQ ID NO: 12360 - protein, 333 aa, Streptococcus agalactiae; identical to SEQ ID NO: 3400

SEQ ID NO: 12361 - protein, 1902 aa, Streptococcus agalactiae
ATGAAAGATCGCTTATATAATAAATTCAAGGATTTTGATAGGGAATTTTGTCAAAAGTATATTAAAACATACCAATCTAATGCCTATCAAGAAATGAAAGCCTCTGTTAATTTGATGATGAGGAACACTTTTGTATTTAATGATAATTGGGATATGGAACCTTGTTCTAAAGCATATTGTCTTGATCCTTTGGAGTGGGATAAGCCAGTAACAGATGATCCAGAATGGTTGTATATGCTAAATCGTCAAACTTATCTTTTTAAATTCCTGGTGGTCTACATTGTTGAAGGCGATAAGTCTTACCTTAGACAAATGAAATATTTTATGTACCATTGGATTGATTGTCAATTTACACTAAAGCCAGAAGGGGCGGTAAGTCGTACTATTGACACTGGGATACGTTGCATGTCATGGCTCAAAGTTTTGATTTTTTTAGATTATTTTGGATTAATAACAGAAACTAAAAAAATTAAACTATTAACTAGTTTACGGGAGCAGATAACTTATATGAGGGACTATTATCGTGAAAAAGATAGTCTAAGTAACTGGGGAATTTTACAAACAACAGCAATATTGGCGTGTTTATACTATTATGAAGATGAATTAAATCTACCTGAAATTCAGAGTTTTGCTGAAGAAGAATTATTACTTCAAATCAAGCTTCAAATTTTAGATGACGGGAGCCAGTATGAACAATCAATTATGTATCATGTAGAAGTCTTGAAGTCCTTAATGGAACTAGTTATCCTTGCGCCTAAATATTATCTACCATTAGAAGAAACTATTGAAAAAATGGTTACCTATCTAATTGCTATGACTGGTCCGGATTATTGTCAACTAGCTATAGGGGACAGTGATGTGACTGATACTCGTGATATTCTAACTTTGGCAACGCTTGTGTTGAAATCTTCTAAAACAAAATCATTTTCTTTTGATAATGTTAATTTAGAAACTTTGCTTTTGTTTGGGAAGCCATCAATTTATCTTTTTGAAGAAATACCACGTGCGACAATAGGAGAGTCTGCTTATCTTTTTCCAGATTCTGGTCATGTGTGTTTACGTGATGATAGGCGTTATATATTTTTTAAGAACGGTCCATTTGGTAGCGCTCATACTCATAGTGATAATAATAGTGTTTGTCTCTATGATAAAAAGAAACCTATTTTCATTGATGCAGGAAGATATACTTACAAAGAAGAACAACTAAGGTATGATTTTAAACGTTCGACTAGTCATTCAACATGTACCCTTGATGAGCAACCCTTAGAAATGATCAAGGACTCTTGGACATATACTTCCTATCCAAAATGTGACTATTGTCAGTTGACTTCAAAGGATAGGTACCATTTGGTCGAAGGACAACTACATGTCCAAAGAGCTTCTGATATCTATTACCATAAGCGATGGTTGTTAACTTTACCGCAGGCCATTACCTTAGTTATTGATAAGGTGAGTTGTCCAGGAGAGCATGTCTTAACAAATCAATATATTTTAGATGATCAGGTCATTTATGAAAATGGGCTTGTTAACGACTTGAAATTAGTAAGTCCTACGACCTTTAATCTAGAAGATTGCCTTATTTCTAAGCGGTATAATCAATTGACAGAAAGTCATAAATTAGTTAAGAAAATAAAATTTGTTGATGAGGTGATGGATTATACCTTGATAGTTGATCGGAACTGTCAGGTGAAATGTGTTCCTTTAGTGCAAACGAACAGTCATAAGGAACTAAGTAATAGCATTGCATTTGATATTAGGTCTCAAGACTTTCATTATTTAATTGGAGTGCTTATGGATGATATTATCTTTGGGGATAAACTCTATTTGATGCAAGGGATAAAATGCAAAGGAAAAGTCATTGTATATGATAAAAATAATGGCAAAATGAGTCGTTTAAAAAAT

SEQ ID NO: 12362 - protein, 634 aa, Streptococcus agalactiae
MKDRLYNKFKDFDREFCQKYIKTYQSNAYQEMKASVNLMMRNTFVFNDNWDMEPCSKAYCLDPLEWDKPVTDDPEWLYMLNRQTYLFKFLVVYIVEGDKSYLRQMKYFMYHWIDCQFTLKPEGAVSRTIDTGIRCMSWLKVLIFLDYFGLITETKKIKLLTSLREQITYMRDYYREKDSLSNWGILQTTAILACLYYYEDELNLPEIQSFAEEELLLQIKLQILDDGSQYEQSIMYHVEVLKSLMELVILAPKYYLPLEETIEKMVTYLIAMTGPDYCQLAIGDSDVTDTRDILTLATLVLKSSKTKSFSFDNVNLETLLLFGKPSIYLFEEIPRATIGESAYLFPDSGHVCLRDDRRYIFFKNGPFGSAHTHSDNNSVCLYDKKKPIFIDAGRYTYKEEQLRYDFKRSTSHSTCTLDEQPLEMIKDSWTYTSYPKCDYCQLTSKDRYHLVEGQLHVQRASDIYYHKRWLLTLPQAITLVIDKVSCPGEHVLTNQYILDDQVIYENGLVNDLKLVSPTTFNLEDCLISKRYNQLTESHKLVKKIKFVDEVMDYTLIVDRNCQVKCVPLVQTNSHKELSNSIAFDIRSQDFHYLIGVLMDDIIFGDKLYLMQGIKCKGKVIVYDKNNGKMSRLKN

SEQ ID NO: 12363 - protein, 813 aa, Streptococcus agalactiae
ATGACTGGATCTAAAAAATTAGCAAAAAGTGATTACACTAAAACAGCTTTACGTGCCTTTTATTTACAAAATGGCTTTAATTACAGTAACTATCAAGGTCTTGGTTATGCTAATGTCATATATCCAGCTCTCAAAAAATATTATGGAGATGACAAAAAAGCTTTAGCGGGAGCTCTAGAAGAAAATGTGGAGTTTTACAATACAAACCCTCATTTCTTACCTTTTGTAACTAGCTTACATTTAGCAATGCTTGATAATGAGCGGCCAGAAGAAGAAATTCGCGGTATTAAGATGGCGCTTATGGGTCCTCTTGCAGGTATCGGTGATTCTTTATCACAATTTTGCTTAGCACCCTTGTTCTCAACGATTGCAGCCTCTTTAGCGACAGATGGTTTGGTGGTGGGACCGATTCTGTTCTTTGTGGCTATGAATACTATTTTAACGGGAATTAAATTAGTTACTGGCATGTATGGTTATCGTCTTGGGACCAGTTTTATTGATAAATTGAGTGAACAAATGTCAGTTATCTCACGGGCAGCTAATATCGTTGGTGTAACGGTCATCTCAAGTTTAGCTGCAACACAAGTTAAGCTTACAATCCCTTACACTTTTGCTCCAGAAAAAGTAACTAGTACAACGCAAAAGATTGTTACTGTCCAAGGTATGCTTGATAAAATTGCACCAGCTCTACTTCCAGCACTCTACACTTTCCTTATGTTTTACCTTATTAAAAATAAAAAATGGACAACTTATAAGTTAGTTATCCTTACAGTTATTATTGGTATCCTTGGTAGCTGGTTAGGTATTTTAGCT

SEQ ID NO: 12364 - protein, 271 aa, Streptococcus agalactiae
MTGSKKLAKSDYTKTALRAFYLQNGFNYSNYQGLGYANVIYPALKKYYGDDKKALAGALEENVEFYNTNPHFLPFVTSLHLAMLDNERPEEEIRGIKMALMGPLAGIGDSLSQFCLAPLFSTIAASLATDGLVVGPILFFVAMNTILTGIKLVTGMYGYRLGTSFIDKLSEQMSVISRAANIVGVTVISSLAATQVKLTIPYTFAPEKVTSTTQKIVTVQGMLDKIAPALLPALYTFLMFYLIKNKKWTTYKLVILTVIIGILGSWLGILA

SEQ ID NO: 12365 - protein, 864 aa, Streptococcus agalactiae
ATGGATATTAGTATTCTTCAGGCTGTCTTAATTGGACTGTGGACGGCTTTCTGTTTTAGTGGCATGTTGCTTGGCCTCTATACAAATCGTTGTATCGTTCTCTCTCTAGGCGTTGGTGTTATTTTAGGAGATATTCAAACAGCTTTGGCAGTTGGAGCAATATCTGAACTGGCTTACATGGGATTTGGTGTGGGAGCGGGAGGGACAGTTCCTCCAAACCCAATCGGTCCTGGGATTTTTGGAACTTTGATGGCTATTACAACAGCTGGAACTAAAGGAAAAATCACACCGGAAGCTGCTCTTGCATTATCAACCCCAATTGCAGTTGGTATTCAATTTCTTCAAACAGCAACTTATACTGCTTTTGCAGGGGCGCCTGAAACAGCTAAAAAAGCTTTGCAAGCAGGTAATTTCCGAGGATTTAAAATTGCAGCAAATGGTACAATTTGGGCATTCGCTGGATTGGGATTTGGTTTAGGAGTACTGGGTGCTCTTTCAACGCAAACTTTGACAGATTTATTTGCTCTCATTCCCCCTGTTTTGCTTAATGGTCTAACCTTAGCTGGGAAAATGCTTCCTGCAATTGGTTTTGCGATGATTCTCTCTGTAATGGCTAAAAAAGAACTCATTCCTTATATCCTACTTGGATATGTTCTAGCTGTTTATTTTGGTTTGCCAGTTCTAACTCCAACAGCAAATGGAGACGGAGTTTTAACATCAGTGGCTACTAACAGTGTGCTTGGGGTTCCAACTATCGGGGTAGCTATAATTGCAACAATATTTGCTTTGCTTGATATTTTCAGAAAACCAGCTGCACTTACTAAAGAAACTAAGACAGAAGGAGACAACCAAGATGACTGGATC

SEQ ID NO: 12366 - protein, 288 aa, Streptococcus agalactiae
MDISILQAVLIGLWTAFCFSGMLLGLYTNRCIVLSLGVGVILGDIQTALAVGAISELAYMGFGVGAGGTVPPNPIGPGIFGTLMAITTAGTKGKITPEAALALSTPIAVGIQFLQTATYTAFAGAPETAKKALQAGNFRGFKIAANGTIWAFAGLGFGLGVLGALSTQTLTDLFALIPPVLLNGLTLAGKMLPAIGFAMILSVMAKKELIPYILLGYVLAVYFGLPVLTPTANGDGVLTSVATNSVLGVPTIGVAIIATIFALLDIFRKPAALTKETKTEGDNQDDWI

SEQ ID NO: 12367 - protein, 492 aa, Streptococcus agalactiae; identical to SEQ ID NO: 8091

SEQ ID NO: 12368 - protein, 164 aa, Streptococcus agalactiae; identical to SEQ ID NO: 3408

SEQ ID NO: 12369 - protein, 1194 aa, Streptococcus agalactiae
ATGATGAAAATAAAACCGGTCAAGGTTGAGTCAATTGAAAATCCAAAGCGTTTTTTAGACGGTAGATTATTAACTAAGATTGAAGTTGAGGGAGCGATTGAAAAAGCCTTGAAGCAACTTTATATTAATATTGATTACTTTGGTGAAGAGTATCCAACACCTGCAACATTCAATAATACTTATAAAGTTATGGATAACACAGAATGGACAAATGGTTTTTGGACAGGGTGCTTGTGGTTAGCTTATGAGTATAATCAGGATAAAAAGTTAAAAAACATAGCCCATAAAAATGTATTGTCATTTCTAAATCGTATTAATAATCGTATAGCATTAGATCACCACGACTTAGGATTTCTTTACACACCATCTTGTACAGCAGAATATCGTATCAATGGTGATGTTAAAGCTTTAGAAGCCACTATAAAAGCTGCAGATAAATTGATGGAGCGCTATCAAGAAAAAGGTGGATTTATTCAGGCTTGGGGAGAACTCGGGTATAAGGAACACTATCGCTTAATTATCGATTGCTTACTTAATATCCAACTCTTATTTTTTGCTTATGAACAGACAGGTGATGAAAAGTATAGACAAGTTGCGGTGAATCACTTCTACGCTTCAGCTAACAATGTGGTGCGTGATGATTCTTCTGCTTTTCATACTTTTTATTTCGACCCAGAAACTGGAGAACCGTTAAAAGGTGTCACACGACAGGGTTATAGTGATGAGTCATCTTGGGCAAGAGGGCAAGCATGGGGCATCTACGGTATTCCGCTTAGTTACCGGAAAATGAAAGATTATCAGCAGATTATCCTTTTTAAAGGTATGACAAACTATTTTCTAAATCGTTTACCTGAAGACAAGGTATCCTATTGGGACCTTATTTTTACGGATGGCTCAGGTCAGCCTAGAGATACATCCGCAACAGCAACGGCTGTGTGTGGAATTCATGAGATGCTTAAATATTTACCAGAAGTAGATCCTGATAAAGAGACATACAAATATGCTATGCATACAATGCTTCGTAGTCTAATTGAACAGTATAGTAATAATGAACTTATAGCAGGACGTCCTCTTCTATTGCACGGTGTGTATTCGTGGCATTCAGGTAAAGGAGTAGATGAAGGTAATATTTGGGGAGATTATTATTACTTAGAAGCCTTAATAAGATTCTATAAAGACTGGGAACTTTATTGG

SEQ ID NO: 12370 - protein, 398 aa, Streptococcus agalactiae
MMKIKPVKVESIENPKRFLDGRLLTKIEVEGAIEKALKQLYINIDYFGEEYPTPATFNNTYKVMDNTEWTNGFWTGCLWLAYEYNQDKKLKNIAHKNVLSFLNRINNRIALDHHDLGFLYTPSCTAEYRINGDVKALEATIKAADKLMERYQEKGGFIQAWGELGYKEHYRLIIDCLLNIQLLFFAYEQTGDEKYRQVAVNHFYASANNVVRDDSSAFHTFYFDPETGEPLKGVTRQGYSDESSWARGQAWGIYGIPLSYRKMKDYQQIILFKGMTNYFLNRLPEDKVSYWDLIFTDGSGQPRDTSATATAVCGIHEMLKYLPEVDPDKETYKYAMHTMLRSLIEQYSNNELIAGRPLLLHGVYSWHSGKGVDEGNIWGDYYYLEALIRFYKDWELYW

SEQ ID NO: 12371 - protein, 318 aa, Streptococcus agalactiae
ATGTCTTCTAATGATGTTAGAGTTGCTTTGCAAAGAGAGGTTATCGATTTCAAAGAAATTTTAGTATTGACTGATTTGCTAGGTGGGACCCCTTTCAATGTTTCTTCCGCCTTATCAGTAGAATATACAGATAAAAAGATAAAAGTTTTATCGGGCTTGAACCTTTCAATGTTAATGGAAGCTGTTTTATCTAGAACGATGTTTGAACATGTAGATGACCTTGTTGATAAAGTTATAACATCATCTCGTGAAGGAATTGTTGATTTTTCTAATTGCCTTGCTACACAAATTGCAGAAGTAACTTTTGAAGGAGGCATT

SEQ ID NO: 12372 - protein, 106 aa, Streptococcus agalactiae
MSSNDVRVALQREVIDFKEILVLTDLLGGTPFNVSSALSVEYTDKKIKVLSGLNLSMLMEAVLSRTMFEHVDDLVDKVITSSREGIVDFSNCLATQIAEVTFEGGI

SEQ ID NO: 12373 - protein, 810 aa, Streptococcus agalactiae
ATGACTGAACAATTCTTAAAAGACAACTTTTCACTAGAAGGTAAAGTCGCCTTAATAACAGGTGCTTCTTACGGCATTGGTTTTTCAATAGCAACTGCTTTTGCTAGAGCTGGAGCAACTATTGTCTTCAATGATATTAAGCAGGAACTCGTTGACAAAGGCATCTCCGCCTATAAAAAACTTGGCATTAAGGCCCATGGCTATGTTTGTGACGTTACAGATGAAGATGGAATCAACGAAATGGTGAACAAAATTTCTCAAGATGTTGGGGTAATTGATATTCTAGTTAACAACGCAGGTATCATAAAACGCACCCCTATGCTAGAGATGAGCGCTGCAGATTTTCGACAAGTTATTGATATTGATTTGAATGCTCCCTTTATCGTATCAAAAGCGGTATTACCTGGAATGATCCAAAAAGGACATGGTAAAATCATCAATATTTGCTCCATGATGAGTGAGCTTGGACGCGAAACAGTTGCTGCCTATGCTGCTGCCAAAGGGGGACTTAAAATGTTAACCAAGAACATCGCTTCTGAATACGGTTCTGCTAACATCCAATGTAACGGTATCGGGCCCGGCTATATTGCCACACCACAAACAGCTCCCCTTCGTGAACGTCAAGATGATGGTTCACGTCATCCATTCGACCAATTTATCATCGCTAAAACACCTGCCGCTCGCTGGGGTGAGGCAGAAGATTTAGGTGCACCAGCTATCTTCCTTGCTAGCGATGCATCAAACTTTATCAATGGTCACATACTCTATGTAGATGGCGGTATTTTAGCTTACATCGGTAAACAACCTCAA

SEQ ID NO: 12374 - protein, 270 aa, Streptococcus agalactiae
MTEQFLKDNFSLEGKVALITGASYGIGFSIATAFARAGATIVFNDIKQELVDKGISAYKKLGIKAHGYVCDVTDEDGINEMVNKISQDVGVIDILVNNAGIIKRTPMLEMSAADFRQVIDIDLNAPFIVSKAVLPGMIQKGHGKIINICSMMSELGRETVAAYAAAKGGLKMLTKNIASEYGSANIQCNGIGPGYIATPQTAPLRERQDDGSRHPFDQFIIAKTPAARWGEAEDLGAPAIFLASDASNFINGHILYVDGGILAYIGKQPQ

SEQ ID NO: 12375 - protein, 639 aa, Streptococcus agalactiae
ATGAAAATTGCATTAATCAACGAAAATAGCCAAGCAAGTAAAAATACTATTATCTACAAAGAATTAAAAGCGGTTTCTGACAAAAAAGGATTTGATGTTTTCAACTACGGGATGTATGGCAAAGAAGAAGAAGAAAGCCAGCTAACTTATGTACAAAATGGTTTACTGACTGCTATTTTACTTAATAGCGGTGCTGCAGATTTTATTATTACAGGCTGTGGGACAGGAATTGGAGCGATGCTTGCTTGTAATAGTTTTCCTGGCGTAGTCTGTGGATTCGCTGCTGATCCTGTCGACGCTTACTTATTCTCTCAAGTAAACGGAGGAAATGCTCTTTCTCTTCCTTTTGCTAAAGGATTTGGGTGGGGAGCTGAATTGAATCTGAGGTATTTATTTGAACGTCTTTTCGAAGATGAAAAAGGAGGGGGATACCCTAAAGAGAGGGCTGTGCCTGAGCAACGCAATGCACGTATCCTTAGCGAAGTAAAACAGATTACTTACAGAGATTTACTCTCTGTTTTAAAAGAAATTGATCAAGATTTCTTAAAGGAAACCATTTCTGGGGAGCATTTCCAAGAATATTTCTTCGCTAATTGCCAAAATCAAAATATAGCAGACTACTTGAAATCTGTCTTAGAC

SEQ ID NO: 12376 - protein, 213 aa, Streptococcus agalactiae
MKIALINENSQASKNTIIYKELKAVSDKKGFDVFNYGMYGKEEEESQLTYVQNGLLTAILLNSGAADFIITGCGTGIGAMLACNSFPGVVCGFAADPVDAYLFSQVNGGNALSLPFAKGFGWGAELNLRYLFERLFEDEKGGGYPKERAVPEQRNARILSEVKQITYRDLLSVLKEIDQDFLKETISGEHFQEYFFANCQNQNIADYLKSVLD

SEQ ID NO: 12377 - protein, 1005 aa, Streptococcus agalactiae
ATGTCTAAGATTCTTTTTTTCGGTGAACCTCTCATTCGCATCACTCCAAAAGAAAATGACTATTTTGCAGATAGTATCTCAACTAAACTATTCTATGGTGGCTCTGAAGTTAATATCGCAAGAGCTCTACAAGGCTTTGGGCAAGATACTAAACTCCTCTCAGCCTTACCCAATAATCCCATAGGTAATAGTTTTCTTCAATTTTTAAAAGCACAGGGTATTGATACTCATTCTATTCAGTGGGTTGGAGAACGTGTTGGGTTATATTTCTTAGAAAATTCCTTTGCTTGCAGAAAAGGTGAGGTGGTCTACGACCGCGATTATAGTAGTTTACATGACTTTAGGATAAACCAAATTGATTTCGATCAATTATTTGAAGGAGTTTCTCTCTTTCATTTTAGTGGTATTACACTATCATTGGATGAGTCTATCCAAGAGATAACACTGCTTCTTTTAAAAGAAGCTAAAAAAAGAGAGATAACAATCTCCTTAGATCTCAATTTTCGCAGTAAACTAATTTCTCCTAAAAATGCCAAAATCCTTTTTTCTCAGTTCGCTACCTTTGCGGATATTTGTTTTGGTATTGAACCTCTTATGGTTGACTCACAGGACACTACCTTCTTCAATCGCGATGAAGCTACAATAGAGGACATCAAAGAACGAATGATTTCTCTTATAAATCACTTTGACTTTCAAGTCATTTTCCATACTAAACGTCTACAGGATGAATGGGGACGAAACCACTACCAAGCTTACATAGCAAATCGTAAACAAGAGTTTGTCACTTCAAAAGAAATCACCACAGCTGTAAACCAGAGAATTGGAAGCGGAGATGCTTTTGTGGCGGGAGCGCTATATCAACTACTTCAGCACTCAGACAGCAAGACAGTCATTGATTTCGCTGTCGCTAGTGCATCTTTAAAATGTGCTTTGGAAGGGGACAATATGTTTGAGACCGTTGCCGCAGTTAACAAAGTACTAAATCAATCGAAAGACATTATTCGT

SEQ ID NO: 12378 - protein, 335 aa, Streptococcus agalactiae
MSKILFFGEPLIRITPKENDYFADSISTKLFYGGSEVNIARALQGFGQDTKLLSALPNNPIGNSFLQFLKAQGIDTHSIQWVGERVGLYFLENSFACRKGEVVYDRDYSSLHDFRINQIDFDQLFEGVSLFHFSGITLSLDESIQEITLLLLKEAKKREITISLDLNFRSKLISPKNAKILFSQFATFADICFGIEPLMVDSQDTTFFNRDEATIEDIKERMISLINHFDFQVIFHTKRLQDEWGRNHYQAYIANRKQEFVTSKEITTAVNQRIGSGDAFVAGALYQLLQHSDSKTVIDFAVASASLKCALEGDNMFETVAAVNKVLNQSKDIIR

SEQ ID NO: 12379 - protein, 636 aa, Streptococcus agalactiae
ATGATAAAATCAAAGATTTTATTGCAATTAATGCAAGGAAAAATAGTTGCTGTCATTCGTGGAAATAGCCAAGAAGAAGCTTTTCAAGCTGCTCAAGCATGCATAAAAGGTGGTATTTCTGCTATCGAAATCGCCTATACTAATAGCAAAGCTAGCCAAGTCATTGAACAACTAGTCACACAATATACTAACCAAGAACAAGTTGTCGTTGGGGCAGGAACTGTTCTAGACTCAGAAACTGCCCGAATGGCTATTTTAGCAGGAGCAAAGTTTATTGTATCTCCCGCATTTAATCTACAGACTGCTAAACTATGTAATCGTTATGCTATTCCTTATTTACCAGGTTGCATGACCTTATCAGAGATAACAACAGCACTTGAAGCTGGTTGTGAAATAATTAAAATATTCCCAGGAGGTACTCTAGGAACATCTTTTATCTCATCACTAAAAGCACCTTTACCTCAAGTACAAATTATGGTGACTGGTGGGGTAAATCTCACAAATGCCAAAGACTGGTTTCTATCTGGAGTAACAGCCATTGGTATTGGTGGAGAGTTCAATAAACTAGCAGCTTTGGGGGAATTTGATAAAATCACAGAAATGGCTAAACAATACAAAATACAGCTAAATCTGAAT

SEQ ID NO: 12380 - protein, 212 aa, Streptococcus agalactiae
MIKSKILLQLMQGKIVAVIRGNSQEEAFQAAQACIKGGISAIEIAYTNSKASQVIEQLVTQYTNQEQVVVGAGTVLDSETARMAILAGAKFIVSPAFNLQTAKLCNRYAIPYLPGCMTLSEITTALEAGCEIIKIFPGGTLGTSFISSLKAPLPQVQIMVTGGVNLTNAKDWFLSGVTAIGIGGEFNKLAALGEFDKITEMAKQYKIQLNLN

SEQ ID NO: 12381 - protein, 612 aa, Streptococcus agalactiae
ATGTCATTTTTGGAAGAATTAAAAAACCGTCGCTCTATTTATGCTCTTGGTCGCAATACAGAAGTTTCTAATGAGAAAATTGTAGAGATTATTAAAGAGGCAGTTCGCCAATCCCCATCTGCTTTTAATAGTCAAACTTCCCGTGTTGTCATTTTATTGAATGATGAAGTTACTAAGTTCTGGGATGAATTGGTTGCTAATGATTTGGTAGAAACAATGAAAGTACAAGGTGCTCCAGAGACAGCTATTGCTGGAACTAAGGAAAAATTAGCTAGTTTTGGAGCTTCAAAGGGAACAGTACTCTTCTTTGAAGATCAAGATGTTGTCAAATCTCTTCAAGAACAATTCGTTCTTTATGCGGATAACTTTCCAGTTTGGTCTGAGCAATCAACAGGTATTGCCTCAGTAAATACTTGGACAGCCCTTTCTGCAGAACTTGGACTTGGTGGTAATTTACAACATTACAATCCAGTTATTGATGCATCAGTACAAGCTGTTTATGGTGTTCCAGCTAGTTGGAAACTTCGTGGACAACTAAATTTTGGTTCAATCGAAGCTGAAACAGGAGAAAAAGAATTCATGAATGATGATGACCGCTTTAAAGTCATCGGA

SEQ ID NO: 12382 - protein, 204 aa, Streptococcus agalactiae
MSFLEELKNRRSIYALGRNTEVSNEKIVEIIKEAVRQSPSAFNSQTSRVVILLNDEVTKFWDELVANDLVETMKVQGAPETAIAGTKEKLASFGASKGTVLFFEDQDVVKSLQEQFVLYADNFPVWSEQSTGIASVNTWTALSAELGLGGNLQHYNPVIDASVQAVYGVPASWKLRGQLNFGSIEAETGEKEFMNDDDRFKVIG

SEQ ID NO: 12383 - protein, 423 aa, Streptococcus agalactiae
ATGGGAAACTTTAAAAATTCAGCGGTTAAATCTATGGTTGTCATGCGAAAAGCATTTAGAACAATAGACGGAAAAGTCTCAGAATCATTTAAAGAATTTGAATTAACACCAACTCAGTTTGCAGTTTTGGATGTTCTCTATGCTAAAGGCACAATGAAAATTGGAGAATTGATTGAAAATATGCTTGCTACATCAGGTAATATGACTGTTGTTATTAAAAATATGGAAAAAAAAGGATGGGTATTACGCCATTCTTGTCCGAATGATAAGAGAGCCTTTTTGGTGAGTTTAACAACTGAAGGAGAAGAAGTGATAAAAAAAGCTCTACCAGAGCATATTAAACGTGTAGAAGATGCTTTTTCAGTCTTAACAGAAACAGAGCAAGAAGACTTGATTAACCTTTTAAAAAAATTTAAAACCTTG

SEQ ID NO: 12384 - protein, 141 aa, Streptococcus agalactiae; identical to SEQ ID NO: 3428

SEQ ID NO: 12385 - protein, 4404 aa, Streptococcus agalactiae
ATGTCAGAATTGTTCAAGAAACTTATGGATCAGATTGAAATGCCGCTTGAAATTAAGAATTCAAGTGTTTTTTCGTCTGCTGATATTATCGAGGTAAAGGTTCATTCTCTATCACGCTTATGGGAATTTCATTTTTCATTTCCAGAATTATTGCCAATTGAGGTGTATCGTGAATTACAAACTCGTTTAGTGAATAGTTTTGAAAAAGCAGATATAAAGGCTACTTTTGATATAAGAGCAGAAACTATTGATTTTTCTGATGATCTGCTACAGGATTATTATCAACAAGCTTTTTGTGAACCCTTGTGTAATAGTGCAAGTTTTAAGAGTTCTTTTTCACAATTAAAAGTTCATTACAATGGCAGTCAGATGATTATTTCTGCACCTCAATTTGTCAATAATAATCATTTTCGTCAGAATCATTTGCCGCGTTTGGAACAACAGTTTTCATTGTTTGGATTTGGTAAACTTGCTATTGATATGGTTTCTGATGAACAAATGACGCAAGACTTAAAATCATCATTTGAAACTAATCGCGAGCGATTGCTTGAAAAAGCTAACCAAGAAGCTATGCAAGCCTTGGAAACACAAAAATCACTAGAAGATTCAGCGCCTCCATCAGAAGAAGTGACCCCAACTCAAAATTATGATTTCAAAGAGCGTATCAAACAACGTCAAGCTGGCTTTGAAAAAGCAGAGATTACACCCATGATTGAGGTGACAACAGAAGAAAATCGTATCGTTTTTGAAGGAATGGTTTTTAGTGTTGAACGAAAAACAACCCGCACTGGACGTCATATCATTAATTTTAAGATGACTGATTATACCTCAAGTTTTGCTATGCAAAAGTGGGCTAAAGATGATGAAGAATTGAAGAAGTACGATATGATTTCTAAAGGTTCGTGGTTGCGAGTCAGAGGGAATATTGAGAACAATAACTTTACTAAATCTTTGACAATGAATGTCCAAGATATCAAAGAGATTGTGCATCATGAACGTAAAGACTTAATGCCAGCAGATCAAAAACGTGTGGAATTTCATGCTCATACCAATATGTCAACAATGGATGCTTTACCAACTGTCGAGAGCCTCATTGATACTGCAGCTAAGTGGGGACACCCAGCTATTGCAATTACCGACCATGCCAATGTTCAAAGTTTTCCGCACGGCTACCACAGAGCAAAAAAAGCAGGTATAAAAGCAATTTTTGGATTAGAGGCAAATATTGTTGAAGATAAAGTGCCTATTTCCTACAACGAAGTTGATATGAATTTGCACGAAGCAACTTATGTTGTATTTGATGTGGAAACTACAGGTCTTTCTGCAGCTAATAATGACCTAATTCAGATTGCAGCATCAAAAATGTTCAAGGGTAATATTATTGAGCAATTTGATGAGTTTATTGACCCAGGTCATCCTCTTTCTGCCTTTACAACTGAGTTGACAGGTATTACGGATAATCATGTCAGAGGTTCAAAACCTATTTTACAAGTCCTTCAGGAATTTCAGAATTTTTGTCAAGGTACGGTTTTAGTTGCGCATAATGCAACCTTTGACGTTGGTTTTATGAATGCGAATTATGAACGTCATAATCTGCCTTTGATCACACAGCCGGTCATTGATACCTTAGAATTTGCAAGAAATCTTTATCCTGAATATAAGCGTCATGGTTTGGGGCCTCTAACCAAACGTTTCCAAGTTGCTTTGGAACATCATCATATGGCCAACTACGATGCTGAAGCAACGGGTCGCTTACTCTTTATTTTCTTAAAAGAGGCGCGGGAAAATCGTGATGTGACTAATTTGATGGAGCTCAATACTAAATTGGTAGCTGAAGACTCTTACAAAAAGGCACGCATAAAGCATGCAACCATTTATGTCCAAAATCAGGTTGGACTTAAAAATATATTTAAGTTGGTTAGCCTTTCAAATGTTAAATATTTTGAAGGGGTGGCAAGAATTCCTAGGTCAGTTTTAGATGCTCACAGAGAAGGTCTCTTGCTAGGTACTGCCTGTTCTGATGGAGAAGTTTTTGATGCCTTGTTATCAAATGGAATTGATGCAGCAGTGACCCTAGCTAAATATTATGATTTTATTGAAGTCATGCCACCTGCTATTTATCGCCCCTTGGTGGTTCGTGATTTAATTAAAGATGAGGCGGGGATTCAACAAATTATTAGAGACTTAATAGAGGTCGGTCGGCGTTTAGATAAGCCTGTTTTAGCTACGGGAAATGTTCATTATATTGAGCCTGAAGATGAGATTTACCGTGAGATTATTGTTCGTAGTCTTGGACAAGGTGCCATGATTAATAGGACTATCGGTCGTGGGGAGGATGCTCAACCAGCGCCTTTGCCAAAAGCACATTTCCGCACAACAAATGAGATGTTAGATGAATTTGCCTTTCTTGGTAAAGATTTAGCCTATGAGATCGTTGTAACCAATACGAATACTTTTGCAGATCGATTTGAAGACGTTGAAGTTGTAAAAGGGGATCTCTATACTCCGTTTGTTGATCGTGCTGAAGAACGAGTTGCTGAATTAACTTATGCTAAAGCATTCGAAATATATGGTAATCCTCTTCCTGATATTATTGATTTACGTATCGAAAAAGAGTTAGCATCTATACTTGGTAATGGATTTGCCGTTATCTATCTTGCTTCGCAAATGTTGGTGCAACGTTCTAATGAACGTGGTTATCTAGTAGGATCACGTGGGTCTGTTGGGTCGAGTTTTGTAGCGACCATGATAGGAATTACTGAAGTTAATCCAATGCCACCTCATTATGTTTGCCCAAATTGTCAGCATTCTGAATTTATCACAGATGGTTCTTGTGGTTCAGGCTACGATTTACCAAATAAAAATTGTCCTAAATGTGGTACTTTGTACAAGAAAGATGGACAGGATATTCCGTTTGAAACTTTCTTAGGATTTGATGGAGATAAGGTTCCTGATATTGATCTGAATTTCTCTGGAGATGATCAACCTTCTGCTCACTTAGATGTTCGTGATATCTTTGGAGAAGAATATGCTTTTCGTGCAGGAACGGTAGGTACCGTAGCTGAAAAAACTGCTTTTGGTTTTGTCAAAGGTTACGAACGAGATTACAATAAATTTTATAACGATGCAGAGGTCGAACGGTTAGCGACTGGTGCTGCGGGAGTTAAACGTTCTACAGGTCAACACCCCGGTGGTATTGTTGTTATTCCTAACTATATGGATGTTTATGATTTTACTCCGGTTCAATATCCAGCAGATGATATGACAGCTGCTTGGCAGACAACTCACTTCAATTTCCATGATATTGATGAGAATGTCTTAAAGTTAGATATTCTAGGACATGATGATCCTACTATGATTCGTAAACTTCAGGATTTATCAGGAATTGATCCATCAAATATCCTTCCAGATGATCCAGACGTTATGAAGTTATTTTCTGGTACGGAAGTTTTAGGAGTGACAGAAGAGCAAATTGGAACTCCTACAGGAATGCTTGGTATTCCAGAGTTTGGTACGAACTTTGTTCGTGGTATGGTGAACGAAACCCATCCAACCACATTTGCAGAATTGTTGCAACTGTCAGGACTATCACATGGTACGGATGTTTGGTTAGGTAATGCTCAAGACTTAATCAAAGAAGGTATTGCTACCTTATCAACCGTTATTGGTTGTCGTGATGACATCATGGTTTATTTAATGCACGCTGGTCTACAACCAAAGATGGCCTTTACAATCATGGAGCGCGTGCGTAAGGGGTTATGGTTGAAAATTTCAGAAGATGAGCGTAACGGTTATATCCAAGCAATGCGTGATAATAATGTCCCGGATTGGTATATTGAATCGTGTGGAAAAATCAAGTATATGTTCCCTAAAGCCCATGCAGCAGCCTATGTTTTAATGGCATTACGTGTGGCGTACTTTAAAGTACATTATCCAATATTTTATTACTGTGCTTATTTTTCTATTCGCGCTAAAGCTTTTGAATTACGCACAATGAGTGCTGGGCTTGATGCCGTTAAGGCGCGCATGAAGGATATCACTGAGAAGCGTCAGCGTAATGAGGCGACGAATGTCGAAAATGACCTTTTTACGACATTAGAGTTGGTTAATGAAATGCTTGAGCGTGGCTTTAAATTTGGGAAATTAGATCTTTATCGTAGCCATGCGACTGACTTTATTATTGAAGAGGATACGCTAATCCCTCCATTTGTTGCTATGGAAGGCTTGGGAGAAAACGTTGCAAAACAGATAGTTCGGGCACGTGAAGATGGTGAATTTTTATCAAAAACAGAGCTTCGTAAGCGAGGAGGAGTCTCGAGTACCTTAGTTGAAAAATTTGATGAGATGGGTATTTTGGGAAATTTACCAGAAGACAATCAGTTGAGTCTTTTTGATGATTTCTTC

SEQ ID NO: 12386 - protein, 1468 aa, Streptococcus agalactiae
MSELFKKLMDQIEMPLEIKNSSVFSSADIIEVKVHSLSRLWEFHFSFPELLPIEVYRELQTRLVNSFEKADIKATFDIRAETIDFSDDLLQDYYQQAFCEPLCNSASFKSSFSQLKVHYNGSQMIISAPQFVNNNHFRQNHLPRLEQQFSLFGFGKLAIDMVSDEQMTQDLKSSFETNRERLLEKANQEAMQALETQKSLEDSAPPSEEVTPTQNYDFKERIKQRQAGFEKAEITPMIEVTTEENRIVFEGMVFSVERKTTRTGRHIINFKMTDYTSSFAMQKWAKDDEELKKYDMISKGSWLRVRGNIENNNFTKSLTMNVQDIKEIVHHERKDLMPADQKRVEFHAHTNMSTMDALPTVESLIDTAAKWGHPAIAITDHANVQSFPHGYHRAKKAGIKAIFGLEANIVEDKVPISYNEVDMNLHEATYVVFDVETTGLSAANNDLIQIAASKMFKGNIIEQFDEFIDPGHPLSAFTTELTGITDNHVRGSKPILQVLQEFQNFCQGTVLVAHNATFDVGFMNANYERHNLPLITQPVIDTLEFARNLYPEYKRHGLGPLTKRFQVALEHHHMANYDAEATGRLLFIFLKEARENRDVTNLMELNTKLVAEDSYKKARIKHATIYVQNQVGLKNIFKLVSLSNVKYFEGVARIPRSVLDAHREGLLLGTACSDGEVFDALLSNGIDAAVTLAKYYDFIEVMPPAIYRPLVVRDLIKDEAGIQQIIRDLIEVGRRLDKPVLATGNVHYIEPEDEIYREIIVRSLGQGAMINRTIGRGEDAQPAPLPKAHFRTTNEMLDEFAFLGKDLAYEIVVTNTNTFADRFEDVEVVKGDLYTPFVDRAEERVAELTYAKAFEIYGNPLPDIIDLRIEKELASILGNGFAVIYLASQMLVQRSNERGYLVGSRGSVGSSFVATMIGITEVNPMPPHYVCPNCQHSEFITDGSCGSGYDLPNKNCPKCGTLYKKDGQDIPFETFLGFDGDKVPDIDLNFSGDDQPSAHLDVRDIFGEEYAFRAGTVGTVAEKTAFGFVKGYERDYNKFYNDAEVERLATGAAGVKRSTGQHPGGIVVIPNYMDVYDFTPVQYPADDMTAAWQTTHFNFHDIDENVLKLDILGHDDPTMIRKLQDLSGIDPSNILPDDPDVMKLFSGTEVLGVTEEQIGTPTGMLGIPEFGTNFVRGMVNETHPTTFAELLQLSGLSHGTDVWLGNAQDLIKEGIATLSTVIGCRDDIMVYLMHAGLQPKMAFTIMERVRKGLWLKISEDERNGYIQAMRDNNVPDWYIESCGKIKYMFPKAHAAAYVLMALRVAYFKVHYPIFYYCAYFSIRAKAFELRTMSAGLDAVKARMKDITEKRQRNEATNVENDLFTTLELVNEMLERGFKFGKLDLYRSHATDFIIEEDTLIPPFVAMEGLGENVAKQIVRAREDGEFLSKTELRKRGGVSSTLVEKFDEMGILGNLPEDNQLSLFDDFF

SEQ ID NO: 12387 - protein, 582 aa, Streptococcus agalactiae
ATGAAAAGTCGAAAAAAAGATAAATTGGTATTGAGGTTAACAACAACACTATTAGTTTTTGGTTTGGGTGGGGTTTGGTTTTACAATTATAAAAATGATAATGTCGAACCGACAGTCACTAGTGCATCGGATCAAACGACGACTTTTATTCAAACGATTTCCCCAACAGCTATTGAAATTTCTAAGACCTATGATTTGTATGCGTCAGTCTTATTAGCACAAGCTATTTTGGAATCATCCAGTGGACAATCAGATTTGTCTAAGGCTCCTAATTATAACCTCTTTGGCATCAAAGGAGAATATAAAGGTAAATCTGTTCAAATGCCTACTTTAGAAGATGATGGGAAAGGTAATATGACCCAAATCCAAGCTCCTTTTCGCGCCTATCCAAATTATTCTGCTTCACTATATGATTATGCTGAGTTAGTATCTAGTCAAAAGTATGCATCTGTTTGGAAATCAAATACCTCTTCTTATAAGGATGCTACTGCAGCTCTAACAGGTCTTTATGCGACAGATACTGCTTATGCTAGTAAATTAAACCAAATTATTGAAAACTACAGTCTAGATGCTTATGATAAA

SEQ ID NO: 12388 - protein, 194 aa, Streptococcus agalactiae
MKSRKKDKLVLRLTTTLLVFGLGGVWFYNYKNDNVEPTVTSASDQTTTFIQTISPTAIEISKTYDLYASVLLAQAILESSSGQSDLSKAPNYNLFGIKGEYKGKSVQMPTLEDDGKGNMTQIQAPFRAYPNYSASLYDYAELVSSQKYASVWKSNTSSYKDATAALTGLYATDTAYASKLNQIIENYSLDAYDK

SEQ ID NO: 12389 - protein, 1851 aa, Streptococcus agalactiae
ATGAAACAAAGTAAAATGCTTATTCCAACACTTCGCGAAATGCCAAGTGATGCTCAGGTTATCAGCCATGCTCTTATGGTTCGTGCAGGATATGTCCGCCAAGTTTCGGCTGGAATCTATGCTTATTTGCCTCTAGCTAACCGTACTATTGAAAAATTTAAAACAATTATGCGTCAAGAATTTGAGAAGATTGGTGCAGTTGAAATGTTAGCTCCAGCTCTTCTTACAGCAGATTTATGGCGTGAATCTGGGCGCTATGAAACATATGGTGAAGACCTTTATAAATTAAAGAATCGTGATCAATCGGATTTTATCTTAGGACCAACTCATGAAGAGACTTTCACAACTCTTGTTCGTGACGCAGTAAAATCTTATAAGCAGTTACCACTAAACCTTTATCAAATTCAGTCTAAATATCGTGATGAGAAGCGTCCTCGTAATGGACTTCTTCGAACACGTGAATTTATCATGAAAGATGGATACAGCTTCCACAAAGATTATGAGGACCTTGATGTCACTTACGAAGATTACCGTAAAGCATACGAAGCCATCTTCACACGTGCTGGACTTGACTTTAAAGGTATTATAGGTGACGGAGGTGCTATGGGAGGTAAAGATAGCCAAGAATTTATGGCAGTAACTCCCAATCGTACAGATTTAAATCGTTGGTTAGTCCTTGATAAAACTATTCCTTCTATTGATGATATTCCAGAGGATGTTTTAGAAGAAATTAAAGCAGAACTCTCGGCTTGGCTAGTTTCTGGCGAGGACACTATTGCATACTCCACTGAATCAAGCTATGCTGCTAACCTTGAGATGGCAACAAATGAGTACAAACCATCTACTAAGGCTGCTACCTTTGAAGAAGTAACAAAAGTAGAAACTCCTAACTGCAAATCAATTGATGAGGTAGCTGGATTTTTATCAATTGATGAAAATCAAACTATCAAGACACTATTGTTTATTGCTGATGAACAGCCCGTGGTTGCTTTACTAGTTGGTAACGATCAAGTCAATGATGTGAAGTTAAAAAATTATTTAGCGGCTGATTTCTTAGAGCCTGCAAGTGAAGAGCAAGCAAAAGAGATTTTTGGTGCAGGTTTTGGTTCTCTTGGGCCAGTTAACCTACCTGAGTCTGTTAAAATTATTGCTGATCGTAAAGTTCAAGACCTTGCTAATGCTGTGTCTGGTGCTAACCAAGATGGTTATCATTTTACTGGAGTTAATCCAGAACGTGATTTCACAGCTGAATACGTTGATATTCGTGAAGTAAAAGAAGGGGAGATTTCTCCAGACGGTAAAGGTACTCTGAAATTTGCTCGTGGTATTGAAATTGGACATATCTTTAAACTAGGTACCCGTTATTCAGATAGTATGGGAGCGAACATCCTTGATGAAAATGGCCGCTCAAATCCTATTGTTATGGGGTGTTATGGTATTGGTGTTAGTCGTATTCTCTCAGCTGTCATTGAACAACATGCCCGACTTTTTGTGAATAAGACACCAAAAGGAGCTTATCGCTTTGCTTGGGGGATTAATTTCCCAGAAGAATTAGCCCCATTTGATGTACATTTGATTACTGTCAATGTCAAAGATCAAGAGTCACAAGACCTTACTGAGAAAATTGAAGCTGATTTGATGCTTAAAGGTTATGAAGTCCTGACAGATGATCGTAATGAACGTGTTGGTTCTAAATTCTCAGACAGTGACTTAATTGGACTTCCAATTCGAGTAACTGTTGGGAAGAAAGCTTCTGAAGGTATCGTTGAAGTGAAAATTAAAGCAAGTGGTGATACGATTGAGGTTCACGCTGATAACTTAATTGAAACTTTAGAGATTCTAACAAAAAAA

SEQ ID NO: 12390 - protein, 617 aa, Streptococcus agalactiae
MKQSKMLIPTLREMPSDAQVISHALMVRAGYVRQVSAGIYAYLPLANRTIEKFKTIMRQEFEKIGAVEMLAPALLTADLWRESGRYETYGEDLYKLKNRDQSDFILGPTHEETFTTLVRDAVKSYKQLPLNLYQIQSKYRDEKRPRNGLLRTREFIMKDGYSFHKDYEDLDVTYEDYRKAYEAIFTRAGLDFKGIIGDGGAMGGKDSQEFMAVTPNRTDLNRWLVLDKTIPSIDDIPEDVLEEIKAELSAWLVSGEDTIAYSTESSYAANLEMATNEYKPSTKAATFEEVTKVETPNCKSIDEVAGFLSIDENQTIKTLLFIADEQPVVALLVGNDQVNDVKLKNYLAADFLEPASEEQAKEIFGAGFGSLGPVNLPESVKIIADRKVQDLANAVSGANQDGYHFTGVNPERDFTAEYVDIREVKEGEISPDGKGTLKFARGIEIGHIFKLGTRYSDSMGANILDENGRSNPIVMGCYGIGVSRILSAVIEQHARLFVNKTPKGAYRFAWGINFPEELAPFDVHLITVNVKDQESQDLTEKIEADLMLKGYEVLTDDRNERVGSKFSDSDLIGLPIRVTVGKKASEGIVEVKIKASGDTIEVHADNLIETLEILTKK

SEQ ID NO: 12391 - protein, 1256 aa, Streptococcus agalactiae
ATGCTAGGAATTTTAACCTTTATTATTATTTTTGGTGTCATTGTAGTTGTTCACGAATTTGGGCATTTCTATTTTGCAAAGAAATCAGGAATTCTTGTTCGTGAATTTGCTATTGGTATGGGTCCAAAAATCTTTTCTCACATTGATAAAGAAGGAACAACCTATACTATTCGTATATTACCGCTAGGTGGTTATGTCCGTATGGCTGGTTGGGGTGATGATAAGACTGAAATTAAGACAGGGACGCCGGCTAGCCTTACTTTAAATAAAGAAGGCATTGTAACTCGTATTAATTTATCAGGAAAACAATTAGACAATACTTCTTTACCAATCAATGTCACAGCTTATGATCTAGAAGATAAACTAACTATCACAGGATTGGTCTTAAGTGAGACAAAAACCTATAGTGTTGATCACGATGCTACTATCATGAGGAGGATGGTACTGAAATTCGTATTGCTCCCTTAGATGTGCAGTATCAGAATGCTTCTGTATGGGGGCGCTTAATTACCAATTTTGCAGGTCCGATGAATAATTTTATTTTAGGTCTTGTAGTCTTTATTGCACTTGCTTTTATTCAAGGAGGTGTTCAAGATTTATCAACCAATCAGGTCCGTGTATCAGAAAATGGTCCTGCTGCTAGTGCAGGTTTAAAAAATAATGATCGTATTTTACAAATAGGGTCGCACAAAGTTTCTAACTGGGAACAGTTGACAGCAGCAGTAGAAAAGTCAACTAGGCATTTAGAAAAAAAACAAAAACTTGCCCTTAAGATTAAGAGCAAAGAGGTGGTGAAAACGATCAACGTTAAGCCACAGAAAGTTGATAAATCCTACATCATCGGCATTATGCCAGCTCTAAAGACAAGCTTTAAAGACAAACTTTTAGGTGGATTTAAACTAGCATGGGAAAGTTTCTTTAGAATTTTAAATGAATTAAAGAAACTTATTGCTCATTTTAGTATTAATAAATTGGGAGGTCCAGTAGCTCTCTATCAGGCTAGTAGCCAAGCTGCTAAAAATGGTTTCGTCACAGTTCTCAACTTAATGGGATTAATCTCTATCAACTTAGGTATTATGAATCTCATCCCTATACCAGCCCTTGACGGGGGTAAGATAGTGATGAATATTTTAGAAGCCATTCGTCGCAAACCACTTAAACAAGAAACAGAAACTTATATTACGCTCGCTGGGGTAGCAGTTATGTTAGTATTAATGATTGCTGTAACCTGGAACGATATCATGCGAGCTTTCTTC

SEQ ID NO: 12392 - protein, 419 aa, Streptococcus agalactiae
MLGILTFIIIFGVIVVVHEFGHFYFAKKSGILVREFAIGMGPKIFSHIDKEGTTYTIRILPLGGYVRMAGWGDDKTEIKTGTPASLTLNKEGIVTRINLSGKQLDNTSLPINVTAYDLEDKLTITGLVLSETKTYSVDHDATIIEEDGTEIRIAPLDVQYQNASVWGRLITNFAGPMNNFILGLVVFIALAFIQGGVQDLSTNQVRVSENGPAASAGLKNNDRILQIGSHKVSNWEQLTAAVEKSTRHLEKKQKLALKIKSKEVVKTINVKPQKVDKSYIIGIMPALKTSFKDKLLGGFKLAWESFFRILNELKKLIAHFSINKLGGPVALYQASSQAAKNGFVTVLNLMGLISINLGIMNLIPIPALDGGKIVMNILEAIRRKPLKQETETYITLAGVAVMLVLMIAVTWNDIMRAFF

SEQ ID NO: 12393 - protein, 792 aa, Streptococcus agalactiae
ATGAAAGAACGTGTTATTTGGGGAGCTGTCGCGCTTGCCATATTTATCCCTTTTTTAGTAATGGGTGGTTTACCTTTCCAATTTTTAGTTGGACTTTTAGCTATGATTGGTGTTTCTGAATTACTTCGTATGCGTCGTTTAGAAATATTTTCCTTTGAAGGTGCATTAGCTATGATAGGATCCTTTGTTTTAACAGTTCCTTTAGATAGTTACTTGTCCTTTTTACCAGTTGACGCTAGTTTATCAGCATACGGTATTGTTATTTTTATGATTTTGGCAGGTACTGTTTTGAACAGTAATTCTTACAGTTTTGAAGATGCTGCCTTTCCAATTGCGTCTAGTTTTTATGTGGGTATCGGCTTTCAAAATCTAGTCAGTGCTCGTATGGCTGGAATAGATAAGGTGTTGTTAGCTTTATTTATTGTCTGGGCGACTGATATCGGTGCTTATATGATTGGTCGTCAATTTGGACAACGCAAACTACTACCCTCAGTGTCTCCAAATAAAACAATTGAAGGGAGTCTAGGAGGGATTGCTTCAGCCATTGTGGTAGCTTTCTTTTTTATGCTTTTTGATAAGACCGTCTATGCGCCTCATAGCTTCCTAGTCATGTTAGTTTTAGTGGCTATCTTTAGCATTTTTGGTCAATTTGGAGATTTAGTTGAAAGTAGTATTAAACGTCATTTTGGTGTTAAAGATTCGGGTAAATTGATTCCGGGTCATGGGGGGATTTTGGATCGCTTTGATAGTATGATTTTTGTTTTCCCAATCATGCACTTCTTTGGCTTATTC

SEQ ID NO: 12394 - protein, 264 aa, Streptococcus agalactiae
MKERVIWGAVALAIFIPFLVMGGLPFQFLVGLLAMIGVSELLRMRRLEIFSFEGALAMIGSFVLTVPLDSYLSFLPVDASLSAYGIVIFMILAGTVLNSNSYSFEDAAFPIASSFYVGIGFQNLVSARMAGIDKVLLALFIVWATDIGAYMIGRQFGQRKLLPSVSPNKTIEGSLGGIASAIVVAFFFMLFDKTVYAPHSFLVMLVLVAIFSIFGQFGDLVESSIKRHFGVKDSGKLIPGHGGILDRFDSMIFVFPIMHFFGLF

SEQ ID NO: 12395 - protein, 750 aa, Streptococcus agalactiae
ATGTTTATATTTAAAAGAAAAAAACAAGTAGAAATGCCTTTGGAGAAAATACCAGCACATATTGGTATTATCATGGATGGTAACGGACGTTGGGCAAAAAAACGTTTAAAACCACGCGTTATGGGACATAAGGCGGGGATGGATGCTCTTCAAGAAGTTACAATAGCAGCTTCAGAATTAGGTGTTAAAGTACTAACTGTCTATGCCTTTTCTACAGAAAATTGGTCACGTCCAGATGATGAAGTTAAGTTTATTATGAACCTTCCGGTTGAATTTTTTGATAAATATGTACCAGAGTTAGATAAAAATAATGTACGTGTACAGGTCATCGGAGATACTCATAAATTACCTAAGGCAACATACGATGCAATGCAACGCGCTTGTTTGAGGACAAAACATAATTCGGGGCTCGTCTTGAATTTTGCGCTAAATTATGGCGGACGTTCAGAAATCACTAATGCCATTAAGGAAATTGCTCAGGATGTTTTGGAAGCTAAGTTGAATCCTGACGATATTACAGAGGATTTAGTAGCAAATCATTTAATGACAAATAGCTTACCCTATCTTTATAGAGACCCTGATTTGATTATCCGAACTAGTGGAGAGTTACGCTTGAGTAACTTTTTACCTTGGCAATCAGCTTATAGTGAATTTTACTTTACTCCCGTTTTATGGCCAGATTTTAAAAAAGACGAACTACATAAGGCCATTGTGGATTATAATCAACGCCATCGTCGATTTGGTAGTGTA

SEQ ID NO: 12396 - protein, 250 aa, Streptococcus agalactiae
MFIFKRKKQVEMPLEKIPAHIGIIMDGNGRWAKKRLKPRVMGHKAGMDALQEVTIAASELGVKVLTVYAFSTENWSRPDDEVKFIMNLPVEFFDKYVPELDKNNVRVQVIGDTHKLPKATYDAMQRACLRTKHNSGLVLNFALNYGGRSEITNAIKEIAQDVLEAKLNPDDITEDLVANHLMTNSLPYLYRDPDLIIRTSGELRLSNFLPWQSAYSEFYFTPVLWPDFKKDELHKAIVDYNQRHRRFGSV

SEQ ID NO: 12397 - protein, 156 aa, Streptococcus agalactiae
ATGGTTTTAGATGTTGATGGTGTCTATTTGACGTTTGAGTTGGCAGCTATCAAATCTGTTGTCTCTAAGGCAGCAACACCAACAGAACCAGTTGAAGATGTTAAGATTATTGAAGTCAATGAAGACGAAAATAAAGAAACAGCCATCGAAACTGAA

SEQ ID NO: 12398 - protein, 52 aa, Streptococcus agalactiae
MVLDVDGVYLTFELAAIKSVVSKAATPTEPVEDVKIIEVNEDENKETAIETE

SEQ ID NO: 12399 - protein, 720 aa, Streptococcus agalactiae
GTGGTTGCGAGTCAGAAAGGGAATATTGAGAACAATAACTTTACTAAATCTTTGACAATGAATGTCCAAGATATCAAAGAGATTGTGCATCATGAACGTAAAGACTTAATGCCAGCAGATCAAAAACGTGTGGAATTTCATGCTCATACCAATATGTCAACAATGGATGCTTTACCAACTGTCGAGAGCCTCATTGATACTGCAGCTAAGTGGGGACACCCAGCTATTGCAATTACCGACCATGCCAATGTTCAAAGTTTTCCGCACGGCTACCACAGAGCAAAAAAAGCAGGTATAAAAGCAATTTTTGGATTAGAGGCAAATATTGTTGAAGATAAAGTGCCTATTTCCTACAACGAAGTTGATATGAATTTGCACGAAGCAACTTATGTTGTATTTGATGTGGAAACTACAGGTCTTTCTGCAGCTAATAATGACCTAATTCAGATTGCAGCATCAAAAATGTTCAAGGGTAATATTATTGAGCAATTTGATGAGTTTATTGACCCAGGTCATCCTCTTTCTGCCTTTACAACTGAGTTGACAGGTATTACGGATGACCCAGGTCATCCTCTTTCTGCCTTTACAACTGAGTTGACAGGTATTACGGATAATCATGTCAGAGGTTCAAAACCTATTTTACAAGTCCTTCAGGAATTTCAGAATTTTTGTCAAGGTACGGTTTTAGTTGCGCATATGCAACCTTTGACGTTGGTTTTA

SEQ ID NO: 12400 - protein, 240 aa, Streptococcus agalactiae
MVASQKGNIENNNFTKSLTMNVQDIKEIVHHERKDLMPADQKRVEFHAHTNMSTMDALPTVESLIDTAAKWGHPAIAITDHANVQSFPHGYHRAKKAGIKAIFGLEANIVEDKVPISYNEVDMNLHEATYVVFDVETTGLSAANNDLIQIAASKMFKGNIIEQFDEFIDPGHPLSAFTTELTGITDDPGHPLSAFTTELTGITDNHVRGSKPILQVLQEFQNFCQGTVLVAHMQPLTLVL

SEQ ID NO: 12401 - protein, 93 aa, Streptococcus agalactiae
TTGGGAGGTCCAGTAGCTCTCTATCAGGATAGTAGCCAAGCTGCTAAAAATGGTTTCGTCACAGTTCTCATCTTAATGGGATTNNNNNTTAAT

SEQ ID NO: 12402 - protein, 31 aa, Streptococcus agalactiae
  VARIANT 28, 29, 30: Xaa = Any Amino Acid
MGGPVALYQDSSQAAKNGFVTVLILMGXXXN

SEQ ID NO: 12403 - protein, 156 aa, Streptococcus agalactiae
ATGAGCTTACCTATTATTATGCTTGTTGTTATGGTTGGTATGATGTTCTTCATGCAACGTCAGCAAAAGAAACAAGCACAAGAACGTCAAAAACAATTGAATGCTGTTCAAAAAGGTGATAGAAATTGTCACAATTGGTGGTCTTTNNNNNTTAAT

SEQ ID NO: 12404 - protein, 52 aa, Streptococcus agalactiae
  VARIANT 49, 50, 51: Xaa = Any Amino Acid
MSLPIIMLVVMVGMMFFMQRQQKKQAQERQKQLNAVQKGDRNCHNWWSXXXN

SEQ ID NO: 12405 - protein, 342 aa, Streptococcus agalactiae; identical to SEQ ID NO: 8127

SEQ ID NO: 12406 - protein, 114 aa, Streptococcus agalactiae; identical to SEQ ID NO: 8128

SEQ ID NO: 12407 - protein, 1160 aa, Streptococcus agalactiae
ATGAGTGAAAATTTAGGTCAATTAGCTATCAACCAAGCTAGAGAAAATGGTGGAAAATTAGAAGTAATTTCAAAAGTTAAGGTGGAAGATAAGAGGGAGCTTAGTATTGCCTATACCCCAGGGGTGGCGTCAGTATCATCGGCTATTGCAGAGGATGTGGAGCTTGCATATGAGTTGACGACTAAAAAAAATACAGTAGCCGTAGTGAGTGATGGTTCAGCTGTTCTTGGATTAGGAGATATTGGTCCTGAGGCAGCAATGCCAGTCATGGAAGGTAAAGCAGCACTCTTTAAACGTTTTGCAAATGTAGATGCTGTGCCAATTGTGTTGAAAACAAATGATACAGAGGAAATTATTTCTATAGTAAAAGCGATTTCGCCGACTTTTGGAGGGATTAATTTAGAGGATATTTCAGCACCACGTTGTTTCGAAATTGAACAACGCCTAATTGAAGAATGTGATATACCAGTTTTCCATGATGACCAACATGGTACAGCAATCGTAGTATTAGCGGCTTTGTTTAACAGTTTGAAGCTAGTTAAAAAAGACATTGAAGACATCAGAGTAGTTGTTAATGGTGGAGGTTCAGCGGGCTTATCTATAACAAGGAAGCTTCTATCAGCAGGAGCAAAACATGTAACGGTAGTTGATCGATTTGGCATTATTAACGATAAAGATCGGGAGTCATTAGCCCCTCATCACAAAGCGATTGCAAAATTGACTAATAGAGAATTCCAATCTGGATCCTTAGAAGATGCTTTGGAGAATGCCGATGTTTTTATAGGTGTTTCTGCTCCGGAAGCATTACATGCAGAATGATTTCCAAGATGGCTGATAAACCTATTGTATTTGCAATGGCGAATCCCATTCCAGAAATTTATCCAGATCAAGCCTTAAAAGTCGGAGCTTACATAGTTGGAACTGGTCGTAGTGATTTTCCAAATCAAATTAATAATGTTTTAGCATTTCCGGGTATTTTCAGAGGAGCATTAGATGCTAGAGCAAAAACGATAACTGTTGAAATGCAAATTGCAGCAGCGAGAGGCATAGCTAGTTTAATACCGGAGGAAGAATTAAGCACAACTCACATCATTCCAAATGCTTTTCAAAATGATGTGGCCGATGTAGTTGCTAAAAGCGTCAGTAATGCTGTACAAAAA

SEQ ID NO: 12408 - protein, 387 aa, Streptococcus agalactiae
MSENLGQLAINQARENGGKLEVISKVKVEDKRELSIAYTPGVASVSSAIAEDVELAYELTTKKNTVAVVSDGSAVLGLGDIGPEAAMPVMEGKAALFKRFANVDAVPIVLKTNDTEEIISIVKAISPTFGGINLEDISAPRCFEIEQRLIEECDIPVFHDDQHGTAIVVLAALFNSLKLVKKDIEDIRVVVNGGGSAGLSITRKLLSAGAKHVTVVDRFGIINDKDRESLAPHHKAIAKLTNREFQSGSLEDALENADVFIGVSAPEALHAEWISKMADKPIVFAMANPIPEIYPDQALKVGAYIVGTGRSDFPNQINNVLAFPGIFRGALDARAKTITVEMQIAAARGIASLIPEEELSTTHIIPNAFQNDVADVVAKSVSNAVQK

SEQ ID NO: 12409 - protein, 1335 aa, Streptococcus agalactiae
ATGGCAGACGTGAAGGTAGTGAATAATGAGGATTCTAGAGGTCAAAAGCAAGACTTAAAGACTAAACTATTTCATATTAAGGTAGGGTCAGTTCCCCTACCAGTATATGTTTGTTTAGCATTATTGATTCTTCTAGCAGGCTTTTTACAAAAATTGCCAGTCAATATGCTAGGAGGATTTGCAGTCATCTTAACAATGGGATGGTTCTTAGGTACTATTGGAGCTAGCATCCCTGGTTTTAAAAACTTCGGTGGCCCAGCTATTTTATCTTTATTAGTACCATCTATTTTGGTGTTTTTCAACCTCATTAATAAAAATGTTTTAGAATCAACAAATATGTTGATGAAGCAAGCTAACTTTCTTTATTTTTATATTGCTTGTTTAGTGTCCGGTAGTATTTTAGGGATGAATCGGAAAATGTTGATTCAGGGATTGCTAAGAATGATTTTCCCCATGTTATTAGGAATGGTTTGTGCGATGATGGTAGGGACATTTGTCGGTGTTATTTTAGGCTTAGAGTGGCGACACACTTTGTTTTATATCGTAACACCCGTTTTAGCTGGTGGTATTGGTGAAGGTATTTTACCATTATCGTTAGGCTATAGTTCAATTACCGGTGTAGCTAGTGAACAACTAGTTGCTCAACTCATCCCAGCCACTATTATTGGTAATTTCTTTGCCATTTTATGTACTGCACTATTGAATCGTTTGGGAGAAAAGAAACCACACTTGTCTGGTCAAGGGCAATTAGTAAGGTTAAATAAAGGAGAGGACATGTCAGATATTATTGCTGATCATTCTGGCCCAATTGACGTTAAGAAAATGGGTGGAGGTGTTTTAACAGCATGTAGTCTCTTTATTTTTGGACATTTGTTGCAGCAATTAACTGGATTTCCTGGCCCTGTATTAATGATTATTGCAGCAGCTATTTTGAAATATATCAATGTTATTCCTAGAGAAACACAAAATGGAGCTAAGCAACTTTATAAATTTATTTCTGGTAATTTTACATTTCCTCTAATGGCAGGGCTAGGATTGCTTTATATCCCGTTAAAAGATGTTGTGGCAACGCTTAGCATACAATATTTCATAGTTGTTATTAGTGTTGTATTTACAGTTATTTCTGTTGGATTCTTTGTATCGCGATTCCTTAATATGAATCCTGTTGAAGCAGGTATTATTTCAGCTTGTCAAAGTGGTATGGGAGGAACAGGAGATGTTGCCATTTTAAGTACAGCAGACCGAATGAACTTGATGCCATTTGCTCAAGTTGCTACGCGTTTAGGAGGAGCTATTACTGTTATCACAATGACAGCCATTTTACGCATGTTATTC

SEQ ID NO: 12410 - protein, 445 aa, Streptococcus agalactiae
MADVKVVNNEDSRGQKQDLKTKLFHIKVGSVPLPVYVCLALLILLAGFLQKLPVNMLGGFAVILTMGWFLGTIGASIPGFKNFGGPAILSLLVPSILVFFNLINKNVLESTNMLMKQANFLYFYIACLVSGSILGMNRKMLIQGLLRMIFPMLLGMVCAMMVGTFVGVILGLEWRHTLFYIVTPVLAGGIGEGILPLSLGYSSITGVASEQLVAQLIPATIIGNFFAILCTALLNRLGEKKPHLSGQGQLVRLNKGEDMSDIIADHSGPIDVKKMGGGVLTACSLFIFGHLLQQLTGFPGPVLMIIAAAILKYINVIPRETQNGAKQLYKFISGNFTFPLMAGLGLLYIPLKDVVATLSIQYFIVVISVVFTVISVGFFVSRFLNMNPVEAGIISACQSGMGGTGDVAILSTADRMNLMPFAQVATRLGGAITVITMTAILRMLF

SEQ ID NO: 12411 - protein, 1488 aa, Streptococcus agalactiae
TTGATTTTAGTCACTATGACCATTTGTATATTTTCTATTTTTTATTATGTCACTATACATCAGTCCTATCGTATGGTAAGGGTACAGGAAGAAAAAATCTTAAAAAATACTGGTTATGCTTTATCGAGAAATCCACAAGTTATACAAACACTCAAAGATAATCACTATGATCAAAGTCTCCAAAAACAAATGCTATTCCTTAGCAAAAAATCAAATTTAGACTATATTGTCCTTATAAATTTAAAAGGGATCCGTTTTACCCACCCTGACTCCACTAAGATTGGTAAACCATTTCAAGGGGGTGATGAACAAGCTGTTTTTAAGGGAAAAGCTATTATGTCTACTGCAGAAGGTTCTTTAGGAAAATCTTTACGATACTTAATTCCAGTATATGATCACCAAAAACAGGTTGGGGCAATTGCAGTTGGCTTAAAATTAACGACACTTGGAGACTTATCTCAAAGCAGCATAAAAGAGTTTAGTAAGCCTCTCTTGATTAGTATTTTGATTAGCTTAGTCGTCACAAGTATAATTTCTTATGGCTTAAAAAAACAACTTCACAACCTCCATCCAAGTGATATTTTTCAACATTTAGAAGAGCGCAATGCAACACTGGACCAAATTCAAGCCGCTGTATTTGTTATTGACCAGAGGCATATCATCAAAAGAAATAATCCTGCAGCTAGTTTATTATTCAAAAAAGAGGGGCAACGAGACCTATTTTCAGGTAAATTATTAGAATCTTTAATTCCTCAACTCAAGCAGGATCATTTTTCAAAAAAAACTGAACAAGTATTACATTTTCAAGGACAAGACTATTTACTATCTATCTCGCCAATTACGGTTAAAACACAAAATAGAGGCTATGTTGTCTTCTTAAGGAATGTTACTGAAACACTTTTCACTTTGGATCAATTAGCACACACTACAGCTTATGCTTCTGCTCTACAGGCCCAAACACATCAATTTATGAATCAACTTCATGTTATTTATGGACTTGCAGACATCGAATACCACGACGAGTTGAAAATTTATTTAAAAGAATTATTGGAGCCACAAAATGAATTTTTAGCACGCTTATCAATGTTAGTTAGAGAGCCTCGACTGGCTAGTTTCATTATTGGCGAAAGAGAAAAATTCGCAGAAAAACACATCAATCTATCCACAGAAATTTTAGTAGACATCCCTACCAAGTCAACTGTTGAGGATGTTAATAACTATCTCTTGCTCCACAGATATATTAATACGAAGATACTCACGCTATTAAATTCAACGACTTTAGTTTCTTTACGTTTAAATTATCAAAATAACCTCATTGAAACAGATTATCAATGGGAGAATGAGAAGTGGTTACTCAATGACTACCATCAGTATTTCAACGACGCTTATTTTCAACAGTTACTTGTAGATTCAAGAGCTACTTATAAGATCTCTTTAAAACAAGATAAGGTTATTATAAGAACAAATATTATCTACTCAGAAGGGTCT

SEQ ID NO: 12412 - protein, 496 aa, Streptococcus agalactiae
MILVTMTICIFSIFYYVTIHQSYRMVRVQEEKILKNTGYALSRNPQVIQTLKDNHYDQSLQKQMLFLSKKSNLDYIVLINLKGIRFTHPDSTKIGKPFQGGDEQAVFKGKAIMSTAEGSLGKSLRYLIPVYDHQKQVGAIAVGLKLTTLGDLSQSSIKEFSKPLLISILISLVVTSIISYGLKKQLHNLHPSDIFQHLEERNATLDQIQAAVFVIDQRHIIKRNNPAASLLFKKEGQRDLFSGKLLESLIPQLKQDHFSKKTEQVLHFQGQDYLLSISPITVKTQNRGYVVFLRNVTETLFTLDQLAHTTAYASALQAQTHQFMNQLHVIYGLADIEYHDELKIYLKELLEPQNEFLARLSMLVREPRLASFIIGEREKFAEKHINLSTEILVDIPTKSTVEDVNNYLLLHRYINTKILTLLNSTTLVSLRLNYQNNLIETDYQWENEKWLLNDYHQYFNDAYFQQLLVDSRATYKISLKQDKVIIRTNIIYSEGS

SEQ ID NO: 12413 - protein, 678 aa, Streptococcus agalactiae
ATGGACGTATTAATTATCGAAGATGATCCTATGGTGGAATTTATCCACCGCAATTACCTTGAAAAACTCAATTATTTTCAAAACATCTATTCAACTGCTAGTCAAACACAAGCTATTGCTTATCTTAATGACATTAAAATCCAACTTGTTCTTTTAGATATTCATATTAAAGAAGGCAATGGTCTAGAATTATTAAAGTTATTACGCAATCAACACCAAAATACCGAAGTCATTGTTATTTCAGCAGCCAACGAGGCGCACACTGTCAAAGAAGCATTTCATTTAGGTATTGTAGATTACCTGATAAAACCATTTACATTTGAACGTTTTGAGTCTAGTATTGAAAAATTCCTAAATCATTATCATACATTTGAAGCTGATAAAATCTACCAAGACAACATCGATCACTTTCAAAAAATAGATTCTGGATGGCTAGAGGGAGAGGTTAAACTTGATGAGAAAGGGCTCTCTGAAATTACCTATCAGCATATTCTTGATGCCATTCAAGAGTTAGAGCAGCCTTTCACTATCCAAGAGTTAGCAAAATGCAGTCAATTTTCTCATGTCTCTGTTAGGAAATATATTGCCTATATGGAAGAAAAAGGCCTTCTGACAAGTCAGCAAATTTATACTAAGGTCGGTCGTCCTTACAAAGTTTATAAGCTTATAAAAAAAACT

SEQ ID NO: 12414 - protein, 226 aa, Streptococcus agalactiae
MDVLIIEDDPMVEFIHRNYLEKLNYFQNIYSTASQTQAIAYLNDIKIQLVLLDIHIKEGNGLELLKLLRNQHQNTEVIVISAANEAHTVKEAFHLGIVDYLIKPFTFERFESSIEKFLNHYHTFEADKIYQDNIDHFQKIDSGWLEGEVKLDEKGLSEITYQHILDAIQELEQPFTIQELAKCSQFSHVSVRKYIAYMEEKGLLTSQQIYTKVGRPYKVYKLIKKT

SEQ ID NO: 12415 - protein, 993 aa, Streptococcus agalactiae
ATGGCAGTTCTGATTTTAGGTGGCGCCGGCTACATTGGCTCGCATATGGTTGATCAGTTAATCACACAAGGAAAAGAGAAAGTTATTGTTGTTGATAACTTGGTAACAGGTCATCGTCAAGCGGTGCATTCAGATGCGATTTTTTATGAAGGAGATTTATCCGATAAAACGTTTATGCGTCAAGTTTTTAGGGAAAATCCTGATGTAGATGCAGTTATCCATTTTGCGGCATTTTCACTAGTTGCTGAATCAATGGAAAATCCTTTAAAATATTTTGATAATAACACTGCTGGAATGATAAAACTTTTAGAAGTAATGAATGAATGTGATATCAAAAATATTGTCTTTTCATCAACAGCTGCAACATATGGTATTCCAGAACAAGTTCCTATTTTAGAAACAGCTCCTCAAAATCCTATTAATCCTTATGGCGAAAGTAAGCTTATGATGGAAACAATTATGAAATGGGCTGATCAAGCCTACGGTATTAAGTTTGTCGCTCTACGTTACTTCAACGTTGCTGGAGATAAACCGGATGGCTCAATTGGGGAAGATCATAAACCAGAAACACATTTGTTACCAATCATTCTTCAAGTTGCTCAAGGAGTACGTGACAAAATAATGATTTTTGGAGATGATTACAATACTCCAGATGGAACTAATGTTCGAGATTATGTGCATCCATTTGATTTGGCAGATGCTCATATATTAGCAGTTGATTACCTTCGCCAAGGGAATGAATCAAACGTGTTTAATCTCGGATCTTCGACAGGTTTTTCTAACCTTCAGATGTTAGAGGCAGCTCGTCGTATTACTGGGAAAGAAATTCCTGCTCAAAAGGCAGCTCGTCGTCCAGGAGATCCAGATACGCTTATTGCTTCCTCAGAGAAAGCTCGTCAAATCCTTGGGTGGGAGCCTAAATTTGATAATATTGATAAAATTATTTCATCGGCATGGGCATGGCACTCTAGTCATCCAAATGGCTACGAAGAT

SEQ ID NO: 12416 - protein, 331 aa, Streptococcus agalactiae; identical to SEQ ID NO: 3452

SEQ ID NO: 12417 - protein, 1605 aa, Streptococcus agalactiae
ATGAAGAAACACTGGTGGCATAAAGCTACGATTTATCAAATTTACCCACGTTCATTTATGGATTCAGATGGTGATGGTGTGGGGGACATTAAAGGGATTACTAGCAAACTAGACTACCTTGAAAAATTAGGGATTACTGCTATCTGGTTATCACCTGTTTATCAAAGTCCAATGGATGACAATGGTTATGATATTTCAGATTATCAAGCCATTGCAGATATTTTCGGTGACATGAATGATATGGACCAACTGTTACAAGAGGCAAATCAACGCGGGATTAAAATCATCATGGATTTGGTAGTGAATCATACCTCTGATGAACATGCTTGGTTCGTAGAAGCGCGAGAAAACCCTAATAGTCCTGAACGTGATTTTTATCTTTGGCGAGATGAACCTAACGATTTGACTTCTATTTTTAGTGGCTCAGCTTGGGAATATGATAAAGCATCAGGTCAATATTATTTGCACCTTTTTAGCAAACGTCAGCCAGATCTCAACTGGGAGAATGAAGCTTTACGTCATAAAATTTATGATATGATGAATTTCTGGATTGATAAGGGTATTGGTGGTTTCCGTATGGATGTCATTGATTTAATTGGGAAAATTCCAGATAAGGGCATTACTGGTAATGGACCAAAACTCCATGATTATCTTAAAGAAATGAACAGAGCTAGTTTTGGAAAGCATGACTTATTGACGGTGGGTGAAACTTGGGGAGCAACGCCAGACATTGCAAAACAATACTCAAATCCCGATAATGAAGAATTATCTATGGTCTTTCAATTTGAACATGTAGGTCTTCAACATAAACCTGACGCTCCTAAGTGGGATTACAGTGACGGATTAGATGTTCCAGCATTGAAAGATATTTTTACAAAATGGCAAACACAATTGGAGCTTGGCCAAGGTTGGAATTCTTTATTCTGGAATAATCACGACCTTCCTCGGGTGCTCTCGATTTGGGGAAATGATAGTGATAACAGAAAACAATCTGCCAAGGCTCTAGCAATCCTACTACATTTGATGCGTGGAACGCCTTACATCTATCAAGGTGAAGAAATTGGTATGACCAATTATCCATTTGAGTGTTTAGCAGATGTAGATGATATTGAATCCCTTAACTATGCTAAAGAAGCCATGGATAATGGGGTATCTGAAGCAACAATTTTAGATAGTATTCGTAAAGTCGGTCGTGATAATGCTCGTACTCCAATGCAGTGGAGTCAAGAACATCAAGCTGGTTTTACTAAAGGTACCCCATGGCTAGCAGTCAATCCCAATTATCAGGAAATTAATGTGGAGGCAGCGCTAAATGATACGGAAAGTATTTTTTATACTTATCAAAAATTAGTTGCTTTACGTAAAGAACACGACTGGTTAGTTGATGCTGATTTTAAACTTTTGGAAACAGCAGATAAGGTATTTGCTTATGTTCGTCAAACAGATAAAGAACGTTATTTAATAGTTGCGAACTTATCCGATAAAAACCAATCTTTTGAATTTCCAGAAGCTGTTAAAGAAACTATTATTTCAAATACAGAGGTTCAAGAAGTACTATCAAATAACACTCTTAAGCCGTGGGATGCCTTCTGCATAGAGCTATTC

SEQ ID NO: 12418 - protein, 535 aa, Streptococcus agalactiae
MKKHWWHKATIYQIYPRSFMDSDGDGVGDIKGITSKLDYLEKLGITAIWLSPVYQSPMDDNGYDISDYQAIADIFGDMNDMDQLLQEANQRGIKIIMDLVVNHTSDEHAWFVEARENPNSPERDFYLWRDEPNDLTSIFSGSAWEYDKASGQYYLHLFSKRQPDLNWENEALRHKIYDMMNFWIDKGIGGFRMDVIDLIGKIPDKGITGNGPKLHDYLKEMNRASFGKHDLLTVGETWGATPDIAKQYSNPDNEELSMVFQFEHVGLQHKPDAPKWDYSDGLDVPALKDIFTKWQTQLELGQGWNSLFWNNHDLPRVLSIWGNDSDNRKQSAKALAILLHLMRGTPYIYQGEEIGMTNYPFECLADVDDIESLNYAKEAMDNGVSEATILDSIRKVGRDNARTPMQWSQEHQAGFTKGTPWLAVNPNYQEINVEAALNDTESIFYTYQKLVALRKEHDWLVDADFKLLETADKVFAYVRQTDKERYLIVANLSDKNQSFEFPEAVKETIISNTEVQEVLSNNTLKPWDAFCIELF

SEQ ID NO: 12419 - protein, 1131 aa, Streptococcus agalactiae
ATGGTAGAATTAAATTTAAATCATATTTACAAAAAATATCCAAGTGCATCGCATTATTCTGTTGAAGACTTTGACTTGGATATTAAAGACAAAGAATTTATTGTTTTTGTTGGACCATCAGGTTGTGGGAAATCAACAACACTTCGTATGATCGCAGGTCTTGAAGATATTAGTGAAGGTGAGCTCAAGATTGATGGCGAAGTTGTCAATGACAAATCACCTAAAGATCGTGATATTGCTATGGTTTTCCAAAACTATGCTCTTTATCCACATATGACTGTTTACGATAATATGGCTTTTGGGCTCAAATTGCGTAAATTCTCAAAACAAGAAATTGATAAGCGCGTTCGTGAAGCAGCAGCTAATATTGGCCTTACTGAATTCTTAGAGCGCAAACCTGCGGATTTGTCAGGTGGACAACGCCAACGTGTTGCTATGGGACGTGCTATTGTGCGTGATGCCAAAGTGTTCTTAATGGATGAGCCTTTATCTAACTTAGATGCTAAATTACGTGTTTCAATGCGTGCTGAAATTGCAAAAATTCATCAACGTATTGGTTCAACAACTATTTATGTTACCCACGACCAAACAGAGGCGATGACTTTGGCAGACCGTATTGTCATTATGTCAGCTACTAAGAACCCTGATGGTGATGGTACAATTGGTAAAATTGAGCAAGTTGGTTCACCACAAGAACTCTATAATCTTCCTGCCAATAAATTTGTTGCGGGATTCATTGGTAGCCCATCTATGAACTTCTTCAAAGTTAAAGTTGAAAATGGTATGATTATTAGTGAAGATGGTCTTCGAATCGCTATCCCTGAAGGTCAAGAAAAACTTTTAGAATCACGAGGCTATAAAGGAAAAGAATTGATTTTTGGTATTCGTCCAGAAGACATTTCAAGCAATCTTCTTGTCCAAGATACTTATCCAAATGCCAATGTTGAAGCAGAAGTTTTAGTTTCTGAATTACTCGGTAGCGAAACTATGCTTTATGTTAAGTTAGGTCAAACAGAATTTGCTTCTCGTGTTGAAGCGCGTGACTTCCATAATCCAGGAGAAAAAGTTAACCTAACGTTTAATGTTGCTAAGGGGCATTTCTTTGATGCAGATACTGAACAAGCTATTCGT

SEQ ID NO: 12420 - protein, 377 aa, Streptococcus agalactiae; identical to SEQ ID NO: 3460

SEQ ID NO: 12421 - protein, 849 aa, Streptococcus agalactiae
ATGGATTTTAAGGAACTGTTTCCAGAAGTTATTACTAAACAGGAAGTTAAACAGAGTGAGGATTATATCATCGTTGAGCAAGATGGTCATGTCCTCCACTTTCCAAAATCTTCGCTAACTAAGCGTGAACTATGCTTATTACAAATGACACCAAGCCTGGAAGATGCGAGTTCAGTGGATTCTCAGAATCCTTGGTACCGCTATCTAGTTGAAGGTCGTGGAAGGTTGCCCCAATCTCATTCGGCAGTCCAATTTATTTTTATTGAGCATCAATTTACCTTATCAGAAGAACTTAAGGATTTCTTGTCGCCTTTAGTAATAAACGTAGAAATAATTATGACAATTAATCAAACCCAAAGTGTCATGATTTTAAATCAGGATAATTTCTTTAATGCTACGGAATTACTAACAGATATTTTACCAACGATTGAAAATGACTTTAACACGCGTTTAAGGTGCTATTTTGGGAATAGTTGGACGCATCTACAAGCAGTGGACTGGAAAGAATTATATGAAGAAGAATATAAACTTTTTACGCTTTTTCTTAGTCACAAGGCCGAACAACATTACTGTCGATTTCCAAAGATGGCTTTATGGGCTTTGGCAAATCAATCGCCCATGCCTTCTATTAAAGCAAAATGTTTACAACATATCCTTGATACGAGTGATACTTCGGCTATAATAAAAGCCTTGTGGCAAGAGCAAGGGAATCTTGCTAAAACGGCTAAGGCACTTTTCATTCATCGGAATTCATTGCAATATAAATTAGATAAATTTACCCAATCTTCGGGACTTAATTTAAAAATATTAGATGATTTAGCCTATGCCTATTTAATTTCGATGGATACC

SEQ ID NO: 12422 - protein, 283 aa, Streptococcus agalactiae
MDFKELFPEVITKQEVKQSEDYIIVEQDGHVLHFPKSSLTKRELCLLQMTPSLEDASSVDSQNPWYRYLVEGRGRLPQSHSAVQFIFIEHQFTLSEELKDFLSPLVINVEIIMTINQTQSVMILNQDNFFNATELLTDILPTIENDFNTRLRCYFGNSWTHLQAVDWKELYEEEYKLFTLFLSHKAEQHYCRFPKMALWALANQSPMPSIKAKCLQHILDTSDTSAIIKALWQEQGNLAKTAKALFIHRNSLQYKLDKFTQSSGLNLKILDDLAYAYLISMDT

SEQ ID NO: 12423 - protein, 894 aa, Streptococcus agalactiae
ATGGCTATTACGATACAAAATCATGAGTTGCAAGTGACATTAAAAGCGTTAGGTGCAACAATGACTTCTATTACAGATAGTCAAGGCGTTGAGTACCTTTGGCAAGGGGACCCCACTTATTGGGGTGGGCAAGCTCCTATTTTATTTCCTATATGCGGAAGTGTTCGAAATGATTGCGTCATTTACAGACCAGCTCAAGCTCCACATTTTACGGGTATCATACCAAGGCATGGCTTTGTACGTCACAAAACATTCGACTATGATTACATATCGGATTCTTCTGTTCGTTTTACAATTAAAAGTAGTGAAGAAACGTTGATAAATTATCCTTATCGTTTTAGTTTAGAAATAACTTACACCTTAAGAAATAAAAGCATTGACATTACATATATTGTCAAAAACTTAGAATCAGAAAAAAATATGCCATATGCTATCGGAGCTCACCCAGGCTTTAATTGCCCTTTGTTTGAAAAGGAAGTATTTAGTGATTACTATCTAGAGTTTGAACAGTTTGAAACTTGCACAATTCCTGAGTCGTTTCCGGATACAGGCTTGTTAGATTTACAAGCTAGACATCCTTTTTTAGAAAATCAAAAACAATTATCTCTTAATCATGCTTTATTTGAAAAAGATGCTATTACTTTAGACCAACTACGATCTAAGACGGTTTACTTAAAATCTAGAAATCATGCAAAAGGAATCCAACTTGACTTTGATGATTTTGAGAATCTTATTCTTTGGACAAGTAACAATGGTGGTCCTTTTTTGGCTTTGGAACCCTGGAGTTCTTTGTCAACTTCTATTGAAGAGTCTGATATTTTAGAAGATAAACAAAATATCGTACGGCTTAATCCAAAGCAGTCGAAACAGCATTCTATTCGGATCACTATTTTA

SEQ ID NO: 12424 - protein, 298 aa, Streptococcus agalactiae
MAITIQNHELQVTLKALGATMTSITDSQGVEYLWQGDPTYWGGQAPILFPICGSVRNDCVIYRPAQAPHFTGIIPRHGFVRHKTFDYDYISDSSVRFTIKSSEETLINYPYRFSLEITYTLRNKSIDITYIVKNLESEKNMPYAIGAHPGFNCPLFEKEVFSDYYLEFEQFETCTIPESFPDTGLLDLQARHPFLENQKQLSLNHALFEKDAITLDQLRSKTVYLKSRNHAKGIQLDFDDFENLILWTSNNGGPFLALEPWSSLSTSIEESDILEDKQNIVRLNPKQSKQHSIRITIL

SEQ ID NO: 12425 - protein, 975 aa, Streptococcus agalactiae
ATGGGATTAACAGAACAAAAACAAAAACATATGGAACAATTGAGTGATAAAAATGGTATTATTTCGGCCCTGGCTTTTGACCAACGTGGAGCATTGAAGCGATTAATGGCAAAATATCAATCTGAGGAGCCCACTGTTTCTCAAATAGAAGCACTTAAAGTTTTGGTAGCTGAAGAATTAACCCCTTACGCTTCATCAATGTTGTTAGATCCAGAATATGGGTTGCCAGCTACGAAAGTTTTAGATGACAATGCCGGTCTTTTACTTGCGTATGAAAAAACGGGTTATGATACCAGTAGTACCAAACGACTCCCAGACTGTTTAGACATTTGGTCTGCGAAACGCATTAAAGAAGAGGGAGCAGACGCAGTTAAGTTCTTACTTTATTATGATGTTGATAGTTCGGATGAAGTAAACGAAGAAAAAGAAGCTTATATTGAACGGATTGGTTCTGAATGTGTTGCAGAAGATATTCCTTTTTTCCTTGAAATTTTGTCATATGATGAAAAGATTGCGGATAGCTCAGGTATTGAGTATGCTAAAATTAAGCCACGTAAGGTTATTGAAGCTATGAAAGTTTTTTCAAATCCTCGATTTAATATTGATGTCTTGAAGGTGGAAGTGCCTGTCAATATGGACTATGTAGAAGGTTTTGCGCAAGGAGAGACTGCTTATAATAAAGCGACAGCTGCGGCTTATTTTAGAGAACAAGATCAGGCGACACTACTCCCCTACATTTTTTTGAGTGCAGGAGTTCCTGCTCAGCTTTTTCAAGAGACTCTTGTGTTTGCTAAAGAAGCTGGTGCTAAATTTAACGGTGTCCTTTGTGGTAGAGCAACTTGGGCTGGAAGTGTTAAAGAGTATGTTGAAAAAGGAGAAGCTGGTGCACGTCAATGGTTACGTACAATAGGTTTTCAAAATATTGATGAACTAAATAAAATTTTGCAAAAAACAGCAACTTCTTGGAAGGAAAGA

SEQ ID NO: 12426 - protein, 325 aa, Streptococcus agalactiae
MGLTEQKQKHMEQLSDKNGIISALAFDQRGALKRLMAKYQSEEPTVSQIEALKVLVAEELTPYASSMLLDPEYGLPATKVLDDNAGLLLAYEKTGYDTSSTKRLPDCLDIWSAKRIKEEGADAVKFLLYYDVDSSDEVNEEKEAYIERIGSECVAEDIPFFLEILSYDEKIADSSGIEYAKIKPRKVIEAMKVFSNPRFNIDVLKVEVPVNMDYVEGFAQGETAYNKATAAAYFREQDQATLLPYIFLSAGVPAQLFQETLVFAKEAGAKFNGVLCGRATWAGSVKEYVEKGEAGARQWLRTIGFQNIDELNKILQKTATSWKER

SEQ ID NO: 12427 - protein, 930 aa, Streptococcus agalactiae
ATGATTTTAACAGTAACTTTGAACCCTTCTATTGATATTTCGTACTGCTTAGAAAACTTTAACATGGATACTGTAAATCGAGTTACCGACGTCTCCAAAACACCTGGGGGTAAGGGGTTAAATGTGACTCGTGTTCTTTCTCAACTTGGCGATAATGTAGTGGCAACTGGTCTATTAGGGGGGCATTTTGGAGATTTCATCCGAAGTGGCTTAGATACATTGGAAATCAGACACCAATTTTTAAGTATTGGTGGAGAAACACGTCATTGTATTGCAGTTTTACATGAGGGTCAGCAGACTGAAATTCTAGAAAAAGGTCCACATATTACTAAAGATGAAGCAGACGCCTTTTTGAATCATCTAAAACTTATCTTTGATGCTGCAACTATCATAACAGTATCAGGAAGTTTACCAAAGGGACTCCCCTCAGATTATTATGCTAGGTTAATCTCCCTAGCGAATCACTTTAATAAGAAAGTTGTTTTAGACTGTTCAGGAGAAGCATTGCGTTCGGTTTTAAAATCTAGTGCTAAGCCGACCGTCATTAAACCTAACCTTGAAGAATTAACACAATTAATTGGAAAGCCGATTAGCTATAGTTTAGACGAACTAAAATCTACCTTACAGCAAGATATTTTTAGAGGAATTGATTGGGTTATTGTTTCTTTAGGTGCTAGGGGAGCTTTTGCTAAACATGGGAATCACTACTATCAAGTGACGATTCCAAAAATAGAAGTTATTAATCCAGTTGGTTCAGGGGATGCAACGGTTGCAGGAATCGCGTCTGCTTTAGAACATCAACTAGATGATATAAATTTGCTTAAGAGAGCTAATGTCTTGGGTATGCTTAATGCACAAGAAACATTAACAGGGCATATCAATCTGACCTACTATCAAGAATTAATCAGTCAAATCCAAGTGAAAGAGGTA

SEQ ID NO: 12428 - protein, 310 aa, Streptococcus agalactiae
MILTVTLNPSIDISYCLENFNMDTVNRVTDVSKTPGGKGLNVTRVLSQLGDNVVATGLLGGHFGDFIRSGLDTLEIRHQFLSIGGETRHCIAVLHEGQQTEILEKGPHITKDEADAFLNHLKLIFDAATIITVSGSLPKGLPSDYYARLISLANHFNKKVVLDCSGEALRSVLKSSAKPTVIKPNLEELTQLIGKPISYSLDELKSTLQQDIFRGIDWVIVSLGARGAFAKHGNHYYQVTIPKIEVINPVGSGDATVAGIASALEHQLDDINLLKRANVLGMLNAQETLTGHINLTYYQELISQIQVKEV

SEQ ID NO: 12429 - protein, 513 aa, Streptococcus agalactiae
ATGAAAATTGCGGTCGGTTGTGATCATATTGTAACTTATGACAAAATTGCAGTTGTGGATTATTTAAAAACAAAAGGGTATGAGGTTATTGATTGTGGAACTTATGATAATATCCGTACTCACTATCCTATTTATGGTAAGAAAGTAGGAGAAGCTGTCGCTAGTGGAAAAGCCGACTTAGGTGTATGTATTTGTGGAACTGGAGTTGGTATTAATAATGCTGTTAATAAAGTTCCAGGAATTCGCTCAGCTCTGGTACGTGATTTGACATCAGCTATCTATGCTAAAGAAGAATTAAATGCTAACGTTATCGGATTTGGTGGGAAAATTACTGGTGGGCTGTTAATGACAGATATCATCGAGGCATTTATAAGAGCTAAATATAAACCAACAAAAGAAAACAAAGTATTAATTGAAAAGATAGCCGAGGTTGAGACTCATAATGCCCATCAAGAAGAGAATGACTTTTTCACAGAGTTCTTAGATAAATGGAATCGTGGTGAATATCACGAC

SEQ ID NO: 12430 - protein, 171 aa, Streptococcus agalactiae; identical to SEQ ID NO: 3474

SEQ ID NO: 12431 - protein, 423 aa, Streptococcus agalactiae; identical to SEQ ID NO: 8153

SEQ ID NO: 12432 - protein, 141 aa, Streptococcus agalactiae; identical to SEQ ID NO: 8154

SEQ ID NO: 12433 - protein, 2379 aa, Streptococcus agalactiae
ATGCTAGGTTTTATCTTATTATGTGGACTTTTGCATCCTAGTACAATTTATAGTGAGGAAATAAAATCTGATATAAACTCTTTTATATCAATAGATGATGAAAAAACTACTGCTCCCATATTTGACTCTACTTTAGATAAGCTTACTAATTCAATAGAGGAGAGGCAGTTAGAATTAGATTCTGATACATCGGACGGTTTAATAGTAGATGATCAAAAAGATAAAGATATGGTAGTAGTCTTAGGTGATTCTGACAGTCAAGAAAAATTGTCACCTCCTCTAAAATCGGAAATAGCGACAGAAGAAAATCGTAAACAGGCAAATTTAGCAGAACTAAATGCAACTCAACCTAATAATAGAACTACCTATATTATACCCGAAAGCAGTCATTCCATTGCAGAACAACAGAGATTCCTGATAGAATCAAAGGGTTCTTCGGTTGCATTACTTAATAGCGATGAATTTAGAAAGACAGCGAGAGAGGATAGAGGTTTTGAAAGGGATAAGTTGAGGTCTTTGGATATCATTCCTAAGGGAGATTTATCGACAAGTAATGTCATAGGTAATACGGACATTGCTAGTCAGATATCGTTGGGCTTTAAAAAGAATGCGATACAGGAACACCATCTTACTAAAACATTCTCTCAAAAGGATGGAAAGTTATCGTCTGTTATAGAGGGGATGCTTGCTATTGGCAAAGAGAAAGTAGAGAAAGAAATAAAATATAGTGGTAATTTATGGCAAAAATTAAAAGCTAAGGCACACTGCCTTGTTTGCTGTGTTGATAATTTGAATTTTGAAGATATAAAATCTTATTTTCAATATTATTGTCATCTAAACCATCAGCTCAAATTACCTAAAGGTGCTATACTTTCTGCTAAAACAGAAGTATATAGGGGAGGAGATTTTGGGAGAAAAAATAAAGATAATGTGTTTGGTTACCGTATCCCCTCATTATTGAAAACCGAAAAAGGAACTTTACTTGCAGGAGCTGATGAAAGAATTGAGCAAGCTTGTGATTGGGGAAACATAGGAATGGTTATTCGCCGTAGTGAGGATGATGGTGTCACTTGGGGAAAAAGAGAAACTATTGTCAATCTCCGTAATAACCCTAGAGTTCCGCTAGTTACTAGTGGTGACTATAGTGGCTCACCTATTAATATGGATATGGCATTAGTTCAAGATACTAGCTCTAAGACGAAACGTATTTTTTCAATATATGATATGTTTCCAGAAGGAAGAGGCGTTATTAGTATTGCTAACACACCTGAAAAAGAATATACCCAAATCGGAGGACAGTCTTATCTTAATTTATATAATAATGAAAAGAAATCGAAGGTTTTTACTATCCGTGACAAAGGTATTGTATATAATTTTAAAGGGAAAAAGACTGATTATCATGTTATAACAGAAACTACTAAAAGTGACCATTCAAATCTAGGGGATATTTATAAGGGAAAACAGCTACTTGGAAATATATATTTTACAAAACATAAAACGTCACCATTTCGTTTAGCAAAATCAAGCTATGTGTGGATGTCATATAGCGATGATGATGGTAGGACATGGTCATCACCTAGAGATATAACAGCAAGTCTTCGTCGGAGAGGCATGAAATTTTTGGGAATAGGACCTGGAAAAGGTATAGTTTTAAAATGGGGGCCACACGCTGGTCGTATTATTATTCCTGCCTATTCTACGAATTGGAAATCTCATCTAAGAGGTTCACAATCTTCACGCCTAATTTATTCAGACGACCATGGAAAAACGTGGCATACTGGAAAAGCAGTCAATGATAACCGTGTACTTTCTAATGGTGAAAAAATTCACTCATTAACAATGGATAATAAAAAAGAACAAAATACAGAATCCGTACCTGTTCAATTGAAAAATGGGGACATTAAGTTATTTATGAGGAATCTAACTGGTAACCTAGAAGTAGCCACAAGTAAAGACGGCGGGGAGACTTGGCAAAACCATGTTAAACGATATAAGGAAGTTCATGATGCTTACGTCCAACTATCAGCTATTCGCTTTGAGCATGACAAAAAAGAGTATATTTTATTAGTGAATGCTAATGGGCCAGGTAAGAAGCGTCAAGATGGATATGCACGTCTAGCGCAAGTTAATCGAAATGGTAGTTTTAAGTGGTTATATCACCATCACATTCAAGATGGTTCGTTTGCTTACAACTCTGTTCAACAACTTAATAATGATCAATTTGGTGTCCTTTATGAACATAGAGAAAAACATCAAAATAGTTTTACTTTAAATTACAAAGTTTTTAATTGGAGTTTTCTTAGTCAAAATACAGAGAAGCAAGGCACTTTATGGGAGAAAATGGCAGCAAATTGGCATGTTTTGTTTAAATTTTATTTA

SEQ ID NO: 12434 - protein, 793 aa, Streptococcus agalactiae
MLGFILLCGLLHPSTIYSEEIKSDINSFISIDDEKTTAPIFDSTLDKLTNSIEERQLELDSDTSDGLIVDDQKDKDMVVVLGDSDSQEKLSPPLKSEIATEENRKQANLAELNATQPNNRTTYIIPESSHSIAEQQRFLIESKGSSVALLNSDEFRKTAREDRGFERDKLRSLDIIPKGDLSTSNVIGNTDIASQISLGFKKNAIQEHHLTKTFSQKDGKLSSVIEGMLAIGKEKVEKEIKYSGNLWQKLKAKAHCLVCCVDNLNFEDIKSYFQYYCHLNHQLKLPKGAILSAKTEVYRGGDFGRKNKDNVFGYRIPSLLKTEKGTLLAGADERIEQACDWGNIGMVIRRSEDDGVTWGKRETIVNLRNNPRVPLVTSGDYSGSPINMDMALVQDTSSKTKRIFSIYDMFPEGRGVISIANTPEKEYTQIGGQSYLNLYNNEKKSKVFTIRDKGIVYNFKGKKTDYHVITETTKSDHSNLGDIYKGKQLLGNIYFTKHKTSPFRLAKSSYVWMSYSDDDGRTWSSPRDITASLRRRGMKFLGIGPGKGIVLKWGPHAGRIIIPAYSTNWKSHLRGSQSSRLIYSDDHGKTWHTGKAVNDNRVLSNGEKIHSLTMDNKKEQNTESVPVQLKNGDIKLFMRNLTGNLEVATSKDGGETWQNHVKRYKEVHDAYVQLSAIRFEHDKKEYILLVNANGPGKKRQDGYARLAQVNRNGSFKWLYHHHIQDGSFAYNSVQQLNNDQFGVLYEHREKHQNSFTLNYKVFNWSFLSQNTEKQGTLWEKMAANWHVLFKFYL

SEQ ID NO: 12435 - protein, 1444 aa, Streptococcus agalactiae
ATGCAGGTATTTTTAAATATTGTCAATAAATTCTTTGATCCAGTTATTCATATGGGTTCGGGAGTTGTGATGCTAATTGTCATGACAGGTTTAGCCATGATATTTGGAGTGAAGTTTTCTAAAGCACTTGAAGGTGGATTAGTTAGCTATTGCTCTTACGGGTATTGGTGCTATTATTGGTATTTTAACTGGTGCTTTTTCCGAATCACTTCAAGCTTTTGTTAAAAATACAGGAATCAATCTAAGCATTATTGACGTTGGTTGGGCTCCATTAGCAACTATTACATGGGGATCACCATATACGCTTTACTTCTTATTAATCATGCTTATTGTCAATATTGTTATGATTGTTATGAAAAAAACGGATACCTTAGATGTTGATATTTTTGATATTTGGCATTTATCTATCACAGGTCTTTTAATTATGTGGTATGCTAAAAAAAATAATCTACCAACACTTTTATCTGTCATTATTGCAACTGTAGCTATTATCTTTGTTGGTGTTCTAAAAATTATCAATTCTGATTTGATGAAACCTACCTTTGATGATTTATTGGGGACAGGTCCAACTTCTCCCATGACTTCAACGCATATGAATTATATGATGAACCCCATTATTATGGTTTTGGATAAGCTTTTTGATAAAGTTTTTCCAGGGCTAGATAAATATGACTTTGACGCGGCTAAATTAAATAAAGCCATTGGATTCTGGGGATCTAAGTTCTTTATTGGTATGATTTTAGGACTTGTCATAGGGATTATGGGCAACCCCGTGTTCTCATTTGCAGCATTAGGTGGCTGGTTCTCTCTCGGTTTTACAGCAGGTGCTTGTTTAGAGTTGTTCTCTTTGATTGGTTCTTGGTTCATTGCTGCAGTAGAACCACTTTCTCAAGGAATTACTAATTTTGCTAATGGTAAAATGCATGGTCGTCGTTTCAATATTGGTTTGGACTGGCCATTTATTGCCGGACGTGCAGAGATTTGGGCATGTGCTAACATTCTTGCACCGATTATGCTAGTAGAAGCTATTTTACTCTCTAAAGTTGGTAATGGTATTCTACCGCTTGCTGGTATTATCGCAATGGGCGTAACCCCTGCTTTACTGGTTGTTACACGTGGCCGTTTAATTCGTATGATTACCTTTGGAACATTGCTATTACCGCTATTTCTTTTATCAGGAACAATGATTGCCCCATTTGCAACTGAATTAGCTAAAAAGGTGGGCGCATTCCCAGCTGGGGCGCGAGCAGGTTCACTTATCACTCACTCTACACTAGAAGGCCCTATGGAGAAAATCTTTGGTTACGTTATTGGTAAAGCGACAACAGGTCAATTATCAGCGATTATAACATTAATTATTTTTGCGACAGCTTATCTTGGTTTGTTTATGTGGTATGCTAAACAAATGAAACGCCGTAATGCAGAATATGCAGCTAATCAAAAA

SEQ ID NO: 12436 - protein, 482 aa, Streptococcus agalactiae
MQVFLNIVNKFFDPVIHMGSGVVMLIVMTGLAMIFGVKFSKALEGGIKLAIALTGIGAIIGILTGAFSESLQAFVKNTGINLSIIDVGWAPLATITWGSPYTLYFLLIMLIVNIVMIVMKKTDTLDVDIFDIWHLSITGLLIMWYAKKNNLPTLLSVIIATVAIIFVGVLKIINSDLMKPTFDDLLGTGPTSPMTSTHMNYMMNPIIMVLDKLFDKVFPGLDKYDFDAAKLNKAIGFWGSKFFIGMILGLVIGIMGNPVFSFAALGGWFSLGFTAGACLELFSLIGSWFIAAVEPLSQGITNFANGKMHGRRFNIGLDWPFIAGRAEIWACANILAPIMLVEAILLSKVGNGILPLAGIIAMGVTPALLVVTRGRLIRMITFGTLLLPLFLLSGTMIAPFATELAKKVGAFPAGARAGSLITHSTLEGPMEKIFGYVIGKATTGQLSAIITLIIFATAYLGLFMWYAKQMKRRNAEYAANQK

SEQ ID NO: 12437 - protein, 303 aa, Streptococcus agalactiae
ATGATCAAAATATTAGCAGCTTGTGGTGCAGGCGTAAACTCAAGTCATCAAATTAAAGATGCTATCGAGACACAATTAGGAGATAGAGGTTACAATGTACATTGTGATGCTGTTATGGTTAAGGATATCACTGAGGAAATGGTCAACAAATATGATATCTTTACTCCTATTGCTAAAACTGATTTAGGTTTTAATGTACCAATTCCAGTTGTAGAAGCAGGACCTATTCTTTATCGCATACCAGTTATGAGCGAACCGGTCTTTACTGCTTTAGAACAAGTTATCAAAGAACATAACCTATCA

SEQ ID NO: 12438 - protein, 101 aa, Streptococcus agalactiae; identical to SEQ ID NO: 3482

SEQ ID NO: 12439 - protein, 470 aa, Streptococcus agalactiae
GTGTTTGCTGTGACTCAAGATATTTTATTTATGATGCTCATTCTCAGGAAGAATTATTTGACTTAGTATCAAAAGCATTGATAAAACAACACTATGTTAGTCCTGACTACCGACAGGCAGTAAAAGAAAGGGAGAGAGAGTTTCCGACGGGGTTAAAAATTGATTTAAAAGATGGGACTCCTATTCAATATGCTGCTATTCCACACACTGAAACGCAGTATTGTCTAGTAGATAGAATCTTTTATGTCAAAAATAGTCAGCCAATTACTTTCAAACATATGATTAATCCAGAAGAGGAGTGTAGGGTTCAGGATTTTTTCTTCATCATTAATAGTAGGAATAGTAACCAAAGTGATATTTTATCTAATTTGATTACCTTCTTTATTACAAAAGGAAATCTAGATCGGCTACATGAGCTTGGCGACAATAAGGAAAAAATTAATCATTATTTAATAGAAAAAGGAGTGTTT

SEQ ID NO: 12440 - protein, 157 aa, Streptococcus agalactiae
  VARIANT 11: Xaa = Any Amino Acid
MFAVTQDILFXDAHSQEELFDLVSKALIKQHYVSPDYRQAVKEREREFPTGLKIDLKDGTPIQYAAIPHTETQYCLVDRIFYVKNSQPITFKHMINPEEECRVQDFFFIINSRNSNQSDILSNLITFFITKGNLDRLHELGDNKEKINHYLIEKGVF

SEQ ID NO: 12441 - protein, 773 aa, Streptococcus agalactiae
ATGTTAAAGCGAGAAAGATTACAAAAAATAATAGAAAAAGTCAATATAAATGGTATTGTCACTGTTAATGAAATCATGGAAGAACTTGATGTATCAGACATGACTGTTAGGCGTGACTTGGATGAATTAGATAAAGCAGGACTGTTAATACGCATCCATGGTGGTGCACAAAAAGTAAACGCATCACCAATTCCACAAAATTATGAAAAATCAAACACTGAAAAATACGATATTCAAACAAATGAAAAATTAGAAATTGCCCAATTTGCAAAACAATTCATCAATGATGGTGAAACAATCTTTATTGGGCCTGGAACAACCTTAGAGAAATTAGCCACGCAATTACTTGATTTTAAAATTAGGTAGTAACCAATAGCCTTCCTGTTTTCAATATTCTGAATCAAAGTTCAACACTTGACCTTATCCTTGTAGGAGGAGAGTACAGAGAAATTACTGGTGCTTTTGTCGGTTCTGTTACTATTAACTCTATTAAATCACTCAATTTTTCAAAAGCTTTCGTTAGTAGTAATGGTGTTTTTGAAAAGTCTATCGCTACTTACGACGAGGGGGAAGGTGAAATCCAGCGCATTGCTCTTAATAATTCCTTTGAAAAATTCCTTTTAGTTGATAGCCAAAAATTTGGTAAATATGATTTTTATACTTTTTATCAATTAGACGATATTGATTTTGTATTAACAGATCATAATATTGATAATGTTGTTAAGGAGCAATACAGTAGCTTCACCAAAATTTTAACTAATAACAATTACATG

SEQ ID NO: 12442 - protein, 258 aa, Streptococcus agalactiae
MLKRERLQKIIEKVNINGIVTVNEIMEELDVSDMTVRRDLDELDKAGLLIRIHGGAQKVNASPIPQNYEKSNTEKYDIQTNEKLEIAQFAKQFINDGETIFIGPGTTLEKLATQLLDFKIRVVTNSLPVFNILNQSSTLDLILVGGEYREITGAFVGSVTINSIKSLNFSKAFVSSNGVFEKSIATYDEGEGEIQRIALNNSFEKFLLVDSQKFGKYDFYTFYQLDDIDFVLTDHNIDNVVKEQYSSFTKILTNNNYM

SEQ ID NO: 12443 - protein, 2580 aa, Streptococcus agalactiae
ATGAATCGTAAAAAAACAGTTATTATTAGTGCTTTATCAGTAGCTCTATTTGGTACTGGTGTAGGTGCTTATCAATTAGGTAGTTATAATGCCCAAAAATCAGACAATAGTGTTTCTTATGTGAAAACAGATAAATCTGATAGCAAAGCACAAGCAACAGCTGCAAATAAAACGCCCGACCAAATCAGTAAAGAAGAAGGCATATCTGCAGAACAAATCGTTGTTAAAATTACTGATGATGGTTATGTAACTTCTCATGGAGACCATTACCATTATTACAATGGTAAAGTGCCATATGATGCCATCATTAGTGAAGAATTGATTATGAAAGACCCTAGCTATGTCTTTAATAAAGCTGATGTCATTAATGAAGTCAAAGATGGTTATATTATCAAAGTTAATGGTAAGTATTACCTCTATCTTAAAGAAGGTAGCAAACGAACAAATGTTCGTACAAAGGAACAAATCCAAAAGCAACGCGAAGAATGGTCTAAGGGTGGTTCTAAGGGAGAATCAGGAAAGCATAGTAGTGCAAAAACTCAAGCTTTATCAGCCAGCGTACGTGAAGCGAAAGCTAGCGGTCGCTATACTACAGATGATGGTTATGTTTTTAGTCCAACAGATGTCATTGATGACATGGGAGATGCCTTTTTAGTACCACATGGCGATCATTTCCATTATATCCCGAAAGCTGATTTATCTCCATCAGAGTTATCAGCCGCACAGGCATATTGGAACCGCAAGACTGGCCGATCAGGTAATAGCTCAAAACCATCAAATTCAAGTTCATACATTCATGCAAGTGCACCAAGCGGTAATGTATCAACAGGAAGACATGCTAATGCCCCTATTTCTATTCCAAGAGTCACTCACGCAAATCACTGGTCAAAACCAGCTGGTAATCATGCTACGGCACCAAAACACCATGCACCTACAACCAAACCAATCAACAAAGATTCTGCTTTAGACAAAATGTTGAAACGTTTATATGCTCAACCGTTATCTGCTCGTCACGTAGAAAGTGATGGTTTGGTTTATGACCCAGCACAAGTTAATGCTTTCACAGCAATCGGTGTTTCTATTCCGCACGGTAATCATTTCCACTTTATTCACTATAAGGATATGTCTCCATTAGAGTTAGAAGCAACAAGGATGGTGGCAGAGCATAGAGGACATCATATTGATGCATTAGGGAAAAAAGATTCTACAGAGAAACCAAAGCATATTTCTCATGAACCTAATAAGGAACCTCACACAGAGGAAGAACACCATGCAGTAACACCGAAAGACCAACGTAAAGGCAAACCAAATAGCCAGATTGTCTACAGTGCTCAAGAAATTGAAGAGGCAAAAAAAGCTGGTAAATACACAACATCTGATGGTTACATTTTTGATGCCAAAGATATTAAAAAAGATACAGGTACAGGTTATGTCATTCCACATATGACACATGAGCATTGGGTACCAAAGAAAGATTTATCAGAGTCGGAATTAAAAGCAGCTCAAGAATTTCTTTCAGGAAAATCTGAAGCAAATCAAGACAAACCAAAAACAGGTAAAACAGCTCAAGAAATCTATGAGGCAATTGAACCAAAAGCAATTGTTAAACCTGAAGATTTATTATTTGGAATTGCACAAGCGACAGACTATAAGAATGGTACATTTGTAATTCCTCATAAAGATCATTACCATTATGTGGAATTAAAATGGTTTGATGAAGAAAAAGATCTTTTAGCTGATTCAGATAAGACATATTCTTTAGAAGACTATTTAGCTACGGCTAAATATTACATGATGCACCCAGAAAAACGTCCTAAAGTTGAAGGATGGGGTAAAGATGCTGAAATTTATAAGGAAAAGGACTCTAATAAAGCAGATAAACCAAGTCCTGCACCAACTGATAATAAATCAACATCAAATTCTAGTGATAAAAACTTAAGTGCTGCAGAAGTATTCAAACAAGCAAAACCAGAAAAAATTGTACCGCTTGATAAAATTGCTGCTCACATGGCATATGCAGTTGGATTTGAAGATGATCAATTGATTGTTCCTCATCATGATCATTATCATAATGTTCCTATGGCATGGTTTGACAAGGGTGGTTTATGGAAAGCACCAGAAGGCTATACATTACAACAACTCTTCTCAACAATTAAATACTACATGGAACATCCTAATGAATTACCAAAAGAAAAAGGTTGGGGACACGACAGTGATCATAACAAAGGCTCAAATAAAGACAATAAAGCCAAAAATTATGCTCCAGATGAAGAACCTGAAGATTCAGGGAAAGTAACTCACAACTATGGTTTTTATGATGTTAATAAAGGTTCAGACGAAGAAGAACCAGAAAAACAAGAAGATGAATCAGAGCTAGATGAATATGAACTAGGAATGGCACAAAACGCTAAGAAATATGGTATGGATAGACAATCTTTTGAAAAGCAACTCATCCAATTATCAAATAAATATAGTGTAAGTTTTGAAAGCTTTAATTATATTAATGGTAGTCAAGTTCAAGTTACTAAAAAAGATGGCTCTAAAGTGCTTGTTGATATTAAAACACTAGCAGAAGTGAAA

SEQ ID NO: 12444 - protein, 860 aa, Streptococcus agalactiae
MNRKKTVIISALSVALFGTGVGAYQLGSYNAQKSDNSVSYVKTDKSDSKAQATAANKTPDQISKEEGISAEQIVVKITDDGYVTSHGDHYHYYNGKVPYDAIISEELIMKDPSYVFNKADVINEVKDGYIIKVNGKYYLYLKEGSKRTNVRTKEQIQKQREEWSKGGSKGESGKHSSAKTQALSASVREAKASGRYTTDDGYVFSPTDVIDDMGDAFLVPHGDHFHYIPKADLSPSELSAAQAYWNRKTGRSGNSSKPSNSSSYIHASAPSGNVSTGRHANAPISIPRVTHANHWSKPAGNHATAPKHHAPTTKPINKDSALDKMLKRLYAQPLSARHVESDGLVYDPAQVNAFTAIGVSIPHGNHFHFIHYKDMSPLELEATRMVAEHRGHHIDALGKKDSTEKPKHISHEPNKEPHTEEEHHAVTPKDQRKGKPNSQIVYSAQEIEEAKKAGKYTTSDGYIFDAKDIKKDTGTGYVIPHMTHEHWVPKKDLSESELKAAQEFLSGKSEANQDKPKTGKTAQEIYEAIEPKAIVKPEDLLFGIAQATDYKNGTFVIPHKDHYHYVELKWFDEEKDLLADSDKTYSLEDYLATAKYYMMHPEKRPKVEGWGKDAEIYKEKDSNKADKPSPAPTDNKSTSNSSDKNLSAAEVFKQAKPEKIVPLDKIAAHMAYAVGFEDDQLIVPHHDHYHNVPMAWFDKGGLWKAPEGYTLQQLFSTIKYYMEHPNELPKEKGWGHDSDHNKGSNKDNKAKNYAPDEEPEDSGKVTHNYGFYDVNKGSDEEEPEKQEDESELDEYELGMAQNAKKYGMDRQSFEKQLIQLSNKYSVSFESFNYINGSQVQVTKKDGSKVLVDIKTLAEVK

SEQ ID NO: 12445 - protein, 921 aa, Streptococcus agalactiae
ATGAAAAGGATACGGAAAAGCCTTATTTTTGTTCTCGGAATAATTACCCTAATTTGCTTATGTGCTTGTACTAAACAGAGCCAGCAAAAAAATGGCTTGTCGGTCGTGACTAGCTTTTATCCAGTATATTCCATTACAAAAGCAGTTTCTGGTGATTTGAATGATATTAAAATGATTCGATCACAGTCAGGCATTCATGGTTTTGAACCCTCATCAAGTGATGTTGCTGCCATTTATGATGCTGATCTATTTCTTTATCATTCGCACACACTAGAAGCTTGGGCGAGACGTTTGGAACCTAGTTTGCATCACTCTAAAGTATCTGTAATTGAAGCTTCAAAAGGTATGACTTTGGATAAAGTTCATGGCTTAGAAGATGTAGAGGCAGAAAAAGGAGTAGATGAGTCAACCTTGTATGACCCTCACACTTGGAATGACCCTGTAAAAGTATCTGAGGAAGCACAACTCATCGCTACACAATTAGCTAAAAAGGATCCTAAAAACGCTAAGGTTTATCAAAAAAATGCTGATCAATTTAGTGACAAGGCAATGGCTATTGCAGAGAAGTATAAGCCAAAATTTAAAGCTGCAAAGTCTAAATACTTTGTGACTTCACATACAGCATTCTCATACTTAGCTAAGCGATACGGATTGACTCAGTTAGGTATTGCAGGTGTCTCAACCGAGCAAGAACCTAGTGCTAAAAAATTAGCCGAAATTCAGGAGTTTGTGAAAACATATAAGGTTAAGACTATTTTTGTTGAAGAAGGAGTCTCACCTAAATTAGCTCAAGCAGTAGCTTCAGCTACTCGAGTTAAAATTGCAAGTTTAAGTCCTTTAGAAGCGGTTCCCAAAAACAATAAAGATTACTTAGAAAATTTGGAAACTAATCTTAAGGTACTTGTCAAATCGTTAAATCAA

SEQ ID NO: 12446 - protein, 307 aa, Streptococcus agalactiae
MKRIRKSLIFVLGIITLICLCACTKQSQQKNGLSVVTSFYPVYSITKAVSGDLNDIKMIRSQSGIHGFEPSSSDVAAIYDADLFLYHSHTLEAWARRLEPSLHHSKVSVIEASKGMTLDKVHGLEDVEAEKGVDESTLYDPHTWNDPVKVSEEAQLIATQLAKKDPKNAKVYQKNADQFSDKAMAIAEKYKPKFKAAKSKYFVTSHTAFSYLAKRYGLTQLGIAGVSTEQEPSAKKLAEIQEFVKTYKVKTIFVEEGVSPKLAQAVASATRVKIASLSPLEAVPKNNKDYLENLETNLKVLVKSLNQ

SEQ ID NO: 12447 - protein, 441 aa, Streptococcus agalactiae
ATGAAAATCATTATTCAACGTGTTAGTCAAGCAAGTGTTTCTATTGAAGATGATGTAGTCGGATCTATTGAGAAGGGTTTAGTACTTCTAGTTGGGATTGCTCCAGAAGATACAACAGAAGATATTGCTTATGCAGTTCGTAAAATTACTAGCATGCGTATTTTTTCTGATGATGATGGGAAAATGAACCTTTCAATTCAAGACATTAAAGGAAGCGTCTTATCTATCTCACAATTTACACTCTTTGCAGATACCAAAAAAGGAAATCGTCCAGCTTTTACTGGGGCAGCTGATCCTGTTAAAGCGAATCAGTTTTATGATATCTTTAATCAAGAATTAGCAAATCATGTTTCGGTAGAAACAGGTCAATTTGGAGCTGATATGCAAGTCAGTCTGATTAATGATGGACCAGTGACTATCGTTTTAGATACTAAAAATAAA

SEQ ID NO: 12448 - protein, 147 aa, Streptococcus agalactiae
MKIIIQRVSQASVSIEDDVVGSIEKGLVLLVGIAPEDTTEDIAYAVRKITSMRIFSDDDGKMNLSIQDIKGSVLSISQFTLFADTKKGNRPAFTGAADPVKANQFYDIFNQELANHVSVETGQFGADMQVSLINDGPVTIVLDTKNK

SEQ ID NO: 12449 - protein, 2157 aa, Streptococcus agalactiae
ATGAGTGAGACGGATGTTGCTTTTGTAAAATTTGCCTTAAATTACGCAACCGCAGCTCATTATTATCAAGCAAGAAAGTCGGGAGAGCCCTACATTATTCATCCAATTCAAGTAGCAGGTATTCTTGCAGATTTACACCTTGATGCCGTTACGGTAGCTTGTGGTTTTTTACATGATGTTGTAGAAGATACGGAAATTACCCTTGATGAGATTGAAACTGATTTTGGCAAGGATGTTCGCGATATTATTGACGGCGTAACAAAATTGGGTAAAGTGGAGTACAAATCTCATGAAGAACAGTTAGCAGAAAATCACCGTAAAATGTTAATGGCTATGTCTAAGGACATCCGTGTTATTTTGGTTAAGCTCGCTGACCGCTTACATAATATGAGAACCCTTAAACACCTCAGAAAAGATAAACAAGAGCGTATTTCACGTGAGACTATGGAAATATACGCTCCTTTAGCGCATCGTTTGGGGATTAGTCGTATCAAGTGGGAATTAGAAGATTTATCTTTTCGTTACTTGAATGAGACGGAATTTTATAAAATTTCTCATATGATGAGTGAAAAACGTCGTGAACGTGAAGAGTTGGTTGATATAATTGTCGATAAAATCAGATCCTATACTGAGGAACAGGGTTTATATGGTGATATTTATGGTAGACCAAAACACATTTATTCTATTTACAGAAAAATGCGTGATAAAAAGAAACGCTTTGATCAGATTTATGATTTAATTGCGATACGCTGTATTATGGAAACTGCTAGTGATGTTTATGCCATGGTGGGGTATATCCATGAGTTATGGCGTCCTATGCCAGGAAGGTTTAAAGATTATATTGCGGCACCAAAGGCCAATGGTTATCAATCTATTCACACGACGGTTTATGGACCTAAAGGGCCAATTGAAATTCAGATTCGAACTAAAGAAATGCATCAAGTTGCCGAGTTTGGTGTTGCAGCCCATTGGGCCTATAAAAAAGGAATCACCAGTAAGGTTAATCAAGCAGAGCAATCGGTTGGTATGGGATGGATTCAAGAATTAGTTGAGCTTCAAGATGAATCAAAAGACGCCAAGGATTTTGTTGACTCTGTTAAGGAAGATATCTTTACAGAACGCATCTATGTTTTTACCCCAAATGGTGCTGTTCAGGAACTGCCAAGGGAATCTGGACCAATTGATTTTGCTTATGCTATTCACACGCAAGTTGGAGAAAAAGCTACTGGCGCTAAAGTAAATGGACGTATGGTTCCATTGACTGCTAAGTTAAAAACAGGAGATGTTGTTGAGATTATCACAAACCCTAATTCATTTGGACCAAGTCGTGACTGGATTAAGATTGTTAAGACCAATAAAGCTCGCAATAAAATTCGTCAGTTCTTCAAAAACCAAGATAAAGAAACTTCTATTAATAAAGGTAGAGAATTACTGGTTGATTATTTCCAAGAACAAGGTTATGTGCCTAACAAATATTTAGATAAGAAACATATTGAAGAAATCCTTCCACGTGTCAGTGTTAAAAGTGAGGAAGCTTTGTATGCAGCCGTAGGTTTTGGTGATTTGAGTCCGATTAGTATTTTTAATAAACTGACGGAAAAAGAACGCCGTGAGAAGGAACGTGCTAAGGCTAAAGCGGAAGCAGACGAACTTATTAACGGTGGCGAAATCAAAACCGATAAGCGTGATGTTCTCAAAGTTAAGAGTGAAAATGGTGTTATCATTCAAGGAGCTTCAGGTTTATTAATGCGTATTGCAAAATGTTGTAATCCCGTTCCTGGAGATCTCATTGAAGGCTATATAACTAAAGGTAGAGGCGTGGCTATCCATCGTTCAGATTGTCAAAATTTAAAGAGTCAGGAGAACTACGAACAACGTTTGATTGATGTTGAGTGGGACGATGATGGATCTAAAAAAGAGTACATGGCTGAAATCGATATTTATGGTTTGAATCGTAGTGGCCTCCTTAATGATGTCCTTCAAACCTTATCAAATGCAACAAAGCTAGTATCGACAGTAAATGCACAACCAACAAAAGATATGAAATTTGCTAATATTCATGTTAGCTTTGGAATTTCAAATTTAGCACAATTGACAACTGTGGTTGATAAAATCAAAATTATCCCAGATGTTTATTCTGTTAAACGTACGAATGGT

SEQ ID NO: 12450 - protein, 719 aa, Streptococcus agalactiae
MSETDVAFVKFALNYATAAHYYQARKSGEPYIIHPIQVAGILADLHLDAVTVACGFLHDVVEDTEITLDEIETDFGKDVRDIIDGVTKLGKVEYKSHEEQLAENHRKMLMAMSKDIRVILVKLADRLHNMRTLKHLRKDKQERISRETMEIYAPLAHRLGISRIKWELEDLSFRYLNETEFYKISHMMSEKRREREELVDIIVDKIRSYTEEQGLYGDIYGRPKHIYSIYRKMRDKKKRFDQIYDLIAIRCIMETASDVYAMVGYIHELWRPMPGRFKDYIAAPKANGYQSIHTTVYGPKGPIEIQIRTKEMHQVAEFGVAAHWAYKKGITSKVNQAEQSVGMGWIQELVELQDESKDAKDFVDSVKEDIFTERIYVFTPNGAVQELPRESGPIDFAYAIHTQVGEKATGAKVNGRMVPLTAKLKTGDVVEIITNPNSFGPSRDWIKIVKTNKARNKIRQFFKNQDKETSINKGRELLVDYFQEQGYVPNKYLDKKHIEEILPRVSVKSEEALYAAVGFGDLSPISIFNKLTEKERREKERAKAKAEADELINGGEIKTDKRDVLKVKSENGVIIQGASGLLMRIAKCCNPVPGDLIEGYITKGRGVAIHRSDCQNLKSQENYEQRLIDVEWDDDGSKKEYMAEIDIYGLNRSGLLNDVLQTLSNATKLVSTVNAQPTKDMKFANIHVSFGISNLAQLTTVVDKIKIIPDVYSVKRTNG

SEQ ID NO: 12451 - protein, 2400 aa, Streptococcus agalactiae
ATGTCAAAACATTATTTTTCAAAAAGCGTATTCGCTTTAACTGTCTTAACAGCTACAGCAACAAGTGGTTTAGCTGTTCAAGCAGAAGACATTGTTACAACACCAAGTTCAACCGCTACAAAGGTTGAATCAACTACCCCCACTAGCACAATTGCAGAGGAAAAGTCAAACGTTACTTCTACTCCAACTGCAATAACTGATGCTTCAACAGCCACAAGCACAAATACCACTGCCAATAATCAAAATCCACAGCCTGTTGCCACAGAAACCACAACTGGTGATCTCAAACCTATTGAAGGTGAAAAAGTTGACCTTCGCATCATGTCAACCACAGACCTACACACCAATTTAGTTAACTATGATTATTATCAAGATAAAGAATCTCAAAAAATAGGGTTAGCAAAAACTGCTGTCCTTATCGAAGAAGCAAAAAAAGAAAATCCTAATACCGTCTTAGTTGATAACGGAGATGTCATTCAAGGGACACCTTTAGGAACTTATAAAGCAATCGTTAAACCTGTCGCAGAAAATGAAGAACATCCTATGTACCAAGCCATGAATGCTCTTGGTTATGATGCATCAACACTAGGTAATCATGAGTTTAATTACGGTTTAGATTACCTCAAAAAAATCATTGCTACAGCCAACCTTCCAATCCTCAACGCAAATGTTTTGGATTTCAAAACACATCAACCAGTTTTTAAAACTTATGACATCATTACTAAAACCTTCAAAGATTCAACAGGAAGAGCTGTTGCACTAAATATTGGAATTACAGGAATTGTACCTCCTCAAATCTTAAACTGGGACAAGGCTAACTTAGAGGGAAAGGTTATTGTCAAAGATTCAGTTAAAGCAATCGAAGAAATCGTTCCTACTATGCGTGCTAAAGGAGCAGATGTCATTCTCGTTTTATCACACTCTGGCATTGGAGATGATCGATATGAAGAAGGTGAAGAAAACGTTGGCTATCAAATTGCCAGCATCAAGGGAGTGGATGCCGTTGTTACGGGACACTCACACGCTGAATTTCCATCAGGTAACGGTACTGGCTTCTATGAAAAATACACTGGAGTTGATGGTATCAATGGAAAAATAAATGGAACACCCGTTACAATGGCAGGCAAGTACGGGGATCACCTTGGTATTATTGATTTAGGACTTAGCTATACTAATGGAAAATGGCAAGTCTCCGAAAGCAGTGCTAAAATCCGTAAAATTGATATGAACTCAACAACTGCTGACGAGCGTATCATTGCATTGGCTAAGGAAGCACACGATGGCACAATCAACTATGTTCGCCAACAAGTAGGTACAACAACTGCGCCAATTACAAGTTACTTTGCACTAGTTAAAGATGATCCTTCAGTTCAAATTGTTAACAACGCTCAACGTTGGTACGTTGCAAATGAATTGAAAGGAACACCTGAGGCAAATTTACCACTTCTATCTGCTGCAGCACCATTTAAAGCTGGAACACGTGGCGATGCTACCGCATATACTGATATTCCAGCTGGACCTGTTGCAATTAAAAACGTAGCTGATCTTTATCTTTATGATAATGTTACTGCACTTTTAAAAGTGACCGGAGCAGACTTACGTGAATGGTTAGAAATGTCCGCTGGTCAATTTAACCAAATTGACCCTAACAATAAAGCACCACAAAATATTATCAATACCGAATATCGTACCTATAATTTTGACGTTATTGATGGCTTGACTTATAAATTTGATATTACACAACCTAATAAATACAATAAAGATGGAAAAGTTGTTAATAGTCAAGCTAGTCGAGTACGCGATTTAATGTACAATGGTAAGCCCGTTGCAGACAAACAAGAGTTTATGATTGTGACCAATAACTACCGTGCTAGTGGTACCTTCCCTGGGGCTAAAAATGCCACAATGAACCGTTTGCTGAACTTAGAAAATCGCCAAACTATTATCAACTATATTATTTCAGAGAAAACCATCAATCCTACAGCTGATAATAACTGGGGCTTCACAAAGTCTATTAAAGGCCTTGATTTACGATTCCAAACAGCCGATAAAGCTAAAAATCTTGTTACTAATAGCAAGGATATTCAGTATATCGCTAGTTCTACCAAAGATGAAGGATTTGGTGATTATCGATTTGTCTATACTGAACAAGAAAAAGTAGACCTTACTGAGCCATCACATCAAGAAAAGTTAAGCCAAATAGAAAAACAAAAAATTCACCACATGGTTGCAACTGCTTATACAAAAGCAAAAGCTTCTCCAAATATTACAGGCACTGTCTATACACAACAGAAAGAAAAAACATTACCTAAAACTGGACAAGAAAAACAATCTTATCTGGCTTTCTTTGGTGTCGCAATACTTGGACTCGTGGGAAGTTTACTTAAAAAGAAACAAATA

SEQ ID NO: 12452 - protein, 800 aa, Streptococcus agalactiae
MSKHYFSKSVFALTVLTATATSGLAVQAEDIVTTPSSTATKVESTTPTSTIAEEKSNVTSTPTAITDASTATSTNTTANNQNPQPVATETTTGDLKPIEGEKVDLRIMSTTDLHTNLVNYDYYQDKESQKIGLAKTAVLIEEAKKENPNTVLVDNGDVIQGTPLGTYKAIVKPVAENEEHPMYQAMNALGYDASTLGNHEFNYGLDYLKKIIATANLPILNANVLDFKTHQPVFKTYDIITKTFKDSTGRAVALNIGITGIVPPQILNWDKANLEGKVIVKDSVKAIEEIVPTMRAKGADVILVLSHSGIGDDRYEEGEENVGYQIASIKGVDAVVTGHSHAEFPSGNGTGFYEKYTGVDGINGKINGTPVTMAGKYGDHLGIIDLGLSYTNGKWQVSESSAKIRKIDMNSTTADERIIALAKEAHDGTINYVRQQVGTTTAPITSYFALVKDDPSVQIVNNAQRWYVANELKGTPEANLPLLSAAAPFKAGTRGDATAYTDIPAGPVAIKNVADLYLYDNVTALLKVTGADLREWLEMSAGQFNQIDPNNKAPQNIINTEYRTYNFDVIDGLTYKFDITQPNKYNKDGKVVNSQASRVRDLMYNGKPVADKQEFMIVTNNYRASGTFPGAKNATMNRLLNLENRQTIINYIISEKTINPTADNNWGFTKSIKGLDLRFQTADKAKNLVTNSKDIQYIASSTKDEGFGDYRFVYTEQEKVDLTEPSHQEKLSQIEKQKIHHMVATAYTKAKASPNITGTVYTQQKEKTLPKTGQEKQSYLAFFGVAILGLVGSLLKKKQI

SEQ ID NO: 12453 - protein, 453 aa, Streptococcus agalactiae
ATGCCTAAATTAACCCTAGTCTATATCAGTCTTAGCGGCAATACTCAAAGCTTTGTCAAACGTCTTAGTGAACAACTGTCAACTTGGCATAACTGTCAGGTTTCGACTATTAATATCAAGGAACAAAATCATCAAACCTTTCCTGTTGACCAACCTTTCGTAGCACTATTACCCACTTACCTCGAGGGAGGAAATGGCATTGACAATGGCGATCAAGAAATTCTTACCATTCCACTTGGTGATTTTATAGCTGCACACAATAATGTCAAAAATTGTATCGGAATTGTTGGCTCTGGAAATAGAAATTTTAACAATCAGTACTGTTTAACTGCAAAACAATACTCTGAACGGTTTGGATTTCCTATGTTAGGAGACTTTGAATTGCGAGGAACTTCTAGCGACGTTGAACGTATCGCAAATATTATCGTTGAAACATTATCGAACTTTAAAGCC

SEQ ID NO: 12454 - protein, 151 aa, Streptococcus agalactiae; identical to SEQ ID NO: 3502

SEQ ID NO: 12455 - protein, 1035 aa, Streptococcus agalactiae
ATGGAAACAACATTAAACTACATTAAAACCCTGACATCAATCCCTTCACCAACAGGGTTTACCCAAACAATCATGACCTATATCATCAAAGAATTGGAATCGTTTGGCTACTCACCAATTCGCACAAACAAGGGAGGCGTCATGGTTTCTCTAAAAGGAAAAAATGATACTAAACATCGCATGATAACTGCTCACCTTGATACACTTGGTGCTATGGTTAGGGCCATCAAACCAGATGGTCGATTAAAAATTGACCTTATTGGCGGATACACATACAATGCCATTGAAGGAGAAAACTGTACTATACACCTCTCAAAAAATGGTAAAGAAATTTCTGGAACTGCTCTTATTCATCAAACTAGTGTCCATGTTTACAAAGACGCTGGAACTGCTGAACGTAATCAAACAAATATGGAAATTCGTTTAGATGAGAAAGTAACAACTGCTGACGAAACACGTGCTTTAGGTATCCAGGTCGGCGATTTTATTTCATTTGATCCGCGTACAATCGTAACAGACAGCGGCTTTATTAAATCACGTTACCTAGATGACAAGGTATCCGCTGGTATCCTAATGGAACTTCTTTCTGTTTACAAGAAAGAAGACATTCAACTTCCTTATACTACTCATTTCTACTTTAGTGCCTTTGAAGAGCTAGGACATGGAGCAAATTCAAGCATCCCAAATGAAACTGTAGAATATCTAGCAGTTGATATGGGAGCTATGGGAGACGATCAAGAAACTGACGAATATACTGTCTCTATCTGTGTTAAAGATGCTTCTGGTCCTTATCATTATGAATTACGTCAACATCTTGTTTCTCTAGCTGAAAACAATAATATTCCTTATAAACTTGATATTTATCCTTATTATGGTAGTGACGCCTCCGCTGCCATGCGTGCTGGTGCGGAAGTTAAACACGCGCTACTTGGTGCAGGTATTGAATCTAGTCATTCTTATGAACGTACCCATATCGATTCTATTCAAGCAACTGAACTCTTAGTGGATGCCTATCTCAAAAGCAATATGGTGAAC

SEQ ID NO: 12456 - protein, 345 aa, Streptococcus agalactiae
METTLNYIKTLTSIPSPTGFTQTIMTYIIKELESFGYSPIRTNKGGVMVSLKGKNDTKHRMITAHLDTLGAMVRAIKPDGRLKIDLIGGYTYNAIEGENCTIHLSKNGKEISGTALIHQTSVHVYKDAGTAERNQTNMEIRLDEKVTTADETRALGIQVGDFISFDPRTIVTDSGFIKSRYLDDKVSAGILMELLSVYKKEDIQLPYTTHFYFSAFEELGHGANSSIPNETVEYLAVDMGAMGDDQETDEYTVSICVKDASGPYHYELRQHLVSLAENNNIPYKLDIYPYYGSDASAAMRAGAEVKHALLGAGIESSHSYERTHIDSIQATELLVDAYLKSNMVN

SEQ ID NO: 12457 - protein, 494 aa, Streptococcus agalactiae
ATGGTAGCCACGCTCATTATTATCAGGGGAAATTCAGCTAGCGGAAAGTCTACAATAGCTAAGCAACTTCAAGCCGAATTAGGGGAAGATACCCTTCTCTTATCTCAGGATTACCTTCGTAGAGAGATGTTAGGAACTAAGGATGGTGAAAATACTACTACCATTCCCCTTTTGATCAATTTACTAAATTATGGTTACCATAACTGTTCCTACATCATCCTTGAAGGCATACTTCGTTCTGATTGGTATACGCCTGTTTGGAAACATATTTTAAAACATAACCCCAACAATACTTATGCTTATTACTATGATTTAAGCTTTCAAGAAACTGTTAAAAGACATTCAACTCGACTTAAATCTTTAGAATTTGGAGAAGATTCTCTTGCAAGATGGTGGCTTGAGAAAGACTTCTTAAAAGAGATACTGAAAAAATATTAACAAAATCTATGAGTTTAGAGGATGTCAAAAAACTTATAATGACCGACGTTTTACCT

SEQ ID NO: 12458 - protein, 165 aa, Streptococcus agalactiae
MVATLIIIRGNSASGKSTIAKQLQAELGEDTLLLSQDYLRREMLGTKDGENTTTIPLLINLLNYGYHNCSYIILEGILRSDWYTPVWKHILKHNPNNTYAYYYDLSFQETVKRHSTRLKSLEFGEDSLARWWLEKDFLKEIPEKILTKSMSLEDVKKLIMTDVLP

SEQ ID NO: 12459 - protein, 1035 aa, Streptococcus agalactiae
ATGAAAGAAAAACAGTCGAAAAGGCTTATTTATATACTACTGGTTGTTCCCATTATTTTTATAAGTATTTTTACATACAGTATTAGCCAGCCTTCTAAACTACTTCCACCAAAAGAATTAGTTATTCTAAGTCCAAATAGTCAAGCCATTTTAACAGGAACGATTCCAGCTTTTGAGGAAAAATACGGTATAAAAGTTAAGCTTATTCAAGGTGGGACAGGGCAACTAATAGATAGATTAAGTAAGGAGGGTAAGCAGTTGAAGGCGGATGTTTTCTTTGGAGGAAATTATACGCAATTTGAAAGTCATAAGGCATTGTTTGAGTCTTACGTATCAAAGAATGTTCATACTGTTATTCCAGACTATATCCATCCGAGTGATACGGCGACACCTTATACTATAAATGGGAGTGTCTTGATTGTAAATAACGAATTAGCTAAGGGACTTACCATCAAGAGTTATGAAGATTTATTACAGCCTTCCTTAAAAGGTAAAATTGCCTTTGCAGATCCGAATACTTCCTCTAGTGCTTTCTCACAACTCACCAATATACTCTTGGCAAAGGGTGGTTACACCAATCCAAAAGCGTGGAACTATGTTAAAAAGCTACAACATAATATTAATGCTATCAAATCTTCTAGCTCTTCAGAAGTTTATCAATCAGTTGCAGAAGGCAAAATGATTGTGGGGCTGACTTACGAAGACCCTAGTGTCAATTTGCAAAAAAGTGGTGCCAATGTTTCTATTGTGTATCCGACAGAAGGGACAGTTTTTGTCCCATCTTCGGTTGCAATTATAAAGAATGCTCCTTCTATGAAAGAAGCAAAGTTATTTATTAATTTTATGCTTTCTTTAGATGTTCAAAATGCCTTTGGGCAGTCAACGAGTAACCGACCTATTCGTAAAGATGCCCAAACGAGTAATGGCATGAAAGCTTTAAAGGATATTGCTACTCTTAAAGAAGATTATCGCTATGTCACTAAGCATAAGGGCCAAATCCTTAAAACCTATAATCGTATTCGTAGAAATGCTGAT

SEQ ID NO: 12460 - protein, 345 aa, Streptococcus agalactiae
MKEKQSKRLIYILLVVPIIFISIFTYSISQPSKLLPPKELVILSPNSQAILTGTIPAFEEKYGIKVKLIQGGTGQLIDRLSKEGKQLKADVFFGGNYTQFESHKALFESYVSKNVHTVIPDYIHPSDTATPYTINGSVLIVNNELAKGLTIKSYEDLLQPSLKGKIAFADPNTSSSAFSQLTNILLAKGGYTNPKAWNYVKKLQHNINAIKSSSSSEVYQSVAEGKMIVGLTYEDPSVNLQKSGANVSIVYPTEGTVFVPSSVAIIKNAPSMKEAKLFINFMLSLDVQNAFGQSTSNRPIRKDAQTSNGMKALKDIATLKEDYRYVTKHKGQILKTYNRIRRNAD

SEQ ID NO: 12461 - protein, 771 aa, Streptococcus agalactiae
ATGTATAGATTACTTATCGTTGAGGATGAGCACCTTATTCGTAAGTGGTTACGCTATGCTATTGATTATCAATCATTGAATATTTTAGTGGTTGGTGAAGCAAAAGATGGTAAAGAAGGAGCTCAATTAATTCAGGAAGAGCAGCCAGACATTGTTTTAAGTGATATTAATATGCCAATTATGACAGCATTCGATATGTTTGAGGCAACCAAAGGACAATCTTATGCCAAAATTATTTTATCTGGCTATGCTGATTTTCCAAATGCGCAATCAGCTATTCACTATGGCGTTCTTGAATTTTTAACAAAACCACTAGAAAAGCAAGCTTTGATTGATTGTTTAAAAACAATTATGGCTAGAATTGAGGAACATAAGGAGAAGCACCTACAAGAGCATACAGAATTGTATTTACCTCTACCACAAGCTAATGACCAAGTTCCTGAAGTTATTAAAGATATGCTAGCATGGATTCATAGCCATTTTCATGGGAAAATTGTGATTAGCCAGTTAGCTCACGATTTAGGTTACAGTGAAAGTTATCTTTACACAGTCACTAAAAAGCACCTTCATATAACTTTGAGTGATTATATAAATCAATATCGTATTAATCAAGCCATTCAGTTGATGTTTAGAGAACCAGACCTAATGGTTTACCAAATTGCAGAAGCTGTTGGTATTTATGATTATCGTTATTTTGATAGGGTTTTTAAAAAGTACTTGGGTCAGACAGTAAAAGCGTTTAAGGAAGAACATATTTTTAAACAGATGGAT

SEQ ID NO: 12462 - protein, 257 aa, Streptococcus agalactiae; identical to SEQ ID NO: 3510

SEQ ID NO: 12463 - protein, 1647 aa, Streptococcus agalactiae
ATGAGAGGATATAGAATGGAAGAACGCTTTAAGAAACGACTACAAGATGATATCTCTAAACATTTTTCCCGCCAGTCTTTAATTTTATCCTTGTTATTGATTGCACTTTTCGTCCTTTTTTCTTTAGCGCCTCAGCAGATAGGCCTTTATAAAGATGTTAATTCAGTTTCCTATAGTTATAAGCAATTGATTCAAAAACATGATACCTTATTAGATGACTTAGGTAAAAATAGTTTGAAACCATTTGTCTCAGGACACTTAGGAAGTGCTGATTTGAGTAAGCAATATTATCATTTAAGGAATCATTTACAAAGTCAAACAGAACTTTTAGTATTCTCACCTAATCAAGAACTTTTGTTTGCTAGTAATTCACATTTAGGTAATTTTTTTAGTAAGTCTATTTACATTAGTGAAGTTTTAGATAAGGCTAAAATAAATCAAAGGCTACTAAAAATTATTGTAGATAGTGAGGGAGGGCATTACCTTGCACTCATTAAGCCAATTATAGTTAATAAAAAAGTTTCAGGTTATGCCTTCTTATTGATGAATGGGAAAGACTTTTTACTTCCAACGAAGGCTATTAACTCAGACTTGATTATTGCCGATCAGCTAAATAATAGCTTTACTTTTACTAATCGTGATTTTATCTCCTCTAGTTTAGATAAGGTAGATAGTCAATTCTTAACTAGATATTTTAGTTTTCACGATCATCGAGCTTTTGTTGTTAGGAAAGTAGCTCTGCAAGACAATATCCTACTTTACATGTATCGTCCCCTGATACCAGTAACTCTGGTCGTCCTTTTTTCTCTAGTATCATCAGTTATTATTTTTGTAATTTTACGACGAAAATCTAGAGTTCTAGCCGATCGCATCGCAGTAAAAAATTCTAGCGCCATAAATCAAATGGTGCTAGATATGGATGCCATTTCCCGCCAAGAAAAATCTAGTATTGAGCTTGATAGTCAAGATGAATTTCAATATCTATCTGTTCAAATCAATCAGATGGTTTCACGGTTAAAAGATTTACATGAGAAAACTCTCGATTTGGAAACACAAAAGTTGCTGTTTGAAAAGAGGATGTTAGAAGCTCAGTTTAATCCTCACTTCCTTTATAATACCCTTGAGACAGTTTTAATAACCAGTCACTATGATTCACAATTAACAGAAAGAATCGTTATACAACTAACAAAATTATTGCGCTATAGCCTTAGTGGTAGCACAGAAGCAGCTGTGCTTAAGGATGATTTAGCAATCATTGAATCCTACCTTTTGATTAATCAAGTGAGATTTGAAGAATTAACTTACACTATTTCAGTATCCCCTGAACTTGAACACATGCGTGTACCAAAACTTTTCTTGTTACCGCTAATTGAGAATGCTATTAAATATGGCTTAAAAGAACGTCATGATGTAGCAATAAACATAGATATTTGGCAAGATAGTGATGGAATTTGGTTTACTGTTTCAAATAATGGATCAGGTATTAGTTTGGCTAGGCAAAAAGCCATACGTACAATGTTAAGATCAACTCACTCGCATCATGGGCTTATTAATTCTTATAGACGATTACAATATCAATTTTCAACAGTATTGTTAGAGTTTACGAAGACAGATGATGCTTTTCGAGTTAGCTATATAGTAAAGGAG

SEQ ID NO: 12464 - protein, 549 aa, Streptococcus agalactiae
MRGYRMEERFKKRLQDDISKHFSRQSLILSLLLIALFVLFSLAPQQIGLYKDVNSVSYSYKQLIQKHDTLLDDLGKNSLKPFVSGHLGSADLSKQYYHLRNHLQSQTELLVFSPNQELLFASNSHLGNFFSKSIYISEVLDKAKINQRLLKIIVDSEGGHYLALIKPIIVNKKVSGYAFLLMNGKDFLLPTKAINSDLIIADQLNNSFTFTNRDFISSSLDKVDSQFLTRYFSFHDHRAFVVRKVALQDNILLYMYRPLIPVTLVVLFSLVSSVIIFVILRRKSRVLADRIAVKNSSAINQMVLDMDAISRQEKSSIELDSQDEFQYLSVQINQMVSRLKDLHEKTLDLETQKLLFEKRMLEAQFNPHFLYNTLETVLITSHYDSQLTERIVIQLTKLLRYSLSGSTEAAVLKDDLAIIESYLLINQVRFEELTYTISVSPELEHMRVPKLFLLPLIENAIKYGLKERHDVAINIDIWQDSDGIWFTVSNNGSGISLARQKAIRTMLRSTHSHHGLINSYRRLQYQFSTVLLEFTKTDDAFRVSYIVKE

SEQ ID NO: 12465 - protein, 825 aa, Streptococcus agalactiae
ATGAAATCACAGGATAATTTGACTAAAGAAGACCGTAAAATGCTTCGCTCAGTCTTCTGGCGCTCATGGACGATGAATGCTAGTCGTACTGGGGCAACACAATACCACGCAGTAGGGGTTATTTATACTTTACTACCAGTCATCAATCGTTTTTATAAGACTGATAAGGATAAAGCAGAGGCATTGGTCCGTCATACAACATGGTTTAATGCCACCATGCACATTAATAATTTTATTATGGGTCTTGTTGCATCTATGGAAAAGAAAAACAGTGAAGATCCTGATTTCGATGCTAGTGCCATCACCGCAGTTAAGGCTTCTTTGATGGGACCTATATCTGGAGTTGGTGATTCATTCTTTTGGGGAATTCTAAGAGTTATTGCGGCAGGTATCGGTATCTCCTTGGCAAGTACAGGCTCAGCCATGGGAGCTGTTGTCTTTCTACTCTTGTATAACATTCCAGCTTTTCTGATTCATTATTATAGTCTCTATGGAGGTTACTCTGTAGGTGCAGGGTTTATCAAAAAATTGTATGAATCAGGTGGTATTAAAATTGTTACTAAGACTTCAAGTATGCTTGGTTTAATGATGGTAGGCTCAATGACTGCTTCAAATGTTAAATTCAAGACAATCTTAACGGTAGCAGCTAAAGGAGCTAAGGAAGCAGCTTCCATACAAAGTTACCTTGACCAATTATTTGTTGGCGTAGTGCCACTGTTGGTAACGATATTAGCCTTCTGGCTTCTACGTAAAAAAGTCAATATCAACTGGATCATGTTTGGCATTATGGTGTTAGGTATTGTACTTGGTCTCTTAGGTATTTGC

SEQ ID NO: 12466 - protein, 275 aa, Streptococcus agalactiae; identical to SEQ ID NO: 3514

SEQ ID NO: 12467 - protein, 807 aa, Streptococcus agalactiae
ATGATAATGCCAGCGACGATGGCAGCTTTAGCTGTATTGATTTGTTTTGGGGGAAATTACTTAACAGGTCAAAGTATGATGGAGAGACCACTTGTAGTTGGTCTTGTAACAGGAATGCTACTAGGTGATATTAAGGTTGGTATCTTAATGGGAGCCTCCCTAGAAGCGCTATTTTTGGGAAACGTTAATATTGGGGGTGTTATTGCAGCAGAGCCAGTAACAGCAACAGCGATGGCAACAACTTTTACCATTATTTCAAACATTGATCAAAAAGCAGCAATGACTCTAGCTGTTCCAATTGGAATGTTGGCAGCATTTGTTGTTATGTTTTTGAAAAACGTCTTCATGAATATCTTTGCACCGATGGTGGATAAAGCTGCAGCCGCAAACCATCAAGGTAAACTTGTGATGCTTCACTATGGTACATGGATTATTTACTATCTCATTATCGCTTCTATTTCTTTCATTGGTATTTTAGTAGGTAGTGGGCCTGTTAATAGTTTTGTCCATCATATTCCTCAAAACCTGATGAATGGCTTAAGTGCGGCGGGAGGCCTCCTTCCAGCTGTTGGTTTTGCTATGCTGATGAAATTATTATGGACAAATAAATTAGCTGTTTTTTACTTGCTTGGTTTTGTTTTAACAGCTTATTTAAAATTACCAGCGGTTGCAGTTGCTGCCCTAGGAGCAGTTATTTGCGTCATTAGTTCACAACGTGATATAGAATTAGACGCAATTACTAGAGGTGCGATCAGTAAACAGACAACCTTTGACTCTAAAGAATCAGAAGAGGAGGACTTCTTCGCA

SEQ ID NO: 12468 - protein, 269 aa, Streptococcus agalactiae; identical to SEQ ID NO: 3516

SEQ ID NO: 12469 - protein, 489 aa, Streptococcus agalactiae
ATGATTACTCAAATTCGTGTTGACGACCGTTTGATTCATGGGCAAGTGGCAGTTGTATGGACTAAAGAATTAAATGCACCACTTTTAGTGGTGGCTAATGATGAAGCTGCAAAAAATGAAATCACACAGATGACTCTTAAAATGGCTGTGCCTAATGGCATGAAATTATTAATCCGTTCAGTTGAAGAATCAATAGCTCTATTTAAAGATCCACGCGCAACTGACAAGCGTATTTTTGTGATTGTCAATTCTGTTAAAGATGCCTGTACAATTGCTAAAAATATAACTGATTTAGAAGCAGTAAACGTCGCTAATGTAGGACGCTTTGATAAGTCTGATCCAGCTACAAAAGTCAAACTAACATCAAGTCTCTTATTAAATCCAGAAGAGTTGGAAGCCGCAAAAGAATTAGCCAGCTTACCAGATTTAGACGTCTTTAACCAAGTATTGCCTTCAAATACTAAAGTTAACTTGAGTCAACTAGTCAAA

SEQ ID NO: 12470 - protein, 163 aa, Streptococcus agalactiae
MITQIRVDDRLIHGQVAVVWTKELNAPLLVVANDEAAKNEITQMTLKMAVPNGMKLLIRSVEESIALFKDPRATDKRIFVIVNSVKDACTIAKNITDLEAVNVANVGRFDKSDPATKVKLTSSLLLNPEELEAAKELASLPDLDVFNQVLPSNTKVNLSQLVK

SEQ ID NO: 12471 - protein, 423 aa, Streptococcus agalactiae
ATGAAGCGGAAATTCCTAATTGGAAGTCACGGAAAACTTGCGAGTGGGTTGCAGAGTTCTATTGATATTCTGACAGGCGAGGGACAAGAGATTCAGACAATAGATGCTTACATTGATGATAGTGACTATACCAAGTCTATTGTAGAATTTATTGATGAGATTGCACCAGATGAACAGGGCCTTATTTTTACAGATTTGTTAGGTGGTAGCGTTAATCAGAAAATGGCGACTGCTGTAATGAATAGTGGGAAAAATAATGTTTTTTTAATAACGAACAGCAATTTAGCGACCTTGTTGTCATTACTATTTTTGAAACCTGAAGAGGAATTAACTAAAGAAGAAATTGTAACCGTTATCAATGAATCTCAAGTGCAGCTGGTAGATCTTAGCTTTAAAGCGAGTTCAGAAGATGACTTTTTCGAT

SEQ ID NO: 12472 - protein, 141 aa, Streptococcus agalactiae
MKRKFLIGSHGKLASGLQSSIDILTGEGQEIQTIDAYIDDSDYTKSIVEFIDEIAPDEQGLIFTDLLGGSVNQKMATAVMNSGKNNVFLITNSNLATLLSLLFLKPEEELTKEEIVTVINESQVQLVDLSFKASSEDDFFD

SEQ ID NO: 12473 - protein, 1005 aa, Streptococcus agalactiae
ATGATTAGCTTGCTACAATACCTTTTTTCCATACTGGTCATTTTAGTTCATAGTGGAAGGTTATTTAGTCAGGATGTCATTCATTTTACCTTTAAAAGTTTCCTAGGTCGGATGGCTGTTCCTTATTTTTTGATTTGTACTGCTTTCTTTTTGAGAGGTCGTATACAGCAAGGTTTGTGTAATCACTCCTACTTTCGTAAACTGATTAAAAAGTATAGCATGTGGACTATCATTTATTTGCCTTATGGTTATTTCTTTTTTGAATCTCTAAATATAGCGAAGATCTATTTGCTGCCGGGTTTTATTGTGGCATTGTTGTATTTAGGTATGTTACATACCCTTTGGTACATCCCTGCTGTTATTCTAGGTTGGATCATTATTCAAGGATTATTGAAGTATGTAGGAACTAGGGGGACATTTATCACAGTTGTTGTACTCTATTGTATTGGAGCAGTAGAGACCTATTCTGTCTTTGTACAGTCAACAAAATTTTATCCCCTGATGTCCACTTATATGTCAATTTTTCAGACAACACGAAACGGATTATTTTACACTCCAGTTTATCTTCTAGCAGGATATTTACTCTATGATTATTTTAATACTGACCTATTTACCAAATCGCGTGGTCTTAAGTATATTCTCTTCCTTTTACTTCTAGCTTTAGAGAATGTTCTTATTTATTTTAATCAAGGGTTGGATAAAAATTTCTTCTTATTAGCTCCTTTATGTGCAGTATTCTTATTTAACTGGAGTATACGTACATCACTGTTTAAGGACTATCGTTTAAGTCCTTTAAAGCAGTTGAGTGTCTATTATTTCTTCCTTCACCCTCTTTTTGTTGGCATAGTGTCTTACTGTTTAAAATCAACTTCCTTAGTTGCACACCATCAAGGAAAAGTGATTTTTGTGGTGACCTTGGCATTAACACATGCTTGTGCTCTACTCATAATAAAGGTTGTTAATAAGATACCCTATCAAAAAATTATTCCATTATCTCTTTCGAAA

SEQ ID NO: 12474 - protein, 335 aa, Streptococcus agalactiae
MISLLQYLFSILVILVHSGRLFSQDVIHFTFKSFLGRMAVPYFLICTAFFLRGRIQQGLCNHSYFRKLIKKYSMWTIIYLPYGYFFFESLNIAKIYLLPGFIVALLYLGMLHTLWYIPAVILGWIIIQGLLKYVGTRGTFITVVVLYCIGAVETYSVFVQSTKFYPLMSTYMSIFQTTRNGLFYTPVYLLAGYLLYDYFNTDLFTKSRGLKYILFLLLLALENVLIYFNQGLDKNFFLLAPLCAVFLFNWSIRTSLFKDYRLSPLKQLSVYYFFLHPLFVGIVSYCLKSTSLVAHHQGKVIFVVTLALTHACALLIIKVVNKIPYQKIIPLSLSK

SEQ ID NO: 12475 - protein, 168 aa, Streptococcus agalactiae
ATGATACCAATCTCTTCAGAAGAATATCTCAATTATCCCAAAAAGTCATTGAAACGCCTTAAATGGTATCTGATAATTATTGTTAATACCTTATTAACCATATTAGGAAATAAAAAAGCTGATTTCGCAAAAGAAAATCAGCTTAGAATAATTTCTTGTTCAGATAAC

SEQ ID NO: 12476 - protein, 56 aa, Streptococcus agalactiae
MIPISSEEYLNYPKKSLKRLKWYLIIIVNTLLTILGNKKADFAKENQLRIISCSDN

SEQ ID NO: 12477 - protein, 1152 aa, Streptococcus agalactiae
ATGATATCAATTTTTCCTTTTGAATTAAAAAAACTGCTACAACGTAAGGCAGCATTGGGGGCTTTTATTATCTTCCTTCTTGCTATTTTTGGTCTATTTTACCAGCATTTTTTTGTTGGGCAAATTAGTGGCTATTCTGCAGATAAAATACATGGTCGAGAAGCGGTTGCCATTAATCGTAGAATAGCTGAAAAATATTCAGGGGATTTATCTGAAGAACGAGTAACAAATATTATTAAAAACTATGTTAATCCGCCAGCAGGACGCCCCCCTATATTTGATGTTTTTAGTTATTATGTGGCAGACACTTTTGATCGTGATTTTTTAATTTACTATAACCAATTGAAAGATGATAAAACAATTGATTTTAATAAAATAAATATTAAAGATCAAAAACAGTTGGGTTCTGCGCTACCACTAAAACAACTAAAGTTAGGTAACTTTGCTCCTTGGAATCAACTTTTCGAAGTAAGTAATAGTACTTATATTTTAATTGTCTTATTTACTCTATTCTTATCAGCTCCTCTTTTTTCAGGAGATAGGGCTAAGAAGATTAATCCTATACTACTGACGACTCGGTATGGACGTGGTCAGTTGACCTGGGCTAAGTTAGCTAGTACAATGACCATCGGTATTTCCACATTTATCCTAGCATATGCCCTCATTCTGACGGTATTTGCAGATTATTTTGGTTTTAGTGGTTGGGAGACAAGTGTTCAACTGAATTTATACTGGACATCACCTTTAGCTAATATTATGGGATTTCCTGTACCTATGACAATATCAACTGCTTTTGTTCATATTATTGTCTTACAATTTGTTGGACTCCTTTTTATAGCCAGTCTTAATTTCTTTATATCAAGTATCACAAATTCGCCATTAACATCTTTTGCTGTTTCAACACTTGCCTTTTTTGCTCCTAGCTTTTTAATGGCTATGTTTAATAAAGGTGTGATAAACAAGTTATTAACTATTTTCTCAGTATCAACGACAGACACTCCAGCTTTACTTTTAAAATTATCACGTAATGGTAGTCCTGGCTTTTTCTTTGATAGTTTTTCTGCTAATGAAATCTGTTTGATCAGTCTGCGTATGTTAATTGCAGTGTTATTGATAGCTTATACCTATCGTTTAATGCGACGAAGAAGTTTA

SEQ ID NO: 12478 - protein, 384 aa, Streptococcus agalactiae
MISIFPFELKKLLQRKAALGAFIIFLLAIFGLFYQHFFVGQISGYSADKIHGREAVAINRRIAEKYSGDLSEERVTNIIKNYVNPPAGRPPIFDVFSYYVADTFDRDFLIYYNQLKDDKTIDFNKINIKDQKQLGSALPLKQLKLGNFAPWNQLFEVSNSTYILIVLFTLFLSAPLFSGDRAKKINPILLTTRYGRGQLTWAKLASTMTIGISTFILAYALILTVFADYFGFSGWETSVQLNLYWTSPLANIMGFPVPMTISTAFVHIIVLQFVGLLFIASLNFFISSITNSPLTSFAVSTLAFFAPSFLMAMFNKGVINKLLTIFSVSTTDTPALLLKLSRNGSPGFFFDSFSANEICLISLRMLIAVLLIAYTYRLMRRRSL

SEQ ID NO: 12479 - protein, 708 aa, Streptococcus agalactiae
ATGAGCCACTTTACATTCGCAGATAGTGGGAATATTTATTGGAATGGACTGGAGCAGTCGGAAGAATTTTATCGTCACATTGGTTTTTTACCGCAACATTTTCGCTATTATGATCAATTTACTGGCATTGCTTTCTTAAATTATATCGCTACCTTAAAAGGTGTTGATAAAAAGAAAGCTAAACAAGAAATTCCTAGATTACTAGAGCTTGTTGGTTTAGGCGATGTAGGTAAAAAGAAGATTTCATCATACTCCGGTGGTATGAAGCAACGTTTAGGCATTGCTCAAGTACTTATCAATGATCCTGAAATACTCATTCTGGATGAACCAACTGTTGGACTTGATCCTAAGGAACGGGTTAAATTTCGCCATATTTTGAGTCAGTTATCCACCAATAAAATTATCATTTTATCAACGCATATTGTGTCGGATGTGGAAGCTGTTGCCAAAGAAATTATAGTATTAAAAAATGGTAAATTTATCGAACATGGCAACACCGCACAGCTGTTGAAAACTATTGAGGGAAAAGTGTGGGAAATAACGACTGAACCAGATTTATCTCAGATACCCAATATTGCTATTGTTAATGAAAAAGTCATTTCAGATAGTCGGGTATTTCGTGTAGTGAGTGATATTTGTCCGAGTGATTCGGCACAGTTGGTTGTTCCGACTCTAGAAGATTTCTACATCTATCATTTTAGAGGGGAG

SEQ ID NO: 12480 - protein, 236 aa, Streptococcus agalactiae
MSHFTFADSGNIYWNGLEQSEEFYRHIGFLPQHFRYYDQFTGIAFLNYIATLKGVDKKKAKQEIPRLLELVGLGDVGKKKISSYSGGMKQRLGIAQVLINDPEILILDEPTVGLDPKERVKFRHILSQLSTNKIIILSTHIVSDVEAVAKEIIVLKNGKFIEHGNTAQLLKTIEGKVWEITTEPDLSQIPNIAIVNEKVISDSRVFRVVSDICPSDSAQLVVPTLEDFYIYHFRGE

SEQ ID NO: 12481 - protein, 180 aa, Streptococcus agalactiae
ATGTTGACGTACAAAAAAGCATTGGTGCGTCAGGTTGATACTAAGGATTGTGGAGTAACTGCACTTGCTTCAATCGCAAAGTTCTATGGTTCAAAATATTCATTAAACCACTTACGAGAACTGGCCAAAACTAATCGAGATGGAACTACAGCTTCAGGAATTATCGCCGGAACAACTAAA

SEQ ID NO: 12482 - protein, 60 aa, Streptococcus agalactiae
MLTYKKALVRQVDTKDCGVTALASIAKFYGSKYSLNHLRELAKTNRDGTTASGIIAGTTK

SEQ ID NO: 12483 - protein, 1332 aa, Streptococcus agalactiae
ATGAATTCTACTCTATCCATCTTAGAGATAGCTTTAACGATAATATTAACAATATTTCTCTTTTCTAAAATCAGTGGACGTCAATTAACTTTAATAGAGATTGGAATTTGTATTGCTCTGAGATTAGGACTTGTAATTTTATTTATAGCAGCTAATACTATTATTAATCTTTCATTTCTAAAGTACTGGCTTCTCCCCATCTATATGTTAAGTCTGGCTTTCTTGTTGCTAAGACCTATATCTAAAACTTTAGTAGTCTTTTATGGCTTGTTTCCAATTGTTCTCAGAAATCTTTGTTCACGTTCTTTAGCTTTTTTTGTCTTTCCTTTGTTTAATATTGATTTTCATACAACCAACCAGGGGTTTTGGGGATATTTTGTTGATGTCTTGTCTACTCTTTGTGTTCTCTTATTTTTAAGATGGATGCAATACGATTTTAAAGCATTGCGAAGTAGTGAAGTTTCGCCAACAGATAGGAGAATTCTCCAATTTACGAATGGGTGCATGGTGAGTTATTACTTATTGATGCAGTTTTTAACTTACTTCGAATATGAATTAGCCATCAATACTGTTATTTACCGACAATTTTTGCTTGTTGCTTATTGGATTATATTTACGGGAGCAATAGCCAGTTTAGACCGGAGACTTCGAAATTCTTTACAGGAGAGGTTAGCTGTTCAAAGAGAACTCCAATTGGCTAATATGATAGATTATAGCCACCATATTGAGGGGTTGTATAAAGAAGTTAGGAGCTTCCGACATGATTATAGTAACATGTTAACGACCTTGAAACTAGGGATTGATAATGAAGATATATCTATTGTCAAATCAGTTTATCAGTCTATCTTTAAAGAATCTAATACACATTTCCGACATCCTAAGTATAATATAGACCGGTTGGTTAATGTAGATAACCCAGCCTTAAAAAGTCTTTTAGCAGCCAAGCTTTCACAAGCGATAGACAATCATATTATGGTATCTATAGAAGTACCAGACAGTATTAAACCTCAAGGGATGGAACTGATTGATTTTATTACCATTGTATCTGTTTTATGGGATAACGCTATTGAGGCTTCTTTAGAGACAGACGATCCTAAGATAGCCATGTCTTATTTTACATTAAAACATAAACAAATTTTTATCATAGAAAATTCAACTAAGGAAAAGGCAATAGATACGTCAATGATATTCAATTATGAGATAAGTAGTAAGGGACAGAATAGAGGAATAGGTCTTTACAATGTCAGGGGAGTTATCAATCGTTATCCAAATATTTCTATTGCAACAAGTAGCCAAGATTTTAGTTTCTGCCAAACTTTCGAAATCATATTA

SEQ ID NO: 12484 - protein, 444 aa, Streptococcus agalactiae
MNSTLSILEIALTIILTIFLFSKISGRQLTLIEIGICIALRLGLVILFIAANTIINLSFLKYWLLPIYMLSLAFLLLRPISKTLVVFYGLFPIVLRNLCSRSLAFFVFPLFNIDFHTTNQGFWGYFVDVLSTLCVLLFLRWMQYDFKALRSSEVSPTDRRILQFTNGCMVSYYLLMQFLTYFEYELAINTVIYRQFLLVAYWIIFTGAIASLDRRLRNSLQERLAVQRELQLANMIDYSHHIEGLYKEVRSFRHDYSNMLTTLKLGIDNEDISIVKSVYQSIFKESNTHFRHPKYNIDRLVNVDNPALKSLLAAKLSQAIDNHIMVSIEVPDSIKPQGMELIDFITIVSVLWDNAIEASLETDDPKIAMSYFTLKHKQIFIIENSTKEKAIDTSMIFNYEISSKGQNRGIGLYNVRGVINRYPNISIATSSQDFSFCQTFEIIL

SEQ ID NO: 12485 - protein, 654 aa, Streptococcus agalactiae
ATGGTAAATACCTTTGAAAAACCAGTTCAATTATTGGAATCAATCTGTGAAAAAGGTATGCATAATTTATATTTCTTAGACATTGAAATAAAAAATGATGAGCAGAGGGGCTTAGAGGTCGCAAAACAAATTAGACAAATTGATCCTTATGCTCAGATTGTTTTTGTTACAACTCATTCGGAATTAATGCCTTTAACCTTTCGTTATCAGGTATCAGCTTTAGACTATATCGATAAAGGACTTTCACAGGAAGCATTTAGCAGAAGGATTGAAGAAGTTTTACTATATGCTAATAATGCTTGCAGTAAAAACTTACTAGAAGATTCTTTTTATTTTAAATCACGCTATAGTCAAGTACAAGTACCTTTTAACGATATCCTTTATATAGAAACGTCATTAAGGTCACATAGAGTTGTCCTTTATACTGCAAAAGACAGAATGGAATTCACAGCCACTTTGGGGGATATTTTAAAACAAGAACCTAGGCTCTTTCAATGTCATCGCTCTTTTTTAGTAAATCCCTTGAATATTTTTAAAGTGGATAGGTCAAATAAACTAATCTATTTAAAAAATGGTTCGAATTGTTTGATTTCTCGTAATAAAATAAAAGATATTATGGTAGTAATAGAGGAAAATCAAAGAGGTAGAGGAATA

SEQ ID NO: 12486 - protein, 218 aa, Streptococcus agalactiae
MVNTFEKPVQLLESICEKGMHNLYFLDIEIKNDEQRGLEVAKQIRQIDPYAQIVFVTTHSELMPLTFRYQVSALDYIDKGLSQEAFSRRIEEVLLYANNACSKNLLEDSFYFKSRYSQVQVPFNDILYIETSLRSHRVVLYTAKDRMEFTATLGDILKQEPRLFQCHRSFLVNPLNIFKVDRSNKLIYLKNGSNCLISRNKIKDIMVVIEENQRGRGI

SEQ ID NO: 12487 - protein, 828 aa, Streptococcus agalactiae
ATGAAAGGATACTCTATGGCAAAATGCTTAACGTTAAATACTCATTCATGGATGGAAGTAAATGCTCTAAAGAAATTATTTGATTTAGCAGAGCATATCTTCCGTGAAAAATATGATATCATCTGCCTACAAGAGGTGAACCAGAGCATATCTTCCCCTCTTGCTAAGAGTAGTCCAAATTATCATCCGATTGAAGGTACACCAGCTCTTCATCAAGATAACTTTGCCTTGCAATTAGTGCATTACCTAAATCTTCAAGGTCTACACTATCATTGGACATGGGCTTATAATCATATTGGTTATAGTAAGTACCATGAAGGGGTAGCGATACTTTCTCTGAAACCATTAAAGCCAGATGATATTTTAGTTTCAGCTGTAGACGATGAGACTGATTATCATACTCGTCGTGCTCTGGTAGCTGAGACCACTCTGAATGACAAAGTCGTTACAGTAGTTAGCCTCCATTTATCATGGTTTGAGAAAGGATTTGCGGAGGAGTGGAAACGACTAGAAACTACCCTACTTGAGGTAGAAACTCCACTTTTACTCATGGGTGACTTTAATAATCCTACTGGAAATCAGGGTTATGAACTTGTTCTTAATAGTCCATTAGCATTAAAGGATAGCCACCAAATAGCCAATCATGTATTTGGAGACCATACTATTATGGCTGATATTGATGGTTGGGAAGGGAATAAAAAGGCTCTTAAAGTTGACCATATTTTTACTAGCGAAGACCTTTCAATCAGTTCAAGTCAAGTAGTTTTTGAAGGTGGTGAAGCACCTGTCGTTAGTGATCATTACGGCTTGGAAATTACGTTAAATCTT

SEQ ID NO: 12488 - protein, 276 aa, Streptococcus agalactiae
MKGYSMAKCLTLNTHSWMEVNALKKLFDLAEHIFREKYDIICLQEVNQSISSPLAKSSPNYHPIEGTPALHQDNFALQLVHYLNLQGLHYHWTWAYNHIGYSKYHEGVAILSLKPLKPDDILVSAVDDETDYHTRRALVAETTLNDKVVTVVSLHLSWFEKGFAEEWKRLETTLLEVETPLLLMGDFNNPTGNQGYELVLNSPLALKDSHQIANHVFGDHTIMADIDGWEGNKKALKVDHIFTSEDLSISSSQVVFEGGEAPVVSDHYGLEITLNL

SEQ ID NO: 12489 - protein, 1959 aa, Streptococcus agalactiae
TTGGCTATTGGTGGTAGCTGGGCTAAAGAACGTGCCGGTGGTGCTTTTGCGGCTGGCTTATCCTTTATTCTTATTAACCTTATTACGGGGAACTTTTTTGGTGTTAAAACAGATATGTTAGCAGACAGTAAAGCAACTGTTCAAACGGTATTTGGTGCAACCATCAGAGTTTCAGATTACTTTGTTAACGTTCTTGGACAACCTGCTCTTAATATGGGTGTATTTGTCGGTATTATTTCAGGTTTCGTTGGTGCAACTGCCTTTAATAAATATTATAACTATCGTAAATTACCAGATGCTTTAACTTTTTTCAATGGAAAACGTTTTGTTCCATTTGTTGTTATTTATCGTTCAGTCATTGTTGCATTAATTTTATCAGTATTTTGGCCGGTTGTTCAATCAGGTATCAATGGCTTTGGTAAATGGATTGCAAGTTCACAAGACAGTGCTCCAATATTAGCACCATTTGTCTACGGTACGATAGAGCGTTTATTGCTCCCATTTGGTTTACACCATATGTTAACTATTCCAATGAACTACACGCAACTAGGTGGCACATACACTGTCCTTACAGGTGCAACTAAAGGAGCACAGGTGTTGGGACAAGATCCACTGTGGTTAGCATGGGTTGGTGATTTAATTAACTTAAAAGGCTCAAATTCAAGTCAATACCATCACTTATTGACAAGTGTCACTCCAGCACGTTTTAAAGTGGGGCAAATGATTGGTGCTTCAGGTATTTTGATGGGATTATCTTATGCTATGTATCGTAACGTTGATAAAGATAAAAAATTGAAATACAAGTCAATGTTTATTTCAGCAGCGGCGGCTACTTTCTTGACAGGTGTTACTGAGCCAATTGAGTACATGTTCATGTTTGCAGCAATGCCACTCTACCTTGTATATGCTGTCGTTCAAGGATGTGCGTTTGCTATGGCAGATATTGTTAACCTCCGCGTTCATTCATTTGGTAATATAGAATTTTTAACACGTGTTCCCATGGGAATAAAAGCGGGCCTTGGTGGTGATATTTTCAACTTTGTTTGGGTGACACTTCTTTTTGCAGTATTGATGTACTTTATTGCAAACTTTATGATTAAAAAATTCAATTTAGCAACAGCAGGACGTAATGGTAATTATGATAACGAAGAGGTTGATAATGCTCCTTCAACAGCTTCTGGTTCTGCTGATGCAAATTCTCAAGTTGTACAAGTTATTAATTTACTTGGTGGTCGTGATAACATTGAAGATGTAGATGCATGTATGACTCGTCTTCGTGTCACAGTTAAAGATGGAAATAGCGTGGGTTCTGAAGCAGCTTGGAAAAAAGCTGGTGCAATGGGATTGGTGTTAAAAGGTAATGGCGTTCAAGCTATTTACGGACCTAAAGCAGATGTCCTTAAATCAGACATTCAAGATTTGCTAGATTCAGGTACAGTTATTCCAATAGTTGATTTAGAAACAGGCCAACCTGTAGCAGCAGCCCAAGTTACAACTTATAAAGGAATAACAGAAGAAATTGTTTCGGTGGCTAATGGTCAAGTAGAAGCATTGGATGTTGTTAAAGACCCTGTCTTTTCTCAAAAAATGATGGGTGATGGCTTTGCTGTGGAACCAACTGATGGCAATATTTATGTTCCAGTTTCAGGTACAGTTACTAGTGTCTTTCCAACAAAACATGCTTTTGGTTTATTAACAGAAAGTGGCCTAGAAGTTTTAGTACATATCGGTCTAGATACAGTAGCTCTTGATGGTCAACCATTTGAGGTTAAAATTTCTAGTGGTCAAAAAGTGGTAGCAGGCGATCTTGCTGTAGTAGCAGATTTGGAAGCTATCAAAGCAGCTGGTAAAGAGACAAGTGTGATTATCGTCTTTACAAATGTTTCAGATATAAAAACTGTTAAACTTGAAAAATCAGGTCCACAAATAGCTAAAACAGTTGTGGCAAAAGTCGAACTG

SEQ ID NO: 12490 - protein, 653 aa, Streptococcus agalactiae
MAIGGSWAKERAGGAFAAGLSFILINLITGNFFGVKTDMLADSKATVQTVFGATIRVSDYFVNVLGQPALNMGVFVGIISGFVGATAFNKYYNYRKLPDALTFFNGKRFVPFVVIYRSVIVALILSVFWPVVQSGINGFGKWIASSQDSAPILAPFVYGTIERLLLPFGLHHMLTIPMNYTQLGGTYTVLTGATKGAQVLGQDPLWLAWVGDLINLKGSNSSQYHHLLTSVTPARFKVGQMIGASGILMGLSYAMYRNVDKDKKLKYKSMFISAAAATFLTGVTEPIEYMFMFAAMPLYLVYAVVQGCAFAMADIVNLRVHSFGNIEFLTRVPMGIKAGLGGDIFNFVWVTLLFAVLMYFIANFMIKKFNLATAGRNGNYDNEEVDNAPSTASGSADANSQVVQVINLLGGRDNIEDVDACMTRLRVTVKDGNSVGSEAAWKKAGAMGLVLKGNGVQAIYGPKADVLKSDIQDLLDSGTVIPIVDLETGQPVAAAQVTTYKGITEEIVSVANGQVEALDVVKDPVFSQKMMGDGFAVEPTDGNIYVPVSGTVTSVFPTKHAFGLLTESGLEVLVHIGLDTVALDGQPFEVKISSGQKVVAGDLAVVADLEAIKAAGKETSVIIVFTNVSDIKTVKLEKSGPQIAKTVVAKVEL

SEQ ID NO: 12491 - protein, 1652 aa, Streptococcus agalactiae
ATGACTAAAAAAATTTTCCGTACAACTTTATCCGCTAGTTTGGGAATTGTTTTAGTTACAATTTTGATGATTATGGGATTTCTCTATAATTACTTCAATCGCATTCAGCGAGAACAGTTGAGAACACAAACGGCACTGGCGTCACAAGGAATTTCCTTTGAAGGTAAAGATTATTTTGAAAATCTTAAAACTTCAAATGTGCGTATTACTTGGGTAGATAATAAGGGACAAGTGCTTTATGATACCCAATCAGATGCAAAACATATGAAAAATCACGCCAATCGTCAAGAAATTAAAGAAGCTATCAAGAGTGGTTATGGTGAGAGCACGAGGTGGTCAGCGACACTTACTGAGAAGTCTATCTATGCTGCGCAACGTTTAAATAATGGAACGATAGTTCGTTTATCAGTTGCGCAACAAACTATTTTTTATCTTCTCCTTGGTATGATGAGTCCCTTAGCAATTATCATCTTACTTGCTATTATTTTATCTGTATTAATTGCACGATATATAGCGAAAAAAGTATCAGAGCCTTTAAACAATATTGACTTAGATCATCCTTTATCAAATGATAGTTACGAGGAGATAACACCATTATTAAGGCGTCTTGATAGCCATCAGTCTAAGATTCAACATCAAAAACTGTTATTACAAAAGCGTCAAAAAGAAATTGATACCATTATTTCTAAAATTAAGGAAGGAATGATTCTTTTAGATGATCAAGCAAGAATCGTTAGTATCAACGCAGAAGCTTTAAAGTTATTCCAAATTAATGATGATTGGCATGGGCGCTTTATGATGGAAGTTAGCCGAGATTTAACTCTCAAAGACTTAATTGATCAAGGACTAAAAGGGAAAAAGAAAGAGGCTAATATTGACATTGAAAATAATCATTACCGCGTCTTGGTAAGACCAACTACAGATAACAACCGAGTAACAGGATTGGTTGTTCTACTGTTTGATGTGACTGACCAACTCCAAATGGAACAACTTCAACGTGAATTTACTGCCAATGTCTCTCATGAATTGAAAACCCCGCTTCATGTCATTTCTGGGTACTCAGAACTGTTAGCTAATCAAATGGTTCCAAACGAAGAAGTCCCACAATTTGCAGCTAAAATTCATAAAGAATCTGAACGATTAGTTAAATTGGTTGAGGATATTATCAACCTTTCTCACCTTGATGAACAAGAAAAATTACCGCAAGAGACAGTAAATCTGTATGACTTAACACAAAAAGTTTTAGAAGGTTTACAAGCTAAAGCAGATAAGAAGCACATACAAATCAATTTTAATGGAGAAGAAGCTATTTTGCGAGGGAATCCAGTTTTATTGAATTCCTTGGTGTACAACTTGTGTGACAATGCTCTCACCTATAATCATGAGAAAGGTCAAGTAAATGTGACTTTGAAAAATTCACCTGATACAATTACCTTAGAAGTTAGTGATACGGGACTAGGCATTGCAGAGAAGGACAAAAAACGTATTTTCGAACGTTTCTATCGCGTCGATAAAAGTCGCTCAAAAATAGTTGGAGGGACTGGTTTAGGTTTGTCTATTGTAAAGAGTGCTTAGATTTTCACAATGGTAGTATAAAAGTGGACAGCCATTTGGGGCAGGGAACAACAATGACCGTTTTACTTCACAAACAA

SEQ ID NO: 12492 - protein, 551 aa, Streptococcus agalactiae
  VARIANT 525: Xaa = Any Amino Acid
MTKKIFRTTLSASLGIVLVTILMIMGFLYNYFNRIQREQLRTQTALASQGISFEGKDYFENLKTSNVRITWVDNKGQVLYDTQSDAKHMKNHANRQEIKEAIKSGYGESTRWSATLTEKSIYAAQRLNNGTIVRLSVAQQTIFYLLLGMMSPLAIIILLAIILSVLIARYIAKKVSEPLNNIDLDHPLSNDSYEEITPLLRRLDSHQSKIQHQKLLLQKRQKEIDTIISKIKEGMILLDDQARIVSINAEALKLFQINDDWHGRFMMEVSRDLTLKDLIDQGLKGKKKEANIDIENNHYRVLVRPTTDNNRVTGLVVLLFDVTDQLQMEQLQREFTANVSHELKTPLHVISGYSELLANQMVPNEEVPQFAAKIHKESERLVKLVEDIINLSHLDEQEKLPQETVNLYDLTQKVLEGLQAKADKKHIQINFNGEEAILRGNPVLLNSLVYNLCDNALTYNHEKGQVNVTLKNSPDTITLEVSDTGLGIAEKDKKRIFERFYRVDKSRSKIVGGTGLGLSIVKSAXDFHNGSIKVDSHLGQGTTMTVLLHKQ

SEQ ID NO: 12493 - protein, 675 aa, Streptococcus agalactiae
ATGATATATTGTGTTGAAGATGATGCTGATATTCGCGAAATGATGCTCTATACTTTGCAAATGGCAGGTTTTACAGCTCAAGGATTCTCGAGTTCAGAGCTTTTTTGGGAAGCTATTCAGGAGAAAGTTCCAGACTTGATTTTACTTGATATTATGTTGCCGGGAGATGATGGTTTGACTATTTTAGAGCGTTTAAGGAGAAAACATCAAACGGAAATGATACCAGTAATCATGACAACTGCTAAAGGTAGTGAGTATGATAAAGTTAAAGGGTTAGATCTTGGAGCAGATGATTATCTCGTCAAACCTTTTGGGATGATGGAAATGATTTCACGAATAAAAGCAGTCTTGAGACGTAGCCGCCAAGTAGATTCAAAAGCTCATATTATCATTGGAAATTTAGAGATTGATCCGACTAATTATTGGGTCAAAAGGGGAACGGAAAAAATCCACTTAACCCTAAAGGAATTTGAGTTATTAGTATTATTCTTCCGTAATCCCAATAGAGTCTTTACAAGGCAAGAACTTCTGGATAAGGTTTGGGGAGAACAATTTTTAGGAGAAACTAGAACTGTGGATGTTCACATTGGGACACTGCGAACAAAACTTGGTGAGGATGGCTATTTGATCGCTACAGTAAGGGGAGTTGGATACCGTTTGGAGGAAAGACATGAC

SEQ ID NO: 12494 - protein, 225 aa, Streptococcus agalactiae
MIYCVEDDADIREMMLYTLQMAGFTAQGFSSSELFWEAIQEKVPDLILLDIMLPGDDGLTILERLRRKHQTEMIPVIMTTAKGSEYDKVKGLDLGADDYLVKPFGMMEMISRIKAVLRRSRQVDSKAHIIIGNLEIDPTNYWVKRGTEKIHLTLKEFELLVLFFRNPNRVFTRQELLDKVWGEQFLGETRTVDVHIGTLRTKLGEDGYLIATVRGVGYRLEERHD

SEQ ID NO: 12495 - protein, 654 aa, Streptococcus agalactiae
ATGATTCGTTCACGATTTGCAAGTCAACTTAATGACCTTAATAAAGAAATTATTTTTATGGGGGCATTGTGTGAGGACATCATTGGGAAGTCCTTAGGTGCTCTAACAAATAGTAATGACGTTTACCTTGACGACATTTCTGAAACTTATCACAAGATTGAACAAATGGAACGGGATATTGAGGAGAGATGTTTAAAACTTTTACTTCGTCAGCAACCAGTTGCCAAGGATTTACGCCGTATTTCTTCTGCATTAAAAATGGTTTATGATATGAAACGTATTGGTGCTCAAGCTTATGAAATTGCGGAAATTGTTAGTTTAGGTCATATTATCCAAGGTGCAGGTTCTGAAAGGGACCAACTTAACAGCATGTCTAATAATGTCATTAGTATGCTGACTAAGAGTATAGATGCTTTTATTTATGACAATGAAGAACAAGCGCATCAAGTAATTGAACAAGATAGGACAGTTAACCAGGAATTTGATACAATAAAGAAACAGTTAGTGTTATATTTTTCGGTACAGGATGTTGATGGTGAATATCCCATAGATGTTTTAATGATCGCCAAGTACCTAGAGCGTATTGGTGATCATACAGTAAATATTGCTAAATGGGTGCTTTTCTCAATAACAGGTAACCTAGATGGAGAAGCG

SEQ ID NO: 12496 - protein, 218 aa, Streptococcus agalactiae; identical to SEQ ID NO: 3540

SEQ ID NO: 12497 - protein, 747 aa, Streptococcus agalactiae
GTGAGTAAATTAGTAATTAATAATTTAGATTTGTATTATGGAGAATTTCACGCTCTCAAGGATGTTAATTTAGACATTGAAGAAAAAGAAATCACAGCCTTTATTGGACCTTCTGGGTGCGGAAAGTCTACTCTCTTGAAAAGTATTAACCGTATGAATGATTTGGTCAAAAATTGCAAAATCACAGGGGATATTACTTTAGAAGGCGAGGATGTCTATAGACAATTGGATATTAACCAATTGCGTAAAAAGGTTGGAATGGTGTTTCAAAAACCTAATCCGTTTCCAATGAGCATTTATGATAATGTTGCTTTTGGTCCAAGAACGCACGGTATTCATTCCAAAGCAGAGTTAGATGATATCGTTGAACGTTCCCTTAAACAGGCGGCTCTATGGGATGAGGTTAAAGATCGTCTTCACAAATCTGCTCTGGGTATGTCTGGCGGACAGCAGCAACGTTTGTGTATTGCGCGTGCTCTTGCTATTGAGCCTGATGTTTTACTTATGGATGAACCCACAAGTGCCTTGGATCCTATTTCAACAGCAAAAATTGAAGAATTGGTTATCCAACTGAAGAAGAACTACACTATTGTTATAGTGACACATAATATGCAACAAGCTGTTCGTATTTCTGATAAAACAGCATTCTTTCTGATGGGAGAAGTGGTTGAATATAATAAAACGAGCCAACTCTTTTCATTGCCACAAGATGAGCGTACAGAAAACTATATTACAGGGAGATTCGGA

SEQ ID NO: 12498 - protein, 249 aa, Streptococcus agalactiae; identical to SEQ ID NO: 3542

SEQ ID NO: 12499 - protein, 876 aa, Streptococcus agalactiae
ATGGAAAATATTAACCAAAAAACGTCAAAACAATATTTAGCATCTTTAAAAAAAGATCCCCTTTCCTTCTTTCTTTTTGCTATTGTCTATTTGGGAGCAATTCTAAGTTTTGCTACAATTGCATTTGTTGTTATTTATATTTTAGTTAAGGGGCTTCCTCATGTGAATACTGGCTTGTTTGCATGGACTTATAATACTCAGAACGTTTCACTATTACCAGCTTTCATTAACACTATCTTTATCATCGCCTTAACTTTATTATTTGCAGTTCCACTTGGTATTGGTGGATCAATTTATCTAACGGAATATGCTAGACGTGATAATCCTTATCTCAAAATTATCCGTGTTGCAACCGAGACATTGGCAGGGATACCTTCAATTATTTATGGTTTATTTGGTGCATTATTTTTTGTAAAATACACACACTTAGGCTTATCTTTGATATCGGGTTCTTTGACTTTGAGCATCATGATTTTACCTTTGATTATGAGGACAACTGAAGAAGCTTTACTATCTGTTCCGGATTCTTATCGAGAAGGAGCCTTTGCGCTTGGTGCGGGTAAATTGAGAACCATATTTAAAATCGTATTACCTAGTGCTATGTCTGGTATTTTTGCTGGTATTATTTTAGCGGTAGGACGTATCATTGGTGAGTCAGCAGCACTTATTTTCACAGCTGGAACAGTTGCAAAAGTAGCACATTCGGTATTTAGTTCATCTCGTACTTTAGCAGTACATATGTATGCTATTTCGGGTGAGGGCTTATATGTTGACCAAACTTATGCGACTGCGGTCATCTTATTGCTTTTAGTTATTATTGTCAATTTTGTATCTGGACTAGTAGCCAAACGATTAGGAAGTGAGTCGAACAGTGAG

SEQ ID NO: 12500 - protein, 292 aa, Streptococcus agalactiae
MENINQKTSKQYLASLKKDPLSFFLFAIVYLGAILSFATIAFVVIYILVKGLPHVNTGLFAWTYNTQNVSLLPAFINTIFIIALTLLFAVPLGIGGSIYLTEYARRDNPYLKIIRVATETLAGIPSIIYGLFGALFFVKYTHLGLSLISGSLTLSIMILPLIMRTTEEALLSVPDSYREGAFALGAGKLRTIFKIVLPSAMSGIFAGIILAVGRIIGESAALIFTAGTVAKVAHSVFSSSRTLAVHMYAISGEGLYVDQTYATAVILLLLVIIVNFVSGLVAKRLGSESNSE

SEQ ID NO: 12501 - protein, 843 aa, Streptococcus agalactiae
ATGAAACAAACAAAAGAAGGTCTTATGCAAGCTGTGTTTTTCATCACGGCTTGCGTCAGTGTTATATCAGCTATTTTAATTTGCCTCTTTCTCTTCTCTAGTGGTCTTCCAGCTATTACGAAAATCGGCTGGGGAAATTTTATATTTGGTAAAGTCTGGCATCCTAGTAATAGTATTTTTGGCATCTTTCCAATGATTGTAGGTTCCTTATATGTTACAGCGGGAGCTTTACTTTTAGGAGGACCGATAGGTATCCTTACTGCTGTTTTTATGGCTTATTTCTGCCCAGAAAATATTTATAAGCCTTTAAAGTCAGCTATCAATTTAATGGCGGGAATCCCTTCAGTTGTTTATGGTTTCTTTGGACTCGTTGTTATTGTCCCTATGATAAGGCAATATATTGGTGGCTTTGGTATGGGAGTCTTAGCAGCTTCAATTTTGCTAGGAATTATGATTTTACCAACAATTGTTAGCATTTCAGAATCTTCTTTAAGAGCTGTTCCAGAGAGCTATTATGAAGGCGGTATTGCCCTTGGTGCCTCTCATGAACGAAGTGTCTTCTTTGCTGTTTTACCAGCTGCTAAACGTGGTATTTTAGCATCGGTTGTTTTGGGAATTGGACGTGCTATTGGTGAAACAATGGCTGTCATCATGGTAGCGGGTAATCAAGCTGTCTTGCCTCAATCGCTGACATCAGGCGTTAGAACTCTAACCACTAATATTGTCATGGAAATGGGCTATTCTTCTGGTTTGCATCGTCAAGCCTTAATTGGTACAGCTGTGGTACTCTTTATCTTTATATTAATGATTAATATCAGTTTTTCAGCATTACAGAAAGAGGAA

SEQ ID NO: 12502 - protein, 281 aa, Streptococcus agalactiae
MKQTKEGLMQAVFFITACVSVISAILICLFLFSSGLPAITKIGWGNFIFGKVWHPSNSIFGIFPMIVGSLYVTAGALLLGGPIGILTAVFMAYFCPENIYKPLKSAINLMAGIPSVVYGFFGLVVIVPMIRQYIGGFGMGVLAASILLGIMILPTIVSISESSLRAVPESYYEGGIALGASHERSVFFAVLPAAKRGILASVVLGIGRAIGETMAVIMVAGNQAVLPQSLTSGVRTLTTNIVMEMGYSSGLHRQALIGTAVVLFIFILMINISFSALQKEE

SEQ ID NO: 12503 - protein, 879 aa, Streptococcus agalactiae
ATGAAAAAACACAAAATGCTATCTCTTTTGGCGGTATCTGGTCTTATGGGAATTGGCATCCTAGCAGGATGCTCAAATGATTCATCATCTTCACCTAAAGGGACAATTAACATTGTTTCTAGAGAGGAAGGGTCTGGAACTCGTGGAGCTTTCATAGAGTTATTTGGGATCGAGTCAAAAAATAAAAAAGGCGAAAAAGTAGACCATACTTCTGATGCAGCAACTGTTACCAATTCAACTTCAGTTATGCTAACCACTGTCTCTAAAGACCCGTCAGCTATTGGTTATTCTTCACTAGGTTCATTAAATAGTAGCGTTAAAGTGCTTAAAATTGATGGCAAAAATGCGACTGTAAAAGATATTAAATCAGGAAGCTATAAGATTTCTCGTCCTTTCAATATTGTAACAAAAGAAGGTAAGGAAAAAGAAGCAACAAAAGATTTTATTGATTATATCTTAAGCAAAGATGGGCAAGCAGTCGTTGAGAAAAATGGCTATATTCCACTTGACAATGCCAAAGCATATCAAGCAAAAGTGTCATCTGGTAAAGTTGTTATAGCAGGTTCAAGTTCAGTAACGCCGGTTATGGAAAAGATTAAAGAGGCCTATCATAAAGTAAATGCAAAAGTAGATGTTGAAATTCAACAAAGTGATTCTTCAACTGGGATTACAAGCGCAATTGATGGATCAGCAGATATAGGTATGGCATCACGTGAATTGGATAAGACAGAGTCATCCAAAGGGGTCAAAGCTACTGTTATTGCAACAGATGGTATAGCAGTAGTTGTTAATAAGAAAAATAAAGTTAATGATCTATCAACAAAACAAGTAAAAGACATTTTTACTGGAAAGACAACGTCTTGGTCTGACTTATCAAAG

SEQ ID NO: 12504 - protein, 293 aa, Streptococcus agalactiae
MKKHKMLSLLAVSGLMGIGILAGCSNDSSSSPKGTINIVSREEGSGTRGAFIELFGIESKNKKGEKVDHTSDAATVTNSTSVMLTTVSKDPSAIGYSSLGSLNSSVKVLKIDGKNATVKDIKSGSYKISRPFNIVTKEGKEKEATKDFIDYILSKDGQAVVEKNGYIPLDNAKAYQAKVSSGKVVIAGSSSVTPVMEKIKEAYHKVNAKVDVEIQQSDSSTGITSAIDGSADIGMASRELDKTESSKGVKATVIATDGIAVVVNKKNKVNDLSTKQVKDIFTGKTTSWSDLSK

SEQ ID NO: 12505 - protein, 585 aa, Streptococcus agalactiae
ATGATTATTGCTATTCAAGGTGGTATGGCTGTAGGGAAAACCACAGCTTTGAAAATCATTGAGAAAGTTTACCCAAAAATCGCTATTAGTTTTGAGGACATTTCTCCAGTAGTTGATAAGATTAATAAACATCAGCTTGATAACAATAAATTAGACGATTATTGTGAAATTCAACAACTATTTATTCAGCATGAACGAGATAGATACGAACTTGTTAGAGATAATGAAATAGTGTTAATGGATTATGGAGCTGAGGAAATTGCTTTTTATACACAATACTTTCCAAAGGTGGCGGGTTATAGTTGGACTTTACCTTCTAATTTGTTACTAGAGGTAAATAGGCTAAAGGAATGTTTTGCTGATTATATTATTTTTCTAGATGCAGATAAGACGGTCCTATACCAACGTCAAAAAAATGATTTTAATAGACGGCGTCATTTTTTCAAATGGTATACTCATCACCTGTTGCCTGCTAAAAAACATTATTTAGACACATTTTCCAATGTTATTCATATTAATACAAATCATTTAAATGCTGAGGAAGTGGCTGAAAAAATCATTGACATCATTCGTAAGTTAACTCTA

SEQ ID NO: 12506 - protein, 195 aa, Streptococcus agalactiae
MIIAIQGGMAVGKTTALKIIEKVYPKIAISFEDISPVVDKINKHQLDNNKLDDYCEIQQLFIQHERDRYELVRDNEIVLMDYGAEEIAFYTQYFPKVAGYSWTLPSNLLLEVNRLKECFADYIIFLDADKTVLYQRQKNDFNRRRHFFKWYTHHLLPAKKHYLDTFSNVIHINTNHLNAEEVAEKIIDIIRKLTL

SEQ ID NO: 12507 - protein, 738 aa, Streptococcus agalactiae
ATGCAACAGTATTTTGTAAATGGCAAAGCAGATGACTTTGTGACCATCGAGGACAAGGATACCATCAAGCACATGTTCAATGTCATGCGATTGACAGAAGATGACCAAGTGGTCTTGGTTTTTGATGATACCATCAAGCGTCTGGCAAAGGTGGTGGACAGCTCTGCCCATCGCTTCCAAATTCTAGAAGAGCTAGACAGCAATGTTGAAATGCCTGTCCAAGTGACCATCGCCTCAGGCTTTCCCAAGGGAGACAAGCTAGACCTTGTGACACAAAAGGCGACAGAATTGGGTGCAGCGGCTATCTGGGCCTTCCCAGCTGACTGGTCAGTCGTCAAGTGGGATGGTAAAAAACTGGCTAAAAAAGAAGATAAGCTGGCAAAAATTGCTATGGGCGCTGCAGAGCAGAGCAAGCGTAATCGTCTTCCTCAGGTTCGTTTATTTGAGAAGAAGGCTGACTTTCAAGCGGAGCTTAATGGCTTTGATAAAATTTTTATCGCCTATGAAGAGTCTGCCAAGGAGGGTGAAATGTCAGCGCTAGCCCAGAACTTGCAGACTGTAAAAGCAGGTGACAAGCTCCTCTTCATCTTTGGACCAGAAGGGGGCATTTCTCCAAAAGAAATCGCAGCTTTTGAAGAGGCTGGAGCGATAAAAGTGGGCCTGGGGCCACGCATCATGCGCACAGAAACAGCACCGCTCTATGCTCTAAGTGTTATTAGTTACTCAGCGGAGTTATTA

SEQ ID NO: 12508 - protein, 246 aa, Streptococcus agalactiae
MQQYFVNGKADDFVTIEDKDTIKHMFNVMRLTEDDQVVLVFDDTIKRLAKVVDSSAHRFQILEELDSNVEMPVQVTIASGFPKGDKLDLVTQKATELGAAAIWAFPADWSVVKWDGKKLAKKEDKLAKIAMGAAEQSKRNRLPQVRLFEKKADFQAELNGFDKIFIAYEESAKEGEMSALAQNLQTVKAGDKLLFIFGPEGGISPKEIAAFEEAGAIKVGLGPRIMRTETAPLYALSVISYSAELL

SEQ ID NO: 12509 - protein, 951 aa, Streptococcus agalactiae
ATGAACACATGGAATGAACTAACGGTTCACGTGAATCGTGAGGCAGAGGAAGCTGTCTCGAATTTATTGATTGAAACTGGCAGTCAGGGGGTTGCCATTAGCGATTCGGCTGACTACCTTGGACAGGAGGATCGTTTCGGTGAGCTTTATCCTGAGGTGGAGCAGTCTGATATGATCGTTATTACTGCCTATTATCCTGATACGCTTGATATTGAGGCGGTTAAGGCTGATTTGGCTGATCGTTTAGCTAATTTTGAAGGCTTTGGTCTTGCGACGGGTAGCGTCAACCTTGACAGTCAGGAATTGGTCGAAGAGGACTGGGCTGATAACTGGAAGAAGTACTATGAGCCAGCTCGCATTACCCATGATTTGACCATCGTGCCGTCATGGACGGACTACGAGGCTAAGGCTGGTGAGAAGATTATCAAGCTGGATCCTGGTATGGCTTTTGGGACTGGGACTCACCCAACGACTAAGATGAGTCTTTTTGCCTTGGAGCAAGTGCTTCGTGGTGGTGAGACGGTTATCGATGTGGGGACTGGTTCTGGCGTTTTGTCTATTGCTAGCTCTCTCTTGGGTGCCAAGGACATCTATGCTTATGATTTGGATGATGTTGCAGTGCGCGTGGCTCAAGAAAATATCGACATGAACCCAGCTACTGAAAATATTCATGTGGCTGCTGGTGACTTGCTCAAAGGTGCCCACCAAGAGGCAGATGTCATTGTTGCCAATATTTTAGCGGATATTTTGATCCATCTGACAGACGATGCCTACCGTTTGGTCAAGGATGAGGGTTATCTCATCATGTCTGGTATCATTTCTGAAAAATGGGATATGGTGCGTGAGAGTGCTGAAAAAGCTGGTTTCTTCCTTGAGACTCACATGGTTCAAGGTGAGTGGAATGCCTGCGTTTTCAAAAGGACAGATGATATTTCAGGAGTGATTGGCGGC

SEQ ID NO: 12510 - protein, 317 aa, Streptococcus agalactiae
MNTWNELTVHVNREAEEAVSNLLIETGSQGVAISDSADYLGQEDRFGELYPEVEQSDMIVITAYYPDTLDIEAVKADLADRLANFEGFGLATGSVNLDSQELVEEDWADNWKKYYEPARITHDLTIVPSWTDYEAKAGEKIIKLDPGMAFGTGTHPTTKMSLFALEQVLRGGETVIDVGTGSGVLSIASSLLGAKDIYAYDLDDVAVRVAQENIDMNPATENIHVAAGDLLKGAHQEADVIVANILADILIHLTDDAYRLVKDEGYLIMSGIISEKWDMVRESAEKAGFFLETHMVQGEWNACVFKRTDDISGVIGG

SEQ ID NO: 12511 - protein, 306 aa, Streptococcus agalactiae
ATGGGGTATTTTACAGTATTTTGGCAGAAAGATGGAAATGGTAAAAATATTCCTTTTTATGAACAAGATGAAGTGGGAGATTTGATTATTGTCATTAAAGATGGTAGGAGGAAAGGTTTGTTCATCATTCCCAAAGAAGTTGCAGTGAGTAAGGGTATTCTTTCATCTGCTAACTCTCAAGGAAAGATGGCTATGCGATTTTACCCTCCTTGGTGTAGCGATTTAAATAGAACAGCTTTGGTGACACAGCGATGGCAGTTGAACTATTTTATTGATTTAAGTAGAAATAATGAAGGAGTTACTACA

SEQ ID NO: 12512 - protein, 102 aa, Streptococcus agalactiae
MGYFTVFWQKDGNGKNIPFYEQDEVGDLIIVIKDGRRKGLFIIPKEVAVSKGILSSANSQGKMAMRFYPPWCSDLNRTALVTQRWQLNYFIDLSRNNEGVTT

SEQ ID NO: 12513 - protein, 714 aa, Streptococcus agalactiae
ATGAAAACAGTTAAAGAAGTCAGTATCTTAAGCGGTGTAAGTGTGCGCACCTTGCATCACTATGATAAAATCGGTTTATTCCCACCTACCGCCCTATCCGAAGCAGGCTATCGACTTTATGACGATGAAGCATTGATTCGCCTGCAAGAAATTTTGCTATTTCGTGAGTTGGAATTCCCTCTCAAAGATATCAAATACCTGCTTGAGCAAGCAAAAGAGGAAAGGCAAGACTTATTAGCCCAACAAATCAAATTGCTTGAATGGAAAAGATTGCATCTTGAGCAGGTTATCACCCATGCGAAACGATTACAAGAAAAAGGAGATGATTATATGAATTTCGATGTTTATAATAAAACAGAATTAGAACAATTACAAGCTGAAGCAAAAGAAAAATGGGGACAAACAGCAGCCTACCAAGAATTTGCTCAAAAACATGCTTCAGATGACTTTGCACAAATTAGCCAAGAAATGGCAAAAATAATGGTACAATTTGGGCAATTAAAGACACAAAATGTATCTGATGAATCTGTTCAAATGTGTGTGAAACGGCTACAAGACTATATCTCTCAGCATTTTTACACCTGTACCAATGAAATCCTTGCTGGACTAGGACAAATGTATCAATCAGATGACCGGTTTAGTCAATCAATTGACAAAGCTGGTGGAGCAGGAACAAGTGAATTTGTCAGCCAAGCTATTGCTTACTATTGCCAA

SEQ ID NO: 12514 - protein, 238 aa, Streptococcus agalactiae
MKTVKEVSILSGVSVRTLHHYDKIGLFPPTALSEAGYRLYDDEALIRLQEILLFRELEFPLKDIKYLLEQAKEERQDLLAQQIKLLEWKRLHLEQVITHAKRLQEKGDDYMNFDVYNKTELEQLQAEAKEKWGQTAAYQEFAQKHASDDFAQISQEMAKIMVQFGQLKTQNVSDESVQMCVKRLQDYISQHFYTCTNEILAGLGQMYQSDDRFSQSIDKAGGAGTSEFVSQAIAYYCQ

SEQ ID NO: 12515 - protein, 468 aa, Streptococcus agalactiae
ATGATTACTTTACAAAAGGCGGAAGCTAGTGATTTAGAGAAGATTATTGCCATTCAGAGAGCTAGCTTTAAGGTAGTCTATGAGAAATACCACGATCAATACGATCCCTATGTGGAAGAAGTTGAGCAGATTCGATGGAAACTAGTGGAGCGACCAGATTGTTTCTATCATTTTGTCCTTGTTGATGAGACAATTGTTGGTTTTCTTAGATTGGTTATCAAGGACGAGGAGAAGCGTGCTTGGCTTGGTACGGCGGCTATTCTTCCCCAATATCAAGGGCAGGGCTACGGCTCAGCAGGGATGGCTTTATTAGAGAAAACCTATCCTAAGCTTACAAAGTGGGATTTATGTACGATTGCACAAGAAAAACTAATGGTCAGTTTTTATGAAAAATGTGGTTATCATTCAACCCATACCGAACCTGAGCAAGAAGGAATGGATATGGTCTATATGACAAAGAAGATAGAA

SEQ ID NO: 12516 - protein, 156 aa, Streptococcus agalactiae
MITLQKAEASDLEKIIAIQRASFKVVYEKYHDQYDPYVEEVEQIRWKLVERPDCFYHFVLVDETIVGFLRLVIKDEEKRAWLGTAAILPQYQGQGYGSAGMALLEKTYPKLTKWDLCTIAQEKLMVSFYEKCGYHSTHTEPEQEGMDMVYMTKKIE

SEQ ID NO: 12517 - protein, 456 aa, Streptococcus agalactiae
ATGGATAGTTTTGATGAGTTATTTGATTTCTCAGGTGCAAAGATCGCTCTTTTCTGTGAAGGAAAGATTTTGACCAGCCTAAGAGATGATTTTCCAGATTTGCCTTATGCAGGCTTTTGGGACTTACCAGGAGGTGGTCGTGAGGACAATGAAACACCTTTGGAATGTCTTTTTCGAGAAGTTGATGAAGAATTAAATCTGACCTTAACTCGAAACCATATTAATTGGGTCAAGACTTATAGGGGTATGTTGAAGCCTGATAAATTATCAGTTTTTATGGTTGGACATATCAGTCAGAAAGAGTACGATAGCATTGTTCTAGGTGATGAAGGACAAGGCTACAAGCTCATGTCCATTGACGAATTTCTAAGCCATAAAAAGGTCATTCCTCAGTTGCAGGAGAGGTTGAGAGATTATTTGGAGGTGGAAGATGATTACTTTACAAAAGGCGGAAGC

SEQ ID NO: 12518 - protein, 152 aa, Streptococcus agalactiae
MDSFDELFDFSGAKIALFCEGKILTSLRDDFPDLPYAGFWDLPGGGREDNETPLECLFREVDEELNLTLTRNHINWVKTYRGMLKPDKLSVFMVGHISQKEYDSIVLGDEGQGYKLMSIDEFLSHKKVIPQLQERLRDYLEVEDDYFTKGGS

SEQ ID NO: 12519 - protein, 306 aa, Streptococcus agalactiae
ATGAAATCAGGTCAGAAAATAATTGAACTCAGGTTATATGACGAACGAAGGCAGACTATTACAATTGGTGATTACATTGTCTTTTATCTGTTAAATGATAAAAGAAAGAAATTGACCACAGAAGTTGTTTGTTTACATATATTTGATGATTTTTCTCAACTTTATGAAAGTTTAGATTTGCTAAAATGTGGATATACATTGGATGATATAGAAACAGCCAGACCAGAGGAGATGGAACGTTATTATCCCCCTGAACAAATTAGAAAATATGGAGCTTTAGGAATAGAATTGAGGTTATTGCATGGA

SEQ ID NO: 12520 - protein, 102 aa, Streptococcus agalactiae
MKSGQKIIELRLYDERRQTITIGDYIVFYLLNDKRKKLTTEVVCLHIFDDFSQLYESLDLLKCGYTLDDIETARPEEMERYYPPEQIRKYGALGIELRLLHG

SEQ ID NO: 12521 - protein, 468 aa, Streptococcus agalactiae
ATGGCTAAATTTGGATTTTTGTCTGTTCTGGAAGAAGAATTGGACAAGCACTTAAACTATGACTTTGCCATGGATTGGGACAAGAAAAATCACGCTCTTGAGGTGACCTTTGTCCTAGAAGCGCAAAACAGCTCTGCTATTGAAACCGTGGACGACCAGGGGGAGACGAGTAGCGAGGACATCGTTTTTGAGGACTATGTACTCTTTTACAACCCTGTCAAGTCTCGCTTTGATGCTGAGGACTATCTGGTGACTATCCCCTATGAGCCTAAGAAGGGCTTGTCGCGTGAGTTTCTGGCTTATTTTGCGGAGACTCTCAACGAGGTTGCCACTGAAGGGTTGAGCGACCTCATGGACTTCCTCACCGATGACAGTATCGAAGAGTTCGGTCTTTCTTGGGATACGGATGCTTTTGAAAATGGCAGAGCAGAACTGAAAGAGACAGAGTTTTATGCATATCCGAGGTAT

SEQ ID NO: 12522 - protein, 156 aa, Streptococcus agalactiae
MAKFGFLSVLEEELDKHLNYDFAMDWDKKNHALEVTFVLEAQNSSAIETVDDQGETSSEDIVFEDYVLFYNPVKSRFDAEDYLVTIPYEPKKGLSREFLAYFAETLNEVATEGLSDLMDFLTDDSIEEFGLSWDTDAFENGRAELKETEFYAYPRY

SEQ ID NO: 12523 - protein, 336 aa, Streptococcus agalactiae
ATGTATTATCCGATGATTCTGGAGCTACTTGTTTTTATCTTGTTTGGTTACCTCGTCTATGCTAGCAATAAGACACAGTTGACGAAGTATGATGAGGATGAATTGTCCGATAAGGAGCGAAAAAGTATACGTCATATTGGTTGGAAGTCAGGTATCTATTTTGGTGTTTTCATGTATTTGACTTCTTACACTTGGATAGATAGTCCGCTTAGCTATTTTGATTATCTATTATCAGGTAAAGCCTTGTTCACCTTAGTCTTTACAGGTAGCTTCTTTGGTATATCGACGGCTGTCGTCAATTATTTTAATCGACGAAAAGGTAAGGAAGAGCGTGAA

SEQ ID NO: 12524 - protein, 112 aa, Streptococcus agalactiae
MYYPMILELLVFILFGYLVYASNKTQLTKYDEDELSDKERKSIRHIGWKSGIYFGVFMYLTSYTWIDSPLSYFDYLLSGKALFTLVFTGSFFGISTAVVNYFNRRKGKEERE

SEQ ID NO: 12525 - protein, 201 aa, Streptococcus agalactiae
ATGAACAAAGAAAATTTTACAGACCGCTTGATTAAACGTTTTTACGGTATTTCTGGCCCTTTGGATGAGTACAAGAGACGTGAAGCCGACCGCATGGGGAATATAGCTCTTATCTTTCTGGTATGGTTCTTGATGCTTGGAAATGTTGTAGCGCTCCTATTGGCAGAGGATTTTCCCCAAGAGTTGCCATGTATTATCCGA

SEQ ID NO: 12526 - protein, 67 aa, Streptococcus agalactiae
MNKENFTDRLIKRFYGISGPLDEYKRREADRMGNIALIFLVWFLMLGNVVALLLAEDFPQELPCIIR

SEQ ID NO: 12527 - protein, 186 aa, Streptococcus agalactiae
ATGAATAGAGTTAAGGATTATCGTTTGGAAACTAAGAAGTCTCAGCTTGCTTTGGCGAAGGAAATCGGAGTTTCTAGACAGACGATAAATATGATTGAGAACAACAAGTATAATCCCTCGCTTGATTTATGTATCAAGCTGGCTAAGGCTTTAGGGACTGATTTGAATGCACTGTTTTGGGAGGAT

SEQ ID NO: 12528 - protein, 62 aa, Streptococcus agalactiae
MNRVKDYRLETKKSQLALAKEIGVSRQTINMIENNKYNPSLDLCIKLAKALGTDLNALFWED

SEQ ID NO: 12529 - protein, 489 aa, Streptococcus agalactiae
ATGATTATCAGACCTATGCAGGACTGCGACCGTGGGGCAGTTCTGACCTTACAAAATACAGGCTGGACTGCTCTTACCTCTCCTGTCTATGACCGCAAGTGGACTGAAAGTGACTTGGAGAAGAATCTGGCAAATGGCATGTCCTTCTTTGTCGCTGAGGTCGATGATAAGATCGCTGGCATCTTGGACTTTGGTCCCTACTATCCTTTCCCAGCTGGCAAGCATGTTGCCACTTTCGGCATTCTCATCGCTGAACCCTACCAAGGTCAGGGGCTAGGTAAGGCTCTCTTGAAAGCTCTGCTAACTGAGGCTAAAGCTCAAGGTTACATCAAGATTGCCATGCACGTCATGGGCAACAATAGTAGAGCCATTTCCCTCTATCAAAAATACGGTTTTACCGAAGAGGCTCGAATCACTAAAGCCTTTTTCATTGAAAATCATTATGTTGATGCTTTAATTTTCGCAAAAGATTTGGAGAATAATCATGGC

SEQ ID NO: 12530 - protein, 163 aa, Streptococcus agalactiae
MIIRPMQDCDRGAVLTLQNTGWTALTSPVYDRKWTESDLEKNLANGMSFFVAEVDDKIAGILDFGPYYPFPAGKHVATFGILIAEPYQGQGLGKALLKALLTEAKAQGYIKIAMHVMGNNSRAISLYQKYGFTEEARITKAFFIENHYVDALIFAKDLENNHG

SEQ ID NO: 12531 - protein, 1266 aa, Streptococcus agalactiae
ATGGCTGACAATCTTGCTCTACGTATGCGTCCTCGCAATATTAATGAAGTTATCGGGCAGCAACATCTCGTTGGTAATGGCAAAATTATTGATCGAATGGTTGCAGCTAATATGTTATCTTCCATGATCCTATATGGCCCACCAGGTATTGGGAAGACTTCTATTGCTTCTGCTATTGCTGGTACTACTAAATATGCCTTTCGTACTTTTAATGCCACTGTTGATAGTAAAAAACGTCTTCAAGAAATTGCAGAAGAAGCTAAATTTTCTGGTGGCTTAGTTTTATTACTTGACGAGATTCATAGACTTGACAAGACAAAACAAGATTTTCTTTTACCTTTACTTGAGAATGGCAATATTATTATGATTGGAGCAACAACTGAAAATCCTTTCTTTTCAGTAACTCCTGCCATTAGAAGTAGGGTACAAATTTTTGAGTTAGAACCTCTTTCTAACGAGGATATTAAAAAAGCCATTCAGCTAGCAATTTCCGATAAAGAACGGGGATTTCCTTTTTTAGTGACAATTGATGATGAGGCGCTAGATTTCATTGTTACCGCCACAAATGGAGACCTACGATCTGCTTATAATTCCTTGGATCTAGCAGTCATGTCTACTTCTCCTAATGAAGATGGTAGCCGTCATATTAGTCTAGAGACAATGGAAAATAGTCTGCAGCGTAGTTATATTACAATGGATAAAAACGGAGATGGGCATTATGATGTCCTATCAGCCTTACAAAAATCAATTAGAGGTTCTGATGTCAATGCCAGCCTGCACTATGCCGCTCGTTTAGTAGAAGCTGGAGATTTACCTAGTTTAGCAAGACGTTTGACCATTATTGCTTATGAAGATATCGGCTTAGCTAACCCCGAAGCACAAATACATACTGTGACTGCATTGGAAGCTGCCCAACGCATTGGTTTTCCAGAAGCTCGTATTCTTATTGCTAACATTGTTGTGGATTTAGCTCTATCACCTAAATCAAATTCAGCCTATTTGGCTATGAATGCAGCCTTAGCTGATTTACGTCGTTCAGGAAATTTACCTATTCCACGTCACCTAAGAGATGGACATTACAGCGGTAGTAAAACCTTGGGCAATGCAAGGGATTACAAGTACCCTCACGCCTATCCTGAAAAATGGGTTAAACAACAATACTTACCAGATAAACTAGTAGGACATAATTATTTTGAAGCCAATGAAACTGGTAAATACGAACGCGCACTTGGTTCAAATAAAGAGCGCATTGATAAGCTCTCAGAC

SEQ ID NO: 12532 - protein, 422 aa, Streptococcus agalactiae
MADNLALRMRPRNINEVIGQQHLVGNGKIIDRMVAANMLSSMILYGPPGIGKTSIASAIAGTTKYAFRTFNATVDSKKRLQEIAEEAKFSGGLVLLLDEIHRLDKTKQDFLLPLLENGNIIMIGATTENPFFSVTPAIRSRVQIFELEPLSNEDIKKAIQLAISDKERGFPFLVTIDDEALDFIVTATNGDLRSAYNSLDLAVMSTSPNEDGSRHISLETMENSLQRSYITMDKNGDGHYDVLSALQKSIRGSDVNASLHYAARLVEAGDLPSLARRLTIIAYEDIGLANPEAQIHTVTALEAAQRIGFPEARILIANIVVDLALSPKSNSAYLAMNAALADLRRSGNLPIPRHLRDGHYSGSKTLGNARDYKYPHAYPEKWVKQQYLPDKLVGHNYFEANETGKYERALGSNKERIDKLSD

SEQ ID NO: 12533 - protein, 303 aa, Streptococcus agalactiae
ATGGGAATCCTTGGTGATTATGTTTTATCAGAAGCCTCTGATTATATCAGTGGCAAAAAAGATATCAAGGCTTTAAAAAAGAAACTTGATAAAATGTTAGTGACAGGTGTTTACGCTCCAAGAATCAAGTCTAAACGTAGTAGTATTGTCTCTACTTATGATGAAGAGATAACGACGACTGCAACAAACGCAAAAGCAAGCATAACAGCAATAGCAGGTCAAATAGATACTGCAATTAAGGGACAGTTTAGAACTAAAGTTGAAACTGTATTGGATAATAACAGTACAAAGTATGATGAAATT

SEQ ID NO: 12534 - protein, 101 aa, Streptococcus agalactiae
MGILGDYVLSEASDYISGKKDIKALKKKLDKMLVTGVYAPRIKSKRSSIVSTYDEEITTTATNAKASITAIAGQIDTAIKGQFRTKVETVLDNNSTKYDEI

SEQ ID NO: 12535 - protein, 399 aa, Streptococcus agalactiae
ATGGGAAAACTAGATTCGAATGAGGATAAACTTAGTAACAGTAAAAGGGATTTAGAAAAGTTGGAAGATGATTACCATCATAAAACCATGGCTATCTCTAATAAATTCTTTGAACTGGAAGATAAACGAACTGAGTTTGAAACGATGCTTCAGGAAACTTATGAAGCAACAAGTTATAATCTTCGTCAAGATGAGAACATTAATGAAGAGTCCTTTATGACTATGAATCACATTATAGATGCTTTTCAAAGTGATTTTGATACAGAATATACTAAAGAGAAAAGAAGATTGACTGCCTTAGAAGAAGAAACTAATCAAAAGTACTCTAAAAAGAGACAATTGCTTGAAGAAAAAATAGATCATTTAATGTCAGAAAGGAGAGACTATGGGAATCCTTGG

SEQ ID NO: 12536 - protein, 133 aa, Streptococcus agalactiae
MGKLDSNEDKLSNSKRDLEKLEDDYHHKTMAISNKFFELEDKRTEFETMLQETYEATSYNLRQDENINEESFMTMNHIIDAFQSDFDTEYTKEKRRLTALEEETNQKYSKKRQLLEEKIDHLMSERRDYGNPW

SEQ ID NO: 12537 - protein, 990 aa, Streptococcus agalactiae
GTGATTGCTTATGCAGGTACTAATTTAGGTGATCGTTTAGACATAGCTACAGATGTTGAAATGGTTGCTGGAGGGGATACATATTTACTTGCTGACCCTAAAACCAAGACTTTTAGGAAATCTCAGGGAAAATCAGCACTAGAGTATGCCGAAAAAATATCGAGTAAATATCCTAATTCAGAAATTACTACAACCGGTCACTCCTTAGGGGAATCAGAGGCACTATATGTCGCTTTAAAAATGGGTTGGATGAATGTTGGTTATAATGGTCCAGATATTCATAACATGATATCAGATGACGAAATATATTATATGAAATCTCATCCAGAACAATTTAGAAATTATCGAAATACACTAGATGTTATCGGAAATATTACAGGGAACGAAACAAAAACAGCTATTTATTATGATAAAGTTGAAGGTATTTATGGACCTTTAAAAGCTCATGGATTAGCAAATTGGAGTTTTAATAAGGAAGGTCAAGTTGTTGATGAAAATGGCAAAGAAATTACGAATGGTATGATACTTTCAGTTGCACAAACAACTGTAAAAACTTTTCAAATTAATAAGCAGAAGCAACAGATGATGAAGGGAGGTCTAAATTCTAATGAAAAAATCTTCTTGGATGCTGAACAAGCTGCTGTTATTGCAAGTGGTTTAGTCTCTACTGCTGAAACTGCTTTAGAGGATATCAAAACCTCAGCACAATCTGCTGTTGAAGAAGCTGAAGAATTGTGGAATACCACTAAAAGCATGCCCTTTGGTATTACAGAGCTTACGGAAGCAGAGTTGGCAGAAGCCTATGCAGAAGGTGGTGTTACCTATGAGAGCATAGTAACTAAAACAGATACCCATTTTGATAAAAAAGTCGCTAAAGCAGAAGAATTGGTAACTACTTACACGACTTTGAAAAGTGATATTCAATCTGGTGTTGAAACTATGTTGTCTAAGGATAGTGAATTGGCTGGAGATTTTAAAGCATGGGAAAAC

SEQ ID NO: 12538 - protein, 330 aa, Streptococcus agalactiae
MIAYAGTNLGDRLDIATDVEMVAGGDTYLLADPKTKTFRKSQGKSALEYAEKISSKYPNSEITTTGHSLGESEALYVALKMGWMNVGYNGPDIHNMISDDEIYYMKSHPEQFRNYRNTLDVIGNITGNETKTAIYYDKVEGIYGPLKAHGLANWSFNKEGQVVDENGKEITNGMILSVAQTTVKTFQINKQKQQMMKGGLNSNEKIFLDAEQAAVIASGLVSTAETALEDIKTSAQSAVEEAEELWNTTKSMPFGITELTEAELAEAYAEGGVTYESIVTKTDTHFDKKVAKAEELVTTYTTLKSDIQSGVETMLSKDSELAGDFKAWEN

SEQ ID NO: 12539 - protein, 213 aa, Streptococcus agalactiae
ATGATTTCAGAAGAAAGTTACAGATATTTAGTTGAGGATGCTTATCGAGTTGATTCAAAAAAAGTAAAAATACCTCTGAAAAGAGGTGATATTGTAGGAAACAGTGACTATGTTATTATAGAACCACCTATAGATAATACTTCAAATGGTATGCAAGCTATGGTAGTTGCTCCGATAAAAGAAGGAACGACAGCTGAACAGATACTAGTGAAA

SEQ ID NO: 12540 - protein, 71 aa, Streptococcus agalactiae
MISEESYRYLVEDAYRVDSKKVKIPLKRGDIVGNSDYVIIEPPIDNTSNGMQAMVVAPIKEGTTAEQILVK

SEQ ID NO: 12541 - protein, 329 aa, Streptococcus agalactiae
ATGAAAAACTTATTTGCAACACAGAAGCATCATCAAGGAAACAGGAACAAGATAGAATTGTCAATTACATAAAACAACATGTTGAGTTAACAAATGGTGATCAAATAAAAAAAGTTGAGTTTATCGATTTTCAAAAAAATGAGATGACAGGTACATGGGGAATTTCTACTAAAATTAATGAACAATTTTCGATTAGTTTTTCTGAAGATAGAATTGGTGGTAAACTTAGAGCATTAGGATATCAACCGAATGAAATAGGTTTTTCAAAGGACATCAATAGTAATAATCAAAATATTAATGATATTGAAGTGATTTATATGAAGAAAGAA

SEQ ID NO: 12542 - protein, 110 aa, Streptococcus agalactiae
  VARIANT 8: Xaa = Any Amino Acid
MKNLFATXEASSRKQEQDRIVNYIKQHVELTNGDQIKKVEFIDFQKNEMTGTWGISTKINEQFSISFSEDRIGGKLRALGYQPNEIGFSKDINSNNQNINDIEVIYMKKE

SEQ ID NO: 12543 - protein, 126 aa, Streptococcus agalactiae
GTGATTGCTTATGCAGGTACTATTTCAGGTGGTCGTTTAGACATAGCTACAGATGTTGAAATGGTTGCTGGAGGGGATACATATTTACTTCAGGTGAGAAATGGAAATTACCTGAAGAAACCACAG

SEQ ID NO: 12544 - protein, 42 aa, Streptococcus agalactiae
MIAYAGTISGGRLDIATDVEMVAGGDTYLLQVRNGNYLKKPQ

SEQ ID NO: 12545 - protein, 102 aa, Streptococcus agalactiae
ATGGAATCTCCTATTATTGAGGAATCTGAATTACCTCTTTTTATTATAATAAAAAGAGGTAATTTAATTAATTTAAAAGAAGTTATCAATATCAATTGTATG

SEQ ID NO: 12546 - protein, 34 aa, Streptococcus agalactiae
MESPIIEESELPLFIIIKRGNLINLKEVININCM

SEQ ID NO: 12547 - protein, 207 aa, Streptococcus agalactiae
GTGTTAACTGCTTTAACGCAAGAGCAAGCAGTTATTGATGAGAATTGGGATGGTACAGCATTTGACAGTTTTGAAGCTCAGTTCAATGAATTGTCGCCGAAAATCACACAATTTGCACAATTGTTAGAAGATATCAATCAACAACTATTAAAAGTAGCAGATGTTGTAGAACAAATAGACTCTGATATTGCTTCGCAGATTAATCAG

SEQ ID NO: 12548 - protein, 69 aa, Streptococcus agalactiae
MLTALTQEQAVIDENWDGTAFDSFEAQFNELSPKITQFAQLLEDINQQLLKVADVVEQIDSDIASQINQ

SEQ ID NO: 12549 - protein, 381 aa, Streptococcus agalactiae
ATGAAGAAAAAGTATTGGATTTTACTAATATTACTATTAACAGTTTTGGGAGGAAGTGGCTATATGGTTTTTAAACAACATACAGAAAAAGAAAAAATGATTGCAATAGCTCATAGTGATGAGGCAAAAAAAGTTTATGAATCATTTATGAAAAAAAGAGATAATAGTGCGTTCACAGATGAAGGAATAATAAAAAAATACACAATTGATGATAATAGCGTATACAGTAATCCAATGGGAGGCATTATTGTAAAAGTTATAGTTAATGATTCATCAAAGAATTATATAAGTTATAATTTAATAAAAGATGACGAAGGAAGGATGCATTATGCAAATCTTGTCGTATCAGCTGACCTATCAAACAAACTTGGAGAACCAAAA

SEQ ID NO: 12550 - protein, 127 aa, Streptococcus agalactiae
MKKKYWILLILLLTVLGGSGYMVFKQHTEKEKMIAIAHSDEAKKVYESFMKKRDNSAFTDEGIIKKYTIDDNSVYSNPMGGIIVKVIVNDSSKNYISYNLIKDDEGRMHYANLVVSADLSNKLGEPK

SEQ ID NO: 12551 - protein, 102 aa, Streptococcus agalactiae
ATGATGAAAAAGTATGTTAAGGATGATAGTCTTCAAATAGCTATGACTGAATATAATGAATTGAATTCAGTTAACGATGAAGTTTGGACAGAGGATATTTTA

SEQ ID NO: 12552 - protein, 34 aa, Streptococcus agalactiae
MMKKYVKDDSLQIAMTEYNELNSVNDEVWTEDIL

SEQ ID NO: 12553 - protein, 726 aa, Streptococcus agalactiae
ATGAACAAGTCAAAAGTTGTGTTGGCTGTTTGTGTAGTTGGAATAAGTTTTTTAGCAGCAATGAATTCTGATATTGACTCGGTAAGTGCTAATGCAGTTATGAATTCTAATTATATTCCACAAACTTCAAATATAATTATTTCATCTGAAAAAATTTCTCCATACGTTATAGAGTTTGTTACTCAACAGGAATCCAATAATATTACTTCATATGCACGTTCCTTACAATCTCAGGAGGAAGAAAATTTCAATACTGTCAGGTTTGACTTTACACAAGCAGAATTTTATGATGAAAATGGGAATCTGGTTGATAAAGATACTGTTATGGAAACAGTAAGACCAGAAAAATTGTTGGCTAGGTCTGTAGGCACAAGTGGTGGAACTTGGTTTTCAGGATCAGGTTATAATGTATGTAAAGGAATGCGTGTTTCAGGTAATGCAGGATTGGTCGGTTTACAATCAAGCTACTATGTAGATTTTCAAAAGGTTCAAGGAGGGTATAATAGACTCGATAGGGTATATGGTGCCACAGTTGATAGAGCAGGAACTTGGACCTTTTTAGCTAATGGTGTATTTAGGGGTAGTGAAGCACCCGGAGCCTCAGCTTATGGTGGTATAAAAGGTCAGTGGTCTGTCTCACCAGGGTTTGGACTTCCTACTGGTACATCTACAAAATATCTATACTTCAGAGTTGGTAACGACACTTTTTGGTTAGATACTAATTTT

SEQ ID NO: 12554 - protein, 242 aa, Streptococcus agalactiae
MNKSKVVLAVCVVGISFLAAMNSDIDSVSANAVMNSNYIPQTSNIIISSEKISPYVIEFVTQQESNNITSYARSLQSQEEENFNTVRFDFTQAEFYDENGNLVDKDTVMETVRPEKLLARSVGTSGGTWFSGSGYNVCKGMRVSGNAGLVGLQSSYYVDFQKVQGGYNRLDRVYGATVDRAGTWTFLANGVFRGSEAPGASAYGGIKGQWSVSPGFGLPTGTSTKYLYFRVGNDTFWLDTNF

SEQ ID NO: 12555 - protein, 117 aa, Streptococcus agalactiae
ATGGCAGAATTTATGTTATATTTAGGAATATTATTGAATTTATTGTATTTAGGACTTGCTATTACAGCAGTAATTTACCTTATAAAAATATATAAATTACTTTCAGAAAAAAATCAT

SEQ ID NO: 12556 - protein, 39 aa, Streptococcus agalactiae
MAEFMLYLGILLNLLYLGLAITAVIYLIKIYKLLSEKNH

SEQ ID NO: 12557 - protein, 240 aa, Streptococcus agalactiae
TTGCATCGTATTTCTATTAGTTATACAAAGAAAGGTAAGATGATTTGTATGTCAACAGTTGCAGTAAGAGTTGATGATCAGTTAAAAGATGATGCAACAAAGCTTTTTCAATCTTTAGGATTAGATATGAGTACTGCTGTGAAAATGTTTCTCATTCAATCTGTTAAAACTCAAAGTATACCTTTTGAGATTAAAAATAATCCTTCAATTCTAGTTGAAGAATTACAAAATAAGGAGTTT

SEQ ID NO: 12558 - protein, 80 aa, Streptococcus agalactiae
MHRISISYTKKGKMICMSTVAVRVDDQLKDDATKLFQSLGLDMSTAVKMFLIQSVKTQSIPFEIKNNPSILVEELQNKEF

SEQ ID NO: 12559 - protein, 381 aa, Streptococcus agalactiae; identical to SEQ ID NO: 6713

SEQ ID NO: 12560 - protein, 127 aa, Streptococcus agalactiae; identical to SEQ ID NO: 880

SEQ ID NO: 12561 - protein, 387 aa, Streptococcus agalactiae; identical to SEQ ID NO: 6711

SEQ ID NO: 12562 - protein, 129 aa, Streptococcus agalactiae; identical to SEQ ID NO: 882

SEQ ID NO: 12563 - protein, 599 aa, Streptococcus agalactiae
ATGAGAGATGAGCAAGAAATATATAATTTGGTTTTAAACATAGCAAACCAAGATAAGAGAATCGAAGCTGTACTATTGAATGGATCTCGGGCTAACCCAAATGTACCGAAAGATGATTTTCAAGATTATGATATTGTTTTTGTTACTAATTTTATAGAAGATATTATTTCTGACACTAATTATCATAAAAAATTCGGTGATATTCTTATAATGCAGAAACCAAATGAGTTTAGAAATAAGACGGAATACAATTGCTTTGCTTACTTAATGCAGTTTCAAGATCTGACGAGGATTGATTTAAGGCTTATTAAACCAGAATTCTTGGAGGATTATTTAGATGATGCTTTTTCAAAGTACTTTTAGATAAAAAGATAAATATCTTGATTATAATTTTGAAAGAAGTCTCTGTATGAAACAAAGCAATTGTCAGAAGATGAAATCAACAAAATTCTTAATGAAATATATTGGGTTAGTACTTATGTAGTCAAGGGGATAGCAAGAAATGATATTATTTATTCAGAGTTTATGATATCTAATCCTATTAAAAATGCTTTTATTAAACTTCTAAAACAAAAAATATTAATAGACTTCCTGCAAAC

SEQ ID NO: 12564 - protein, 201 aa, Streptococcus agalactiae
  VARIANT 200: Xaa = Any Amino Acid
MRDEQEIYNLVLNIANQDKRIEAVLLNGSRANPNVPKDDFQDYDIVFVTNFIEDIISDTNYHKKFGDILIMQKPNEFRNKTEYNCFAYLMQFQDLTRIDLRLIKPEFLEDYLDDAFSKVLLDKKNKYLDYNFERSSLYETKQLSEDEINKILNEIYWVSTYVVKGIARNDIIYSEFMISNPIKNAFIKLLKQKILIDFLXN

SEQ ID NO: 12565 - protein, 606 aa, Streptococcus agalactiae
ATGATAAAGTTTAAATTATTTTTTAAATCCACAGAAAAAGAGGAAGAATGGATCGATAAGGTTCAAAAAAGTGGCTATACTTTTACAGGCATTAACTCATTTCTTCCAGCCTTCTATTATTTTAAGAGAGATAAAGAAAAAGACAAGATGTCAATAAAAATGGATTTTAAAAAATACATATCGAAAGATGACTATGCTAACTATATCACTTTATTTGAGGACAGTGGATGGAAGCATATTAGCGGTAGTCGTTGGGGAGGGCTGCATTATTTTCAAAAAATAAAGCCTGAAACCAGTTCAGAGATTTTTTCTGATCAAGAATCAAAATCAGCGATGGCTATGAGTTATTATAAATATACTTGTGAGCATGCGTTTTTCTCTTTATTTTATTTCTTTCTCTTGATAAGAACAACTTCTATCACCATATTTGATCCAAAAAGTTGGTATCTGACGCAAGGTCTATGGGAAATGCAAGGGAAAATATTTTGGTTAGCATTCTTATTTGAAACACCATTTGCCTTATTAAGAATATTACCTATGTTTTACTTTTTAATTTCTGGAATATACTATATTACACGAGCTGTAAAACCCAAGGAAATTATAAAT

SEQ ID NO: 12566 - protein, 202 aa, Streptococcus agalactiae
MIKFKLFFKSTEKEEEWIDKVQKSGYTFTGINSFLPAFYYFKRDKEKDKMSIKMDFKKYISKDDYANYITLFEDSGWKHISGSRWGGLHYFQKIKPETSSEIFSDQESKSAMAMSYYKYTCEHAFFSLFYFFLLIRTTSITIFDPKSWYLTQGLWEMQGKIFWLAFLFETPFALLRILPMFYFLISGIYYITRAVKPKEIIN

SEQ ID NO: 12567 - protein, 332 aa, Streptococcus agalactiae
ATGAAAAGGAATAAACATTTACCGTTAACAGAAACTACCTATTATATCTTATTACTTTGTTTGAGGAAGCGCATGGCTATGCTATTATGCAAAAAGTTGAAGAAATGAGTGGCGGTGATGTTAGAATAGCCGCAGGGACAATGTACGGTGCCATTGAAAATTTACTTAAACAAAAATGGATAAAGTCTATCCCAAGTGACGATAGAAGAAGAAAAGTTTATATTATTACTGAGACAGGAAAAGAAATAGTAGAACTTGAAACGAATCGATTAAGAAAGTTACTTAATACTGCTAATCAGTTGGGTTTTGGGGGAGATAGTTATGATAAAGTT

SEQ ID NO: 12568 - protein, 111 aa, Streptococcus agalactiae
  VARIANT 19: Xaa = Any Amino Acid
MKRNKHLPLTETTYYILLXLFEEAHGYAIMQKVEEMSGGDVRIAAGTMYGAIENLLKQKWIKSIPSDDRRRKVYIITETGKEIVELETNRLRKLLNTANQLGFGGDSYDKV

SEQ ID NO: 12569 - protein, 548 aa, Streptococcus agalactiae
ATGATGTCTTATGCATACCTCATTGCAGAAATATACTTTAAAGTCAAAATAAGGAAATATATTATGAAATTAAAGAATACGAGAATAATCCGTACCATTTAGCACAGCTAGTAGATTTAATTAATTATTGTCAGAATATAGAAGCTAAACTTGATATAAAGATGGCTGAACAAGACGATATTTTTCAAATAGAAAATTATTATCAAAACAGAAAAGGTCAATTTTGGCTTGCCTTAGAAAATGAAAAAGTAGTTGGTTCGATTGCGTTACTGCGTATTGATGATAAAACAGCTGTTCTAAAAAAATTTTTTACATATTCAAAATATAGAGGAAATCCTGTTCGACTTGGTCGAAAATTATTTGAAAGATTTATGCTTTTTGCTCGAGCTAGTAAATTCACAAGAATTGTCTTGGATACTCCAGAAAAAGAGAAAAGATCTCACTTCTTTTATGAAAATCAAGGATTTAAGCAAATAACAAGAGATAAACTAGATGTAGACTACATTTTTCCAGATAGAGATTCAAGGATATATGTAAAACTTCTTGAT

SEQ ID NO: 12570 - protein, 183 aa, Streptococcus agalactiae
MMSYAYLIAEIYFKVKIRKYIMEIKEYENNPYHLAQLVDLINYCQNIEAKLDIKMAEQDDIFQIENYYQNRKGQFWLALENEKVVGSIALLRIDDKTAVLKKFFTYSKYRGNPVRLGRKLFERFMLFARASKFTRIVLDTPEKEKRSHFFYENQGFKQITRDKLDVDYIFPDRDSRIYVKLLD

SEQ ID NO: 12571 - protein, 521 aa, Streptococcus agalactiae
TTGCTGCTATTTGACTTATCTAGATCAATATTTCCAACTAATATGATGTCTTATGCATACCTCATTGCAGAAATATACTTTAAAGTCAAAATAAGGAAATATATTATGGAAATTAAAGAATACGAGAATAATCCGTACCATTTAGCACAGCTAGTAGATTTAATTAATTATTGTCAGAATATAGAAGCTAAACTTGATATAAAGATGGCTGAACAAGACGATATTTTTCAAATAGAAAATTATTATCAAAACAGAAAAGGTCAATTTTGGCTTGCCTTAGAAAATGAAAAAGTAGTTGGTTCGATTGCGTTACTGCGTATTGATGATAAAACAGCTGTTCTAAAAAAATTTTTTACATATTCAAAATATAGAGGAAATCCTGTTCGACTTGGTCGAAAATTATTTGAAAGATTATGCTTTTTGCTCGAGCTAGTAAATCACAGAATTGTCTTGGATACTCCAGAAAGAGAAAATCTCACTTCTTTTATGAAATCAAGGTTTAGCAAAATACAGAGATAAAC

SEQ ID NO: 12572 - protein, 176 aa, Streptococcus agalactiae
MLLFDLSRSIFPTNMMSYAYLIAEIYFKVKIRKYIMEIKEYENNPYHLAQLVDLINYCQNIEAKLDIKMAEQDDIFQIENYYQNRKGQFWLALENEKVVGSIALLRIDDKTAVLKKFFTYSKYRGNPVRLGRKLFERFMLFARASKSQELSWILQKRERSHFFYENQGFSKIQEIN

SEQ ID NO: 12573 - protein, 723 aa, Streptococcus agalactiae
ATGGAGAATGTTAGGACATACAAAGTTATATCTATTCTGATTACTTGTTCAATATTTGGTATATTAGGTCCCTTAACTGCACTTATGATGCCTGATATTATGGCAGGAATTTTACCTAAAAAACTACAGGGAGCGATACCAGAGCCTACCTATATTGATTCTTATATTCAGTATTTTAAAAATATGAATCAGCTTGGTTTAGTTATTTTAGTATTTTTATTTAGTAGTACACTGACGCAAGAATTTTCAAAAGGAACCTTAATTAATCTAGTTACGAAGGGATTAGCCAAAAAAGTTATAATCCTTGCTAAATTTATAGTAATTACCCTTCTATGGACAGTGTCATACTTATTAAGTGTTGTCATCCATTTTAGTTATACGTTATATTACTTTAATAACGAAGGAAGTCATAAATTAATGGTTTATGGTGCAACATGGTTTATCGGTATCCTTTTCATAAGCTTAATACTCTTTTTTTCAGTTCTTTTTCGTAAAACTTTAGGGGTTTTGTTAGGTTGTCTTTTTATGGTGGTGTTATGTGTAGTATCTGGATTTTTTAAAATCAGTAAAAGCTATAATCCTATGCTTCTTATCCAAAAACAAGGAGAAATGTTAAGTGGAAAGTTTAAAGTTCAAGACTTAATGGAACCGAGCATATTAGTGTTTTTGCTTATTATAATGACGTTATTACTTAGCATGTACATTTTTGAAAAAAGTGAAGTT

SEQ ID NO: 12574 - protein, 241 aa, Streptococcus agalactiae
MENVRTYKVISILITCSIFGILGPLTALMMPDIMAGILPKKLQGAIPEPTYIDSYIQYFKNMNQLGLVILVFLFSSTLTQEFSKGTLINLVTKGLAKKVIILAKFIVITLLWTVSYLLSVVIHFSYTLYYFNNEGSHKLMVYGATWFIGILFISLILFFSVLFRKTLGVLLGCLFMVVLCVVSGFFKISKSYNPMLLIQKQGEMLSGKFKVQDLMEPSILVFLLIIMTLLLSMYIFEKSEV

SEQ ID NO: 12575 - protein, 813 aa, Streptococcus agalactiae
ATGATTTATGGATTCGTAGGACCAAATGGAGCAGGTAAAACAACGACAATAAAAATGATTTTAGGATTGTTAAAATTCGATACGGGTTTCATAACAATTTTTGGTAAAAAAGTTAATTTTGGAAGAACAGATACCAATCAACTGATTGGCTATCTCCCAGATGTTCCCGAGTACTACGATTATATGACAGCTCTAGAATATCTTGATTTATGTTCTGGTTTAGCGAGATCAAAGCATAAGCTTTCTAACAAAGAACTACTTAGGTCAGTTGGACTTGACGATAATCACCAAAAGATTGCTACTTATTCTCGAGGAATGAAACAGCGTCTTGGATTAGCTCAAGCACTGGTCCATGATCCTAAAATTATTATTTGCGATGAACCAACCTCTGCATTAGACCCGAAAGGTCGCCAAGATATTTTAGATATTATTTCAAATCTTAGAGGAGAAAAAACTGTGATTTTTTCTACCCATATTCTCTCTGATGTCGAAAAAATATGTGATCACGTTCTGGTGTTAACTAAGTGTGGGATTTATTCTCTTGAAGAGTTAAAAGGAAAAAAATCAGAGGAAAATTATTCGGTTCGTATTTTAATAAAAGTGACAAAGTCTGAAGCTAAGGTACTATCTCATAACTATCAGATAGAAAAGAAAGATAATGAGTATGCACTGACTCTCAAAGGCTCTAAAATGGATAACAAAGCAGATTTACTAGCTGGTTTTTACCAAGATTTAGTTTCTTTAAAGATTAGCCCATCAGCTATTGAAGTCATTGACAATAGTTTAGAGGAGCTTTATTTGGAGGTTACCAAA

SEQ ID NO: 12576 - protein, 271 aa, Streptococcus agalactiae; identical to SEQ ID NO: 3666

SEQ ID NO: 12577 - protein, 204 aa, Streptococcus agalactiae; identical to SEQ ID NO: 8375

SEQ ID NO: 12578 - protein, 68 aa, Streptococcus agalactiae; identical to SEQ ID NO: 8376

SEQ ID NO: 12579 - protein, 1069 aa, Streptococcus agalactiae
ATGCTTGGAGAGAATATCTATTTACAACGTACTCAGATTGGTATGACGCAAGAGAATTTGAGTGATTATTTGCATTTAACAAAAACTACAATTTCAAAGTGGGAAAATAATCAAGCTAACCGGATATTGACTATCTTATTTTGATGGCTAATCTTTTTGATATTAGCTTGGATGACTTAGTCGGTTATCAAAAAACATTGTCAGATGATCAAAGAAATCAGCTCATTAAGGATCTAAAAATAAAAGCAAATGTATTGTCTGAGAGAGATTTCTTTCAGGAAGTTAAGGAATTATCAAAACAGTTCCCTAACGATTTTAAGACTCTGTTGATAATGATTAATATGGTCTTGAGCAACCTAACCAACCTTAATGATTCAGAAATGAAAGAGTGGTCACTAAGTACACTAAATAAAATTATTAGTAAAACAGTAGTTGAGTCTGACCTCCAGACGGCGATAATGTTCAAAACGGTCGTTCTTTTTCACAACCTTGAATATGATGAAGTGATAAACCTTTACCAGAATAGTCCCTATAAATTAGGTGAAGAATTACTTTTAGCTAATAGCTTTTTTGCAAAAGGCGATGTTTACCGAGCTAAGCAAGTATTACAGGTTGAAATTTATCAGCAGATTCTACTTGTATGCGAGTATCTATTGAGTTTATCAACTTTTGAAGTTGAAGAAAACAAAGGCGATATTTTTGAAAGGCTTGAACATATGATAGAAGCGTTTCAATTAAACTCTTTGCATCCCAACACAGTCATCAAGTGTTATTATAGTTTAGCTTGTCATTATAGTAAAAGTGATGATGATAAGGCATTAGGATACTTAAAACAATGTTTTAAATCTTTAAAACAATTGCTCCAAAGATTTGAATTACACGGTGATCTTTCTTTTATACCATCGATGATTGGTTAGAGACAATACCTACTGGTATTGCACCACCGACGAGTCAATTACAGGTAATAGAACGAGTTGAGGACTTATTTCAAAATTCACATTTAAGAACTATCGGGCGTAAAGAATTTCAACAAATGATTCAAAAACTTAACGATTTAAAAAAGGATTAC

SEQ ID NO: 12580 - protein, 358 aa, Streptococcus agalactiae
  VARIANT 40, 334, 336: Xaa = Any Amino Acid
MLGENIYLQRTQIGMTQENLSDYLHLTKTTISKWENNQAXPDIDYLILMANLFDISLDDLVGYQKTLSDDQRNQLIKDLKIKANVLSERDFFQEVKELSKQFPNDFKTLLIMINMVLSNLTNLNDSEMKEWSLSTLNKIISKTVVESDLQTAIMFKTVVLFHNLEYDEVINLYQNSPYKLGEELLLANSFFAKGDVYRAKQVLQVEIYQQILLVCEYLLSLSTFEVEENKGDIFERLEHMIEAFQLNSLHPNTVIKCYYSLACHYSKSDDDKALGYLKQCFKSLKQLLQRFELHGDTFFYTIDDWLETIPTGIAPPTSQLQVIERVEDLFQNSXFXELSGRKEFQQMIQKLNDLKKDY

SEQ ID NO: 12581 - protein, 612 aa, Streptococcus agalactiae
GTGAACAAGAAACCCTTCTTCCAGTGTGTTATACTATTTGTTTCTTTTTTAGTGTTAACATTAGCAGTTAAATCTCAAAGTGATATGATAAGTTATTTGGATAATATCACTTCAGCTTTTTTTCAAAGCATACGAAACCCCGATTTAACTAACTTAATGACGATAATATCAACAGTTGTCAGCCCTTTGACAACGTCATTAATAGCACTTGTTATCCTTGGGTATCAATATTTTTTAAACGAAAGGATAGCTGTGTGGCTATTTATGTTATTTTTTGGTACCAATGCTTTGGCACTGCTTTTAAAAGATATCATCGCACGTCATAGACCTATGAATCAACTTGTTTTTGATTCGGGTTATAGTTTTCCCAGTGGACATACGATATCAACGTTTTTATTAATGATTCTTGTTTTAGTGGTTGCAAGACAGAGATTGAGAAGAGTATTGTCACAAGTAGTTTTCGTAATATTTGCATTAGTGATCCTTGCATCAGTTATTTTTTCAAGACTCTATTTAGAAAATCATTTTTTAACGGATATTTTAGGGTCGTTGTTACTAGGAGCAACGTCATATTGTGGTTTGTCTGCTATTGTATCTTTGAAAGAGTTACAA

SEQ ID NO: 12582 - protein, 204 aa, Streptococcus agalactiae
MNKKPFFQCVILFVSFLVLTLAVKSQSDMISYLDNITSAFFQSIRNPDLTNLMTIISTVVSPLTTSLIALVILGYQYFLNERIAVWLFMLFFGTNALALLLKDIIARHRPMNQLVFDSGYSFPSGHTISTFLLMILVLVVARQRLRRVLSQVVFVIFALVILASVIFSRLYLENHFLTDILGSLLLGATSYCGLSAIVSLKELQ

SEQ ID NO: 12583 - protein, 315 aa, Streptococcus agalactiae
ATGGATATTACAGATTATCAAAAATGGGTGAGCGAATTCTATAAAAAAAGAAACTGGTATCAATACAATTCTTTTATTAGAAGTAACTTTCTTTCAGAAGAAGTCGGCGAATTGGCTCAAGCCATTCGCAAATATGAAATTGGACGTGACAGACCTGACGAAACCGAACAAACTGATTTGGAAAACTTAAATGATATAAAAGAAGAACTAGGAGATGTCTTAGATAATATCTTCATACTTGCTGATCAGTATAATATCTCACTAGAAGAGATTATCAGCGCACATCGCACTAAATTAGAAAAGAGGTTTGAAACA

SEQ ID NO: 12584 - protein, 105 aa, Streptococcus agalactiae
MDITDYQKWVSEFYKKRNWYQYNSFIRSNFLSEEVGELAQAIRKYEIGRDRPDETEQTDLENLNDIKEELGDVLDNIFILADQYNISLEEIISAHRTKLEKRFET

SEQ ID NO: 12585 - protein, 558 aa, Streptococcus agalactiae
ATGAGAATAACTATTTTTTGTGGAGCAAGTACTGGGGAAAATCCTGTTTATAGTGAAAAAACAGTTGCCTTAGCACAATGGATGGCACAAAACAAACATTCTCTGGTGTATGGTGGAGGAAAAGTTGGCTTAATGGGAGTCATGGCTGATACTGTGATTGCAAATGGTGGCTATACTACTGGTGTTATTCCGACATTTTTAAGAGATCGTGAAATTGCACATGAAAATTTATCAGAGCTTATCATAGTAAATAATATGCCTGAACGTAAGGCAAAAATGATGCTACTTGGAGATGCCTTTATCGCTCTACCTGGTGGACCTGGTACCCTTGAAGAAATTTCCGAAGTTATCTCTTGGTCTCGCATCGGTCAAAATGATAATCCTTGCATTTTATATAATGTTAATGGCTACTTTAATGATTTAAAAAATATGTTTGATCATATGGTTGGTGAGGGTTTTCTTAGTCTGGAAGATAGAGAAAATGTCCTATTCTCAGATGATATTGCTGAAATCGAAGATTTTATAACGAATTATAAAGTCCCTAGCACGCGCCAATAC

SEQ ID NO: 12586 - protein, 186 aa, Streptococcus agalactiae
MRITIFCGASTGENPVYSEKTVALAQWMAQNKHSLVYGGGKVGLMGVMADTVIANGGYTTGVIPTFLRDREIAHENLSELIIVNNMPERKAKMMLLGDAFIALPGGPGTLEEISEVISWSRIGQNDNPCILYNVNGYFNDLKNMFDHMVGEGFLSLEDRENVLFSDDIAEIEDFITNYKVPSTRQY

SEQ ID NO: 12587 - protein, 861 aa, Streptococcus agalactiae
TTGAATCAAGAAAAAAAGAGACTTAACCTAATCGGGCTGATACTTTTAGCTCAGGCTATTGTTTTAAGTTTGGCGACTACACTATTTGCTGAAATCTTACAAAATGATGTCTGGATAGGTATAGCAAGTACTTTAATCGCCTTACTCATTCCTTGTTTTTTTATGGGTTTTAAAAATTTAAAAAAACATCTAACGGCAACTCATCATACAATCACTTTCACCACTATTTTATTCTTGTTAAGCATTATATATACTACTAATAATATAGTCTCCACAATATGGGATGCTGTGCTAAATCATCTCAATATTATGGAATCGGAAAGTCAAAATTATGATGCCACCTTCAGTATACTTATGATTAGTTATTCTGTTGTTGTAGGTCCTTTTTTTGAAGAAGTTTTATACCGAGGAATAGTATTGAATTTATTATCCAAGTATGGTAAATGGTTTGCCATTATTACTTCTGGCATCCTATTTGGTTTAATGCACCAAGACATTTCTCAGCTATTGACTACATCTATTGCGGGTATCATAATGGGTTTTATCGCTTACCATTATTCCTTTAAGGTAGCCCTACTCCTTCATATCTGCAATAACTTTATCGTAGAAATTTTCACCCAGCTATCAACAGTAAACGAGTTATACGGGACTTATTTTGAAAATATATTGCTAATTTTAGCAATCTTATTTATATTATATTACCTTTTTACGCATAGGAATACTGCTCGCCATCGTATAAGTCTGCACTCTAACGTTCGAGAGGCTGACTCAATAAACTCTAAACAATACACAAAATTATTACTTACTAGTTGGCCTTTTATTCTCCTTGTCATTTACGACATTGTCCTAACAACTATTAAT

SEQ ID NO: 12588 - protein, 287 aa, Streptococcus agalactiae
MNQEKKRLNLIGLILLAQAIVLSLATTLFAEILQNDVWIGIASTLIALLIPCFFMGFKNLKKHLTATHHTITFTTILFLLSIIYTTNNIVSTIWDAVLNHLNIMESESQNYDATFSILMISYSVVVGPFFEEVLYRGIVLNLLSKYGKWFAIITSGILFGLMHQDISQLLTTSIAGIIMGFIAYHYSFKVALLLHICNNFIVEIFTQLSTVNELYGTYFENILLILAILFILYYLFTHRNTARHRISLHSNVREADSINSKQYTKLLLTSWPFILLVIYDIVLTTIN

SEQ ID NO: 12589 - protein, 300 aa, Streptococcus agalactiae
ATGACTAAAAAGATAACTGTTGTAGCATTAGAAACATTGATTGCCCAGCATAATAATATCCATTTGATAGACGTTCGTGAAGAGCATGAGTATCGTGGGGGGCATATTCCAGGTGCGATAAATCTTCCTTTGAGTCAACTCAGTCATAAGTTTGAACAGTTAGATAAAAATAAGGAATATTATCTTGTTTGTCAACGAGGGGGAAGATCTATTAGAGCATGCCAATTTCTTGAGTTGAAAGGCTACAAAGTAATCAATGTAGATGGTGGCACAGAAGCGTGGAGAGGAAATCTAGAAGTG

SEQ ID NO: 12590 - protein, 100 aa, Streptococcus agalactiae
MTKKITVVALETLIAQHNNIHLIDVREEHEYRGGHIPGAINLPLSQLSHKFEQLDKNKEYYLVCQRGGRSIRACQFLELKGYKVINVDGGTEAWRGNLEV

SEQ ID NO: 12591 - protein, 672 aa, Streptococcus agalactiae
GTGACAACTCCACAAGTGGTAAATCATGTAAATAGTAATAATCAAGCCCAGCAAATGGCTCAAAAGCTTGATCAAGATAGCATTCAGTTGAGAAATATCAAAGATAATGTTCAGGGAACAGATTATGAAAAACCGGTTAATGAGGCTATTACTAGTGTTGAAAAATTAAAGACTTCATTGCGTGCCAACCCTGAGACAGTTTATGATTTGAATTCTATTGGTAGTCGTGTAGAAGCCTTAACAGATGTGATTGAAGCAATCACTTTTTCAACTCAACATTTAGCAAATAAGGTTAGTCAAGCAAATATTGATATGGGATTTGGGATAACTAAGCTAGTTATTCGCATTTTAGATCCATTTGCTTCAGTTGATTCAATTAAAGCTCAAGTTAACGATGTAAAGGCATTAGAACAAAAGGTTTTAACTTATCCTGATTTAAAACCAACTGATAGAGCTACCATCTATACAAAATCAAAACTTGATAAGGAAATCTGGAATACACGCTTTACTAGAGATAAAAAAGTACTTAACGTCAAAGAATTTAAAGTTTACAATACTTTAAATAAAGCAATCACACATGCTGTTGGAGTTCAGTTGAATCCAAATGTTACGGTACAACAAGTTGATCAAGAGATTGTAACATTACAAGCAGCACTTCAAACAGCATTAAAA

SEQ ID NO: 12592 - protein, 224 aa, Streptococcus agalactiae
MTTPQVVNHVNSNNQAQQMAQKLDQDSIQLRNIKDNVQGTDYEKPVNEAITSVEKLKTSLRANPETVYDLNSIGSRVEALTDVIEAITFSTQHLANKVSQANIDMGFGITKLVIRILDPFASVDSIKAQVNDVKALEQKVLTYPDLKPTDRATIYTKSKLDKEIWNTRFTRDKKVLNVKEFKVYNTLNKAITHAVGVQLNPNVTVQQVDQEIVTLQAALQTALK

SEQ ID NO: 12593 - protein, 537 aa, Streptococcus agalactiae
ATGAAAATAGCAATAATCGGATATAGTGGGTCGGGTAAGTCCACTTTAGCGAGAAAATTGGGAAATTACTATAATTGCAATGTATTACACCTTGATAGTATTCACTTCGCCCCAAATTGGGAAGAGAGAAAATATGATGACATGATTGACGATGTCAGCAGCATGTTAGAAAGAAGAACATGGATTATAGAAGGTAACTACAAAAAACTGCTATATCAAGAACGTCTAGCAGATGCAGATGAGATTATTTTTTTTGACTTTAATCGCTTCAACTGCTTGTGGAGAGCATTCAAACGTTACTGTAAGTTTCGTGGTAAGACTCGACCTGATATGGCCAATGGATGCCCGGAAAAATTAGATTTTGAATTTATCAGTTGGATTCTTAAAGACGGTCGCTCTGATAAACAAAAATCAAATTATAAGCAAGTTATTGAGAACTACCCTCAAAAAATAAAGATTCTAAAACACCAACGCGATCTTGAGCAATACCTAAAAGAACTCCCTGTTGCATCCAATACAGACCCTCTCAAGAGCTTA

SEQ ID NO: 12594 - protein, 179 aa, Streptococcus agalactiae
MKIAIIGYSGSGKSTLARKLGNYYNCNVLHLDSIHFAPNWEERKYDDMIDDVSSMLERRTWIIEGNYKKLLYQERLADADEIIFFDFNRFNCLWRAFKRYCKFRGKTRPDMANGCPEKLDFEFISWILKDGRSDKQKSNYKQVIENYPQKIKILKHQRDLEQYLKELPVASNTDPLKSL

SEQ ID NO: 12595 - protein, 1082 aa, Streptococcus agalactiae
ATGACAACAAATGTAATGGCAATTATAGCTACGGAGAAGATTGCTTCAAAGAAATTCCTAGCGTTTTGGCAACTTACCGTATTCAAAGCATTGCTTTCGTCGGTGGCAAACGTGCCCTAGACAGCTCAGAAGCCGAGGTTCGCTCTATTTTAGAGGAAGCAAATATTAAAGTCACAGGAAGCTTTGTCTATGGAACGGATTCAACACAATCTAACATTGACAAGTTAGTAGCCAACCCACAAGTTCAAGCTGCTGATGCTATCTTAGGTTTTGGCGGTGGAAAAGCTTTAGACACAGCTAAAATGGTAGCAAAAGAGTTAGGTAAAAATAGCTTTACTATCCCAACTATTTGTTCTAATTGCTCCGCAGGTACTGCCATTGCAGTTGTATATAATGATGACCATTCTTTCTTAAGATACGGCTATCCCGAGTCTCCACTTCATATTTTTATCAATACACGGATCATTGCACAGGCACCAAGCAAATATTTTTGGGCTGGTATTGGGGACGGTATTTCAAAAGCCCCTGAAGTAGAACGTGCTACCTTAGAGGCTAAGACCAATAAACTACCACATACTGCAGTGTTAGGACAAGCAGTCGCTCTGTCTTCAAAGGAAGCTTTTTATCAATTTGGTGAACAAGGTCTAAAAGACGTTGAAGCTAATTTAGCTTCGCGTGCAGTTGAAGAAATTGCGCTTGATATCTTAATCTCAACTGGCTATGCTTCTAATTTAGTTAATCAACCTGATTTCTACTACAATTCTTGTCACGCGCATGCATTTTACTATGGTACAACCGCTATTCAAAGACAAGGTGAATTCTTACATGGCGTTGTAGTTGCGTTTGGTGTGTTAGTTTTACATGCTTATTTCAACGAACTAGAAGAACTTGAAAAAGTAGCTCGTTTTAATAAGTCACTAGGTTTGCCAACAACTCTAGCTGACGTCTCTTTATCAGAAAAAGATATTCCAAAAATTGTTGAAATTGCAATGACTACTAATGAATACAAAAATACCCCTTTCGATCCCAAAATGTTTGCTCAAGCTATTTTAGCAGCAGACGCTTTCGGACAGACACTAGCC

SEQ ID NO: 12596 - protein, 361 aa, Streptococcus agalactiae; identical to SEQ ID NO: 3688

SEQ ID NO: 12597 - protein, 705 aa, Streptococcus agalactiae
ATGGTATGTGTCGATTTTATTGATCAAAAAGTTTATAGTGAAGCAGAAGGTCTATTTGTTTCCGATTTAGACTTAGGCATTAAAGGTTTAATAAGAGCACGTTATCCTTTTGCTCTGGATAGTGACTTTATTTCGTATGGAAATTTAAGTCATTATTGTATGAATTATCTTGACGAAATTGTTCAGCGAGCGAATCAGAAAAATGAGAAGATAAAATATAATGTGACTACCTTGATGAAAGAAGAAGAGAAGCCCTTCAACGTTGAAGAGCGTTTGAACAAGCAAGCAACTATCGGTCAACGAATTGCTGATGATGTTGCGCGTTTTGGCGGATCTTGGACTTTTATTATCGTTTTTGTATCCATTATGGCTATTTGGATGTTGGTTAATATCATGAAGCCTTTTGGTATTCAATTTGATCCTTACCCATTTATCCTGTTAAACTTAGCTTTATCAACGATTGCTGCAATCCAAGCACCACTTATTATGATGAGTCAAAATCGTGCTGCTGATTATGATCGTTTGCAAGCTCGAAATGACTTTAATGTCAATAAAACCTCTGAGTTAGAAATTAGATTATTGCACGAAAAGATTGACCATATGGTACAACAAGATCAGTTTGAATTGTTAGAGATTCAAAAGTTACAGACAGAAATGCTAGTATCATTGGGAAATCAGTTAGCACAATTGAAACAACTACAAAAA

SEQ ID NO: 12598 - protein, 235 aa, Streptococcus agalactiae; identical to SEQ ID NO: 3690

SEQ ID NO: 12599 - protein, 1842 aa, Streptococcus agalactiae
ATGTCCAAGTTTTTAGAGAAATTAAAAACAGATATTCTAGTAGCTGACGGTGCAATGGGAACTCTCCTTTATACTTATGGGCTAGATACTTGTCATGAATCCTACAATGTAACACATCCAGAAAAGGTTCTAGCCATTCATCAAGCTTATATTGAAGCGGGTGCAGATGTTATTCAGACGAATACCTACGGGGCTCAACGTCATCGATTAAAGAACTACGGTTTGGAAGATCAGGTTGTCTCTATCAATCAAGCAGCAGTTAATCTAGCTCATCAAGCGACTTTGGGTAAAGAAACATTTATTTTAGGTACTGTTGGAGGTTTTCGTTCTCAAAGACAATGCGATTTAACATTGGATAATATTGTAGAAGAAACTTTGGAACAAGTTGAGGCTTTATTGGCGACTGGACAGCTAGACGGATTATTGTTTGAAACTTATTATGATATTGAGGAGATAACGACAGTTTTAAAAATTGTGAGGGAGATGACTGATCTACCAATTATTACTAATATTTCTCTTCATGAAGCAGGGGTAACATCAAATGGAAAGCCTATTGTAGAGGCGCTCAGCCAATTAGTTATGTTAGGTGCAGATGTGATTGGCTTAAATTGTCACCTTGGACCCTATCATATGATCCAATCATTGAAGCAAGTTCCTTTATTTGCCCAGTCTTATTTGTCAGTTTATCCTAATGCAAGTCAGTTATCTTTAGACGGTGAGAATAGTCAATACCAGTTTAGTCAGAATTCAGAGTATTTTGGAAAATCTGCAGAACTTCTCGTAGCAGAAGGAGTTAGGCTTATTGGTGGTTGTTGTGGGACAACTCCAGATCATATTAGAGCTGTGAAACGATCTATTAGAGGATTGAAACCTATTGAACGAAAGGTTGTTACTCCTATAATACCTGTAAAAGATTTTGTTAGGCGTATCAGACGAACAGATACTCTAGTGGATAAGGTAAAAAAAGAAGTAACAATTATCGCAGAATTAGATCCTCCAAAACATTTAGATATCGTTCAGTTTCAAAAGGCTATACGAGCGATTGACCAAAAAGGTATTGCAGCAATTACTTTAGCAGATAATTCACTATCTAATACACGTATTTGTAATTTAAGTATAGCTAGCTTGCTTAAAGATGAAATTAGTACACCCTTTTTACTACATATAGCTTGTCGTGACCATAATTTAATTGGCTTACAGTCTAGACTGTTGGGCATGGAATTATTAGGTTTTAACCATATTTTAGCCATAACAGGAGATCCGACTAAACTTGGTGATTTCCCAGGAGCGACTAGTGTTTATGATGTGACTTCCTTTAAACTCCTTTCTCTGATTAAACAACTTAATCAAGGTTTATCTTATAGTGGTGCTAGCTTGAGACGTCCAACCGATTTTACAGTTGCTGCTGCCTTTAATCCTAATGTGAAAAACCTTACTCGAACCGTAAAATTGATTGAGAAAAAAGTAGCTTCTGGTGCTGATTATTTTATGACACAACCAATATTTGATCACTCTGTGTTAAAGGAATTAGCTGATCTTACTAAAACAGTTGAACAACCCTTTTTTATCGGAATTATGCCAATAACAAGTTATAATAACGCTGTTTTTCTACACAATGAAGTTCCTGGTATTAAACTTTCTGAGTCATTTTTATCTGCTCTTGAAAAGGTAAAGGACGACAAAGAAGCTTGTTTAACTTTGGCCTTAAACGAGAGTAAGTCCTTGATTGATGAAGCCTTGAACTATTTTAATGGTATCTATTTGATTACTCCCTTTTTACGCTATGATCTGACTCTTGAGTTAATTGACTATATACAAAAAAAGCAAGTAAGAAAGTCCTCT

SEQ ID NO: 12600 - protein, 614 aa, Streptococcus agalactiae
MSKFLEKLKTDILVADGAMGTLLYTYGLDTCHESYNVTHPEKVLAIHQAYIEAGADVIQTNTYGAQRHRLKNYGLEDQVVSINQAAVNLAHQATLGKETFILGTVGGFRSQRQCDLTLDNIVEETLEQVEALLATGQLDGLLFETYYDIEEITTVLKIVREMTDLPIITNISLHEAGVTSNGKPIVEALSQLVMLGADVIGLNCHLGPYHMIQSLKQVPLFAQSYLSVYPNASQLSLDGENSQYQFSQNSEYFGKSAELLVAEGVRLIGGCCGTTPDHIRAVKRSIRGLKPIERKVVTPIIPVKDFVRRIRRTDTLVDKVKKEVTIIAELDPPKHLDIVQFQKAIRAIDQKGIAAITLADNSLSNTRICNLSIASLLKDEISTPFLLHIACRDHNLIGLQSRLLGMELLGFNHILAITGDPTKLGDFPGATSVYDVTSFKLLSLIKQLNQGLSYSGASLRRPTDFTVAAAFNPNVKNLTRTVKLIEKKVASGADYFMTQPIFDHSVLKELADLTKTVEQPFFIGIMPITSYNNAVFLHNEVPGIKLSESFLSALEKVKDDKEACLTLALNESKSLIDEALNYFNGIYLITPFLRYDLTLELIDYIQKKQVRKSS

SEQ ID NO: 12601 - protein, 2235 aa, Streptococcus agalactiae
ATGGTAAAAGTTTCAAATTTAGGGTATCCACGTCTTGGTGAACAGCGCGAATGGAAGCAAGCGATCGAAGCTTTCTGGGCAGGGAATCTTGAACAAAAAGATTTAGAAAAACAACTAAAACAATTACGTATCAATCATTTAAAGAAACAAAAAGAGGCAGGTATTGACCTTATTCCAGTGGGGGATTTTTCTTGTTATGATCATGTTTTGGATTTGTCATTTCAATTCAATATAATCCCAAAGCGTTTCGATGAGTATGAGAGGAATTTAGACCTTTATTTTGCTATTGCAAGAGGTGACAAAGATAATGTCGCATCATCTATGAAAAAGTGGTTTAATACCAACTACCACTACATAGTCCCAGAATGGGAGGTTGAGACTAAACCTCACTTGCAGAATAATTACTTACTTGATCTTTATCTAGAAGCTAGGGAAGTAGTTGGTGATAAAGCAAAGCCGGTTATCACTGGTCCAATAACCTATGTTTCCTTATCATCAGGAATTGTCGACTTTGAAGCGACTGTTCAGCGGTTATTACCACTTTATAAGCAGGTCTTTCAAGATTTGATAGATGCAGGCGCCACCTATATTCAGATTGATGAGCCGATATTTGTAACTGATGAAGGTGAACTTTTAGTAGATATAGCTAAGTCTGTCTATGATTTTTTTGCAAGAGAAGTACCACAAGCCCACTTCATCTTTCAAACCTACTTTGAATCAGCAGTCTGTTTAGATAAACTCTCTAAGCTGCCAGTAACGGGATTTGGCCTTGATTTTATACATGGTAGGGCGGAAAATTTAGCTGCTGTTAAGCAAGGTCTATTCCGCGAAAAAGAATTATTTGCAGGAATTGTTAATGGTCGAAATATCTGGGCAGTAAATTTAGAAGAAACGTTGGCTTTATTGGAAGAGATAGGTCCCTTTGTTAAACGTTTGACCCTTCAACCTTCTTCAAGTCTTTTACATGTACCGGTGACGACTAAATACGAAACACATTTAGACCCTGTGTTAAAGAATGGCTTATCATTTGCTGATGAAAAACTAAAGGAATTAGAACTATTAGCTAGTGCTTTTGATGGTAATAAAACAAAGGGATATCACGAAGCTTTATCTCGTTTTTCAGCTCTTCAAGCTGCTGATTTTCGTCATGTAGCATTGGAATCATTAGCAGAAGTAAAGCTTGAACGAAGTCCGTATAAATTACGCCAAGCTTTGCAAGCTGAAAAATTACAGTTACCGATTTTACCAACAACAACTATTGGGTCCTTTCCTCAATCACCTGAAATTAGGAAGAAACGCCTTGCTTGGAAAAGAGGAAATCTATCTGACTCAGATTATAAAGATTTCATAAAAACTGAAATTAGAAGATGGATTGCTATTCAAGAAGATCTTGATCTTGATGTGTTAGTACATGGCGAATTTGAGCGTGTGGATATGGTTGAATTTTTTGGTCAAAAGTTAGCTGGTTTTACGACAACCAAATTAGGCTGGGTACAGTCTTATGGTTCAAGGGCGGTCAAACCACCTATCATTTATGGTGATGTCAAACATATTCAACCCTTAAGCCTTGAAGAAACGGTTTATGCCCAAAGCTTGACTAAGAAACCTGTTAAAGGCATGTTGACAGGTCCTATTACTATAACGAACTGGTCATTTGAGCGAGATGATATTAGCCGATCTGATCTTTTTAATCAAATTGCTTTGGCTATAAAAGATGAGATTCAACTTTTGGAACAATCAGGCATTGCTATTATACAAGTGGATGAAGCAGCCCTTCGAGAAGGTTTACCCTTACGCCAGCAAAAGCAACAGGCTTACTTAGATGATGCTGTTGCGGCCTTTAAAATTGCAACTTCATCTGTGAAAGATGAGACACAAATTCATACACATATGTGTTATTCAAAATTTGACGAAATTATTGATTCTATCCGTGCACTAGATGCAGATGTTATTTCTATTGAAACGAGTAGAAGTCATGGGGACATCATTGAAAGTTTTGAAACAGCAGTTTATCCTCTAGGAATTGGCCTGGGTGTTTACGATATTCATTCCCCTCGCATACCTACTAAGGAAGAAATTATTGTCAATATTCAACGATCACTAAAATGTCTATCAAAAGAGCAATTTTGGGTAAACCCTGACTGTGGCTTAAAAACACGTCGTGAAGCAGAAACAATTGCTGCCTTGGAGGTTCTTGTTTCAGCTACCAAAGAGGTTCGTCAGCAATTAGATAAT

SEQ ID NO: 12602 - protein, 745 aa, Streptococcus agalactiae
MVKVSNLGYPRLGEQREWKQAIEAFWAGNLEQKDLEKQLKQLRINHLKKQKEAGIDLIPVGDFSCYDHVLDLSFQFNIIPKRFDEYERNLDLYFAIARGDKDNVASSMKKWFNTNYHYIVPEWEVETKPHLQNNYLLDLYLEAREVVGDKAKPVITGPITYVSLSSGIVDFEATVQRLLPLYKQVFQDLIDAGATYIQIDEPIFVTDEGELLVDIAKSVYDFFAREVPQAHFIFQTYFESAVCLDKLSKLPVTGFGLDFIHGRAENLAAVKQGLFREKELFAGIVNGRNIWAVNLEETLALLEEIGPFVKRLTLQPSSSLLHVPVTTKYETHLDPVLKNGLSFADEKLKELELLASAFDGNKTKGYHEALSRFSALQAADFRHVALESLAEVKLERSPYKLRQALQAEKLQLPILPTTTIGSFPQSPEIRKKRLAWKRGNLSDSDYKDFIKTEIRRWIAIQEDLDLDVLVHGEFERVDMVEFFGQKLAGFTTTKLGWVQSYGSRAVKPPIIYGDVKHIQPLSLEETVYAQSLTKKPVKGMLTGPITITNWSFERDDISRSDLFNQIALAIKDEIQLLEQSGIAIIQVDEAALREGLPLRQQKQQAYLDDAVAAFKIATSSVKDETQIHTHMCYSKFDEIIDSIRALDADVISIETSRSHGDIIESFETAVYPLGIGLGVYDIHSPRIPTKEEIIVNIQRSLKCLSKEQFWVNPDCGLKTRREAETIAALEVLVSATKEVRQQLDN

SEQ ID NO: 12603 - protein, 321 aa, Streptococcus agalactiae
ATGATAAATAGTACCGTTTTTCTTGCTATTCTTTTAGGTTTTGTTGTTTCTTGGGTGCCAAGAGTCGCTCCATTCATATTTGTAAAATACAAAGGGCTACCAAATAGTCTTGTGAAATTTTTAAAATTTCTTCCTCTTTCTATTTTATTTGCCCTAACATTCTCTAGCTTTTTTTCAGTTAAATTAGGACAATTGCCAACACTAAAATGCTTAGATTTATTGGCTGGCATACCAACTCTAGTTGTCACTATTCGATATCGAAATTTATTTTACACTGTTCTTACTGGTATCGTTACTATGGCTTTATTGAGATTACTATTT

SEQ ID NO: 12604 - protein, 107 aa, Streptococcus agalactiae
MINSTVFLAILLGFVVSWVPRVAPFIFVKYKGLPNSLVKFLKFLPLSILFALTFSSFFSVKLGQLPTLKCLDLLAGIPTLVVTIRYRNLFYTVLTGIVTMALLRLLF

SEQ ID NO: 12605 - protein, 249 aa, Streptococcus agalactiae
GTGACAACTAGAGTTGGTATGCCAGCCAATAAATCTAAGCATTTTAGTGTTGGCAATTGTCCTAATTTAACTGAAAAAAAGCTAGAGAATGTTAGGGCAAATAAAATAGAAAGAGGAAGAAATTTTAAAAATTTCACAAGACTATTTGGTAGCCCTTTGTATTTTACAAATATGAATGGAGCGACTCTTGGCACCCAAGAAACAACAAAACCTAAAAGAATAGCAAGAAAAACGGTACTATTTATCATC

SEQ ID NO: 12606 - protein, 83 aa, Streptococcus agalactiae
MTTRVGMPANKSKHFSVGNCPNLTEKKLENVRANKIERGRNFKNFTRLFGSPLYFTNMNGATLGTQETTKPKRIARKTVLFII

SEQ ID NO: 12607 - protein, 690 aa, Streptococcus agalactiae
ATGGAAAAAGGATTTAAAGATGGAGTGAAAGATGCCTTGCCCACAGCTTTAGGGTATATCTCAATAGGCTTGGCGTTTGGGATAGTTGCTTCAGCATCAGATTTATCTGCAATAGAAGTGGGTCTTATGAGTGCCTTGGTATATGGGGGATCTGCTCAGTTTGCTATGTGTGCGCTATTATTAGCAAAAGCAGACTTGATGACTATTACGATAACAGTATTTTTAGTTAATTTGAGAAATATGTTAATGAGTTTACACGCGACTACTATCTTCAAGTCTGCTCACCTAATGAATCAATTAGCCATAGGAACTCTAGTAACAGATGAGAGCTACGGCGTTTTACTTGGAGAAGCATTACATCACAAAGTCGTATCGCCTAGTTGGATGCATGGTAATAATGTGATGAGTTATTTGACATGGGTAATCTCAACGATAATAGGAACTTTACTGGGGAGTACTATTCCTAATCCAGAAATGTTTGGTTTAGACTTTGCATTAGTCGCCATGTTTATAGGTCTCTTTGTATTTCAGTTGTTTGGGATGTTATCTGATGGAAAGCGACTTGTTGTATATGTTCTTGCTTCTGTAGGTTTAAGTTACTTCTTATTAGCCACTTTTTTGTCAGGAGCCTTATCAGTATTGCTTGCGACTGTTGTTGGATGTAGTGTGGGAGTTGTTTTAGATGATAAA

SEQ ID NO: 12608 - protein, 230 aa, Streptococcus agalactiae
MEKGFKDGVKDALPTALGYISIGLAFGIVASASDLSAIEVGLMSALVYGGSAQFAMCALLLAKADLMTITITVFLVNLRNMLMSLHATTIFKSAHLMNQLAIGTLVTDESYGVLLGEALHHKVVSPSWMHGNNVMSYLTWVISTIIGTLLGSTIPNPEMFGLDFALVAMFIGLFVFQLFGMLSDGKRLVVYVLASVGLSYFLLATFLSGALSVLLATVVGCSVGVVLDDK

SEQ ID NO: 12609 - protein, 4713 aa, Streptococcus agalactiae
ATGAACACAAAACAGCGTTTTTCAATCCGGAAATATAAGTTAGGTGCCGTATCTGTACTTTTGGGAACCCTATTTTTTTTAGGCGGTATCACAAATGTAGCTGCTGATTCTGTCATAAATAAGCCATCTGATATTGCAGTTGAACAGCAAGTAAAAGACAGTCCAACGAGCATAGCAAATGAGACACCTACTAACAACACGTCATCAGCCCTTGCGTCGACAGCTCAAGACAATCTTGTTACAAAGGCTAATAATAATAGTCCAACAGAAACACAACCAGTAGCTGAGTCTCACTCTCAAGCCACCGAGACATTTTCCCCAGCCGCAAATCAACCGGTTGAAAGCACTCAAGAAGTTTCTAAAACTCCTTTAACCAAACAAAATTTAGCAGTCAAACCTACACCAGCTATTTCTAAAGAAACCCCTCAAAACATTGATAGTAATAAAATTATCACTGTCCCCAAAGTATGGAACACAGGCTACAAAGGAGAGGGAACTGTTGTAGCAATTATTGACTCAGGACTAGATACCAATCACGATGCTCTCCAACTAAATGATTCGACAAAAGCAAAATACCAAAACGAACAGCAAATGAATGCTGCTAAAGCAAAAGCTGGTATAAACTATGGAAAATGGTATAACAACAAAGTAATCTTTGGTCACAACTATGTTGATGTCAATACAGAGCTAAAAGAGGTGAAAAGCACTTCTCATGGTATGCACGTAACCAGTATCGCAACAGCTAATCCTAGCAAGAAAGATACAAATGAATTAATCTATGGTGTTGCTCCTGAAGCACAAGTAATGTTTATGAGAGTCTTCTCTGATGAAAAAAGAGGAACTGGACCAGCCCTTTATGTTAAAGCTATTGAAGATGCCGTTAAACTCGGTGCTGATAGCATTAATTTAAGTTTAGGTGGAGCTAATGGCTCTTTAGTTAATGCCGATGACCGACTTATAAAAGCTTTAGAGATGGCTAGACTCGCTGGCGTTTCTGTTGTTATAGCAGCAGGTAACGACGGTACATTTGGGAGTGGAGCATCAAAGCCTTCTGCTCTTTATCCTGATTATGGTTTAATTGGTAGTCCATCAACAGCTCGTGAGGCCATTTCTGTAGCATCATATAATAATACAACACTGGTTAATAAAGTCTTTAACATTATCGGATTAGAAAACAACAAAAATCTCAACAACGGATTAGCTGCTTATGCAGATCCTAAAGTTAGTGATAAGACCTTTGAAGTAGGGAAGCAATATGATTATGTTTTCGTAGGAAAAGGAAACGACAATGATTATAAGGACAAAACTTTAAATGGTAAAATCGCCTTAATTGAACGTGGAGATATTACTTTTACAAAAAAAGTCGTCAATGCTATTAATCACGGTGCTGTGGGAGCTATTATCTTTAATAACAAAGCTGGGGAAGCTAACCTAACAATGAGTTTAGATCCTGAAGCAAGTACTATTCCTGCCATTTTTACCCAAAAAGAGTTTGGAGATGTTTTAGCTCAAAAAAGCTATAAAATTGTATTTAACAATATCAAAAATAAACAAGCTAACCCTAATGCAGGTGTCCTATCTGACTTTTCAAGCTGGGGATTAACAGCAGACGGACAATTAAAACCTGACTTATCTGCTCCTGGAGGCTCTATTTACGCCGCTATCAATGATAATGAATATGATATGATGAGTGGGACAAGTATGGCTTCTCCCCATGTCGCTGGTGCTACTGCTCTAGTTAAACAATACTTATTGAAAGAACATCCAGAACTTAAAAAAGGTGACATTGAAAGAACTGTCAAATACCTTCTTATGAGTACTGCTAAAGCACACCTAAACAAAGATACAGGCGCTTACACCTCACCACGCCAACAGGGAGCAGGTATTATCGATGTCGCAGCAGCAGTTCAGACAGGATTATACCTAACTGGTGGGGAAAACAACTATGGTAGCGTTACATTAGGAAATATTAAAGATAAAATTTCCTTTGATGTTACTGTTCATAATATCAATAAAGTTGCAAAAGATTTACACTATACAACCTATTTGAATACTGATCAAGTTAAAGATGGCTTTGTCACATTGGCTCCTCAACAACTTGGTACATTTACAGGGAAAACGATACGGATTGAACCAGGGCAAACTAAAACGATTACAATTGATATAGATGTTTCGAAATACCATGACATGTTAAAAAAAGTAATGCCAAACGGCTATTTCCTAGAAGGCTACGTACGTTTTACAGACCCTGTTGATGGTGGGGAAGTTCTTAGTATTCCTTATGTTGGATTTAAGGGAGAATTCCAAAACTTAGAAGTTTTAGAAAAATCCATTTATAAGCTTGTTGCTAACAAAGAAAAGGGATTTTATTTCCAACCAAAACAAACAAACGAAGTTCCTGGTTCAGAAGATTATACTGCCTTAATGACTACAAGTTCAGAACCTATCTACTCAACAGACGGTACTAGTCCTATCCAATTGAAAGCCTTGGGAAGCTATAAGTCTATAGATGGAAAATGGATCTTACAACTAGATCAAAAAGGCCAGCCTCATCTAGCCATTTCACCTAATGATGACCAAAATCAAGATGCCGTTGCAGTGAAAGGTGTTTTCTTACGTAATTTCAATAATTTAAGAGCCAAAGTCTATCGTGCAGATGATGTTAATTTACAAAAACCACTATGGGTAAGTGCTCCCCAAGCAGGAGATAAAAATTACTACAGCGGAAATACTGAAAATCCAAAATCTACATTTTTATATGACACAGAATGGAAAGGAACCACTACTGATGGTATTCCTTTAGAAGATGGAAAATACAAATACGTTTTAACTTATTACTCTGATGTCCCTGGCTCTAAGCCACAACAAATGGTGTTTGATATCACTTTGGATAGACAAGCTCCTACACTAACAACAGCAACTTATGACAAAGATAGACGTATCTTCAAAGCTCGTCCTGCAGTAGAACACGGGGAATCTGATATCTTTAGAGAACAAGTTTTTTACTTAAAAAAAGATAAAGATGGTCATTATAATAGCGTCTTACGTCAAAAAGGAGAAGACGGTATCCTTGTTGAAGATAACAAAGTATTTATCAAACAAGAAAAGGATGGTAGCTTTATTCTACCTAAAGAGGTTAACGATTTCTCTCATGTCTACTACACTGTTGAAGATTATGCAGGCAATCTAGTATCAGCAAAACTCGAAGATTTGATCAATATTGGCAATAAAAATGGTTTAGTAAACGTCAAAGTGTTTAGCCCTGAGCTTAACAGTAATGTCGATATTGATTTCTCTTACTCTGTCAAAGATGACAAAGGTAATGTCATCAAAAAGCAACATCACGGGAAAGACCTCAATTTACTGAAATTGCCTTTTGGTACCTATACGTTTGATCTATTCTTATACGATGAGGAACGAGCAAATCTAATCAGTCCCAAAAGTGTCACTGTAACTATTTCTGAAAAAGATAGCCTTAAAGACGTCTTATTTAAAGTTAACTTACTCAAGAAAGCAGCCTTACTCGTTGAATTTGACAAGCTTTTACCAAAAGGAGCAACAGTCCAGTTGGTTACTAAGACAAATACTGTTGTTGATCTACCAAAAGCAACTTATTCTCCTACTGACTATGGTAAAAACATACCTGTAGGAGACTATCGTTTAAACGTAACTCTGCCTAGTGGGTATAGCACTTTAGAGAACTTAGATGATTTACTTGTATCCGTAAAAGAAGGTCAAGTAAACCTAACAAAATTGACGCTGATTAATAAAGCTCCTCTGATTAATGCCCTAGCAGAACAAACTGACATTATTACCCAACCTGTGTTTTATAATGCTGGAACTCACTTAAAAAATAATTACCTAGCTAATCTTGAAAAGGCACAAACTTTAATTAAAAATAGAGTGGAACAAACAAGTATTGATAATGCTATTGCTGCTTTGAGAGAAAGTCGCCAAGCTCTTAACGGTAAAGAAACAGATACTTCTTTACTGGCAAAAGCTATTTTAGCTGAAACAGAAATCAAGGGAAACTATCAATTTGTTAATGCTAGTCCATTAAGCCAATCAACTTATATCAATCAAGTCCAATTGGCGAAAAACCTTCTACAAAAACCTAACGTCACTCAATCAGAAGTAGACAAAGCCTTAGAAAATCTTGATATTGCTAAAAATCAATTAAATGGTCATGAAACTGATTACTCTGGTTTACACCATATGATAATTAAAGCAAATGTTCTGAAACAAACATCATCTAAATATCAGAACGCCAGTCAATTTGCTAAAGAAAATTATAATAACCTTATCAAGAAAGCAGAATTGCTGCTTTCCAATAGACAAGCTACACAAGCTCAAGTTGAAGAGTTATTAAACCAAATAAAAGCAACCGAACAAGAGCTTGATGGTCGCGATAGAGTTTCTTCCGCAGAGAATTATAGTCAATCACTCAATGATAATGACTCTCTCAATACCACACCTATCAATCCGCCAAATCAGCCCCAGGCGTTGATATTCAAAAAAGGCATGACTAAAGAAAGTGAGGTTGCTCAGAAGCGTGTCTTAGGGGTGACTAGTCAAACCGATAATCAAAAGGTAAAGACAAACAAGCTTCCTAAAACAGGCGAAAGCACTCCTAAAATAACCTATACAATATTGCTATTTAGTCTCTCTATGCTAGGTCTGGCAACAATCAAACTAAAGTCTATCAAAAGAGAA

SEQ ID NO: 12610 - protein, 1571 aa, Streptococcus agalactiae
MNTKQRFSIRKYKLGAVSVLLGTLFFLGGITNVAADSVINKPSDIAVEQQVKDSPTSIANETPTNNTSSALASTAQDNLVTKANNNSPTETQPVAESHSQATETFSPAANQPVESTQEVSKTPLTKQNLAVKPTPAISKETPQNIDSNKIITVPKVWNTGYKGEGTVVAIIDSGLDTNHDALQLNDSTKAKYQNEQQMNAAKAKAGINYGKWYNNKVIFGHNYVDVNTELKEVKSTSHGMHVTSIATANPSKKDTNELIYGVAPEAQVMFMRVFSDEKRGTGPALYVKAIEDAVKLGADSINLSLGGANGSLVNADDRLIKALEMARLAGVSVVIAAGNDGTFGSGASKPSALYPDYGLIGSPSTAREAISVASYNNTTLVNKVFNIIGLENNKNLNNGLAAYADPKVSDKTFEVGKQYDYVFVGKGNDNDYKDKTLNGKIALIERGDITFTKKVVNAINHGAVGAIIFNNKAGEANLTMSLDPEASTIPAIFTQKEFGDVLAQKSYKIVFNNIKNKQANPNAGVLSDFSSWGLTADGQLKPDLSAPGGSIYAAINDNEYDMMSGTSMASPHVAGATALVKQYLLKEHPELKKGDIERTVKYLLMSTAKAHLNKDTGAYTSPRQQGAGIIDVAAAVQTGLYLTGGENNYGSVTLGNIKDKISFDVTVHNINKVAKDLHYTTYLNTDQVKDGFVTLAPQQLGTFTGKTIRIEPGQTKTITIDIDVSKYHDMLKKVMPNGYFLEGYVRFTDPVDGGEVLSIPYVGFKGEFQNLEVLEKSIYKLVANKEKGFYFQPKQTNEVPGSEDYTALMTTSSEPIYSTDGTSPIQLKALGSYKSIDGKWILQLDQKGQPHLAISPNDDQNQDAVAVKGVFLRNFNNLRAKVYRADDVNLQKPLWVSAPQAGDKNYYSGNTENPKSTFLYDTEWKGTTTDGIPLEDGKYKYVLTYYSDVPGSKPQQMVFDITLDRQAPTLTTATYDKDRRIFKARPAVEHGESDIFREQVFYLKKDKDGHYNSVLRQKGEDGILVEDNKVFIKQEKDGSFILPKEVNDFSHVYYTVEDYAGNLVSAKLEDLINIGNKNGLVNVKVFSPELNSNVDIDFSYSVKDDKGNVIKKQHHGKDLNLLKLPFGTYTFDLFLYDEERANLISPKSVTVTISEKDSLKDVLFKVNLLKKAALLVEFDKLLPKGATVQLVTKTNTVVDLPKATYSPTDYGKNIPVGDYRLNVTLPSGYSTLENLDDLLVSVKEGQVNLTKLTLINKAPLINALAEQTDIITQPVFYNAGTHLKNNYLANLEKAQTLIKNRVEQTSIDNAIAALRESRQALNGKETDTSLLAKAILAETEIKGNYQFVNASPLSQSTYINQVQLAKNLLQKPNVTQSEVDKALENLDIAKNQLNGHETDYSGLHHMIIKANVLKQTSSKYQNASQFAKENYNNLIKKAELLLSNRQATQAQVEELLNQIKATEQELDGRDRVSSAENYSQSLNDNDSLNTTPINPPNQPQALIFKKGMTKESEVAQKRVLGVTSQTDNQKVKTNKLPKTGESTPKITYTILLFSLSMLGLATIKLKSIKRE

SEQ ID NO: 12611 - protein, 684 aa, Streptococcus agalactiae
ATGACAAAAATAATTTATTTCGCTGATGATGAAAAGAATATTCGTGACTTGGTGGTTCCTTTTTTAGAACATGATGGTTTCACTGTTCGAGCATTTGAAACTGGAGACCTTCTCTTAGAAGCCTATAAAAACCAAAAACCCGATTTAGTTATATTAGACATAATGATGCCTGGAACTAATGGTTTAGATGTTATGAAAAGCATCCGCCAATATGATAATGTTCCTATTATCATGTTAACAGCTAGAGATTCTGATGTTGATTTCATTACGGCTTTTAATTTAGGAACTGACGATTACTTCACCAAGCCTTTTTCACCTATAAAACTTAGCCTACATGTTAAAGCATTGTTCAAACGCCTTGATGAAAAAGCAATCAAAAATGACACTCAGTATCAGTTCCTAGATTTAACTCTGGATACTGAAAAGCGAATAGCCCTATTATCAAATGAAGAAATGCCCTTAACCAAGACAGAATTTGATTTTCTTTTAGTATTAATTGAAAAACCTGAAACTGCTTTTTCTAGGGAAACACTGCTTAATCGTATTTGGGGATTTGATGATATTGAAAGCAGAGCAGTTGATGACACTATTAAACGATTACGTAAAAAATTTAAGCAATACCACAGTCAAGTTAGTATCAAAACTGTCTGGGGTTACGGCTTCAAATTAATCAAAGAGGACAAA

SEQ ID NO: 12612 - protein, 228 aa, Streptococcus agalactiae
MTKIIYFADDEKNIRDLVVPFLEHDGFTVRAFETGDLLLEAYKNQKPDLVILDIMMPGTNGLDVMKSIRQYDNVPIIMLTARDSDVDFITAFNLGTDDYFTKPFSPIKLSLHVKALFKRLDEKAIKNDTQYQFLDLTLDTEKRIALLSNEEMPLTKTEFDFLLVLIEKPETAFSRETLLNRIWGFDDIESRAVDDTIKRLRKKFKQYHSQVSIKTVWGYGFKLIKEDK

SEQ ID NO: 12613 - protein, 1386 aa, Streptococcus agalactiae
ATGAAAAAGAAAAGTTTAATTAGCAATCTTATCCTTATTAATAGCATCACTCTATTTCTTGGTTTTTACCTCATCTATTTTTCTGTCAACTATGTCATTAAAGACTATGTCCATCAAATGACAAGGAATTCCATGCAGGCGAATTTCACCATTTTAGATAGTATCTATAACAACAAGAAAATACCAGATGAAAATATGGTTAACCAAGATAGCATCTTTGTTTGGTCTTACTATGCTATTTTTGACCAGCATTATCGTATGAAATATGGCACTGATAATCATAAAAAAGAGAGCCATGATATTATTCGCTATCTTACCCAAAAAAGATTGTGGCAAATTTCCAAGGAAAAAGATGGTATGTTTGTAACCATCAAGAAAAAAACCTATTATGTAATGACCAAAGACTACTCTGGTATCCTTGTTGATGGTAGCATAAAAAAAGTTCCTAAAGCACAGTCGCAACTTTTTCATGTGATTAACTTTTCAGACATTACTTACACCCAGCATCTAATTACTAAAATTAATCATTTTCTTATAGTTATCTTAGTACTAACCTATATTCCCATGCTATTTATTATGAGGAAGACTTTCACTGGAATTAGAGAATCTATTCAATCAGTACAAACTTATATTTCCAGCCTTTGGAAAAATCAAGGCAATCATCAATCTAGTCAAAAAGAAATTGTCTTTTCTGATTTCGATCCTCTTCTACTTGAGAGCCAAGAAATGGCAAATCGAATCTACCAGGCAGAAGAGAGCCAAAGAAACTTCTTTCAAAATGCCTCCCACGAGTTACGGACACCTTTAATGTCCATCCAAGGATATACTGAGGGAGTTCAAGAGGGTATTATTGATGCCGAGCTCGCACACTCTGTTATTCTGCAAGAGAGCAAAAAAATGAAACAGCTCGTAGACGATATTATCTTACTCTCTAAATTAGACAGTAACTTAAGTGATCAAAAAGATGAATTTTCTTTAAATGAATTACTTAATAGTATTATTGCTTATTTCAAACCCCTAGCTAATAAACAAAAAATTAGTATCACTTATAGACCAGACGAGCATGAAAAGTTACTAAAAGGTAACGAAGAGTTGATTCAACGAGCTATCAATAATATCCTTAGTAACGCACTACGCTATGCTGTTTCTCATATTGAAATCTCTTACACAAATCAAAAACTGACTATCTCAAACGACGGACCAGCCATTTCAAAAGAAGACTTACCTTATATTTTCGATCGCTTCTATAAAGGACATGGCGGCCAAACAGGTATTGGACTTGCAATGACTAAAGAAATTATCAAGCAACATCATGGTAATATCATCGCTGAGAGTGATTCAACCTCAACAACTTTTACGATTTATTTCAATTGCCACAAAATTGCC

SEQ ID NO: 12614 - protein, 462 aa, Streptococcus agalactiae
MKKKSLISNLILINSITLFLGFYLIYFSVNYVIKDYVHQMTRNSMQANFTILDSIYNNKKIPDENMVNQDSIFVWSYYAIFDQHYRMKYGTDNHKKESHDIIRYLTQKRLWQISKEKDGMFVTIKKKTYYVMTKDYSGILVDGSIKKVPKAQSQLFHVINFSDITYTQHLITKINHFLIVILVLTYIPMLFIMRKTFTGIRESIQSVQTYISSLWKNQGNHQSSQKEIVFSDFDPLLLESQEMANRIYQAEESQRNFFQNASHELRTPLMSIQGYTEGVQEGIIDAELAHSVILQESKKMKQLVDDIILLSKLDSNLSDQKDEFSLNELLNSIIAYFKPLANKQKISITYRPDEHEKLLKGNEELIQRAINNILSNALRYAVSHIEISYTNQKLTISNDGPAISKEDLPYIFDRFYKGHGGQTGIGLAMTKEIIKQHHGNIIAESDSTSTTFTIYFNCHKIA

SEQ ID NO: 12615 - protein, 606 aa, Streptococcus agalactiae
ATGTTACATTCTAAAAAAATACATTCCTTATCGCTTATTGCCGTTCTCTCTTTAGCAACATATACGAGTTTACAACCAAATCATGTAACGGCTGAACAATCACAAAAAACATCAACTGTTCATATGAGTCAAAAAACTATTGAACATAAGTTAAAAGTTGCAGATAAAGAAGCTGCTCCTCTCTACGCTAAAATCGACCATATCCAACGACATATTGAAGTCAAAAAAGCAAAAGATTTAAAAGTTATTGAATTGTATATTAACAAAGATATCAACCAACTAGAGAAGCAAAATAAACGTCTACTAACTAAATTCTATACTTCTATTGATAATCAAACATGGGATAGCACAAGTGAGGTCAAAAAATTGATTGATAAGACAAACCTATCCACTAACGAAAAAAATAGATTAAAATTATATTTTGAACAACGTGCTTACCTTGAGACAAGGTTGAACGACCGCTATCAAAAATTTGATAACTCTATTGAAAACCAAAATAAAGAACTAAAAATATTAACGTCAAAAATCGAAAAAATCTATCAAAAACATGGTATTACAAAAGAGGTATTAAAAACTTACTATGCTAAAAAAACAGTACGAGCTGAC

SEQ ID NO: 12616 - protein, 202 aa, Streptococcus agalactiae
MLHSKKIHSLSLIAVLSLATYTSLQPNHVTAEQSQKTSTVHMSQKTIEHKLKVADKEAAPLYAKIDHIQRHIEVKKAKDLKVIELYINKDINQLEKQNKRLLTKFYTSIDNQTWDSTSEVKKLIDKTNLSTNEKNRLKLYFEQRAYLETRLNDRYQKFDNSIENQNKELKILTSKIEKIYQKHGITKEVLKTYYAKKTVRAD

SEQ ID NO: 12617 - protein, 102 aa, Streptococcus agalactiae
ATGCTAAAAAAACAGTACGAGCTGACTGATTTAGCTAAAAATAGAAAAATCCCAAAAGTTCATAAACTTTTGGGATTTTATACGCGTAAATATCACTATTTC

SEQ ID NO: 12618 - protein, 34 aa, Streptococcus agalactiae
MLKKQYELTDLAKNRKIPKVHKLLGFYTRKYHYF

SEQ ID NO: 12619 - protein, 2228 aa, Streptococcus agalactiae
ATGGATACTGGTAATGACCCAGCCGAGTTTACAGCTGAAAACATCGCTAACTTTAAGCGCCAGATTAACGCTCTTGGCTTCTCATACGACTGGGATCGCGAAGTCAACACAACTGACCCTAACTACTACAAGTGGACACAGTGGATCTTTACTAAGCTTTATGAAAAAGGCCTAGCCTATGAAGCTGAAGTTCCCGTTAACTGGGTTGAAGAATTGGGAACGGCCATCGCCAACGAAGAGGTTCTTCCAGATGGCACATCAGAACGTGGCGGCTACCCAGTTGTCAGAAAACCAATGCGCCAATGGATGCTCAAAATCACTGCCTATGCAGAGCGCTTGCTAGAAGACTTGGAAGAAGTTGACTGGCCAGAATCAATTAAGGACATGCAACGCAACTGGATTGGTAAATCAACTGGTGCCAATGTAACCTTCAAGGTTAAGGATACAGATAAGGACTTCACTGTCTTCACAACACGTCCTGACACCCTTTTTGGTGCAACTTACGCAGTTCTTGCTCCTGAACATGCCTTGGTTGATGCTATTACAACAGCTGACCAAGCAGAAGCTGTTGCCGAATACAAACGTCAAGCAAGTCTTAAATCAGATCTTGCCCGTACAGACCTTGCTAAAGAAAAAACAGGTGTCTGGACAGGTGCCTATGCTATTAACCCAGTTAATGGTAAAGAAATTCCAGTTTGGATTGCGGACTATGTCCTTGCCAGCTACGGTACAGGTGCTATCATGGCTGTTCCAGCCCACGATGAACGTGACTGGGAATTCGCAAAACAATTTAAGCTAGACATCATTCCAGTTCTTGAAGGTGGTAATGTTGAAGAGGCTGCCTTTACAGAAGACGGTCTTCACATCAACTCAGACTTCCTAGATGGTCTCGATAAAGCGTCAGCTATTGCCAAAATGGTCGAATGGCTTGAAGCAGAAGGTGTTGGTAATGAGAAAGTCACTTACCGTCTCCGCGACTGGCTCTTCAGCCGTCAACGTTACTGGGGTGAGCCAATCCCAATCATCCACTGGGAAGATGGGACATCAACAGCGGTTCCTGAGAGTGAATTGCCACTGGTTCTTCCAGTAACCAAGATATCCGTCCTTCAGGTACTGGTGAGAGCCCACTTGCTAACTTGACAGACTGGTTGGAAGTGACTCGTGAAGATGGTGTTAAAGGTCGTCGTGAGACTAACACCATGCCACAATGGGCAGGTTCAAGCTGGTACTATCTCCGTTACATTGATCCACACAACACCGAAAAACTGGCTGATGAGGAACTTCTCAAACAATGGTTGCCAGTTGATATCTATGTCGGTGGTGCAGAGCATGCCGTGCTTCACCTTCTCTACGCTCGCTTCTGGCACAAGGTTCTTTACGATCTCGGTGTCGTACCTACCAAAGAGCCATTCCAAAAACTCTTTAACCAAGGGATGATTTTGGGAACAAGCTACCGCGACAGCCGTGGTGCACTTGTGGCAACTGACAAGGTTGAAAAACGTGATGGTAGCTTCTTCCATGTGGAAACTGGGGAAGAGCTTGAACAAGCACCAGCTAAGATGTCTAAATCACTTAAGAACGTTGTCAACCCAGATGATGTTGTTGAACAGTACGGTGCTGACACCCTTCGTGTTTACGAGATGTTCATGGGACCACTTGACGCTTCAATCGCTTGGTCTGAGGAAGGTCTTGAAGGCTCACGTAAGTTCTTGGACCGTGTTTACCGTTTGATCACGACTAAAGAGATTACTAAGGAAAATAGCGGAGCCCTTGACAAGGTTTACAACGAAACCGTTAAGGCTGTTACTGAGCAAGTTGACCAAATGAAATTCAACACAGCTATCGCTCAGCTCATGGTCTTTGTCAATGCAGCTAACAAGGAAGACAAACTCTTTAGCGACTATGCCAAAGGCTTTGTTCAATTGATTGCACCATTCGCACCACACTTAGGTGAGGAGCTCTGGCAAGTCTTGACAGCCTCAGGTGAGTCAATCTCTTACGTGCCATGGCCAAGCTATGACGAAAGTAAATTGGTTGAAAACGAAATTGAAATCGTTGTCCAAATCAAAGGTAAGGTCAAAGCTAAACTTGTAGTTGCTAAAGACCTTTCACGCGAAGAATTACAAGATCTTGCCCTTGCTAACGAAAAAGTCCAATCCGAAATCGCTGGCAAAGACATCATCAAAGTCATCGCAGTACCAAACAAACTGGTTAATATTGTGGTGAAA

SEQ ID NO: 12620 - protein, 743 aa, Streptococcus agalactiae
MDTGNDPAEFTAENIANFKRQINALGFSYDWDREVNTTDPNYYKWTQWIFTKLYEKGLAYEAEVPVNWVEELGTAIANEEVLPDGTSERGGYPVVRKPMRQWMLKITAYAERLLEDLEEVDWPESIKDMQRNWIGKSTGANVTFKVKDTDKDFTVFTTRPDTLFGATYAVLAPEHALVDAITTADQAEAVAEYKRQASLKSDLARTDLAKEKTGVWTGAYAINPVNGKEIPVWIADYVLASYGTGAIMAVPAHDERDWEFAKQFKLDIIPVLEGGNVEEAAFTEDGLHINSDFLDGLDKASAIAKMVEWLEAEGVGNEKVTYRLRDWLFSRQRYWGEPIPIIHWEDGTSTAVPESELPLVLPVTKDIRPSGTGESPLANLTDWLEVTREDGVKGRRETNTMPQWAGSSWYYLRYIDPHNTEKLADEELLKQWLPVDIYVGGAEHAVLHLLYARFWHKVLYDLGVVPTKEPFQKLFNQGMILGTSYRDSRGALVATDKVEKRDGSFFHVETGEELEQAPAKMSKSLKNVVNPDDVVEQYGADTLRVYEMFMGPLDASIAWSEEGLEGSRKFLDRVYRLITTKEITKENSGALDKVYNETVKAVTEQVDQMKFNTAIAQLMVFVNAANKEDKLFSDYAKGFVQLIAPFAPHLGEELWQVLTASGESISYVPWPSYDESKLVENEIEIVVQIKGKVKAKLVVAKDLSREELQDLALANEKVQSEIAGKDIIKVIAVPNKLVNIVVK

SEQ ID NO: 12621 - protein, 537 aa, Streptococcus agalactiae
GTGACTTCCTTTAAACTCCTTTCTCTGATTAAACAACTTAATCAAGGTTTATCTTATAGTGGTGCTAGCTTGAGACGTCCAACCGATTTTACAGTTGCTGCTGCCTTTAATCCTAATGTGAAAAACCTTACTCGAACCGTAAAATTGATTGAGAAAAAAGTAGCTTCTGGTGCTGATTATTTTATGACACAACCAATATTTGATCACTCTGTGTTAAAGGAATTAGCTGATCTTACTAAAACAGTTGAACAACCCTTTTTTATCGGAATTATGCCAATAACAAGTTATAATAACGCTGTTTTTCTACACAATGAAGTTCCTGGTATTAAACTTTCTGAGTCATTTTTATCTGCTCTTGAAAAGGTAAAGGACGACAAAGAAGCTTGTTTAACTTTGGCCTTAAACGAGAGTAAGTCCTTGATTGATGAAGCCTTGAACTATTTTAATGGTATCTATTTGATTACTCCCTTTTTACGCTATGATCTGACTCTTGAGTTAATTGACTATATACAAAAAAAGCAAGTAAGAAAGTCCTCT

SEQ ID NO: 12622 - protein, 179 aa, Streptococcus agalactiae; identical to SEQ ID NO: 3692

SEQ ID NO: 12623 - protein, 1245 aa, Streptococcus agalactiae
ATGTCACCATTAAATATCAATAAGAATAATTGGCGCGCCCTAATCGCTGCCATTGTCGCATCCGGGACCGATGATTTAAATATCATGTTCCTTGCATTTTCTATGTCAACTATCATTACTGATCTTCATTTATCTGCGGCACAGGCTGGTTGGATTGGGACAATTACCAACTTGGGAATGCTCGTGGGAGGACTAATATTTGGTTTATTAGCTGATCGCTACAATAAATTTAAAGTTTTCAAATGGACGATTCTAATCTTTTCAATCGCAACTGGTTTAGTTTTCTTCACTACTAATTTATCATATCTCTATATCATGCGCTTCATTGCAGGAATTGGTGTTGGTGGCGAATATGGTATCGCTATTGCCATTATGGCAGGAATTGTCCCAGCTAATAAAATGGGCCGGATTTCTTCACTAAATGGTATAGCTGGTCAAGTTGGATCTATTAGCTCAGCACTCTTAGCAGGATGGCTAGCCCCAGCACTCGGTTGGCGGGGACTTTTTCTCTTTGGCCTTCTCCCTATAGTTCTCGTCCTATGGATGCAATTTGCTATTGATGATAAAGATATCTTAGATCAATATAATACAGACGCAGATGATGAACCTCTAGATATCAGTATAAAAGCTTTATTTGATACTCCTGTATTAGCCACACAGAGCCTAGCACTAATGGTTATGACAACTGTTCAGATTGCCGGATTCTTTGGCATGATGAACTGGTTACCAACTATTATCCAAACCAACTTAAACGTTTCTGTCAAGAATTCATCATTATGGATGATTGCAACCATTCTTGGAATGTGCCTTGGCATGCTAGTATTTGGTCAATTGTTAGATAAATTTGGACCGCGTTTAGTATACGGGTGTTTCCTTCTATCATCTGCAATTTGTGTCTATCTCTTTCAATTTGCAACAACAATGCCTTCTATGATTATAGGCGGGGCAGTTGTCGGATTCTTTGTTAATGGTATGTTTGCAGGCTATGGTGCCATGATTACACGTCTCTATCCACATCATATTCGTTCAACAGCTAACAATCTTATCTTAAATGTTGGTCGTGCAATAGGTGGCTTTTCGTCTGTTATCATCGGAATGATTCTAGACGTTTCAAATGTCTCTATGGTCATGCTTTTCTTAGCAAGTCTCTATATCGTTAGTTTCTTATCAATGCTAAGCATTAAGCAATTAAAACATCAAAAATATCACACTAATTTAACACAATTAGATGTCAAACCAACTGAC

SEQ ID NO: 12624 - protein, 415 aa, Streptococcus agalactiae
MSPLNINKNNWRALIAAIVASGTDDLNIMFLAFSMSTIITDLHLSAAQAGWIGTITNLGMLVGGLIFGLLADRYNKFKVFKWTILIFSIATGLVFFTTNLSYLYIMRFIAGIGVGGEYGIAIAIMAGIVPANKMGRISSLNGIAGQVGSISSALLAGWLAPALGWRGLFLFGLLPIVLVLWMQFAIDDKDILDQYNTDADDEPLDISIKALFDTPVLATQSLALMVMTTVQIAGFFGMMNWLPTIIQTNLNVSVKNSSLWMIATILGMCLGMLVFGQLLDKFGPRLVYGCFLLSSAICVYLFQFATTMPSMIIGGAVVGFFVNGMFAGYGAMITRLYPHHIRSTANNLILNVGRAIGGFSSVIIGMILDVSNVSMVMLFLASLYIVSFLSMLSIKQLKHQKYHTNLTQLDVKPTD

SEQ ID NO: 12625 - protein, 162 aa, Streptococcus agalactiae
ATGAGCCTTGAAAAAACAGGCGATCTATTTGCAATTAGACCAAGTAAGAGCTTGGTTATTGGCCGCTTAGAGAAGAATCCGGATAAACTTGATAGTATTTATCAGCTTGGTATGAAAGATGCTAAAAGTGGGATGCCTGAGCTGAATAGTTATCTAATGAAA

SEQ ID NO: 12626 - protein, 54 aa, Streptococcus agalactiae
MSLEKTGDLFAIRPSKSLVIGRLEKNPDKLDSIYQLGMKDAKSGMPELNSYLMK

SEQ ID NO: 12627 - protein, 487 aa, Streptococcus agalactiae
ATGTTGTCTGTTGGTTTAGTTTTAGAGGGTGGCGGAATGAGAGGTCTTTATACTGCTGGAGTTTTAGATGCTTTTCTAGATGCAGGAATAAAAGTAGATGGTATCATATCTGTCTCTGCTGGTGCATTGTTTGGTGTTAATTTTGTATCTAGACAACGAGAGAGGGCTTTGCGATACAATAAAAAGTATTTATCCCACCCTAAATATATGAGTCTAAGGTCATGGCTTCGAACAGGGAATTTTGTTAATAAAGATTTCACCTATTATGAAGTTCCTATGAAATTGGATGTATTTGACGATGAAGCATTTAAAAAATCAAGTATTGATTTTTACGCAGTTGCTACAGAGATGACATCTGGTAAACCTGAGTATTTTAAAATTGATAGTGTTTTTGAACAATGGAAATTTTACGTGCTAGTTCAGCATTACCAGTAGTCTCAAAGATGGTTGTTTTGCAGGGGAAAAAGTACTTAAATGGTGGTTTATC

SEQ ID NO: 12628 - protein, 163 aa, Streptococcus agalactiae
MLSVGLVLEGGGMRGLYTAGVLDAFLDAGIKVDGIISVSAGALFGVNFVSRQRERALRYNKKYLSHPKYMSLRSWLRTGNFVNKDFTYYEVPMKLDVFDDEAFKKSSIDFYAVATEMTSGKPEYFKIDSVFEQMEILRASSAFTSSLKDGCFAGEKVLKWWFI

SEQ ID NO: 12629 - protein, 536 aa, Streptococcus agalactiae
ATGTTAGATTCTTTTGATAAGGGTTGGTTTGTACTCCAAACCTACTCAGGTTATGAAAATAAAGTAAAGGAAAATCTCTTGCAACGTGCGCAAACTTATAATATGTTAGACAACATTTTGCGTGTGGAAATCCCTACCAAACTGTAAATGTTGAGAAAAATGGGAAAACAAAAGAAATTGAAGAAAATCGCTTCCCAGGTTATGTACTTGTGGAAATGGTAATGACTGATGAAGCCTGGTTTGTTGTTCGTAATACTCCAAACGTTACTGGATTTGTTGGATCACACGGCAATCGCTCTAAACCAACACCGTTGTTAGAAGAAGAGATTCGTTCAATACTCATCTCAATGGGACAAACCGTTGATGTCTTTGATACTAATATCAAGGAAGGTGATGTTGTTCAAATCATTGATGGTGCTTTCATCGGACAAGAAGGACGTGTAGTTGAGATTGAGAATAACAAAGTTAAATTAATGATCAACATGTTCGGCTCAGAAACACAAGCAGAACTTGAGTTGTACCAAGTTGCAGAATTA

SEQ ID NO: 12630 - protein, 179 aa, Streptococcus agalactiae; identical to SEQ ID NO: 3722

SEQ ID NO: 12631 - protein, 924 aa, Streptococcus agalactiae
ATGAAGCAAAAAAAAATGCTTGATGAAGTCAAAAAGCTTTTAAAAGAACTTCAAGACCTTACCAGAGGTACTAAAGAAGATAAAAAACCAGACGTTAAGCCAGAAGCCAAACCAGAGGCCAAACCAAATATTCAAGTACCTAAACAAGCACCTACAGAAGCTGCAAAACCAGCTTTGTCACCAGAAGCCTTGACAAGATTGACTACATGGTATAATCAAGCTAAAGATCTGCTTAAAGATGATCAAGTAAAGGACAAATATGTAGATATACTTGCAGTTCAAAAAGCTGTTGACCAAGCTTATGATCATGTGGAAGAGGGAAAATTTATTACCACTGATCAAGCAAATCAATTAGCTAACAAGCTACGTGATGCTTTACAAAGTTTAGAATTAAAAGATAAAAAAGTAGCCAAACCAGAGGCTAAGCCAGAAGTTAAACCAGACGTTAAGCCAGAGGCCAAACCAGACGTTAAGCCAGAAGCCAAACCAGACGTTAAGCCAGAAGTTAAACCAGACGTTAAGCCAGAGGCCAAACCAGACGTTAAGCCAGAAGCTAAGCCAGACGTTAAGCCAGAAGTTAAACCAGAGGCTAAGCCAGAAGTTAAACCAGACGTTAAGCCAGAGGCCAGACCAGAGGCTAAGCCAGAAGTTAAACCAGACGTTAAGCCAGAGGCCAAACCAGAGGCTAAGCCAGAAGTTAAACCAGACGTTAAGCCAGAGGCTAAACCAGAAGCCAAACCAGCAACCAAAAAATCGGTTAATACTAGCGGAAACTTGGCGGTTAAAAAAGCTATTGAAAACAAAAAGTATAGTAAAAAATTACCATCAACGGGTGAAGCCGCAAGTCCACTCTTAGCAATTGTATCACTAATTGTTATGTTAAGTGCAGGTCTTATTACGATAGTTTTAAAGCATAAAAAAAAT

SEQ ID NO: 12632 - protein, 308 aa, Streptococcus agalactiae
MKQKKMLDEVKKLLKELQDLTRGTKEDKKPDVKPEAKPEAKPNIQVPKQAPTEAAKPALSPEALTRLTTWYNQAKDLLKDDQVKDKYVDILAVQKAVDQAYDHVEEGKFITTDQANQLANKLRDALQSLELKDKKVAKPEAKPEVKPDVKPEAKPDVKPEAKPDVKPEVKPDVKPEAKPDVKPEAKPDVKPEVKPEAKPEVKPDVKPEARPEAKPEVKPDVKPEAKPEAKPEVKPDVKPEAKPEAKPATKKSVNTSGNLAVKKAIENKKYSKKLPSTGEAASPLLAIVSLIVMLSAGLITIVLKHKKN

SEQ ID NO: 12633 - protein, 1413 aa, Streptococcus agalactiae
ATGAATAATAACGAAAAAAAAGTAAAATACTTTTTAAGAAAAACAGCTTATGGTTTGGCCTCAATGTCAGCAGCGTTTGCTGTATGTAGTGGTATTGTACACGCGGATACTAGTTCAGGAATATCGGATTCAATTCCTCATAAGAAACAAGTTAATTTAGGGGCGGTTACTCTGAAGAATTTGATTTCTAAATATCGTGGTAATGACAAAGCTATTGCTATACTTCTAAGTAGAGTAGATGATTTTAATAGAGCATCACAGGATACACTTCCACAATTAATTAATAGTACTGAAGCAGAAATTAACAATACTTTACCTCAGGGACGAATTATTAAACAGAGTATACCAGTCGTAAGATTAAAAGTTGAGAGATTGGGAAGTGGTGCAATTAAGGCTGAGTCGATTAATAATATTAAAGCTGAATCAATTAATAAAATTCAGGGTAAATCAACTAATACAATTAAGGCTGAGTCCATTAATAAAATTAAAGTAGAGTCTATTAATACAATCAAAGCCGAATCAATTAATAAAATTCAAGCTAAGCCAATTAACACAATCAAAGCCGAGTCTATTAATACAATTAAGGCTGAATCAATTCATAAAATTAAACCTCAATCAATAAAAAGTACTAGTGCTACACATGTTAAAGTTAGTGATCAAGAACTAGCTAAGCAGTCAAGACGTTCTCAAGATATCATTAAATCATTAGGTTTCCTTTCATCAGACCAAAAAGATATTTTAGTTAAATCTATTAGCTCTTCAAAAGATTCGCAACTTATTCTTAAATTTGTAACACAAGCCACGCAACTGAATAATGCTGAATCAACAAAAGCTAAGCACATGGCTCAAAATGACGTGGCTTCAATAAAAAATATAAGCCTCGAAGTCTTAGAAGAATATAAAGAAAAAATTCAAAGAGCTAGCACTAAGAGTCAAGTTGATGAGCTTGTAGCAGAAGCTAAAAAAGTTGTTAATTCCAATAAAGAAACATTGGTAAATCAGGCCAATGGTAAAAAGCAAGAAATTGCTAAGTTAGAAAATTTATCTAACGATGAAATGTTGAGATATAATACTGCAATTGATAATGTAGTGAAACAGTATAATGAAGGTAAGCTCAATATTACTGATGCAATGAATGCTTTAAATAGTATTAAGCAAGCAGCACAGGAAGTTGCCCAGAAAAACTTACAAAAGCAGTATGCTAAAAAAATTGAAAGAATAAGTTTAAAAGGATTAGCGTTATCCAAAAAGGCTAAAGAAATTTATGAAAAGCATAAAAGTATTTTGCCTACACCTGGATATTATGCAGACTCTGTGGGAACTTATTTGAATAGGTTTAGAGATAAACGAACTTTCGGAAATAGAAGTGTTTGGACTGGTCAAAGTGGACTTGATGAAGCAAAAAAAAATGCT

SEQ ID NO: 12634 - protein, 471 aa, Streptococcus agalactiae
MNNNEKKVKYFLRKTAYGLASMSAAFAVCSGIVHADTSSGISDSIPHKKQVNLGAVTLKNLISKYRGNDKAIAILLSRVDDFNRASQDTLPQLINSTEAEINNTLPQGRIIKQSIPVVRLKVERLGSGAIKAESINNIKAESINKIQGKSTNTIKAESINKIKVESINTIKAESINKIQAKPINTIKAESINTIKAESIHKIKPQSIKSTSATHVKVSDQELAKQSRRSQDIIKSLGFLSSDQKDILVKSISSSKDSQLILKFVTQATQLNNAESTKAKHMAQNDVASIKNISLEVLEEYKEKIQRASTKSQVDELVAEAKKVVNSNKETLVNQANGKKQEIAKLENLSNDEMLRYNTAIDNVVKQYNEGKLNITDAMNALNSIKQAAQEVAQKNLQKQYAKKIERISLKGLALSKKAKEIYEKHKSILPTPGYYADSVGTYLNRFRDKRTFGNRSVWTGQSGLDEAKKNA

SEQ ID NO: 12635 - protein, 171 aa, Streptococcus agalactiae; identical to SEQ ID NO: 8435

SEQ ID NO: 12636 - protein, 57 aa, Streptococcus agalactiae; identical to SEQ ID NO: 3726

SEQ ID NO: 12637 - protein, 2319 aa, Streptococcus agalactiae
ATGAAATTATTTGATAAGTTTATAGACTTATTTCGTGTTGACGAAGACAACGACGAAATGACAAGAAAAAATGAACAAGAAACTAGAGAAGAAACTAGTAATTTGGATGGCGAAGAAGTCTATGATATTGATGATATTACCCGACCTAGTAAATCCCAGTATCAGCGAGGCATTCGTCACCAAAAGAAAAATGCTAAATCTCGACCTGAATGGCTACAAAAAGTTGATCGTTACCTCCCTTCTCCTAAGAATCCTATCCGTCGTTTTTGGCGGCGCTATCGTATTGGGAAGTTGCTTTTTATCGCCTTAATGGCTTTTATTCTTATATTTGGTAGCTATCTTTTTTATCTTTCTAAAACTGCTACAGTTAGTGATTTACAGAGTGCTCTAAAAACAACTACCACCATTTATGATAAGAATAAAGAATACGCTGGAAAACTTTCGGGACAAAAGGGAACTTATGTAGAGTTAAATGCTATTTCTGATCATCTCAAAAATGCTGTTATAGCAACTGAAGATAGAACTTTTTATGAAAATAATGGTGTAAACTTTAAGCGATTTTTTTTGGCAGTAGCTACACTTGGGAAATTTGGCGGAGGCTCAACTATTACCCAGCAATTAGCAAAAAATGCTTACTTGTCACAGGACCAAACGATTAAACGCAAGGCGCGTGAATTCTTTTTAGCGCTAGAATTGACTAAGAAATATAGCAAGGCTGAGATTCTGACCATTTATCTTAATAACTCTTATTTTGGTAATGGTGTTTGGGGTGTGGAAGATGCTAGTAGGAAATATTTTGGAACCAGTGCTGCTAATTTGACAGTAGATGAGGCTGCTACACTTGCTGGAATGCTTAAAGGGCCAGAAGTTTATAATCCTTATTATTCTGTTGAAAATGCAACTAACCGAAGAGATACTGTTTTGGCAGCGATGGTTGATGCAGGTAAACTAACCAAGTCTCAAGCTAAAGAAGCTGCTTCAATTGGTATGAAAAATAGATTAGCAGATACCTATGCTGGTAAAATTAATGATTACAGGTACCCATCCTATTTTGATGCTGTTGTCAATGAAGCCATTGATACTTATGGTATTTCAGAAAAAGATATTGTCAATAATGGCTATAAGATTTACACTGCATTAGATCAAAATTATCAATCAGGAATGCAAAAAACATTTGATGATACTAGCCTCTTCCCTGTATCTGACTATGATGGTCAATCTGCCCAAGGTGCTAGCGTAGCTTTAGATCCAAAAACTGGTGGTGTAAGAGGTTTAGTTGGACGTGTTCAAAGTACTAAAGATGCACAGTTTAGAAGTTTTAACTACGCGACTCAATCAAAGAGAAGTCCAGCCTCAACCATAAAACCTTTAGTTGTTTATTCACCAGCTATTGCTTCAGGATGGTCAATAGATAAAGAACTTCCTAATAAAGTTCAAGATTTTCATGGTTATAAACCAAGTAACTATGGTGGGATTGAGACTGAAAGTATCCCGATGTATCAAGCACTAGCTAATTCTTATAATATTCCTGCTGTTTATACTTTAGACAAACTAGGAATCAATAAAGCCTTTACTTATGGCAGGAAGTTTGGTCTAAATATGTCATCAGCAAACAAAGAGCTAGGAGTGGCGCTAGGTGGAAGTGTAACCACTAATCCTTTAGAAATGGCACAAGCTTACTCAACTTTTGCAAATGACGGTATAATGCATCGCGCTCATTTGATTACTCGAATTGAGACAGCTAATGGAAAATTAGTAAAGCAATTTACAGATAAGCCTAAGCGAGTTATTAGTCGCTCAGTGGCTAGTAAAATGACTAGTATGATGTTAGGAACATTCTCAAATGGTACAGCTATTAATGCCAATGTTTATGGTTATACAATGGCAGGTAAAACTGGAACAACCGAAACAGATTTTAACCCCAATTTGTCTGGAGACCAGTGGGTAGTCGGCTATACGCCTGATGTCGTTATTAGTCAATGGGTTGGGTTTAAGAAGACAGATAAACACCATTATTTGACAGATTCTAGTGCAGGTACAGCTTCAAATATATTTAGCACTCAAGCTTCATATATACTACCGTATACTAAGGGGTCTAGTTTTACTCATATTGAGAATGCTTATTTCCAAAACGGTATTGGTTCAGTTTATAATGCACAAGATGCTAGTAATACAACGAACCAAGAATCACGCTCAATTATTAATGATTTAAAAGATTCGGCAAGTAAGGCTGCACAAGATATTTCTAGAGCGGTGGAAGATTCAAATTTCCAAGAGAAGGTAAAAGATGCTTGGAATAGTCTAAAGGACTACTTTAGA

SEQ ID NO: 12638 - protein, 773 aa, Streptococcus agalactiae
MKLFDKFIDLFRVDEDNDEMTRKNEQETREETSNLDGEEVYDIDDITRPSKSQYQRGIRHQKKNAKSRPEWLQKVDRYLPSPKNPIRRFWRRYRIGKLLFIALMAFILIFGSYLFYLSKTATVSDLQSALKTTTTIYDKNKEYAGKLSGQKGTYVELNAISDHLKNAVIATEDRTFYENNGVNFKRFFLAVATLGKFGGGSTITQQLAKNAYLSQDQTIKRKAREFFLALELTKKYSKAEILTIYLNNSYFGNGVWGVEDASRKYFGTSAANLTVDEAATLAGMLKGPEVYNPYYSVENATNRRDTVLAAMVDAGKLTKSQAKEAASIGMKNRLADTYAGKINDYRYPSYFDAVVNEAIDTYGISEKDIVNNGYKIYTALDQNYQSGMQKTFDDTSLFPVSDYDGQSAQGASVALDPKTGGVRGLVGRVQSTKDAQFRSFNYATQSKRSPASTIKPLVVYSPAIASGWSIDKELPNKVQDFHGYKPSNYGGIETESIPMYQALANSYNIPAVYTLDKLGINKAFTYGRKFGLNMSSANKELGVALGGSVTTNPLEMAQAYSTFANDGIMHRAHLITRIETANGKLVKQFTDKPKRVISRSVASKMTSMMLGTFSNGTAINANVYGYTMAGKTGTTETDFNPNLSGDQWVVGYTPDVVISQWVGFKKTDKHHYLTDSSAGTASNIFSTQASYILPYTKGSSFTHIENAYFQNGIGSVYNAQDASNTTNQESRSIINDLKDSASKAAQDISRAVEDSNFQEKVKDAWNSLKDYFR

SEQ ID NO: 12639 - protein, 975 aa, Streptococcus agalactiae
TTGTCTTCGTCAACACGAAATAAGTCTATAAACTTATCAAATAATTTCATAGACTTATTATATCAATTTTCAATAAAATGCTATAATAAAACCATGTCATTTTCATTAAAAATTAGAAATCCATACGGTGAACATACCGTTAAAGAACTCCTTGAAGATTATTTTTTGATTCCACGTAAGATTAGACATTTTTTGCGTGTTAAAAAACATGTACTTATAAACAATGAATTCATTAATTGGCAAACTGTCGTCCAAGAAAACGATACTATTACCTTAATCTTTGATGATGAGGATTACCCTACTAAAAAAATTCCTCTGGGCAGAGCAGAGCTTATTGATTGTCTTTATGAGGATGAACATCTTATTATCGTTAATAAACCTGAAGGTATGAAAACTCACGGTAACCAACCAAATGAAATAGCACTGTTAAATCATGTATCTGCCTATTCTGGACAAACATGCTATGTTGTTCATCGCCTAGATATGGAGACCAGTGGAGCTGTTTTATTTGCTAAAAATCCATTTATACTTCCCCTTATCAATCAACGCTTAGAACGAAAAGAAATTTGGCGTGAATATTGGGCTTTAGTTGAAGGAAAATTTTCACCTAAGCATCAAGTCTTGAGAGACAAAATTGGACGGAACCGTCATGACAGACGTAAACGAATCATTGATTCTAAAAACGGTCAACATGCTATGACAATCATTGACGTTTTGAAGTATACCCAAAATAGTAGTCTCATAAAATGCCGACTGGAAACCGGAAGAACCCATCAAATTCGCATTCACTTATCTCATCACGGACATCCTTTAATAGGAGATCCCCTCTACAACCCTTCTTCTAATAATGAAAGGTTAATGCTACACGCTCACCGATTGACTCTATCTCATCCACTAACTTGCGAAACTATTAGCGTAGAGGCCCCTTCATCTACTTTCGAGAAGATTTTAAACAATTATAAAAAAGGAGTTGGA

SEQ ID NO: 12640 - protein, 325 aa, Streptococcus agalactiae
MSSSTRNKSINLSNNFIDLLYQFSIKCYNKTMSFSLKIRNPYGEHTVKELLEDYFLIPRKIRHFLRVKKHVLINNEFINWQTVVQENDTITLIFDDEDYPTKKIPLGRAELIDCLYEDEHLIIVNKPEGMKTHGNQPNEIALLNHVSAYSGQTCYVVHRLDMETSGAVLFAKNPFILPLINQRLERKEIWREYWALVEGKFSPKHQVLRDKIGRNRHDRRKRIIDSKNGQHAMTIIDVLKYTQNSSLIKCRLETGRTHQIRIHLSHHGHPLIGDPLYNPSSNNERLMLHAHRLTLSHPLTCETISVEAPSSTFEKILNNYKKGVG

SEQ ID NO: 12641 - protein, 1638 aa, Streptococcus agalactiae
ATGTTTGATTTTTTTAAGAAAAAAGTTGTTAAAGTGTGCTTAGTTATTTTTGGTATAGTTTTAGTATCACTTCTGAGTCTAGGATTCTTTTATTTTTCAAAGGGACAAGTACTTAGTCGTTTTGTAGCAGCACGTTCTCGTACGTCAGGTCAAGCGTTTGATAATATTAAAGAATACATGGTTTGGTCAGATACGGGAGAATCTATCACAAATGATGAGGCCAATTACGCTAATTTTGAGCCCTTGTCTAAAAGTGAGGCGCGTAAATTAGGGCAGGAAATAAAAGAAGGAAACAAAAATGATTCAATGTATCTAAAGCGTGTAGGTAGTCGCTTAGGTATATTCCCTGATTATCGTATTGCTAATAAGCCTATGTCTTTGACCTTGAAAACCAATGTTCCTAAATTGGATGTTTTGTTGAATCAAAAAAAGGTCGCAACAAGCAATTCAGATCATTTTTCAGTAACGGTGGAACGTTTACCTAGAACCCATTATACTGCTAGCCTTGAAGGGACTAGTGACGGAAAAGAGATTAAACTCAAAAAAGATTATGATGGTAAAAACCAAACTATTGATTTATCGGTCGCTTTTAAATCTTTTACAGTAACAAGTAATCTTATGGATGGTAATCTTTATTTTGGTGATAATCGTATTGCTAAATTAAAAGATGGTAGCTATTCCGTAGAGAATTATCCAGTGACTGATGGTTCAAAAGCTTATATCAAAAAGGTTTTTAATGATGGTGAGATAACCTCTCATAAACAAAAATTAATCTCTATCGCTGATAATCAGACAATCAAATTAGATGTTGATGGTTTATTAAATGAAAAAGAAGCTGGACAGAAATTGATAACTGCTTTCAATCAATTGATACTTTATGTATCAACTGGGCAAGACCCTCAGACTTTAGGAACAGTTTTTGAAAAAGGTGCCGAAAATGATTTTTACAAAGGATTGAAAGAAAGTATTAAAGCAAAATTTGTAACTGATAATCGTAAAGCGAGCCATTTCACTATTCCTAATATTGTCCTTAATAAAATGACACAGGTTGGGAAAGAAAGTTATCAAGTTAATTTTGCTGCCGATTATGATTTTAATTATGATAAATCAACAGATCCTGATAAGAAAACATATGGCCACATTATTCAGAATTTAACTGGTAATTTTATTATGAAAAAATCAGGAAATAGTTACCTTATTTCTAATGATGGTAAAAAAGATATCACAGTAGCTAAGGAAACTAATAAAGTTAAGGCTGATCCCGTTTCCATTTTTCCAGAGAACCTTGTAGGAAGTTGGAAAGGTGAAGTTGAGGACGGTACAGTAACGATGACTTTTGATAAGGATGGTAAAGTTACTCAGAAAAAAGTTTACAAGGATAGTAAATCTAAGGAAAGTAACCATTCTGCTAAAGTTACGAAGTTGGAGGATAAGGGAAATGGGCTCTACCTTTATCAATATGAATCAGGTACTGATACTACAACTTTTGTAACAGGAGGTATCGGTGGTCTTAAAGTTAAATACGCCTATGGAATAAAAATTGAAGGGAATAAGATCATCCCAGTAATCTGGCAGACATCTAGTGATGGAGAATTTGATTACCATAAACCACTACTCAGTAAGCCATTAACTAAGCAA

SEQ ID NO: 12642 - protein, 546 aa, Streptococcus agalactiae
MFDFFKKKVVKVCLVIFGIVLVSLLSLGFFYFSKGQVLSRFVAARSRTSGQAFDNIKEYMVWSDTGESITNDEANYANFEPLSKSEARKLGQEIKEGNKNDSMYLKRVGSRLGIFPDYRIANKPMSLTLKTNVPKLDVLLNQKKVATSNSDHFSVTVERLPRTHYTASLEGTSDGKEIKLKKDYDGKNQTIDLSVAFKSFTVTSNLMDGNLYFGDNRIAKLKDGSYSVENYPVTDGSKAYIKKVFNDGEITSHKQKLISIADNQTIKLDVDGLLNEKEAGQKLITAFNQLILYVSTGQDPQTLGTVFEKGAENDFYKGLKESIKAKFVTDNRKASHFTIPNIVLNKMTQVGKESYQVNFAADYDFNYDKSTDPDKKTYGHIIQNLTGNFIMKKSGNSYLISNDGKKDITVAKETNKVKADPVSIFPENLVGSWKGEVEDGTVTMTFDKDGKVTQKKVYKDSKSKESNHSAKVTKLEDKGNGLYLYQYESGTDTTTFVTGGIGGLKVKYAYGIKIEGNKIIPVIWQTSSDGEFDYHKPLLSKPLTKQ

SEQ ID NO: 12643 - protein, 1209 aa, Streptococcus agalactiae
ATGTCACAATTTGATCGCATTCACTTAGTTGTCTTAGATTCAGTGGGTATTGGAGCGGCACCAGATGCCAATGATTTTGTCAATGCAGGAGTTCCTGATGGTGCTTCAGACACGCTTGGCCACATTTCAAAAACAGTTGGACTTGCGGTGCCAAACATGGCTAAAATCGGACTTGGTAATATTCCTCGTCCCCAAGCGCTTAAGACCGTCCCTGCAGAAGAAAATCCAAGTGGCTACGCGACGAAGTTACAAGAAGTATCACTTGGTAAAGATACAATGACAGGGCATTGGGAGATCATGGGCTTAAATATTACAGAGCCATTTGATACTTTCTGGAATGGTTTTCCAGAAGATATCATCACAAAGATTGAGGATTTTTCAGGACGTAAAGTTATTCGTGAAGCGAATAAACCTTATTCAGGGACAGCTGTTATTGATGACTTCGGACCACGCCAAATGGAAACTGGTGAGCTCATCATCTATACCTCAGCTGATCCAGTCCTACAAATTGCAGCTCATGAGGATATCATCCCTCTAGAAGAACTCTACCGTATTTGTGAATATGCTCGTAGTATCACAATGGAGCGTCCAGCTCTCCTTGGTCGTATTATCGCTCGTCCATATGTAGGTGAACCAGGCAACTTTACGCGTACAGCCAATCGTCACGACTATGCAGTATCACCATTTGAAGATACCGTATTAAATAAACTAGATCAAGCTGGCATCGATACTTATGCTGTTGGTAAAATCAATGATATTTTTAATGGTTCAGGCATTAATCATGATATGGGACATAACAAATCAAATAGTCATGGTATTGATACTTTGATAAAAACAATGGGGTTATCAGAGTTTGAAAAAGGCTTCTCCTTTACTAATTTGGTTGACTTTGATGCTCTCTATGGTCACCGTCGTGATCCTCATGGCTATCGTGATTGTCTTCATGAGTTTGATGAGCGTCTTCCAGAGATCATTTCAGCAATGCGTGACAAAGACTTACTTTTGATCACTGCCGATCATGGTAATGACCCAACTTATGCAGGCACAGACCATACAAGAGAATACATTCCTCTCTTAGCCTATAGCCCATCCTTCACAGGAAACGGACTTATCCCAGTAGGGCATTTCGCAGATATTTCAGCAACAGTTGCGGATAACTTTGGTGTTGATACTGCGATGATTGGAGAGAGCTTCTTGCAGGACTTGGTA

SEQ ID NO: 12644 - protein, 403 aa, Streptococcus agalactiae; identical to SEQ ID NO: 8444

SEQ ID NO: 12645 - protein, 669 aa, Streptococcus agalactiae
GTGGAAGTAAAAGATATTTTAAAAACGGTAGACCATACTTTGCTAGCAACAACAGCAACATGGCCAGAAATCCAAACAATTTTAGATGATGCAATGGCTTATGAAACAGCTTCAGCATGTATTCCAGCCTCTTACGTCAAAAAAGCAGCAGAGTACGTTTCAGGTAAATTAGCTATTTGTACTGTTATTGGGTTCCCAAATGGCTATAGTACAACTGCAGCGAAGGTTTTTGAATGTCAAGATGCTATTAAAAATGGTGCTGATGAAATTGACATGGTCATTAATTTGACAGACGTTAAAAATGGGGATTTTGATACTGTTGAAGAAGAAATTCGTCAAATCAAGGCTGCATGTCAAGACCATATCTTAAAAGTTATCGTTGAGACATGTCAATTAACTAAAGAAGAACTTATCGAACTTTGTGGAGTTGTCACACGTTCAGGTGCAGACTTTATTAAAACCTCTACTGGTTTTTCGACAGCAGGTGCTACATTTGAAGATGTTGAAGTGATGGCAAAATATGTCGGCGAAGGTGTTAAAATTAAGGCAGCAGGTGGAATCTCATCATTGGAAGATGCTGAAAAATTTATTGCTTTAGGAGCTTCACGCTTGGGTACTAGCCGTATCATCAAGATTGTTAAGAACCAAAAAGTTGAAGAAGGCACTTAT

SEQ ID NO: 12646 - protein, 223 aa, Streptococcus agalactiae; identical to SEQ ID NO: 3742

SEQ ID NO: 12647 - protein, 911 aa, Streptococcus agalactiae
TTGGTAATATTGTTTTCTTATCTGCCCTAGTTAGTCTACTTTATTATGTAGGAATCCTTGGATTTGTAGTAAAATGGATAGGTAAGGGTGTTGGTAAAATTATGAAATCCTCAGAGGTTGAGAGTTTTGTTGCCGTAGCTAATATGTTTCTTGGTCAAACAGACAGTCCAATTTTGGTTAGCAAATACCTAGGTCGTATGACTGATAGTGAGATAATGGTTGTGTTGGTATCAGGTATGGGAAGTATGTCAGTTTCTATTCTTGGTGGCTACATTGCATTAGGCATTCCAATGGAATATCTCTTGATTGCTTCAACAATGGTTCCTATTGGCAGTATTCTCATTGCTAAAATCTTATTGCCTCAAACAGAACCTGTTCAAAAAATTGATGACATTAAGATGGATAATAAAGGTAATAACGCCAATGTGATTGATGCAATCGCTGAGGGTGCAAGCACAGGTGCACAAATGGCTTTCTCAATTGGTGCTAGTTTGATTGCCTTTGTTGGTTTAGTTTCTTTGATTAATATGATGTTAAGTGGATTGGGAATCCGCTTAGAACAAATCTTCTCATATGTTTTTGCTCCATTTGGTTTTCTTATGGGATTTGACCACAAAAACATTCTTCTAGAAGGAAACCTTCTTGGAAGTAAGTTGATTTTAAATGAGTTTGTTTCGTTCCAACAATTGGGTCACCTAATCAAATCTTTAGATTATCGTACAGCATTGGTAGCAACTATTTCACTTTGTGGTTTTGCTAATTTATCAAGTTTAGGTATTTGTGTTTCAGGTATTGCTGTTCTTTGTCCAGAGAAACGTGGCACCCTAGCTCGACTTGTTTTCCGTGCAATGATTGGTGGTATTGCTGTAAGTATGCTTAGCGCCTTTATCGTCGGTATTGTAACTCTATTC

SEQ ID NO: 12648 - protein, 304 aa, Streptococcus agalactiae
MGNIVFLSALVSLLYYVGILGFVVKWIGKGVGKIMKSSEVESFVAVANMFLGQTDSPILVSKYLGRMTDSEIMVVLVSGMGSMSVSILGGYIALGIPMEYLLIASTMVPIGSILIAKILLPQTEPVQKIDDIKMDNKGNNANVIDAIAEGASTGAQMAFSIGASLIAFVGLVSLINMMLSGLGIRLEQIFSYVFAPFGFLMGFDHKNILLEGNLLGSKLILNEFVSFQQLGHLIKSLDYRTALVATISLCGFANLSSLGICVSGIAVLCPEKRGTLARLVFRAMIGGIAVSMLSAFIVGIVTLF

SEQ ID NO: 12649 - protein, 293 aa, Streptococcus agalactiae
ATGCAATTTATTTATAGTATTATTGGTATTTTATTGGTATTAGGAATTGTGTATGCAATTTCTTTCAATCGTAAGAGTGTTTCTCTAAGTTTAATTGGAAAAGCTCTTATCGTTCAATTCATTATTGCGCTAATCTTAGTACGTATCCCACTAGGCCAACAAGTTGTTAGTGTTGTTTCAACTGGAGTTACTAAAGTAATCAACTGTGGTCAAGCTGGTTTAAATTTTGTGTTTGGTTCATTAGCAGATAGTGGAGCAAAAACTGGTTTTATTTTCGCCATTCAAACGCTTGG

SEQ ID NO: 12650 - protein, 98 aa, Streptococcus agalactiae
MQFIYSIIGILLVLGIVYAISFNRKSVSLSLIGKALIVQFIIALILVRIPLGQQVVSVVSTGVTKVINCGQAGLNFVFGSLADSGAKTGFIFAIQTLG

SEQ ID NO: 12651 - protein, 777 aa, Streptococcus agalactiae; identical to SEQ ID NO: 8451

SEQ ID NO: 12652 - protein, 259 aa, Streptococcus agalactiae; identical to SEQ ID NO: 3746

SEQ ID NO: 12653 - protein, 735 aa, Streptococcus agalactiae
ATGCCTAAAAATGAACTAAATAATAAACTAAATAAACTAAAGCATGTGCAAGTCTACAATAAGATTTTTAACATGATCCAAGACGGTACTTATTCTCCTGGAATGCAATTGCCTTCTGAGCCCGAATTAGCAGGGCAACTTAATGTTAGTCGAGCTACTTTACGAAAGTCATTAGCACTATTACAAGAAGACCATTTGGTTAAAAATATCAGAGGAAAAGGTAATTTCATTAGAGAAAATTCTAGCAACTTGTCTGAAAACGGTTACGAAAATAGACAACACCCTATTAAAACTTGTCTAACTTCCAAAATTACAGAAGTGGAATTAGAATTTCGTGTAGAGGTTCCTGCAGAAGCTATCACAGCTTCACTTAAACAAGAAACCCCTGTAGTTGTTATTGCTGATCGTTGGTACCACACCGATGATGGACCATTAGCTTACACACTTTCTTTTATCCCTATCGAACTTATTTCAGATGCTGAGATTTCTTTACATGATACTAAACAGTTGTTAAACTTCATTGAAGAAGGTATCTATCAAGAAGGCATATCAAGCCACTCACAAAGCCATTTGGGATATGCGACATCTGGCAATTTTTCAGCAACCAAATATACCCTATCCGATCATGGACAATTCATATTAATACAAGAAACAATTTTTAACCAAGAGAAAATACTAATGTGTAATAAGCATTACGTTCCCATTGAGCACTTTGAATTGTCCATTACCTCTCAT

SEQ ID NO: 12654 - protein, 245 aa, Streptococcus agalactiae
MPKNELNNKLNKLKHVQVYNKIFNMIQDGTYSPGMQLPSEPELAGQLNVSRATLRKSLALLQEDHLVKNIRGKGNFIRENSSNLSENGYENRQHPIKTCLTSKITEVELEFRVEVPAEAITASLKQETPVVVIADRWYHTDDGPLAYTLSFIPIELISDAEISLHDTKQLLNFIEEGIYQEGISSHSQSHLGYATSGNFSATKYTLSDHGQFILIQETIFNQEKILMCNKHYVPIEHFELSITSH

SEQ ID NO: 12655 - protein, 1620 aa, Streptococcus agalactiae
ATGGCAAAAGATATTAAATTTTCAGCAGATGCCCGCTCAGCAATGGTGCGTGGTGTTGATATTTTAGCTGATACAGTCAAAGTAACATTAGGTCCTAAAGGCCGTAATGTTGTTCTTGAAAAAGCATTTGGTTCGCCTTTAATTACAAATGATGGTGTGACAATTGCTAAAGAAATTGAGCTAGAAGATCACTTTGAAAATATGGGAGCTAAACTTGTGTCAGAAGTGGCTTCAAAAACTAATGATATTGCAGGGGATGGCACTACAACTGCTACTGTTTTGACCCAAGCTATTGTACGGGAAGGTCTTAAAAATGTAACTGCAGGGGCGAATCCGATTGGTATTCGTCGTGGTATTGAAACAGCTGTTTCAGCAGCAGTTGAAGAGCTAAAAGAGATTGCACAACCAGTTTCAGGCAAAGAAGCTATTGCTCAAGTTGCAGCTGTGTCTTCACGTTCTGAAAAAGTTGGGGAATATATTTCTGAAGCTATGGAGCGCGTGGGTAATGATGGTGTTATCACTATTGAAGAATCGCGAGGTATGGAAACAGAGCTTGAAGTTGTAGAAGGAATGCAGTTTGACCGTGGGTACTTGTCACAGTATATGGTAACTGATAACGAGAAAATGGTCTCTGAACTTGAGAATCCGTATATCCTTATTACAGATAAGAAAATTTCAAATATCCAAGAAATTTTACCATTATTAGAAGAGGTTCTTAAAACAAATCGTCCATTGCTAATCATCGCTGATGATGTTGATGGAGAAGCTCTCCCAACGCTTGTTCTTAATAAAATTCGTGGAACTTTCAATGTCGTAGCTGTTAAAGCGCCTGGATTTGGTGATCGTCGTAAAGCCATGCTGGAAGATATTGCTATCCTAACAGGAGGAACTGTCGTTACTGAAGACCTTGGTTTAGACTTAAAAGATGCTACTATGCAAGTTTTAGGACAGTCTGCTAAAGTAACAGTAGATAAAGATTCTACTGTTATTGTCGAAGGTGCCGGTGACTCATCAGCAATTGCTAATCGCGTAGCTATCATTAAGTCACAGATGGAGGCTACAACTTCTGATTTTGATCGTGAAAAATTACAAGAACGACTTGCCAAGTTAGCCGGTGGTGTAGCAGTAATTAAAGTTGGTGCAGCGACTGAAACAGAATTAAAAGAGATGAAACTTCGCATCGAAGATGCGTTAAATGCAACGCGTGCTGCAGTTGAAGAAGGTATTGTTTCAGGTGGAGGTACGGCTCTTGTGAACGTTATTGAAAAAGTAGCGGCACTGAAACTTAATGGTGATGAGGAGACTGGACGTAATATTGTTCTTCGTGCTCTCGAAGAGCCTGTTCGTCAAATTGCTTACAATGCTGGATATGAAGGTTCAGTTATTATTGAACGTTTAAAACAGTCTGAAATTGGTACAGGATTTAATGCGGCTAATGGAGAATGGGTAGATATGGTTACCACAGGTATCATTGACCCTGTCAAAGTAACACGTTCTGCACTTCAAAATGCGGCATCTGTAGCAAGTCTTATCTTGACTACAGAAGCAGTAGTAGCAAATAAACCTGAACCAGAAGCTCCTACAGCTCCTGCAATGGATCCATCTATGATGGGTGGCTTC

SEQ ID NO: 12656 - protein, 540 aa, Streptococcus agalactiae
MAKDIKFSADARSAMVRGVDILADTVKVTLGPKGRNVVLEKAFGSPLITNDGVTIAKEIELEDHFENMGAKLVSEVASKTNDIAGDGTTTATVLTQAIVREGLKNVTAGANPIGIRRGIETAVSAAVEELKEIAQPVSGKEAIAQVAAVSSRSEKVGEYISEAMERVGNDGVITIEESRGMETELEVVEGMQFDRGYLSQYMVTDNEKMVSELENPYILITDKKISNIQEILPLLEEVLKTNRPLLIIADDVDGEALPTLVLNKIRGTFNVVAVKAPGFGDRRKAMLEDIAILTGGTVVTEDLGLDLKDATMQVLGQSAKVTVDKDSTVIVEGAGDSSAIANRVAIIKSQMEATTSDFDREKLQERLAKLAGGVAVIKVGAATETELKEMKLRIEDALNATRAAVEEGIVSGGGTALVNVIEKVAALKLNGDEETGRNIVLRALEEPVRQIAYNAGYEGSVIIERLKQSEIGTGFNAANGEWVDMVTTGIIDPVKVTRSALQNAASVASLILTTEAVVANKPEPEAPTAPAMDPSMMGGF

SEQ ID NO: 12657 - protein, 282 aa, Streptococcus agalactiae
ATGTTAAAACCATTAGGTGATCGTGTGATCATTTCGTTTGTTGAAACTGAAGAGAAATCTGTCGGTGGTTTTGTTCTTGCAGGAGCAAGCCATGATGCGACAAAGACAGCCAAAGTTCTTGCTGTGGGTGACGGTATTCGTACCTTAACAGGGGAATTAGTTGCACCTAGCGTTGCAGAGGGTGATACTGTTTTAGTCGAAAATGGTGCTGGTTTGGAAGTTAAAGACGGTAACGAAAAAGTGACAGTTGTTCGTGAAAGTGACATTGTTGCTGTCGTTAAA

SEQ ID NO: 12658 - protein, 94 aa, Streptococcus agalactiae; identical to SEQ ID NO: 3752

SEQ ID NO: 12659 - protein, 793 aa, Streptococcus agalactiae
ATGTCATTACTTGAATTAGTCAATCTGCACAAAACTTTTGAAAAAGGAACTGTCAATGAGAACCATGTTTTACGTGGTTTAGATTTAACGATTGAAGACGGTGATTTTATTTCAGTAATTGGAGGTAACGGTGCAGGAAAATCAACCCTCCTTAACTGTATTGCTGGTCTAATCTCTATTGATCAGGGGGCAATCACATTAGACAACCAATCAATTACTAAAGACTCTGTAGAAAAACGGTCTAAGGATATTAGTCGAGTCTTTCAGGATCCTAGAATGGGAACTGCAACAAATTTGACGATTGAAGAAAATATGGCAATTGCACATAAAAGAGGCAATAAGCGTCACATTTTTAGACAGTCAGTGACTGACGATGACCGTCAACTATTTAAAAAGTCTCTATCACAATTAGGTCTAGGCTTAGAAAATCGAATGAAGACTGATGCTGCATTTTTATCTGGAGGTCAGCGTCAAGCCCTCACGTTAGCTATGGCAACTCTTGTTCGTCCAAATTATTATTACTGGATGAACATACAGCGGTTAGATCCCAAACTAGCGATATGGTTATGGATTAACACAGAAAGTGATAGAAGAACACGATTGACAGCTTAATGATTACACACAATATGGACATGCCATTGCTTATGGTAATCGTCTCGTGATGCTCTATCACGGGAAAATTGTTGTTGATGTTAAAGGAGAAGCAAAGAGAAACTTAACAGTTGCAGAATTAATGGAACTTTTCCATAAAAACTCAGGTCAACAGTTGATAGATGATGCCCTTGTCTTAGGT

SEQ ID NO: 12660 - protein, 267 aa, Streptococcus agalactiae
  VARIANT 181, 213: Xaa = Any Amino Acid
MSLLELVNLHKTFEKGTVNENHVLRGLDLTIEDGDFISVIGGNGAGKSTLLNCIAGLISIDQGAITLDNQSITKDSVEKRSKDISRVFQDPRMGTATNLTIEENMAIAHKRGNKRHIFRQSVTDDDRQLFKKSLSQLGLGLENRMKTDAAFLSGGQRQALTLAMATLVRPKLLLLDEHTAXLDPKTSDMVMELTQKVIEEQRLTALMITHNMXHAIAYGNRLVMLYHGKIVVDVKGEAKRNLTVAELMELFHKNSGQQLIDDALVLG

SEQ ID NO: 12661 - protein, 770 aa, Streptococcus agalactiae
ATGGGGGCTGCAGTTTGCGCCTTATGTATCGTTAATGATATTAATCCAATTGTGGCAACCATAGCGGGCATGTTAGGTGGTATGTTGGCAGGACTAGTATCGGGTTTTCTTCATACTAAAATGAAAATACCAGCCCTCCTCACAGGTATTATTACGTTGACAGGACTTTACTCTATTAATTTACTTGTTTTAGGAAGATCAAACGTCTCTTTTGCTCTCAAAAATACTTTGGTTACAATGGTAACAAGATTAGGTTTAAATAAACTTTCAGCAGTTTTATTAATTGGAATTGTTTGTGTAGCTTGGTTATCTTAATTTTGTATCTCTTTTTAAATACCCAACTAGGATTAGCTCTAAGAGCGACAGGTGATAATGAGGCTATGGGACAAGCCAATAGTATTAAAGTAGATCGGATGAAAATGCTAGGATATATGATTGGGAATGGCCTGATTGCTTTATCTGGTGCACTTTTAGCGCAAAATAATGGCTATGCAGATTTGAATATGGGAGTGGGCACAATCGTTATTGGATTAGCTTCAATTATCTTGGCAGAAGTAATGATAAAATACTTACCTCTTGGCAAAAGGTTATGGTCAATTGTATTAGGTTCTGTTTTATACCGTATGATTATTGTTTTCATATTAACAACCGATATTGATGCACAGATGATAAAGTTGGTTTCAGCAATTTTGTTGGCTCTCATTTTGTATGTCCCAGAATTACGAGCTAAACTAGGAGTAAAAACCTCTAAATCGCTTACAAAGGAAGGA

SEQ ID NO: 12662 - protein, 257 aa, Streptococcus agalactiae
MGAAVCALCIVNDINPIVATIAGMLGGMLAGLVSGFLHTKMKIPALLTGIITLTGLYSINLLVLGRSNVSFALKNTLVTMVTRLGLNKLSAVLLIGIVCVGLVILILYLFLNTQLGLALRATGDNEAMGQANSIKVDRMKMLGYMIGNGLIALSGALLAQNNGYADLNMGVGTIVIGLASIILAEVMIKYLPLGKRLWSIVLGSVLYRMIIVFILTTDIDAQMIKLVSAILLALILYVPELRAKLGVKTSKSLTKEG

SEQ ID NO: 12663 - protein, 960 aa, Streptococcus agalactiae
ATGAAAAAAATAACAAAGATGGTAATTAGCAGCGTTTTAGCAACTGTTCTGATGACAGCTTGTTCACAATCTTCTCAAAATGGTCAATCTGATGTAAAACATATTGGTATTTTACAATATGTAGAACATCCCTCTCTAACTGCCACTAGAAAAGGATTTATAAAAGAATTAGCTAAAGAAGGCTATAAAGATGGCAAAAATATCAAAATTGAGTATAAGAATGCTCAAGGGGATCAGTCAAATATCCAATCAATTTCTGAAAAACTCATTAAAGATAATAAATTAGTATTGGGAATTGCGACTCCGGCGGCTCAATCGTTGACAACTGTGTCAACAGAAACACCTATTTTGTTTACAGCAGTGACAGATCCGGTATCAGCCGAATTAGTAAAATCAATGAAAAAACCTGAAGGTTTAGCGACTGGTACAAGTGACATGTCTCCAATTAAAAAGCAAGTATCCCTTTTGAGAAAAGTAATGCCTAAGGCTAAACGTGTTGGTATTATGTATACCACTAGCGAGCGTAACTCAGAAGTTCAGGTAAAACAAGCAAAAAAGATCTTCCAAGAGGCGGGGATTAAAACAAGTGTTAAAGGTATTTCTTCCACTAATGATGTACAAGATACTGCTAAGAGTTTAATGTCTAAAACAGATGTTCTTTTTGTACCAACAGATAATATTATAGCCAGCTCAGTAACGCTGTTAGGGAATCTATCGAAAGAATTAAAAGTGCCTGTTGTGGGAGGTTCAGCAGATATGGTACCAAGTGGTTTGCTCTTTTCTTATGGGGCTGATTATGAGGCTTTAGGTCGTCAAACAGCAAGACAAGCTGTTAAAATCCTCAAAGGTAAAGACGTCGCTAAAGTTCCTTCAGAATATCCTCAAAATCTAAAAGTAGTAGTTAATGAAGATATGGCAAAAGAGCTTGGAATTGATGTTTCAAGTATTAAAAATAATAAA

SEQ ID NO: 12664 - protein, 320 aa, Streptococcus agalactiae
MKKITKMVISSVLATVLMTACSQSSQNGQSDVKHIGILQYVEHPSLTATRKGFIKELAKEGYKDGKNIKIEYKNAQGDQSNIQSISEKLIKDNKLVLGIATPAAQSLTTVSTETPILFTAVTDPVSAELVKSMKKPEGLATGTSDMSPIKKQVSLLRKVMPKAKRVGIMYTTSERNSEVQVKQAKKIFQEAGIKTSVKGISSTNDVQDTAKSLMSKTDVLFVPTDNIIASSVTLLGNLSKELKVPVVGGSADMVPSGLLFSYGADYEALGRQTARQAVKILKGKDVAKVPSEYPQNLKVVVNEDMAKELGIDVSSIKNNK

SEQ ID NO: 12665 - protein, 795 aa, Streptococcus agalactiae
ATGGTAAGGCTAATATTTAGTGATATTGATGGTACTTTAATTAACAGTAATTTTAAAGTAACACCTAAGACACGGCAGGGAATTAAACAAATAGTAGCTCAAGGGGCTACTTTCGTTCCCATATCAGCTAGGATGCCTGAGGCAATTACTCCGATTATGGAACAAATTGGAATAGATTCTTATATTATTTCCTATAATGGGGCTTTAATACAAGATATGCAACAAAAAACAATTGCTTCCCACACAATGGATGGTCAAGTTGCCTTACAAGTTTGTTCTTATGTAAGCAAGCATTATTCGAAAATTGCATGGAATGTCTATCGTTATCATGAATGGTATTCCTGTGATAAAGAAAATGAGTGGGTCCAAAAAGAGGAGGAGATTGTTGGTTTACAATCTAAAGAGATGAGTTTGATGGAGTTAGAGAAGCAAGATAGGATTCATAAACTTCTCTTGATGGGAGAACCATCTCTGATGGGAGAATTGGAGAACACTTTGAAAGCTCAATATCCACATTTATCAATCGCACAATCTGCTCCTTACTTTATTGAAATAATGGCTCCAGGTATTGAAAAAGGAAAATCTGCTAAAACTTTAGCAGACTATTTAGATATTTCTCTTGCAGACTCTATTGCGTTTGGTGATAACTATAATGATTTAAATCTGCTTGAAATTGTGGGTAAAGGTTTTGTCATGGCGAATGCTCCTAAAGATTTACAAGAGAGAATTGGAAATGTAACTCAGGATAATGATAACGATGGTATTTATTATGCTTTAGTAGAGTATATGGAAAAT

SEQ ID NO: 12666 - protein, 265 aa, Streptococcus agalactiae
MVRLIFSDIDGTLINSNFKVTPKTRQGIKQIVAQGATFVPISARMPEAITPIMEQIGIDSYIISYNGALIQDMQQKTIASHTMDGQVALQVCSYVSKHYSKIAWNVYRYHEWYSCDKENEWVQKEEEIVGLQSKEMSLMELEKQDRIHKLLLMGEPSLMGELENTLKAQYPHLSIAQSAPYFIEIMAPGIEKGKSAKTLADYLDISLADSIAFGDNYNDLNLLEIVGKGFVMANAPKDLQERIGNVTQDNDNDGIYYALVEYMEN

SEQ ID NO: 12667 - protein, 858 aa, Streptococcus agalactiae
ATGCCGTATCCATACAAAGCCAATCATTCCATTGAATCAATCACCTTAAAAGTAAATGACCTCGAAAACCTCGTAAACTTCTATAGCGATATCATTGGGTTAACTGTTATTGACAAATCCAGCACTAGAGCCTTACTAGGGGTAAATCAAAAAATCCCTCTTATTATCCTTGAAAAAACTGAACTTGAAAAGCATAGTACCTATGGCCTTTATCACACTGCTATTTTAGTACCAGATGAATACCATCTCAGTCTAGCTCTAAATCATTTATTATCTCAGCATATCCCTCTAGAGGGTGGAGCTGACCATGGCTATAGCAATGCTATCTATCTAAGTGATCCTGAAGGTAATGGAATCGAAATTTATAATGATAAGGATATCTCTATGTGGGATATCAGAGAGAGTGGACAAATTATTGGTATTACTGAAAGACTAGATATTGACAATTTACTTGACAGCCTTGTCAACGTTCCTAATAATTATAAGCTTTCTGAAAAAACTCGTATTGGTCATATTCATTTGAGTGTTAAAGATGCTAAGATTAGCTCAAAACTCTATCAAAATGTTTTTGGCTTTGATGAGAAATTTGCAATCCCGACAGCTAGTTGGATTGCATCCGGCAACTACCATCATCATCTAGCCTTTAATAATTGGGCTGGTCCAAATCTTTCTAAAAACCAAGAAGATAGACCCGGAATTTTCTTATTGACAATTGCTTACAATGATGACAACCTTTTTAGAGATAGCTTAAAAAAAGCGCAACTTTACCAACTGACTTTCCTTGAAAAACAAGATCATTATTATATTATTGAAGATTTTGATGGCATCCGAATTAAAGTTGTTCTAAAACCAGAGAAT

SEQ ID NO: 12668 - protein, 286 aa, Streptococcus agalactiae
MPYPYKANHSIESITLKVNDLENLVNFYSDIIGLTVIDKSSTRALLGVNQKIPLIILEKTELEKHSTYGLYHTAILVPDEYHLSLALNHLLSQHIPLEGGADHGYSNAIYLSDPEGNGIEIYNDKDISMWDIRESGQIIGITERLDIDNLLDSLVNVPNNYKLSEKTRIGHIHLSVKDAKISSKLYQNVFGFDEKFAIPTASWIASGNYHHHLAFNNWAGPNLSKNQEDRPGIFLLTIAYNDDNLFRDSLKKAQLYQLTFLEKQDHYYIIEDFDGIRIKVVLKPEN

SEQ ID NO: 12669 - protein, 690 aa, Streptococcus agalactiae
GTGTGTCAAAACATTGCAAGGCCTAAACTGAGTGCACAAACGCAAATTATAATTGATTATTTTTCTACTTTAACTGTTTCAGACTTAGAGGATATCTACAGAATTAATACAAGTGCAGCTCGTTGTGAGGCTCAAAGATGGCAAGATTTTAAATGTAAACAACTTACTCTGAATCCTGCTATTAAGTTATTCAACGGTCTTATGTACCGCAATATCAAAAGGCACAACTTATCCATAAGTGAAGCACAATTTATGGAAAATTCTGTTTTTATTACTAGTGCTCTTTATGGCATCATTCCTGCTATGACACTAATATCCCCTCATCGTTTAGATTTTAACACTAAAATCAAAATCAACAATAACTCTCTTAAAGTTTTTTGGCGTGAAAATTACGATACTTTTATGCAGTCAGATGACATTATGGTTTCTTTGCTTTCTAATGAATTTGAAACCGTCTTTTCTCCTAAAGAGCGTCAAAAACTAATACATCTTAACTTTATTGAAGATCGAGATGGCCAATTAAAAACCCACTCTACCATATCAAAAAAAGCAAGAGGAAAGTGTTTAACTGCTATGATGGAAAATAATTGCCAAACTCTAGAACACTTAAAGCAATTACGCTTTGATGGCTTCTGTTATGATAATGAACTCTCAGACTCTAAGCAATTAACTTTTGTTAAAAAACAGACT

SEQ ID NO: 12670 - protein, 230 aa, Streptococcus agalactiae
MCQNIARPKLSAQTQIIIDYFSTLTVSDLEDIYRINTSAARCEAQRWQDFKCKQLTLNPAIKLFNGLMYRNIKRHNLSISEAQFMENSVFITSALYGIIPAMTLISPHRLDFNTKIKINNNSLKVFWRENYDTFMQSDDIMVSLLSNEFETVFSPKERQKLIHLNFIEDRDGQLKTHSTISKKARGKCLTAMMENNCQTLEHLKQLRFDGFCYDNELSDSKQLTFVKKQT

SEQ ID NO: 12671 - protein, 615 aa, Streptococcus agalactiae
ATGTCAGAAGAAGCAAGTTGGAATACTCCAAAGCCTGGGGAGTGGAAAAGCGAAGAATTAAGTCATGGCCATATCATTGATTATAAAGCTTTTAATTTTGTAGATGGTGAAGGTGTTAGAAATTCACTCTACGTAGCTGGATGTATGTTCCACTGTAAAGGGTGTTATAATACTGCTACATGGTCCTTTCGAGCCGGAATCCCTTATACAAAAGAGCTTGAAGATCAAATTATGAAAGATTTGGCACAACCTTACGTCCAAGGTTTAACGTTATTAGGTGGAGAGCCGTTCTTAAATACAGGTATTTTGCTGCCACTTCTTCAGCGTATCCGACGTGAATTGCCAGAAAAAGATATTTGGTCATGGACGGGGTATACTTGGGAAGAAATGATGCTGGAGACTCAAGATAAATTGGAGATGTTATCTTTGATTGATATTTTAGTGGATGGTAGGTTTGATCAAAGTAAGCGAAATTTAATGCTACAATTTAGAGGATCTTCAAATCAAAGAATCATTGATGTACAAAAATCTTTAAAAGAAGGTGAAGTCGTGATTTGGGAAGGATTAAACGATGGTGACAATAGTTATGAACAAGTCAAACGAGATGATTTACTT

SEQ ID NO: 12672 - protein, 205 aa, Streptococcus agalactiae
MSEEASWNTPKPGEWKSEELSHGHIIDYKAFNFVDGEGVRNSLYVAGCMFHCKGCYNTATWSFRAGIPYTKELEDQIMKDLAQPYVQGLTLLGGEPFLNTGILLPLLQRIRRELPEKDIWSWTGYTWEEMMLETQDKLEMLSLIDILVDGRFDQSKRNLMLQFRGSSNQRIIDVQKSLKEGEVVIWEGLNDGDNSYEQVKRDDLL

SEQ ID NO: 12673 - protein, 489 aa, Streptococcus agalactiae
ATGAAATTACGGCGCCCAGTGTTAGAAGATAAAGAAGAAATTTTAGCCATGTATAAAGAGTTTCAAAAAGAAAGTAGTTCAATGGATGGTGGTTTTTATGAACCAACTATGCATTTTGAAGACTGGCTAGATCATAACCTAAATATGGAGTTAGGGATAGGTGTTCCTGATAATTTTGTTCCATATATTCAGTTTGTGTCTTTTGACAATGATAATAATGCTATAGGTTTCTTAAATTTACGTTTAAGACTAAATGATACTCTTTTAGAAAAAGGTGGACATATTGGTTATTCCATACGACCTCGCCAGCGTGGCAAAGGTTATGCTAAAGAACAGTTGAAGCTAGGAATTGAGCAAGCACATCTAAAAAATATCAATGAAATACTTGTGACATGCCATGTAGACAATGATGCCAGCAAGTCAGTAATATTAGCTAACGGTGGTGTTTTAGAAGATTGTCGTCATCAGACAGAGCGTTATTGGATAACC

SEQ ID NO: 12674 - protein, 163 aa, Streptococcus agalactiae
MKLRRPVLEDKEEILAMYKEFQKESSSMDGGFYEPTMHFEDWLDHNLNMELGIGVPDNFVPYIQFVSFDNDNNAIGFLNLRLRLNDTLLEKGGHIGYSIRPRQRGKGYAKEQLKLGIEQAHLKNINEILVTCHVDNDASKSVILANGGVLEDCRHQTERYWIT

SEQ ID NO: 12675 - protein, 930 aa, Streptococcus agalactiae
ATGTTGCAACTTGGAATTGTCGGTTTAGGAGGTATTTCACAGAAAGCTTATCTACCTTATATGCGTCAAGTGACAGGTGTGCACTGGCATCTTTTTACACGCCAAAAACAGATTTTAGAAGAAGTTAATATGCTTTTTGGTTCTTCTACAGCTTATGACAGTTTAGATAGTCTAGCCGAGCATCCTTTGGATGGAGTCTTCATTCATGTCGCGACTAGTGCTCACTTTGATATAGCAAAGCTTTTTTTAAAAAAGGGTATTCCAGTTTTTATGGATAAGCCTTTGACAGAAGATTATACTTCAACTAAAGCATTGTATGATTTGGCGAAGGATCATAAAACATTTTTAATGGCAGGTTTTAATCGTCGCTTTGCACCACGTATTATGGAAATGAAAAAAGTAGAAGATAAAAACCATATTCGCACCTTTAAAAATGCTGTCAATGCACCAGCGGATTTTCAATATAAGCTTTTTGATATGTTTATCCATCCTTTAGATACGGCGCTATTTTTGACAAATAATGTTGTTAAAAGAGGATACTTTGTGACTAAACGTGATGGGAATAAGATATTACAAGTATCAGTAACGCTAGAAACAGACAGTGAGATAATAGAAGCAAGCATGAACCTGCAGTCGGGGTCTCGTCGAGAAATAATTGAAATAGAGTCGCCAGAAGTAACCTATTCATTAGATGATTTGTCAAATCTTTCTGTTATTGATGGCTTTGATCGTCGTGCTATCGGTTTTGGCTCTTGGGCAAGCACTCTAGAGAAACGTGGTTTTGAACCAATGATTGATGCTTTTATTCAAGCTATCACTACAGGTGTCAATCCTATATCACCAAAGTCTAGTTTATTGAGTCATTTTATTTGTGACCAGATTAATAAAGCGAATGCTCCTTTTGGAATGCTTAACTTGAAGATAATGGAA

SEQ ID NO: 12676 - protein, 310 aa, Streptococcus agalactiae; identical to SEQ ID NO: 8476

SEQ ID NO: 12677 - protein, 141 aa, Streptococcus agalactiae; identical to SEQ ID NO: 8477

SEQ ID NO: 12678 - protein, 47 aa, Streptococcus agalactiae; identical to SEQ ID NO: 8478

SEQ ID NO: 12679 - protein, 2169 aa, Streptococcus agalactiae
ATGACAGAATCTGATATCAAAGTGATTAAACGTGACGGGCGTTTGGTCAGCTTTGATAAGTATAAAATCTACACGGCTCTATTAAAAGCTAGTAATAAAGTTATCAAAATGTCTCCTTTAGTTGAGGCTAAACTTGAGATGATTGCAGATCATGTCATCGCTGAGATCTACAATCGTTTTAAAGATAACATCAAGATATATGAAATACAAAATATCGTTGAACATAAATTATTGGAAGCTAATGAGTACGCTATTGCACAAGAATATATCAATTATCGTACCCAACGCGATTTTGAGCGTTCACAGGCTACAGATATCAATTTTTCTATTGGAAAATTAATTAATAAGGATCAAACTGTTGTTAATGAGAATGCTAATAAAGACTCTGATGTGTTTAATACCCAACGTGATTTAACAGCAGGTATTGTAGGGAAATCAATTGGTCTGAAAATGTTACCTTCTCATGTAGCAAATGCACATCAAAAGGGTGATATCCATTATCATGATTTAGATTACAGCCCATACACTCCCATGACAAATTGCTGTTTAATCGATTTTAAGGGAATGCTTGCAAATGGTTTTAAGATTGGTAATGCAGAAGTTGAGAGTCCAAAATCTATTCAGACAGCGACTGCTCAGATTTCACAGATTATTGCGAACGTTGCTTCAAGTCAATATGGTGGCTGTACAGCAGATCGCATTGATGAGTTTTTAGCTCCTTATGCACAGTTAAATTATCAAAAACATTTAAAAGATGCAAAAGAATGGGTTATTGAAGATAAACAAGAAGACTATGCGCGCGCTAAAACACAAAAAGATATATATGATGCCATGCAATCTTTGGAGTATGAAATTAATACTTTATTTACTTCAAATGGGCAAACGCCATTTACTTCGCTTGGTTTTGGATTAGGAACTAATTGGTTTGAACGAGAAATTCAAAAAGCGATTTTGAAAATTCGGATTCAAGGTTTAGGAAGCGAGCATCGTACTGCTATTTTTCCAAAATTAATTTTTACGCTTAAAAAAGGCCTTAATTTAGAAGAAAATAGCCCCAATTATGATATTAAACAATTAGCACTAGAGTGTGCGACAAAACGGATGTATCCAGATGTCCTTTCTTATGATAAAATTATTGACTTAACGGGCTCTTTTAAAGCCCCTATGGGCTGTCGTTCTTTCCTACAAGGGTGGCGAGATGCAAATGGTCAGGATGTAACATCTGGTCGTATGAATCTTGGAGTTGTAACAGTTAATCTACCGCGCATTGCCATGGAGTCTAACGGTGATATGGATAAATTCTGGGAGATATTTAATGAACGTATGAGTATTGCTAGAGATGCCTTGGTTTATCGTGTGGAACGTGTCAAAGAGGCTATCCCAGCAAATGCGCCCATTCTTTACCAGTATGGAGCATTTGGAGAACGTTTAGGAAAATATGACAATGTTGATCGACTCTTTAATCACCGCCGTGCAACGGTGTCTCTTGGTTATATTGGTTTATATGAGGTGGCGAGTGTTTTTTATGGTGGTGACTGGGAAGATAATCATCAAGCTAAAGCATTTACTGTAGACATCGTTCGTAAGATGAAGCAGTTATGTGCAGATTGGTCTGATGAGTATGATTATCATTTTTCAGTTTATTCGACACCATCGGAGAGCTTGACTGACCGGTTCTGTCGTTTAGATACTGAAAAATTTGGTATAGTAACTGATATTACTGATAAGGAATACTACACTAATTCATTCCACTATGATGTGCGTAAGAATCCAACACCTTTTGAAAAACTAGATTTTGAGAAAATCTATCCTGAAACGGGTGCATCAGGAGGATTTATTCACTACTGTGAGTACCCTGTTTTGCAACAGAATCCAAAAGCTTTAGAAGCAGTTTGGGACTATGCTTATGATCGGGTAGGTTATCTAGGTACTAATACACCAATTGATAAGTGTTACCAATGTCAATTTGAAGGGGATTTTACACCGACAGATCGAGGCTTTACTTGTCCAAATTGTGGTAACAGCGACCCTAAGACAGTAGATGTTGTCAAACGTACATGTGGTTACTTAGGTAATCCACAGGCTCGTCCGATGGTTAATGGTCGTCATAAGGAAATCTCTGCTCGTGTAAAACATATGAACGGATCAAGTATTAAAAATCAAGGTAAT

SEQ ID NO: 12680 - protein, 723 aa, Streptococcus agalactiae
MTESDIKVIKRDGRLVSFDKYKIYTALLKASNKVIKMSPLVEAKLEMIADHVIAEIYNRFKDNIKIYEIQNIVEHKLLEANEYAIAQEYINYRTQRDFERSQATDINFSIGKLINKDQTVVNENANKDSDVFNTQRDLTAGIVGKSIGLKMLPSHVANAHQKGDIHYHDLDYSPYTPMTNCCLIDFKGMLANGFKIGNAEVESPKSIQTATAQISQIIANVASSQYGGCTADRIDEFLAPYAQLNYQKHLKDAKEWVIEDKQEDYARAKTQKDIYDAMQSLEYEINTLFTSNGQTPFTSLGFGLGTNWFEREIQKAILKIRIQGLGSEHRTAIFPKLIFTLKKGLNLEENSPNYDIKQLALECATKRMYPDVLSYDKIIDLTGSFKAPMGCRSFLQGWRDANGQDVTSGRMNLGVVTVNLPRIAMESNGDMDKFWEIFNERMSIARDALVYRVERVKEAIPANAPILYQYGAFGERLGKYDNVDRLFNHRRATVSLGYIGLYEVASVFYGGDWEDNHQAKAFTVDIVRKMKQLCADWSDEYDYHFSVYSTPSESLTDRFCRLDTEKFGIVTDITDKEYYTNSFHYDVRKNPTPFEKLDFEKIYPETGASGGFIHYCEYPVLQQNPKALEAVWDYAYDRVGYLGTNTPIDKCYQCQFEGDFTPTDRGFTCPNCGNSDPKTVDVVKRTCGYLGNPQARPMVNGRHKEISARVKHMNGSSIKNQGN

SEQ ID NO: 12681 - protein, 1056 aa, Streptococcus agalactiae
ATGCTCATTTCGCTATGGTTTTTAATTAAATTTTGTGTCGATAATATCGTTGATGAAGCATTTATATTTTATGGCATTTTAGCAGCATTCTCACTATTTATAGATCCCCAAACACTGATTTTTTGGCTTTGCTCTTTTGTTCTCTTAACAGCAACCAATATTAAGCAAAAGCAGTCACTACGAGGATTTTATCAGTTTTTATGCGTTGTTTTTGGTATGATTTTAATTGCTTATACTGTTGGTTACTTTATGTTTAATCTACAGATTATCTCTTCTTATATTGACAAAGCTATTTTTTACCCCTTTACGTATTTCGCTAGGACAAACCACTCATTCCTTCTTAGTTTAGCAATTCAAATTGTTGTCCTTCTAGGGTCAGGTTGTCTCTTTGGACTATGGGATTTTATTCAAAATCGTAAAAAAGCATCTTATCAAATCGGCTTGAACTTTATTGCCTGTATTTTTATTATTTACGCTATAATGGCCATTTTTTCAAGAGATTTTAACCTTTACCACTTTTTACCTGCTTTACCATTTGGTCTTTTGCTAACGAGTAATAAAATTACTATTCTTTACCAAAAAGTGATTGACAGGCGTTCACATAGACGTCAGTATTTCTCTGGTAAATCTCTTATCGTAGACCTTTTTGTAAAGAAAACATATTATTTGCCCCTCTTACTAGTTTCTTTATCGATAGGGTTACTAGTTTATAATACTTATCAAAATGTTACTCTTAGTAAAGAAAGGCGTGACATTTCACATTATTTGACTACAAAAATTGATAGAGATGGTAAGATTTATGTTTGGGACAAAGTTGCTAGCATTTATAGCCAGACTCGGTTAAAATCTGCTTCTCAATTTGTTTTGCCACATATTAATACAGCGCAAAAAAATAATGAGAAAATTTTGAAGGACGAGCTGCTTCAGCATGGGGCTAAATACTTTATCTTAAATAAAAATGAGAAGTTACCAAATGAACTGAAATCTGATATTAAGAAGCACTACCAAGAAGTTCCTCTATCAAATATCACTCATTTTGTTCTATATCGTTTCAAA

SEQ ID NO: 12682 - protein, 352 aa, Streptococcus agalactiae
MLISLWFLIKFCVDNIVDEAFIFYGILAAFSLFIDPQTLIFWLCSFVLLTATNIKQKQSLRGFYQFLCVVFGMILIAYTVGYFMFNLQIISSYIDKAIFYPFTYFARTNHSFLLSLAIQIVVLLGSGCLFGLWDFIQNRKKASYQIGLNFIACIFIIYAIMAIFSRDFNLYHFLPALPFGLLLTSNKITILYQKVIDRRSHRRQYFSGKSLIVDLFVKKTYYLPLLLVSLSIGLLVYNTYQNVTLSKERRDISHYLTTKIDRDGKIYVWDKVASIYSQTRLKSASQFVLPHINTAQKNNEKILKDELLQHGAKYFILNKNEKLPNELKSDIKKHYQEVPLSNITHFVLYRFK

SEQ ID NO: 12683 - protein, 306 aa, Streptococcus agalactiae
ATGAGGAGAAAAATAGTGGTAGAAAACCTAGAAAAACCAATTGGAGTGAGCTATAAAAATAGCCCATCAATGAGTAAACGAACGGCTATCAGAATGAAGAAATCTAGTCGATTTTCAATTTTATTATATAGTGTTTTGTCAACTCTCTTAGCAATTGCAAATCCGTTATTGACTTATTTTGCAAATGGTTTGCAGACTCAGAATCTCTATACAGGTTTGATGATGACCAAAGGACAGATTCCTTATAGTGATGTTTTTGCTACAGGAGGATTTTTATACTATGTAACGATTGCTCTAAGTACCTTT

SEQ ID NO: 12684 - protein, 102 aa, Streptococcus agalactiae
MRRKIVVENLEKPIGVSYKNSPSMSKRTAIRMKKSSRFSILLYSVLSTLLAIANPLLTYFANGLQTQNLYTGLMMTKGQIPYSDVFATGGFLYYVTIALSTF

SEQ ID NO: 12685 - protein, 120 aa, Streptococcus agalactiae
ATGTCAGATACTCAGCTAACATTAGAAGAACAAGAATTTTTCAAACAATATATGTCTAGAAAATACCACTACTTTAGGGATATTATTCGTTACGGTCAAGTGTTGGCTAAATTGACTAAA

SEQ ID NO: 12686 - protein, 40 aa, Streptococcus agalactiae
MSDTQLTLEEQEFFKQYMSRKYHYFRDIIRYGQVLAKLTK

SEQ ID NO: 12687 - protein, 315 aa, Streptococcus agalactiae
ATGGCACATAATCATAACCACGATCATAACCATGAACATCAACATGAAGTAATCACTCTTGTAGATGAGAATGGGAACGAAACACTTTTTGAAATCCTATTAACTATTGATGGGCGTGAAGAGTTTGGCAAAAACTATGTTCTCCTCATTCCTGCAGGTGCGGAAGAAGACGAACAAGGTGAAATTGAGATTCAAGCTTACTCATTTACAGAAAATGCCGATGGAACTGAAGGAGACCTTCAGCCTATACCAGAAGATTCAGATGCAGAATGGGACATGATTGAGGAAGTTTTCAACAGCTTTCTAGATGAAGAA

SEQ ID NO: 12688 - protein, 105 aa, Streptococcus agalactiae
MAHNHNHDHNHEHQHEVITLVDENGNETLFEILLTIDGREEFGKNYVLLIPAGAEEDEQGEIEIQAYSFTENADGTEGDLQPIPEDSDAEWDMIEEVFNSFLDEE

SEQ ID NO: 12689 - protein, 408 aa, Streptococcus agalactiae
ATGGGACTTGACGTCGGCTCGAAAACTGTTGGCGTTGCAATTAGTGATCCACTCGGTTTCACTGCACAAGGTCTTGAAATCATTAAGATCGATGAAGAATCTGGAAATTTTGGTTTTGACCGCTTAGCAGAGTTAGTAAAAGAGTACAAAGTTGATAAATTTGTAGTTGGTCTACCTAAAAATATGAATAATACAAGTGGTCCTCGTGTAGAGGCTAGTCAGGCATATGGCGATAAAATCACTGAATTATTCAATCTTCCAGTTGAATATCAAGATGAACGTCTAACGACTGTTCAAGCAGAGCGTATGCTAGTTGAGCAAGCTGATATTAGTCGTGGTAAGCGTAAGAAAGTTATCGATAAATTAGCAGCTCAACTAATCTTACAAAATTATTTAGACCGCATGTTT

SEQ ID NO: 12690 - protein, 136 aa, Streptococcus agalactiae; identical to SEQ ID NO: 3768

SEQ ID NO: 12691 - protein, 264 aa, Streptococcus agalactiae
ATGGGATTTACAGATGAAACTGTTCGTTTTAGATTAGATGATAGTAACAAAGTAGAAATTAGTGAAACATTAACAGCTGTTTATCGTTCATTAGAAGAAAAAGGTTACAATCCCATCAATCAAATTGTTGGTTACGTATTGAGTGGGGACCCTGCTTATGTACCTCGTTACAATGATGCTCGCAATCAAATTCGTAAATATGAACGTGATGAGATTGTAGAAGAGCTCGTTCGTTATTATTTACAAGGAAATGGAATAGATTTG

SEQ ID NO: 12692 - protein, 88 aa, Streptococcus agalactiae; identical to SEQ ID NO: 3770

SEQ ID NO: 12693 - protein, 396 aa, Streptococcus agalactiae; identical to SEQ ID NO: 8491

SEQ ID NO: 12694 - protein, 132 aa, Streptococcus agalactiae; identical to SEQ ID NO: 8492

SEQ ID NO: 12695 - protein, 1137 aa, Streptococcus agalactiae
TTGGCTAAAAAAACGAAAAAAGCAGAAGAAATTACTAAGAAATTCGGTGATGAACGTCGAAAAGCCTTAGATGATGCTTTGAAAAATATTGAAAAAGATTTTGGTAAGGGCGCAGTGATGCGCTTAGGTGAGCGAGCTGAACAAAAGGTTCAAGTAATGAGTTCAGGTTCTCTTGCTTTAGATATCGCTTTAGGAGCAGGTGGATATCCTAAAGGACGTATCGTCGAAATTTATGGACCAGAGTCATCTGGTAAAACAACGGTTGCCCTTCATGCCGTAGCTCAAGCCCAAAAGGAAGGTGGGATTGCTGCCTTTATTGATGCTGAGCACGCTCTTGACCCAGCCTATGCTGCGGCTCTTGGAGTTAATATTGATGAGTTACTCTTGTCTCAACCTGACTCAGGTGAGCAAGGTCTTGAAATTGCAGGTAAATTGATTGATTCAGGCGCAGTTGATTTAGTTGTTGTCGATTCAGTTGCAGCCCTTGTTCCTCGTGCTGAGATTGATGGTGATATTGGTGACAGCCACGTTGGTTTGCAAGCTCGTATGATGAGTCAAGCAATGCGTAAATTGTCAGCATCCATTAACAAGACAAAGACAATCGCAATTTTTATCAACCAGCTAAGGGAAAAAGTAGGCGTTATGTTTGGTAACCCTGAAACAACACCTGGTGGTCGTGCTTTGAAATTTTATTCATCGGTTCGTCTAGATGTTCGTGGTAATACTCAAATCAAGGGGACTGGTGAGCATAAAGATCATAATGTTGGTAAAGAGACAAAAATCAAAGTTGTTAAAAATAAAGTTGCTCCACCATTCCGTGAAGCTTTTGTCGAAATTATGTATGGTGAAGGTATTTCTCGCACGGGTGAGTTAATTAAAATTGCTAGTGATTTGGATATTATCCAAAAAGCAGGTGCATGGTACTCATATAATGGTGAGAAAATTGGACAAGGTTCTGAAAATGCCAAAAAATATTTAGCAGATAATCCAGCAATTTTTGATGAAATTGACCATAAAGTGCGCGTGCACTTTGGAATGACTGAAGATGATTCGCCAGTTCAGTCTGAGCTCGTTGAAGAAAAAAATGAAGCTGATGATCTTGTTTTAGATTTGGACAATGCTATTGAAATTGAGGAA

SEQ ID NO: 12696 - protein, 379 aa, Streptococcus agalactiae; identical to SEQ ID NO: 3774

SEQ ID NO: 12697 - protein, 1256 aa, Streptococcus agalactiae
GTGAGGGCTGAAATTATCGCTGTAGGAACAGAAATTTTAACAGGACAGATCGTTAATACAAACGCACAATTTTTGTCGGAGAAAATGGCAGAATTGGGAATTGATATTTATTTCCAGACAGCTGTAGGAGACAATGAGGAACGTTTATTATCGCTTTTAGATATAGCTAGTCAGCGCAGTCAATTGGTTATCCTATGTGGTGGACTTGGACCTACAGAGGATGATTTAACGAAACAAACTTTGGCTAAATTTTTAGGTAAATCATTAACAGTGGATTTATTAGCTAGTCAAAAATTGGATCGTTTTTTTGCAAGTCGTCCTCAGTTTGCTAGAACGCCAAATAATGAACGACAAGCTCAATTGGTTGAAGGCTCAATACCTCTACAAAACCTTACTGGTCTAGCTGTTGGTGGTATCGTTACATCTAAGGGAGTCCAATATATGGTTTTACCAGGTCCGCCTAGTGAATTAAATCCAATGGTTATGGAGCAGGTGGTACCTATTTTGTCAAATAATGGTACAAAATTATATTCACGTGTATTGAGATTCTTTGGTATCGGTGAGAGTCAGTTAGTCACAATCTTAGAAGACATAATTAAGAATCAGACAGATCCAACTATAGCACCATATGCAAAGGTTGGTGAGGTAACTTTAAGGTTATCAACGAAAGCTGAAAATCAGGATGAAGCCGACTTTAAATTAGATAGCTTAGAAAAAGAAATACTTGCTCTTAAGACATTAGATAACCGTAAATTAAAAGATTTATTATATGGTTATGGTGATAATAATAGTATGGCACGTACTGTTTTAGAATTATTGAAAGTACAAAATAAAACGATTACTGCCGCAGAGAGCTTAACAGCAGGGTTATTTCAATCTCAGTTAGCAGAATTTTCTGGTGCTTCGCAAGTTTTTAATGGTGGTTTTACGACCTATAGTATGGAAGCAAAATCACAACTTCTCGGCATCCCTAAGAAAAAATTGCAAGAATATGGAGTTATCAGTCATTTTACAGCTGAGGCAATGGCTCAGCAAGCTCGCCAACTTTTAAAAGCAGATTTTGGTATCGGTTTAACGGGAGTTGCTGGTCCTGATGAGTTGGAAGGATACCCTGCAGGTACAGTTTTTATTGGGATTGCAACCCCTGAAGGCGTTTCTTCTATTAAAGTATCGATGGAGGGAAGAGCCGCTCAGATGTCCGTCATATCAGTACTTTACATGCTTTTGACCTGGTGCGTAGGGCTTTATTAAAGATA

SEQ ID NO: 12698 - protein, 419 aa, Streptococcus agalactiae
MRAEIIAVGTEILTGQIVNTNAQFLSEKMAELGIDIYFQTAVGDNEERLLSLLDIASQRSQLVILCGGLGPTEDDLTKQTLAKFLGKSLTVDLLASQKLDRFFASRPQFARTPNNERQAQLVEGSIPLQNLTGLAVGGIVTSKGVQYMVLPGPPSELNPMVMEQVVPILSNNGTKLYSRVLRFFGIGESQLVTILEDIIKNQTDPTIAPYAKVGEVTLRLSTKAENQDEADFKLDSLEKEILALKTLDNRKLKDLLYGYGDNNSMARTVLELLKVQNKTITAAESLTAGLFQSQLAEFSGASQVFNGGFTTYSMEAKSQLLGIPKKKLQEYGVISHFTAEAMAQQARQLLKADFGIGLTGVAGPDELEGYPAGTVFIGIATPEGVSSIKVSIGGKSRSDVRHISTLHAFDLVRRALLKI

SEQ ID NO: 12699 - protein, 549 aa, Streptococcus agalactiae; identical to SEQ ID NO: 6443

SEQ ID NO: 12700 - protein, 183 aa, Streptococcus agalactiae; identical to SEQ ID NO: 3780

SEQ ID NO: 12701 - protein, 588 aa, Streptococcus agalactiae
ATGTACGATTATATTAAAGGAAAATTGAGTAAAATAACAGCTAAATTTATTGTTGTGGAAACAGCTGGATTGGGATACGTGATATATGTGGCAAATCCCTACTCTTTTTCAGGTTACGTTAATCAAGAAGTTACCATCTACTTACATCAAGTCATTCGCGATGATGCACATCTTTTATTTGGTTTTCATACGGAAAATGAAAAAGAAATTTTTCTTAATTTAATTTCAGTATCAGGAATTGGTCCAACGACCGCTTTAGCAATTATTGCAGTCGATGACAATGAAGGTCTCGTAAGTGCCATTGATAATAGTGATATTAAGTATTTGACTAAATTTCCAAAGATAGGAAAAAAAACAGCACAACAGATGATCCTTGATTTGTCAGGGAAGTTTGTAGAAGCTTCTGGTGAGAGTGCGACTAGTCGTAAGGTTAGCTCTGAGCAGAATAGCAATCTTGAAGAAGCTATGGAAGCTTTGTTAGCGTTGGGGTATAAGGCGACTGAATTGAAAAAAGTAAAAGCCTTTTTTGAAGGTACGAACGAGACTGTGGAGCAATACATCAAATCTAGTTTGAAGATGTTGATGAAA

SEQ ID NO: 12702 - protein, 196 aa, Streptococcus agalactiae
MYDYIKGKLSKITAKFIVVETAGLGYVIYVANPYSFSGYVNQEVTIYLHQVIRDDAHLLFGFHTENEKEIFLNLISVSGIGPTTALAIIAVDDNEGLVSAIDNSDIKYLTKFPKIGKKTAQQMILDLSGKFVEASGESATSRKVSSEQNSNLEEAMEALLALGYKATELKKVKAFFEGTNETVEQYIKSSLKMLMK

SEQ ID NO: 12703 - protein, 1230 aa, Streptococcus agalactiae
GTGAAAGAGTTTTTTGCTTTGCCAAAACAGCTACAGTTAAGAGAATTATTGCGTTTTATTTCCATTACAGTTGGTTCAGCGATTTTTCCTTTTATGGCAATGTATTATGTTCAATATTTTGGAAATCTAGTTACAGGAATTTTGATCATCATAACTCAACTATCAGGGTTTGTAGCGACCTTATATGGAGGCCATTTGTCAGATGCTATAGGGAGGAAAAAAGTTGTGATTGTAGGTTCACTGCTGGCAACCATTGGTTGGGCTATAACTATAGCTGCAAATGTTCCAAATCATATTACGCCACACTTGACCTTTGTAGGTATCCTTATCATTGAAATAGCTCACCAATTTTATTTCCCTGCCTATGAAGCTATGACCATTGATTTGACGAACGAACAGAATCGTCGCTTTGTTTACACTATAGGTTATTGGTTGGTTAACATCGCTGTAATGCTAGGTTCTGGGATTGCTGGGATTTTCTATGATCACCATTTTTTTGAATTATTAATAGTTCTTCTTATTATTTCAGCGATTTGTTGTTTCGTGGTTTACTTCAAGTTTGATGAGACAAAACCACAGGAGGGAACCTTCAAGCATGATAAGGGAGTTTTAGGAACTTTTAAAAATTATAGTCAGGTTTTAGTGGATAAAGCGTTTGTTGTTTATACTTTAGGAGCAATTGGTTCCAGTGTTGTCTGGCTCCAGGTTGATAATTATTTCTCGGTCAATCTTAAGCAAAATTTTGAAGTAGTGTCCATTTTAGGACATACAATCACAGGTGCTAAAATGCTTAGTTTAGCAGTCTTTACAAACACTCTATTAATTGTCTTACTAATGACAACTATAAATAAATTCATAGAGAATTGGCCTTTGAAACGTCAACTAATATTAGGGAGCTTGATTTGTGGTTTTGGAATGCTTTTTAATATCTCTCTAAACACTTTTGGAGCTATTTTGATTGCCATGACGTTTTTTACCTTTGGCGAAATGATTTATGTTCCAGCTAGTCAGGTTCTAAGGGCGGAGATGATGGTGGAGGGAAAAATTGGATCATATTCTGGATTTTTAGCTATCGCACAACCTGTTGCAAGTGTATTAGCAGGTGCCATGGTTTCGCTCAGCTATTTTACAGGAAAAATAGGTGTTCAAATAACATTGACCATTTTTATGTTAGCAGGTCTGGTTTTAATCTTATATGCTACCAAAATGAAAAATATTGAGATAGGAAAA

SEQ ID NO: 12704 - protein, 410 aa, Streptococcus agalactiae
MKEFFALPKQLQLRELLRFISITVGSAIFPFMAMYYVQYFGNLVTGILIIITQLSGFVATLYGGHLSDAIGRKKVVIVGSLLATIGWAITIAANVPNHITPHLTFVGILIIEIAHQFYFPAYEAMTIDLTNEQNRRFVYTIGYWLVNIAVMLGSGIAGIFYDHHFFELLIVLLIISAICCFVVYFKFDETKPQEGTFKHDKGVLGTFKNYSQVLVDKAFVVYTLGAIGSSVVWLQVDNYFSVNLKQNFEVVSILGHTITGAKMLSLAVFTNTLLIVLLMTTINKFIENWPLKRQLILGSLICGFGMLFNISLNTFGAILIAMTFFTFGEMIYVPASQVLRAEMMVEGKIGSYSGFLAIAQPVASVLAGAMVSLSYFTGKIGVQITLTIFMLAGLVLILYATKMKNIEIGK

SEQ ID NO: 12705 - protein, 1977 aa, Streptococcus agalactiae
ATGAACTTGTCTAAAATTATTGAATTACCGGATATATTAGCTAACCAGATTGCTGCTGGTGAGGTTGTTGAAAGACCTAGTAGCGTCGTTAAAGAATTAGTTGAAAATGCCATAGATGCAGGAAGTAGCCAAATTACCATAGAGGTTGAAGAATCTGGTCTTAAAAAGATTCAAATAACGGATAACGGTGAAGGGATGACTAGTGAGGATGCTGTTCTCAGTTTACGACGTCACGCTACATCCAAAATCAAAAGCCAGAGTGACCTTTTTCGTATTCGGACCTTAGGTTTTCGTGGTGAAGCCCTACCATCAATCGCTTCGATTAGTTTAATGACGATAAAAACAGCTACAGAGCAAGGGAAACAAGGGACGTTACTTGTTGCTAAAGGGGGAAACATTGAAAAACAGGAAGTTGTTTCAAGTCCTCGTGGAACAAAAATTTTAGTTGAAAATTTATTCTTTAATACGCCTGCCAGATTGAAATACATGAAGAGTTTACAGTCTGAACTAGCTCATATTATTGATATTGTTAATAGACTCAGTCTAGCGCATCCGGAAGTTGCTTTTACACTGATAAATGATGGTAAAGAAATGACTAAAACTAGTGGGACTGGCGATTTGAGACAGGCGATTGCAGGTATTTATGGTTTAAATACTGCAAAAAAAATGATTGAGATTTCAAATGCAGATTTAGATTTTGAAATTTCGGGTTATGTAAGTTTGCCTGAATTGACACGAGCTAACCGAAACTATATTACCCTATTAATTAACGGTCGTTACATTAAAAATTTTCTTTTAAACCGCTCAATTCTAGATGGTTATGGTTCAAAGTTGATGGTTGGAAGATTTCCAATTGCTGTCATTGATATTCAGATAGATCCTTATCTAGCAGATGTCAACGTTCATCCGACTAAGCAAGAGGTGAGAATTTCTAAGGAACGAGAATTAATGAGTTTAATAAGCTCAGCAATTTCTGAGAGTCTTAAACAATATGATTTGATTCCGGATGCTTTAGAGAATTTAGCTAAAACTAGTACCCGAAGTGTAGATAAGCCTATACAAACAAGCTTCTCACTAAAACAGCCTGGTTTGTATTACGATAGGACTAAAAATGACTTTTTTATAGATGCAGATACTGTATCTGAACCTATTGCTAACTTTACAAACCTTGACAAAAGTGACGGTTCAGTTGACAATGATGTAAAAAACTCTGTTAATCAAGGAGCAACGCAGTCTCCTAATATAAAGTATGCTAGTAGAGATCAAGCTGATAGTGAGAACTTCATTCATTCTCAGGACTACCTTAGTAGTAAACAGTCACTTAACAAACTTGTTGAAAAATTAGATTCGGAAGAAAGTTCGACTTTTCCAGAGCTCGAATTTTTTGGTCAAATGCATGGGACCTACTTATTTGCTCAAGGGAATGGTGGGTTGTATATTATTGATCAACATGCAGCTCAAGAGCGTGTAAAATACGAGTATTACCGTGAAAAGATAGGTGAGGTTGATAATAGTCTTCAACAATTGTTAGTACCATTTCTATTTGAATTTTCAAGTTCAGATTTTCTTCAATTACAAGAAAAAATGTCATTATTACAAGATGTTGGTATTTTCTTGGAACCGTATGGTAATAATACTTTCATTTTAAGGGAACATCCAATTTGGATGAAAGAAGAAGAGGTAGAGTCTGGCGTTTATGAAATGTGTGATATGTTGTTGCTCACTAATGAAGTCTCAGTGAAAAAATATCGCGCAGAGTTGGCTATTATGATGTCTTGCAAGCGATCTATTAAAGCAAACCATACGCTAGACGATTACTCAGCACGTCATTTATTAGATCAGTTAGCGCAATGTAAAAATCCTTATAATTGCCCTCATGGAAGACCTGTTTTAGTTAATTTTACAAAAGCTGATATGGAGAAAATGTTTAAACGAATCCAAGAAAATCATACAAGCCTCAGGGATTTAGGAAAATAT

SEQ ID NO: 12706 - protein, 659 aa, Streptococcus agalactiae
MNLSKIIELPDILANQIAAGEVVERPSSVVKELVENAIDAGSSQITIEVEESGLKKIQITDNGEGMTSEDAVLSLRRHATSKIKSQSDLFRIRTLGFRGEALPSIASISLMTIKTATEQGKQGTLLVAKGGNIEKQEVVSSPRGTKILVENLFFNTPARLKYMKSLQSELAHIIDIVNRLSLAHPEVAFTLINDGKEMTKTSGTGDLRQAIAGIYGLNTAKKMIEISNADLDFEISGYVSLPELTRANRNYITLLINGRYIKNFLLNRSILDGYGSKLMVGRFPIAVIDIQIDPYLADVNVHPTKQEVRISKERELMSLISSAISESLKQYDLIPDALENLAKTSTRSVDKPIQTSFSLKQPGLYYDRTKNDFFIDADTVSEPIANFTNLDKSDGSVDNDVKNSVNQGATQSPNIKYASRDQADSENFIHSQDYLSSKQSLNKLVEKLDSEESSTFPELEFFGQMHGTYLFAQGNGGLYIIDQHAAQERVKYEYYREKIGEVDNSLQQLLVPFLFEFSSSDFLQLQEKMSLLQDVGIFLEPYGNNTFILREHPIWMKEEEVESGVYEMCDMLLLTNEVSVKKYRAELAIMMSCKRSIKANHTLDDYSARHLLDQLAQCKNPYNCPHGRPVLVNFTKADMEKMFKRIQENHTSLRDLGKY

SEQ ID NO: 12707 - protein, 99 aa, Streptococcus agalactiae; identical to SEQ ID NO: 6435

SEQ ID NO: 12708 - protein, 33 aa, Streptococcus agalactiae; identical to SEQ ID NO: 6436

SEQ ID NO: 12709 - protein, 201 aa, Streptococcus agalactiae; identical to SEQ ID NO: 6433

SEQ ID NO: 12710 - protein, 67 aa, Streptococcus agalactiae; identical to SEQ ID NO: 6434

SEQ ID NO: 12711 - protein, 2574 aa, Streptococcus agalactiae
ATGGCCAAGCCAACGATATCACCGGGAATGCAACAGTATCTGGATATAAAAGAGAATTATCCAGATGCTTTTTTGCTTTTTAGAATGGGTGATTTTTATGAATTATTTTATGATGATGCGGTAAAAGCAGCACAAATCCTGGAGATTAGCTTGACTAGTCGAAATAAGAACGCAGAAAAGCCAATCCCAATGGCAGGTGTTCCCTATCACTCAGCTCAACAGTATATTGACGTTTTAGTTGAATTAGGTTACAAAGTAGCCATTGCTGAGCAGATGGAAGATCCTAAAAAAGCTGTGGGAGTGGTAAAGCGTGAGGTAGTGCAAGTTGTTACCCCAGGAACGGTTGTGGAGTCAACGAAGCCGGATAGTGCTAATAATTTCTTAGTAGCGATTGATTCGCAAGATCAACAAACATTTGGTCTAGCATATATGGATGTCTCAACTGGAGAGTTTCAGGCAACCCTTTTAACAGATTTTGAGTCCGTCCGTAGTGAAATACTAAATTTAAAAGCTCGTGAGATTGTAGTAGGATATCAATTGACGGACGAAAAAAATCACCTACTGACGAAGCAGATGAACTTGCTTTTATCATACGAAGACGAACGACTTAATGATATTCATTTGATTGATGAACAGTTAACTGATTTGGAAATATCTGCTGCGGAAAAACTTTTACAATATGTGCATAGAACACAAAAGCGTGAACTTAGTCATTTACAGAAAGTAGTTCATTATGAAATAAAGGACTATTTACAAATGTCATATGCAACGAAAAATAGTCTAGATTTACTGGAGAATGCTAGAACAAGCAAGAAGCACGGAAGTCTTTACTGGTTGTTAGATGAGACTAAAACAGCGATGGGAACTCGAATGCTGAGAACTTGGATTGACAGGCCTTTGGTAAGTATGAATCGAATCAAGGAACGTCAAGATATTATTCAAGTGTTTCTTGATTATTTTTTTGAGAGAAACGATCTCACAGAAAGTTTAAAGGGTGTATATGATATTGAACGTCTAGCAAGTCGAGTATCTTTCGGAAAAGCCAACCCTAAAGATCTATTGCAACTCGGACAGACCTTATCACAAATTCCTCGGATTAAAATGATTTTACAGTCCTTCAATCAACCTGAGCTTGACATTGTTGTCAACAAAATTGACACTATGCCTGAATTAGAAAGTTTAATTAATACGGCGATAGCCCCAGAAGCACAGGCTACTATCACTGAGGGAAACATTATCAAGTCTGGATTTGATAAGCAATTGGATAATTATCGAACAGTGATGCGTGAAGGTACAGGTTGGATTGCTGATATTGAAGCTAAGGAAAGAGCAGCAAGTGGTATCGGTACTCTTAAAATTGATTATAATAAAAAAGACGGTTATTACTTCCATGTTACCAATTCCAATTTATCACTAGTACCGGAGCATTTTTTCCGTAAAGCGACGTTAAAAAATTCTGAACGCTATGGAACAGCAGAACTAGCCAAAATTGAAGGTGAAGTGCTCGAAGCTCGCGAGCAATCTTCAAATTTAGAATATGATATTTTTATGCGTGTTCGTGCTCAAGTAGAATCTTATATTAAACGTCTTCAAGAGCTAGCAAAGACTATTGCAACCGTTGATGTTCTACAGAGTTTGGCAGTAGTTGCAGAAAATCATCACTATGTTCGTCCCAAATTTAATGATGAACATCAGATTAAGATTAAGAATGGGCGTCATGCAACCGTTGAAAAAGTGATGGGAGTGCAAGAATATATTCCCAATAGTATCTATTTTGATAGTCAGACAGATATCCAGTTGATTACAGGACCAAATATGAGTGGTAAGTCGACCTATATGCGCCAGTTAGCTTTGACAGTTATTATGGCACAAATGGGAGGTTTTGTATCGGCAGACGAAGTTGATTTGCCTGTATTTGATGCAATATTTACTAGGATTGGTGCTGCTGATGACTTAATTTCTGGGCAATCAACCTTTATGGTAGAAATGATGGAAGCGAATCAGGCTGTAAAACGAGCCAGTGATAAATCTTTGATTCTTTTTGATGAATTAGGTCGAGGGACAGCCACTTATGATGGTATGGCATTAGCTCAATCGATTATAGAATATATTCATGACCGTGTTAGGGCAAAAACAATGTTTGCAACTCATTACCATGAGTTGACAGATTTATCTGAACAATTGACAAGGCTTGTCAATGTACACGTGGCTACTTTAGAGAGAGATGGAGAAGTTACCTTCTTACATAAAATTGAATCTGGACCTGCGGATAAGTCTTATGGGATACACGTCGCAAAAATAGCTGGTTTACCAATTGACTTATTGGATAGGGCAACTGATATTTTATCACAGTTGGAAGCTGATGCAGTACAGTTGATCGTATCAGCCCCCCAAGAAGCTGTTACTGCTGACTTAAATGAGGAACTAGATTCTGAGAAGCAACAAGGACAATTATCACTTTTTGAAGAACCTTCAAATGCAGGTAGGGTTATTGAGGAGTTAGAAGCGATAGATATAATGAATCTAACTCCAATGCAAGCTATGAATGCTATATTTGACTTAAAGAAATTATTA

SEQ ID NO: 12712 - protein, 858 aa, Streptococcus agalactiae
MAKPTISPGMQQYLDIKENYPDAFLLFRMGDFYELFYDDAVKAAQILEISLTSRNKNAEKPIPMAGVPYHSAQQYIDVLVELGYKVAIAEQMEDPKKAVGVVKREVVQVVTPGTVVESTKPDSANNFLVAIDSQDQQTFGLAYMDVSTGEFQATLLTDFESVRSEILNLKAREIVVGYQLTDEKNHLLTKQMNLLLSYEDERLNDIHLIDEQLTDLEISAAEKLLQYVHRTQKRELSHLQKVVHYEIKDYLQMSYATKNSLDLLENARTSKKHGSLYWLLDETKTAMGTRMLRTWIDRPLVSMNRIKERQDIIQVFLDYFFERNDLTESLKGVYDIERLASRVSFGKANPKDLLQLGQTLSQIPRIKMILQSFNQPELDIVVNKIDTMPELESLINTAIAPEAQATITEGNIIKSGFDKQLDNYRTVMREGTGWIADIEAKERAASGIGTLKIDYNKKDGYYFHVTNSNLSLVPEHFFRKATLKNSERYGTAELAKIEGEVLEAREQSSNLEYDIFMRVRAQVESYIKRLQELAKTIATVDVLQSLAVVAENHHYVRPKFNDEHQIKIKNGRHATVEKVMGVQEYIPNSIYFDSQTDIQLITGPNMSGKSTYMRQLALTVIMAQMGGFVSADEVDLPVFDAIFTRIGAADDLISGQSTFMVEMMEANQAVKRASDKSLILFDELGRGTATYDGMALAQSIIEYIHDRVRAKTMFATHYHELTDLSEQLTRLVNVHVATLERDGEVTFLHKIESGPADKSYGIHVAKIAGLPIDLLDRATDILSQLEADAVQLIVSAPQEAVTADLNEELDSEKQQGQLSLFEEPSNAGRVIEELEAIDIMNLTPMQAMNAIFDLKKLL

SEQ ID NO: 12713 - protein, 435 aa, Streptococcus agalactiae
ATGAATAAAATAGAACGCCAAAAACGTATTAAACGTTTAATCCAATCAGGGCAGATTGGCACACAAGAAGAAATTAAATTACATTTAAAAAATGAAGGAATCGATGTCACGCAAGCGACTCTATCAAGAGACTTGCGTGAGATTGGTCTTTTAAAATTGCGTAGCCCAGAAGGTAAGCTATATTATAGTTTATCAACAGCTACTTCAAATCGATTTAGCCCAGCCTTACGCTCCTATATTTTGAAAGTATCGCGAGCAAGTTTTATGTTAGTTTTAAATACTAATTTAGGGGAGGCTAGCGTTTTAGCAAACTTTATTGATGAGAAAGGGCTGCCAGAGATTTTAGGAACAATGGCAGGAGCAGACACCTTGTTGGTGATTTGTCAAAATGAAGATATTGCCAAAGTTTTTGAAAAAGAACTATCAGTAGGTTTA

SEQ ID NO: 12714 - protein, 145 aa, Streptococcus agalactiae; identical to SEQ ID NO: 3792

SEQ ID NO: 12715 - protein, 1689 aa, Streptococcus agalactiae
ATGGATACAAAACATCTAATTGCGAGTGAAATTCAAAAAGTTGTTCCAGATATGGAACAATCGACCATTCTTTCTTTATTAGAAACCCCAAAAAATTCGAGCATGGGAGATTTAGCTTTCCCAGCATTCTCTTTGGCTAAAACTCTACGCAAAGCACCTCAAATAATTGCTAGTGACATTGCTGAACAAATTAAAAGCGACCAATTTGAAAAGGTGGAAGCTGTTGGACCTTACGTTAACTTTTTCCTTGATAAAGCCGCAATCTCAAGTCAAGTTCTAAAACAAGTCTTATCTGATGGTTCTGCCTATGCTACTCAAAATATTGGTGAAGGACGAAATGTTGCCATTGACATGTCTAGTCCAAATATTGCTAAGCCATTCTCAATTGGACACCTTCGTTCAACAGTTATTGGTGATAGTTTAGCTAATATTTTTGATAAAATTGGCTATCATCCTGTTAAAATTAATCACCTTGGCGACTGGGGTAAACAATTTGGAATGTTAATCGTTGCTTATAAAAAATGGGGCAATGAAGAGGCTGTCCGTGCTCATCCCATTGATGAACTTTTAAAACTTTATGTCCGTATTAATGCTGAAGCCGAGACAGACCCTAGCGTTGATGAAGAGGCACGTGAGTGGTTTCGTAAACTTGAAGCTAACGATCCTGAAGCAACTGAATTATGGCAATGGTTCCGTGACGAGTCATTATTAGAATTCAACCGTCTTTACGATAAAATGAATGTTACATTTGATAGCTATAACGGCGAGGCATTCTACAACGACAAAATGGAGGAAGTGCTTGAACTGCTAGAATCTAAAAACCTCCTGGTCGAATCTAAAGGTGCACAAGTTGTTAACCTAGAAAAATACGGTATTGAACATCCTGCTCTCATTAAGAAATCCGATGGAGCAACTCTCTACATTACACGCGACTTAGCTGCTGCACTTTACCGTAAACGTACCTACGATTTTGCAAAATCAATCTACGTTGTAGGAAACGAACAGTCTGCACACTTTAAACAACTAAAAGCTGTTCTTAAAGAAATGGACTACGATTGGTCCGATGATATGACTCATGTTCCTTTTGGCCTTGTAACAAAAGGAGGAGCAAAATTATCAACTCGTAAAGGAAATGTAATTCTCCTTGAACCTACTGTTGCAGAAGCTATTAATCGTGCGGCATCTCAGATTGAAGCTAAAAACCCTAACCTAGCAGATAAAGATAAAGTTGCTCAAGCAGTTGGTGTAGGTGCTATTAAATTTTACGATTTGAAAACTGATCGTACAAATGGTTATGACTTTGACTTAGAAGCAATGGTATCATTTGAAGGTGAAACTGGGCCATATGTACAATATGCACATGCTCGTATTCAATCAATCTTACGTAAAGCTAACTTTAACCCATCTAATAGCGATAATTACAGTCTCAACGATGTTGAAAGCTGGGAAATCATCAAACTCATCCAAGATTTTCCTCGTATTATTGTACGTGCGGCAGATAATTTTGAGCCCTCTATTATTGCAAAATTCGCTATCAATTTAGCTCAGTGCTTCAATAAATATTACGCCCACACACGTATTTTAGATGAAGACGCTGAAATCAGTAGTCGTCTAGCACTTTGCTATGCAACTGCTACAGTATTAAAAGAATCTCTTCGCCTCCTAGGAGTTGATGCTCCGAATGAAATG

SEQ ID NO: 12716 - protein, 563 aa, Streptococcus agalactiae
MDTKHLIASEIQKVVPDMEQSTILSLLETPKNSSMGDLAFPAFSLAKTLRKAPQIIASDIAEQIKSDQFEKVEAVGPYVNFFLDKAAISSQVLKQVLSDGSAYATQNIGEGRNVAIDMSSPNIAKPFSIGHLRSTVIGDSLANIFDKIGYHPVKINHLGDWGKQFGMLIVAYKKWGNEEAVRAHPIDELLKLYVRINAEAETDPSVDEEAREWFRKLEANDPEATELWQWFRDESLLEFNRLYDKMNVTFDSYNGEAFYNDKMEEVLELLESKNLLVESKGAQVVNLEKYGIEHPALIKKSDGATLYITRDLAAALYRKRTYDFAKSIYVVGNEQSAHFKQLKAVLKEMDYDWSDDMTHVPFGLVTKGGAKLSTRKGNVILLEPTVAEAINRAASQIEAKNPNLADKDKVAQAVGVGAIKFYDLKTDRTNGYDFDLEAMVSFEGETGPYVQYAHARIQSILRKANFNPSNSDNYSLNDVESWEIIKLIQDFPRIIVRAADNFEPSIIAKFAINLAQCFNKYYAHTRILDEDAEISSRLALCYATATVLKESLRLLGVDAPNEM

SEQ ID NO: 12717 - protein, 306 aa, Streptococcus agalactiae; identical to SEQ ID NO: 6425

SEQ ID NO: 12718 - protein, 102 aa, Streptococcus agalactiae; identical to SEQ ID NO: 3796

SEQ ID NO: 12719 - protein, 870 aa, Streptococcus agalactiae
ATGTTGAAACTGGATTTAAAAACAAAGATAAAAGAAGCTATTTTAATTGCCTTGGGTGTGGCTCTCTATACTTTCGGATTTGTCAAATTTAATATGGCTAATCATTTGGCTGAAGGAGGTATTTCCGGTGTCACCTTGATTATCCATGCACTTTTCGGAGTTAATCCAGCACTTTCATCACTTCTCCTTAATATCCCGTTATTTATATTAGGGGCTAGGATTTTAGGGAAAAAATCCTTATTGTTAACTATATATGGTACAGTGTTAATGTCTTTTTTCATGTGGTTTTGGCAACAAATCCCTGTAACAGTCCCTTTGAAAAACGATATGATGTTAGTTGCAGTAGCTGCTGGAATTTTAGCAGGAACTGGTAGTGGTTTAGTATTTAGATATGGTGCAACTACAGGTGGTGCAGATATTATTGGTCGTATTGTGGAGGAAAAATCTGGAATAAAATTAGGGCAAACCTTATTGTTTATTGATGCTATAGTTCTAACGTCTTCACTTGTTTATATTAATTTACAACAGATGCTATATACGTTAGTAGCTAGCTTTGTATTTAGTCAAGTGTTAACAAATGTTGAAAATGGGGGCTACACTGTTCGTGGAATGATCATTATTACCAAAGAATCAGAATCTGCAGCAGCAACCATTTTGCATGAAATTAATAGGGGTGTAACTTTTTTACGGGGCCAAGGTGCCTACTCAGGTAGAGAGCATGATGTCTTGTACGTAGCTCTTAACCCAAGTGAAGTGCGTGATGTGAAAGAAATCATGGCTGATTTAGACCCAGATGCTTTTATTTCTGTTATAAATGTAGATGAAGTTATTAGCTCAGATTTTAAAATTCGACGAAGAAATTACGATAAA

SEQ ID NO: 12720 - protein, 290 aa, Streptococcus agalactiae
MLKLDLKTKIKEAILIALGVALYTFGFVKFNMANHLAEGGISGVTLIIHALFGVNPALSSLLLNIPLFILGARILGKKSLLLTIYGTVLMSFFMWFWQQIPVTVPLKNDMMLVAVAAGILAGTGSGLVFRYGATTGGADIIGRIVEEKSGIKLGQTLLFIDAIVLTSSLVYINLQQMLYTLVASFVFSQVLTNVENGGYTVRGMIIITKESESAAATILHEINRGVTFLRGQGAYSGREHDVLYVALNPSEVRDVKEIMADLDPDAFISVINVDEVISSDFKIRRRNYDK

SEQ ID NO: 12721 - protein, 942 aa, Streptococcus agalactiae
ATGAAAACTAGACGAACCCCTTTAGAAAAAAAGGTAAAATATATTATCAGTGTATGGGCTAAAAAATTTGGTCTCTTACACACTTTAAAAAGTATCTCACGAGAAAAATATGCAGAGAAAATTTCGGCTTCATTACTGTATGGTATTCTATCCAGTGTTGCTGTCAATTTCTTTTTTCAACCTGGACATGTTTATTCAAGTGGAGCAACTGGTTTAGCTCAGGTTATTTCAGCTGTCAGTAAACACTGGTTTTCTTTTGAAATACCAGTTGCTTTAGCTTTTTATGCTATTAATATCCCTTTGCTGATATTATCTTGGCGTAAGATTGGACATAAATTTACTATTTTTACGTTTATCACAGTAACTGTAAGCTCTATCTTCATTCAATTAATGCCTCAAATCACCCTTACAACTGATCCCTTAATCAATGCTATCTTTGGTGGCTTAATTATGGGAGCTGGTGTTGGTTTTAGCTTTAAGTCTAGAATTTCTAGTGGGGGAACAGATATTATCAGTTTGACAATTAGAAAGAAAACAGGCAGAGATGTAGGTAGTATTTCTTTTATTATTAATGGTATTATTTTATTATTTGCAGGTCTTTTATTTGGTTGGAAGTACGCTTTGTACTCGATGGTGACAATTTTTGTATCAAGTAGAGTTACAGATGCCATTTTTACAAAGCAAAAAAAGATGCAAGCGATGATTGTTACCAGTAAGCCTGATTGCGTCATTAAACGTATCCATCGTGATTTACATCGTGGTGTAACCTGTATCAATGATGCTGAAGGTACTTATAATCATGAGAAAAAAGCAGTTTTAATAACTATATTAACACGTGAAGAATTTAGTGATTTTAAATATTTAATGCTAAAAGCAGATCCAAAAGCCTTTGTTTCCGTTGCAGAAAATGTTCATATTATTGGACGATTCGTTGATGATGAT

SEQ ID NO: 12722 - protein, 314 aa, Streptococcus agalactiae; identical to SEQ ID NO: 3800

SEQ ID NO: 12723 - protein, 1749 aa, Streptococcus agalactiae
ATGAAACGTAGTATGTATGCTGGGCGTGTTCGTAGTGAGCACATAGGAACATCGATTACTTTAAAAGGATGGGTTGGTCGTCGTCGTGACCTTGGAGGTCTTATTTTTATTGATCTTCGCGATCGCGAGGGAATCATGCAATTAGTTATTAATCCTGAAGAAGTATCAGCCTCAGTTATGGCAACCGCAGAAAGTCTCCGTAGTGAATTTGTTATAGAGGTTAGCGGTGTAGTGACAGCACGAGAACAAGCTAATGATAATTTACCAACAGGAGAAGTTGAATTAAAAGTGCAAGAATTATCGGTTCTTAATACCTCGAAAACAACACCATTTGAAATTAAAGATGGTATTGAGGCAAATGATGATACACGCATGCGTTACCGTTACTTGGATCTTCGTCGTCCGGAAATGCTTGAAAATTTCAAATTACGTGCGAAAGTAACACACTCAATCCGTAATTACCTTGACAACTTAGAGTTTATTGATGTCGAAACTCCGATGCTAACAAAATCAACTCCAGAGGGGGCACGAGACTACTTGGTTCCATCACGTGTCAACCAAGGACATTTTTATGCCCTTCCACAAAGCCCTCAAATTACAAAACAGCTATTGATGAATGCGGGATTTGATCGTTATTATCAAATTGTCAAATGTTTCCGTGATGAGGATTTACGTGGAGATCGTCAACCCGAGTTTACACAAGTTGACTTAGAGACATCATTCCTTAGTGATCAAGAAATTCAAGACATTGTTGAGGGTATGATTGCTAAAGTAATGAAAGACACTAAAGGTTTAGAGGTTTCTTTACCATTCCCAAGGATGGCATATGATGATGCAATGAATAACTACGGGTCTGATAAGCCTGATACAAGGTTTGATATGCTTTTACAAGACTTGACAGAAGTTGTAAAAGAAGTTGACTTCAAGGTATTCTCAGAAGCTTCAGTAGTTAAAGCGATTGTTGTCAAAAATAAGGCGGACAAGTACTCTCGAAAAAATATTGATAAATTAACAGAAATTGCAAAACAATACGGTGCCAAAGGTTTAGCATGGCTAAAATATGCAGATAATACTATTTCAGGTCCGGTTGCTAAGTTCTTGACAGCTATTGAAGGTAGGTTGACAGAAGCTTTACAGCTAGAGAATAATGACTTAATTCTATTTGTAGCAGATAGTCTTGAAGTAGCTAACGAGACTTTAGGAGCGCTTCGTACACGCATTGCAAAAGAACTTGAACTCATTGATTATTCTAAATTTAATTTCCTATGGATTGTTGATTGGCCAATGTTTGAGTGGTCAGAAGAAGAGGGACGATATATGTCGGCTCATCATCCATTCACCTTGCCAACAGCGGAGACAGCGCATGAGTTGGAAGGGGATTTGGCTAAAGTACGTGCAGTTGCCTATGATATTGTTTTGAATGGATATGAGTTAGGCGGTGGTAGCCTACGTATTAACCAAAAAGATACACAAGAGCGTATGTTCAAGGCTTTAGGATTTAGCGCTGAATCAGCTCAGGAACAGTTTGGTTTCTTACTTGAAGCTATGGATTACGGCTTCCCACCACATGGTGGATTGGCAATAGGCCTTGACCGCTTTGTTATGTTGTTAGCAGGCAAGGACAATATTCGAGAAGTTATTGCATTCCCTAAAAACAATAAGGCTAGTGATCCAATGACTCAAGCTCCTAGTCTCGTTTCAGAACAACAATTAGAAGAATTATCACTTACTGTAGAAAGTTATGAAAAC

SEQ ID NO: 12724 - protein, 583 aa, Streptococcus agalactiae
MKRSMYAGRVRSEHIGTSITLKGWVGRRRDLGGLIFIDLRDREGIMQLVINPEEVSASVMATAESLRSEFVIEVSGVVTAREQANDNLPTGEVELKVQELSVLNTSKTTPFEIKDGIEANDDTRMRYRYLDLRRPEMLENFKLRAKVTHSIRNYLDNLEFIDVETPMLTKSTPEGARDYLVPSRVNQGHFYALPQSPQITKQLLMNAGFDRYYQIVKCFRDEDLRGDRQPEFTQVDLETSFLSDQEIQDIVEGMIAKVMKDTKGLEVSLPFPRMAYDDAMNNYGSDKPDTRFDMLLQDLTEVVKEVDFKVFSEASVVKAIVVKNKADKYSRKNIDKLTEIAKQYGAKGLAWLKYADNTISGPVAKFLTAIEGRLTEALQLENNDLILFVADSLEVANETLGALRTRIAKELELIDYSKFNFLWIVDWPMFEWSEEEGRYMSAHHPFTLPTAETAHELEGDLAKVRAVAYDIVLNGYELGGGSLRINQKDTQERMFKALGFSAESAQEQFGFLLEAMDYGFPPHGGLAIGLDRFVMLLAGKDNIREVIAFPKNNKASDPMTQAPSLVSEQQLEELSLTVESYEN

SEQ ID NO: 12725 - protein, 1278 aa, Streptococcus agalactiae
ATGAAACTTCAAAAACCAAAAGGGACTCAGGATATCTTACCTGGAGAATCAGCAAAGTGGCAATACGTTGAAAATGTTATACGCAATCTCTTTAAACAATATCATTATGATGAAATTCGTACACCAATGTTTGAACATTACGAGGTTATTAGTCGCTCAGTTGGGGATACAACGGATATCGTTACAAAAGAGATGTATGATTTTCATGATAAAGGAGATCGTCACATTACGCTTCGTCCAGAAGGAACAGCACCTGTTGTACGTTCTTATGTTGAAAATAAACTATTTGCACCAGAAGTTCAAAAACCAACCAAAATGTATTATATTGGATCAATGTTCCGATATGAGCGCCCACAGGCTGGTCGTTTACGAGAATTTCATCAAGTAGGCGTTGAGTGCTTTGGATCAAATAATCCAGCAACTGATGTTGAAACAATCGCAATGGGACATCATCTATTTGAAGATTTAGGTATCAAAAATGTTAAACTTCATCTTAATAGTTTAGGGAGTCCAGAAAGTCGTCAAGCCTATCGCCAAGCTCTTATTGATTACTTAACACCCATACGTGAACAATTGTCTAAGGATAGTCAACGTCGTTTGAATGAAAATCCATTGCGCGTACTAGACTCTAAGGAGCCAGAAGACAAACTAGCAGTTGAAAATGCTCCTTCTATTTTAGATTATTTAGATGAGTCAAGCCAAGCCCACTTTGATGCTGTGTGTCATATGCTTGATGCTCTAAATATTCCATACATCATTGATACTAATATGGTTCGTGGTCTTGATTATTATAATCATACTATTTTTGAGTTTATCACTGAGATTGAAGATAATGAATTAACGATCTGTGCTGGAGGCCGTTATGACGGCTTAGTATCCTATTTTGGTGGACCAGAAACTCCAGCATTTGGTTTTGGATTAGGTTTAGAACGCTTGCTCTTAATATTAGGTAAGCAAGGGATTCCTTTACCAATAGAAAATACTATAGATCTGTATATAGCTGTATTAGGATCAGAGGCTAATCTAGCTGCCTTAGATTTGGCACAATCAATACGTCATCAAGGTTTTAAAGTAGAACGTGATTATTTGGGTCGTAAAATCAAAGCACAATTTAAGTCTGCAGATACTTTTAATGCTAAAGTGATTATGACATTAGGTAGCAGTGAAGTAGATTCGAGAGAGGTCAGTTTAAAAAATAATCAAACACGTCAAGAAGTTAAAGTTAGTTTTGAAAACATTAAAACAGGTTTTTCATCTGTGCTTAAACAATTAGGATTG

SEQ ID NO: 12726 - protein, 426 aa, Streptococcus agalactiae
MKLQKPKGTQDILPGESAKWQYVENVIRNLFKQYHYDEIRTPMFEHYEVISRSVGDTTDIVTKEMYDFHDKGDRHITLRPEGTAPVVRSYVENKLFAPEVQKPTKMYYIGSMFRYERPQAGRLREFHQVGVECFGSNNPATDVETIAMGHHLFEDLGIKNVKLHLNSLGSPESRQAYRQALIDYLTPIREQLSKDSQRRLNENPLRVLDSKEPEDKLAVENAPSILDYLDESSQAHFDAVCHMLDALNIPYIIDTNMVRGLDYYNHTIFEFITEIEDNELTICAGGRYDGLVSYFGGPETPAFGFGLGLERLLLILGKQGIPLPIENTIDLYIAVLGSEANLAALDLAQSIRHQGFKVERDYLGRKIKAQFKSADTFNAKVIMTLGSSEVDSREVSLKNNQTRQEVKVSFENIKTGFSSVLKQLGL

SEQ ID NO: 12727 - protein, 180 aa, Streptococcus agalactiae; identical to SEQ ID NO: 8645

SEQ ID NO: 12728 - protein, 60 aa, Streptococcus agalactiae; identical to SEQ ID NO: 3806

SEQ ID NO: 12729 - protein, 147 aa, Streptococcus agalactiae
ATGCGCGTAAATATTACACTTGAACATAAAGAATCTGGTGAACGCTTGTACCTTACTTCAAAAAACAAACGTAACACTCCAGACCGTCTTCAATTGAAAAAATACTCACCAAAACTTCGTAAACACGTTGTTTTTACTGAGGTTAAG

SEQ ID NO: 12730 - protein, 49 aa, Streptococcus agalactiae; identical to SEQ ID NO: 3808

SEQ ID NO: 12731 - protein, 611 aa, Streptococcus agalactiae
ATGATTCAAAATGTTGTTACTTCAATAATCCTGTATTCTGGGACAGCCGTAGACTTACTTATTATCCTAATGTTATTTTTTGCCAAAAGAAAAAGCAGAAAAGACATCATTAACATCTATTTAGGACAATTTCTAGGCTCTGTTAGTCTAATATTCCTAAGTTTGCTTTTTGCATTTGTCTTAAATTATATTCCTAGTAAAGAGATTTTAGGTTTACTCGGTTTGATTCCAATTTTCCTAGGCCTAAAAGTTTTGCTTTTAGGAGATTCTGATGGAGAAGCTTTGCAAAAGATGGTTTGCGAAAAGACAATAAAAACCTGATTTTTCTAGTCGCTATGATTACTTTTGCAAGTTGTGGCGCTGACAATATTGGTGTCTTTGTCCCATATTTTACCACCTTAAATTTAGCGAATTTGATAGTGACTTTACTTACTTTTCTAGTCATGATTTATCTCTTGGTTTTTTCTGCACAAAAATTAGCACAAGTCCCTTCTGTTGGAGAAACTTTGGAAAAATATAGCAGATGGTTTATTGCCGTTGTCTATTTAGGATTGGGGATGTATATCCTGATTGAAAACAACAGCTTTGACATGCTATGGGCTGTGTTAGGC

SEQ ID NO: 12732 - protein, 204 aa, Streptococcus agalactiae; identical to SEQ ID NO: 8642

SEQ ID NO: 12733 - protein, 336 aa, Streptococcus agalactiae
ATGAAAAAAGATAGTATCTGTCAAGTGGATGTTATAAATCAACAAAATGTTACAACCGCAACGAACTACCTTGAAAAGGAAAAAGTCCAAAAATCACTTCGCATTTTATCAAAATTTACCGATAATAAACAGATAAATATCATCTTTTATCTCCTTGCCGTCGAAGAACTCTGTGTCTGCGATATAGCCTGTTTATTAAATCTCAGTATGGCATCTGCCTCCCACCATCTTCGTAAACTAGCCAATCAAAACATCTTGGACACTAGAAGAGAGGGGAAAATTGTATATTATTTTATAAAAGATGAGGAAATCAGAGATTTTTTTAATCAACTAGGA

SEQ ID NO: 12734 - protein, 112 aa, Streptococcus agalactiae
MKKDSICQVDVINQQNVTTATNYLEKEKVQKSLRILSKFTDNKQINIIFYLLAVEELCVCDIACLLNLSMASASHHLRKLANQNILDTRREGKIVYYFIKDEEIRDFFNQLG

SEQ ID NO: 12735 - protein, 1413 aa, Streptococcus agalactiae
ATGAAATTTTTTGAAGAAAATTATTCACAAGAAATACCTACTCGTATCAAAAATTTAAGAAAAAAATACAATATTACACAAAGCGAACTAGGCAATGCAGGTCAAGTTAGTCAAGTTGAAAGTGGTAAGCGACCAATTACGAGTTCGATGTTAGTTTATTTAAATGCTCTAACCGCTTCGAGCTATACGTATATCGTTTTTGGAGAGTTAGATGAGTTTATTGAGAATCTGTTTCATTATTTTTTCAGTTCTATTTTATATAGAGATTTAGAGGCTGTAGATGAAAAACTATATTCTTTCATGAGTGATGATTTAATTTCAATCCAATCAAGTTGTCTAAGTATTGCCAAGACATTTGCAAATTTCAATATTCAAAGAAAAAGATTTATGATTTCTACTGAAACTGAAATGGATACTTTTCACAAGAAAGATGACATTGACGTATGGGTTGGTGGAAAAAGTTATAACCCCGCTAGAAGTTTTAGAACCCGTACCATCAATGAATTGACTGTCATTGATTTTGAAGAAATGTTTGATATTCTTTGGTTGATGTTAGGGGATAATTTAATTAAATCATTTGAAGTTAATGTCTGTGGTATCCTATTTGAATTAGGCGGAAATGACATACCCTCAACATTTAGGCAAGAAAACATTGATCCTCTCATCAATAAATGGTGGTATGATAATGTTTCGACAGAAATTATCCCTAATCTAATAAAAAAACTCAAAGAAAATCCCTTGTTTAATATCGGATTTATGGTAAATGATATATTAGAAAGAATGTATAAAGAGAATATTCCAAAATCTTACCTTACATCCGTCCCATTAGTTATTTCTCAAAAAGGAAGAACAACCTATTCGTTTAGTATGACTGGTGGTCAACAAATAGATGGAGTGAAATTCAAACAGATATATGAGGACTATATGAAATTACTCAGTCAAGGTAAGGATATCGCAGAGTTATATCAAAAATATTCTAAAGAAGAGTTGGCAAATCTAGGCATTAATATTTATCAATCCAATGATATAGAAAGGACTGAGGAAAGAACTTTTGATGAAATTATCAGTTGGGTTTCCAACCCTTATGCAACAAGACCAATTCAAGAAAGGCACACTATTCAATTAGAGCCAACAAGATTTTCACTAGAGGATAAGAAAAGAATTGAAGAAGCTGCAGCTCAAGGACTAAGCGAAATCGACCTTATTGATTTAGTTGACCTATATGATATTAATTTAGACAATACAAGCGTCAATCGCCATATTGTGGGGTTATTGACTAATAACACCCAAGTAACATACTATTTCCAAGAACAATTAAATAAGGAGTTGCTGTCAATGGCTCACGCTTTAGATAACGTACAACAGGCCTTTATTAAATTATTAAGTGAAGAGGAGATACGAAAATTTGCTCTT

SEQ ID NO: 12736 - protein, 471 aa, Streptococcus agalactiae
MKFFEENYSQEIPTRIKNLRKKYNITQSELGNAGQVSQVESGKRPITSSMLVYLNALTASSYTYIVFGELDEFIENLFHYFFSSILYRDLEAVDEKLYSFMSDDLISIQSSCLSIAKTFANFNIQRKRFMISTETEMDTFHKKDDIDVWVGGKSYNPARSFRTRTINELTVIDFEEMFDILWLMLGDNLIKSFEVNVCGILFELGGNDIPSTFRQENIDPLINKWWYDNVSTEIIPNLIKKLKENPLFNIGFMVNDILERMYKENIPKSYLTSVPLVISQKGRTTYSFSMTGGQQIDGVKFKQIYEDYMKLLSQGKDIAELYQKYSKEELANLGINIYQSNDIERTEERTFDEIISWVSNPYATRPIQERHTIQLEPTRFSLEDKKRIEEAAAQGLSEIDLIDLVDLYDINLDNTSVNRHIVGLLTNNTQVTYYFQEQLNKELLSMAHALDNVQQAFIKLLSEEEIRKFAL

SEQ ID NO: 12737 - protein, 447 aa, Streptococcus agalactiae; identical to SEQ ID NO: 8501

SEQ ID NO: 12738 - protein, 149 aa, Streptococcus agalactiae; identical to SEQ ID NO: 8502

SEQ ID NO: 12739 - protein, 318 aa, Streptococcus agalactiae; identical to SEQ ID NO: 8503

SEQ ID NO: 12740 - protein, 106 aa, Streptococcus agalactiae; identical to SEQ ID NO: 8504

SEQ ID NO: 12741 - protein, 1098 aa, Streptococcus agalactiae
ATGACTTCACAATCTCGTGATGTGCTAAACCAATCTTACCTGCAATCTTACCTGCTCCAGAGCCTAAACATGGCTCTGGGGGCTTTAATGCAGGGAGAAACCAGCTACACCAATTCTTTTAATATTGTTATTCAAGCAGACGGCTTTATCTTTGTCCCTCGTCTACCATGTGCTTATATCCTTGATGATGACTTGTACAAGAAAATCTTTCTGATTGCCAATGCTTCACTTTATCCACAATATACGCTTCTAAAACAAAACGCTACCGATTTTGTCCCTCTAGAAACAGATGACTTACACACTCAGCGTGGATTATTTTTCCCTTGGAAAAAGGGAATTTCAGAACGTTTAGTCATTCCAGATTTGGATAAGTTTTCAGCTAGCTTGCCACAGGGGAAAATCCCTATCATGAAGTACTTTGAACTCAATTTAGATAAGGTTAATCACTGGGCTATTGCTGGAAATTCAGGTTCTGGGAAATCGTACGCTCTCACTTATTTCTTGAGTGTACTAAAGCATATGTCTGACTTGATTATCATTGACCCTAAATTTGATACCCCAAGTCGATGGGCAAGAGAAAATCACGTTGCTGTTATACACCCTGTTGAAAACCGTTCAAAATCAGATTTTGTCTCACAGGTCAATGAACAATTAAGTCAGTGTGCAACTCTCATTCAGAAACGACAAGCTATCTTGTATGATAATCCCAATCATCAATTTACCCATCTAACTATTGTTATTGATGAAGTCCTCGCTCTATCAGAGGGAGTCAATAAGAATATCAAAGAAGCCTTTTTCTCCCTACTCTCACAGATTTCCTTATTAGGACGTGCTACCAAAATCCATCTGTTTTTGGTAAGCCAGCGTTTTGACCACAATACTATTCCAATTTCAGTGAGGGAACAGCTAAACGTATTGTTGCAAATTGGAAATATCAATCAGAAAACTACTCAATTTTTATTTCCAGACCTAGACCCAGAGGGTATTGTTATTCCAATAGGACATGGGACAGGTATCATTCAAGTTATCGATAATGAACATCCCTACCAAGTTCTGCCCTTACTCTGTCCAACCTACTACACTAAACGAGGTATTCTA

SEQ ID NO: 12742 - protein, 366 aa, Streptococcus agalactiae
MTSQSRDVLNQSYLQSYLLQSLNMALGALMQGETSYTNSFNIVIQADGFIFVPRLPCAYILDDDLYKKIFLIANASLYPQYTLLKQNATDFVPLETDDLHTQRGLFFPWKKGISERLVIPDLDKFSASLPQGKIPIMKYFELNLDKVNHWAIAGNSGSGKSYALTYFLSVLKHMSDLIIIDPKFDTPSRWARENHVAVIHPVENRSKSDFVSQVNEQLSQCATLIQKRQAILYDNPNHQFTHLTIVIDEVLALSEGVNKNIKEAFFSLLSQISLLGRATKIHLFLVSQRFDHNTIPISVREQLNVLLQIGNINQKTTQFLFPDLDPEGIVIPIGHGTGIIQVIDNEHPYQVLPLLCPTYYTKRGIL

SEQ ID NO: 12743 - protein, 684 aa, Streptococcus agalactiae
ATGACCAATAAAACCTACTTTATGAGAAGTTTTAATCTCATACTATATTTATTTCTATTTGCACCTATCTGTTCTGCATTTGGATGGTTATTCAATTATCTTTCCGTTCAATTAACAAACATCACGTTTGTCAATTTAGATACGGTCAAAAGTATTACGGATATCATTAGTTCCGTTTGTCATGGATTTGCACTTATTTCTCTTCTACTTGCCTTATTTTTGGTTGGATTAGAAATAATACAACGGTTGAAAACAGATAGTCTTTGGAACTATATCCAATCTGTCTATCACACTTTTCTGTTGCGACACTTCCTGTTTCAGCGTGAACGAGTACAGAAGATAAGCAATCTTGAACATCAGACGGTTACTACTATCAACCCAATCCATAACGGATTTAACCGAGCTGTTCGTAAGTGTATCGTAGATATACGAAAAGATACCATCACTATTTTTCTAAAAGTCCCTAGAGACCAACAAGGGCAAAAAATCCTAAAAGAGATGGAAGCACAATTAAAAGAAGAAATCGTCAGCCAACACGCAGACTATTATTTCTCCTCTCCTATTCGAGTTCGTAACCAATTGTGGTTCACTGAACAAAAACTTAATCCCTTGGGGCTGTGGCTTGCGTTAAGCAAAAGCCAGACAGCCCCTTTTTATATTCTTTTCTATCATGACCTATTGGGG

SEQ ID NO: 12744 - protein, 228 aa, Streptococcus agalactiae
MTNKTYFMRSFNLILYLFLFAPICSAFGWLFNYLSVQLTNITFVNLDTVKSITDIISSVCHGFALISLLLALFLVGLEIIQRLKTDSLWNYIQSVYHTFLLRHFLFQRERVQKISNLEHQTVTTINPIHNGFNRAVRKCIVDIRKDTITIFLKVPRDQQGQKILKEMEAQLKEEIVSQHADYYFSSPIRVRNQLWFTEQKLNPLGLWLALSKSQTAPFYILFYHDLLG

SEQ ID NO: 12745 - protein, 603 aa, Streptococcus agalactiae
ATGGCAAAAGAACAGCGCTCAACCAAATGGACTTTTCTCTTCTACGAGGAAAGCGCCCCAGAGAACTACTTGAATATATTAGAGGAACTCCATATTCCGTTTATTCTTAGTCCTTGGCACGATAAGGACGTTAATAGACAGACGGGAGAGTTCAAGAAATCGCACAAACACGGTGCTTTCTTCTTTGATTCACTGAAAAGCTATTCACAAGTATCAAATATCATCAGTGACAAACTAAACGGTCCAGCACATGTGGAGGTAGTTATGTCTCCCACTGGTTTATTTGACTACTTTACCCATGCGGAAAATCCAGATAAGACCCCCTACAACATTGAGGATATTGAAGTCGGTTGCGGCTTTAATTTAGAAAAATTCTTGATGGAGATGAACTCCTCGGATTTTATACATGAAGTAGTTGATATTATCGAAGAGAACGACTTTACCGAATTTGAAGAATTGGTCTGGTATGCCCGAGCAAACAATACCAATTTATTAGGGCTTATCATTGAACGTACATATTTCTTCGCCAAATACCTAGATTCACGAAGATACAATCCTAATCGACTCCATAATTCAAACACAGAGGAGAAAGAGAATAATGAA

SEQ ID NO: 12746 - protein, 201 aa, Streptococcus agalactiae; identical to SEQ ID NO: 8510

SEQ ID NO: 12747 - protein, 246 aa, Streptococcus agalactiae; identical to SEQ ID NO: 8511

SEQ ID NO: 12748 - protein, 82 aa, Streptococcus agalactiae; identical to SEQ ID NO: 8512

SEQ ID NO: 12749 - protein, 249 aa, Streptococcus agalactiae
ATGGAAACTGAAACAATTATTCATAATGGCAAAAAAGTCATTAAAAAAATCAAAAAAGATAAGTCCATCTCATACACTTTGAAGGGGACATTTCTGGGAAAAGATATCAAAACTGGTAAGCAAGTCACTACTACCATTACAGCCAAGACACTAAAACAGTTAGATAGAGCAATCATTCAAGCACGACTAGAATTTGAAAAAATGGCTCAACACGAGAAAAAGTTATCGTCATTGATACACTGGAAGATT

SEQ ID NO: 12750 - protein, 83 aa, Streptococcus agalactiae
METETIIHNGKKVIKKIKKDKSISYTLKGTFLGKDIKTGKQVTTTITAKTLKQLDRAIIQARLEFEKMAQHEKKLSSLIHWKI

SEQ ID NO: 12751 - protein, 849 aa, Streptococcus agalactiae
TTGGCAAAGAAATCAAAAGAGTCCATTGAATCTGGTATAAAGCGTGCTGATAAAGGTAGTGCTAAAGATTTTGGTGCTGTTATCCATAAGTTGAAAGATATTTTTGACTATGGAATTACAAACTATGGACTAATCACTAATCCTGTTAGCACTGTTAAGATACCACCTAAGCCAAAATCAAATAAGCAACGCATCATGGTATTACATGATGATGGTCTTGTAATATGGCTTAATTATCTTGAAAGTTTAGATAACAATAGAGCCAATCGTAGATTTAAGTTAATTTGTAATACTCTATTAGCCTCCGCTTTGCGAATAAATGAATTACTTGCATTGACGATTGATGACCTAGATTTTGAAAATTCTTCTATTAACGTCAGTAAAACATTGATGTGGAAAACCGCAAATAAAAAAGATGGGACAAAAGGGGAAGTTATCTGTAAAGCTACACCAAAAACTGATGCAGGAAATCGCTCTGTCCCTCCCCCCATAATAGAAAAACTCAGAGATTTCCACCACGAAATGAACAAGTATCTTGAATTGCACAACAGACATAGAACAAAACTGATTTTCCCTACAATCTATGGGAACTATATGTGTGACAGAAACGAGAGAACAACTCTTAAGAAAAGGTTAGTAGGTCTTGGATTACCAAACTATGGTTTCCATTTATTCCGACATACTCATGCTTCAATGCTACTTAATGCTGGAACAAATTGGAAAGAACTCCAAGTCAGAATGGGACATAAATCCATTTCAACTACAATGGATACTTACGCTGAATTAGCACCACAACGAAAGTTAGAAGCTGTGGGGATTTATCTTGAAAAGATTGCTGAGCTAACGCAA

SEQ ID NO: 12752 - protein, 283 aa, Streptococcus agalactiae
MAKKSKESIESGIKRADKGSAKDFGAVIHKLKDIFDYGITNYGLITNPVSTVKIPPKPKSNKQRIMVLHDDGLVIWLNYLESLDNNRANRRFKLICNTLLASALRINELLALTIDDLDFENSSINVSKTLMWKTANKKDGTKGEVICKATPKTDAGNRSVPPPIIEKLRDFHHEMNKYLELHNRHRTKLIFPTIYGNYMCDRNERTTLKKRLVGLGLPNYGFHLFRHTHASMLLNAGTNWKELQVRMGHKSISTTMDTYAELAPQRKLEAVGIYLEKIAELTQ

SEQ ID NO: 12753 - protein, 387 aa, Streptococcus agalactiae; identical to SEQ ID NO: 6711

SEQ ID NO: 12754 - protein, 129 aa, Streptococcus agalactiae; identical to SEQ ID NO: 882

SEQ ID NO: 12755 - protein, 483 aa, Streptococcus agalactiae
TTGTCAGATTTTATTTTTAAAAATAAAAAGCCCAGAAATATTGATTTCATAGGCTTTTTTATATTAGACTTCCTGCGAAACAAAATATGGTACAATAGTTCTATGAATTATGAAGCAAGCAAACAATTAACTGATGTACGATTTAAGCGCCTTGTTGGTGTTCAGCGCACTACTTTTGAAGAGATGTTAGCTGTGTTAAAAACAGCTTATCAACGTAAACACGCAAAAGGTGGCCGAACCCCTAAGTTAAGCTTAGAAGATCTCCTCATGGCTACTCTTCAATACATGCGAGAATACCGCACTTATGAACAAATTGCGGCTGATTTTGGCATTCACGAAAGCAACTTAATCCGTCGAAGTCAATGGGTTGAATCAACTCTTATTCAAAGTGGTTTTACGATTTCAAAAACTCATCTTAGTGCTGAGGATACGGTGATTGTGGATGCAACAGAGGTAAAAATCAATCGTCCTAAAAAAATCAAC

SEQ ID NO: 12756 - protein, 161 aa, Streptococcus agalactiae
MSDFIFKNKKPRNIDFIGFFILDFLRNKIWYNSSMNYEASKQLTDVRFKRLVGVQRTTFEEMLAVLKTAYQRKHAKGGRTPKLSLEDLLMATLQYMREYRTYEQIAADFGIHESNLIRRSQWVESTLIQSGFTISKTHLSAEDTVIVDATEVKINRPKKIN

SEQ ID NO: 12757 - protein, 669 aa, Streptococcus agalactiae
ATGACAAACTATAAAAACAACTTAAAAAAATTCATGAGCAATAAATTATACGTAGGGTTAGCTTCCATTACGCTACTTGGTATTGGGGGAGCTATAGGAGTAAGCGGAGCTGCATTAGCGCATAACCATCACTCAGAACACATGTCTTTTGAACATAAGCATGAAGGACACGATAAACATCACGATCATAGAGAAAAACACTCACTAAAAACATTAAAGAATATCTCGACAAAAATCGATTATAAGACTGCCTTAGAAACTGCCAAAAAAGAAGCTCGCTCAGGCTTTATTTCACAAATTGAATTAAATACCAAAGGTGATACACCTTTTTATGAAATCAAAGTTATTGATAATAAAATAGCTAAAAAATATAAAATTGATGCTAATTCTGGGAAGATCCTTTCAACAACATCAGATAACCAACTCAATTCAAAAGATGCCCAATTAAAACAACCAAGTAAAGATATTCAGACTGCATTACAAGCTATTCAAGCAAAATATAAAAATGCAAAAATAAAAGAAATTTCTCTTGCGAATAACAAATCAAATAAGCTAGTTTATAAAGTAAAACTACTTGATGGAAATACTCCTAAGATTGCCCAATTTGATAGTGATAAAGCATCATTTATAAAGGCAAATAAGCTTAATACAACTCATAAAAATCACGAC

SEQ ID NO: 12758 - protein, 223 aa, Streptococcus agalactiae
MTNYKNNLKKFMSNKLYVGLASITLLGIGGAIGVSGAALAHNHHSEHMSFEHKHEGHDKHHDHREKHSLKTLKNISTKIDYKTALETAKKEARSGFISQIELNTKGDTPFYEIKVIDNKIAKKYKIDANSGKILSTTSDNQLNSKDAQLKQPSKDIQTALQAIQAKYKNAKIKEISLANNKSNKLVYKVKLLDGNTPKIAQFDSDKASFIKANKLNTTHKNHD

SEQ ID NO: 12759 - protein, 669 aa, Streptococcus agalactiae
ATGAAAATCCTTGTTGTTGAAGATGAGTTTGACTTGAACCGTAGTATTGTAAAACTTTTAAAAAAGCAACACTACAGTGTTGACAGTGCTTCAAATGGTGAAGAAGCCTTACAATTTGTTTCAGTGGCAGAATATGATGTGATTATCTTAGATGTAATGATGCCAAAAATGGACGGCTTCACCTTTTTAAAACTGCTTCGCAACAAAGGAAGTCAAGTATCTATTCTTATGTTGACTGCTCGAGATGCCGTTGAAGATCGTATCGCAGGTCTAGATTTTGGTGCGGATGATTACCTTGTAAAACCATTTGAATTTGGAGAGCTCATGGCCCGAATTCGAGCTATGTTACGACGTACAAATAGACAAGTATCTTCTGATGATATTCAAATTCAAGATATAACAATCAATTTATCTACAAAGCAAGTTTGGAGAAACAACAATTTGATTGATTTAACAGCTAAGGAATACGAAGTCCTTGAGTATTTGGCACGTCACAGAGACCAAGTCCTCTCTCGTCATCAAATTCGTGAACACGTTTGGGATTATGATTATGATGGAGAGTCCAATATTATTGATGTCCTTATCAAAAACCTTCGTCGAAAACTAGATAACAACCGAGACGGATCACTAATAAAAACTAAACGAGGTTTAGGATATGTTATTCCAAAG

SEQ ID NO: 12760 - protein, 223 aa, Streptococcus agalactiae
MKILVVEDEFDLNRSIVKLLKKQHYSVDSASNGEEALQFVSVAEYDVIILDVMMPKMDGFTFLKLLRNKGSQVSILMLTARDAVEDRIAGLDFGADDYLVKPFEFGELMARIRAMLRRTNRQVSSDDIQIQDITINLSTKQVWRNNNLIDLTAKEYEVLEYLARHRDQVLSRHQIREHVWDYDYDGESNIIDVLIKNLRRKLDNNRDGSLIKTKRGLGYVIPK

SEQ ID NO: 12761 - protein, 1362 aa, Streptococcus agalactiae
ATGTTATTCCAAAGTAAAATAAATTACCCTAAAAAGTCTAGCATCATCACTCAAATTACCCTCTGGTACAGCTCTTTTATTTTTATCCTTGTTATCGGTGTATTAATTGGTTCATTTTTTATTTCAAAAAGCATTGCTGAAAACAAATCTGAAAAAAATTTAGAAGCTAAAGCTGTGCAAATGAGTCAAGCGTTAGCTAAAGGTCATCGGTATGAGGCTTTTGAAGATGGAATATTTTATTCAGTCTATGACCAAAATGGAAAAGTTATCTATTCTGGTTTTCCAAAAGGATTTAAAAAGGATTTAGACCATCAACATAAACATAAAAAGAAATTATCTCTATTTTCCATGGAGAATCGTACATTTCAGTATGTTGATATTCCAATTTCTGGGAAAAATCAGTGGTTACGTGCTATCCGTACTGTTGACAGACTGGATAAGCAATTAACTGAATTGTTATTTAGTTTGGGTATCGTTCTTCCTCTTATATTGATTATAATAACTGTTGGTGGCTATTTAATTTTAAAGCGCGCTTTTAGACCGATTCAAGAAATTACTGAAACCGCTCAATTTATTACCCAAAATGAGGACTATACTAAGCGAATTATCACTAAAAATAACGAAAATGAATTAACTGAGCTAGCAGCTGTTATCAATACTATGTTGGCTTCTATTGAATCATCATTTGTTCGGGAAAAACAATTTAACAATGATGTTTCTCATGAACTACGGACTCCTGTAACAGTTATACTTTCTGAAAGTGAATACGGAAAAAACTACGCAGAAAATTTAATTGAAGCAAAAGAATCCTTTGAGGTTATACACCGTCAGTCACTATCAATGAAAAAATTAGTTGAGCAACTTCTAGAATTGACTAAGGCAGAAAATCCATTATCAATTCAGTTAGAACCTCTTAATTTCTCAATTATGATGAAGCAACTAGTATCCGATTCAAGTAGATTATTAGATAATACCCCTATACACCTTGACTCTCAAATCGAAGATGACCTTTGGATTATAGGTCAACAAACACTACTCAAACGGCTTTTTGATAATCTATTTTCAAATGCTATTAAATTTACAAACAATCATATTTCTATTAGTCTAAGACAGTCCGATAATCAAATTGTCTTCTCTATTAAAGATAATGGTCTAGGTATCTCAGTTGATGACCAAAGTAAAATTTGGAACCGTTTCTATCAAGTGGACTCTGCTCGAACCAAGGATAGTCAGTCTGGAATTGGTTTAGGGCTATCTTTAGTAAAACAAATCGCTACAATACACCGTGCTAAAATATGGGTTGATTCTAAACCTGATGATGGCAGTCAGTTTACGCTCACCTTTCCAAAATTGAAGAAAGAC

SEQ ID NO: 12762 - protein, 454 aa, Streptococcus agalactiae
MLFQSKINYPKKSSIITQITLWYSSFIFILVIGVLIGSFFISKSIAENKSEKNLEAKAVQMSQALAKGHRYEAFEDGIFYSVYDQNGKVIYSGFPKGFKKDLDHQHKHKKKLSLFSMENRTFQYVDIPISGKNQWLRAIRTVDRLDKQLTELLFSLGIVLPLILIIITVGGYLILKRAFRPIQEITETAQFITQNEDYTKRIITKNNENELTELAAVINTMLASIESSFVREKQFNNDVSHELRTPVTVILSESEYGKNYAENLIEAKESFEVIHRQSLSMKKLVEQLLELTKAENPLSIQLEPLNFSIMMKQLVSDSSRLLDNTPIHLDSQIEDDLWIIGQQTLLKRLFDNLFSNAIKFTNNHISISLRQSDNQIVFSIKDNGLGISVDDQSKIWNRFYQVDSARTKDSQSGIGLGLSLVKQIATIHRAKIWVDSKPDDGSQFTLTFPKLKKD

SEQ ID NO: 12763 - protein, 1551 aa, Streptococcus agalactiae
ATGCCAGAAAAAATGACAAACAGTGAAAACAAAAAGAGTAAAGGTTTTCGAATGCCAGGTGCCTTTACAATATTATTCATTTTAACAATCTTTTCGGTTTTGGCTACATGGTGGATACCTGCTGGGTCCTATTCAAAATTACAATTTGATACAGCATCATCCAAACTAGTAGTAACAGATCCAAATGGTAAGACAGTTCATGTTCCAGCAACGCAAACACAGTTGGATAAGATGAATGTCAAAATTAAAATTAAAGAATTTACTTCTGGTGCTATTAGTAAGCCAGTTTCAGTTCCAAATACTTACAAACGTTTGAAGCAAAATCCGGCAGGCATTGGCTCCGTGACGACTAGTATGGTAAATGGAACCATTGAAGCTGTTGATATTATGGTATTTATCATGGTACTTGGAGGCATGATAGGAGTAGTTAGAAAGAGTGGCGCTTTTGAGTCTGGTCTTCTAGCTTTAACAAAGAAAACCAAAGGTAGAGAGTTTTTATTGATATTTTTAGTTTCCTTATTGATGGTTTTAGGCGGTACTCTATGTGGTATTGAAGAAGAAGCAGTTGCTTTTTATCCTATTTTAGTTCCAATCTTTTTAGCCATGGGTTATGATTCTATCATTTGTGTAGGTGCTATTTTCTTAGCAAGTTCTGTTGGGACATCATTTTCAACAATTAATCCGTTTTCTTCTGTTATTGCTTCAAATGCAGCTGGTATTAGTTTCACAGAAGGCTTATCATGGCGTACAGTAGGGTGTACTGCAGGTGCTATTTTTGTTGTGGTGTATCTACATTGGTATTCTAAAAAAATAAAAGCGAATCCAGAGTTTTCATATTCCTATGAAGATAGAGTAGAATTTAATGCTAAATGGGGCATGACAACTAACCATACCCCCTCACTCTTTACTGTCAGACAAAAAATTATTTTAAGTTTATTTGTTATTTCATTTCCTTTGATGGTTTGGGGAGTAATGTCACAGGGATGGTGGTTTCCAACCATGGCTTCTTCCTTTTTAGCTATTACAATTATTATTATGTTTTTAACAGCAACTGGGGCAAATGGTATTGGAGAAAGGGATGTTGTTGATGAGTTTGTTAATGGTGCATCAAGCCTTGTTGGGGTTTCATTAATCATTGGTTTAGCGCGTGGTATCAATATTATTTTGAACCAAGGTTATATATCAGATACGATGCTTTACACAGCTTCAAAATTAGCTTCACATGTTAGTGGCCCTGTCTTTATCATTGTTATGATGTTTATCTACTTTGTGTTAGGATTTGTTGTTCCATCCTCGTCGGGTTTAGCAGTACTTTCAATGCCAATTCTAGCACCTCTTGCAGATACTGTTGGGATTCCTCGTTCAGTAGTAGTAATGGCTTATCAATTTGGGCAGTATGCAATGTTGTTTTTAGCACCTACTGGACTAGTTATGGCAACCTTGCAGATGTTAGATATGAAGTACTCCCATTGGCTAAAATTTGTGTGGCCGGTTGTTTTATTCCTCCTAATATTTGGTGGCGGTTTGTTAGTTCTACAAGTTTTAATACTT

SEQ ID NO: 12764 - protein, 517 aa, Streptococcus agalactiae
MPEKMTNSENKKSKGFRMPGAFTILFILTIFSVLATWWIPAGSYSKLQFDTASSKLVVTDPNGKTVHVPATQTQLDKMNVKIKIKEFTSGAISKPVSVPNTYKRLKQNPAGIGSVTTSMVNGTIEAVDIMVFIMVLGGMIGVVRKSGAFESGLLALTKKTKGREFLLIFLVSLLMVLGGTLCGIEEEAVAFYPILVPIFLAMGYDSIICVGAIFLASSVGTSFSTINPFSSVIASNAAGISFTEGLSWRTVGCTAGAIFVVVYLHWYSKKIKANPEFSYSYEDRVEFNAKWGMTTNHTPSLFTVRQKIILSLFVISFPLMVWGVMSQGWWFPTMASSFLAITIIIMFLTATGANGIGERDVVDEFVNGASSLVGVSLIIGLARGINIILNQGYISDTMLYTASKLASHVSGPVFIIVMMFIYFVLGFVVPSSSGLAVLSMPILAPLADTVGIPRSVVVMAYQFGQYAMLFLAPTGLVMATLQMLDMKYSHWLKFVWPVVLFLLIFGGGLLVLQVLIL

SEQ ID NO: 12765 - protein, 924 aa, Streptococcus agalactiae
ATGGCAAAAATTGTTGTTGCACTAGGAGGAAATGCCTTAGGAAATTCTCCAGAAGAACAATTAAGATTAGTAAAACATACTGCAAAATCATTGGTAGCCTTGATAAAAAAGGGACACGAAATTGTTGTAAGTCATGGTAATGGACCACAAGTTGGTGCCATTAATTTAGGAATGAATTTTGCGGCTGAGAGTGGTCAAGGAACTAATTTTCCTTTTCCAGAATGTGGAGCAATGAGCCAAGGATACATAGGCTATCATCTCCAACAGAGCCTTTTAAATGAATTACGTCAAGAAGGAATAAATAAGGAAGTTGCTACAATTATTACCCAAATTGAGGTGGATGAATCAGATCAAGCATTTAGCGCACCTACCAAGCCTATAGGTACCTTTTATGATAAGGAGACATCAGAAAAGATTGCTATAGAGAAAGGGTATACTTTTGTAGAAGACGCTGGACGAGGGTATCGTCGTGTTGTTGCTTCACCTGAACCTAAAAAAATCATCGAAATTAATAGCATTAAAACACTTATTGAAAATGATACCCTAGTTATCGCAGGTGGAGGTGGAGGCATCCCTGTCATTAATAAGGGAGGTTATGAAGGTATTGCAGCTGTTATTGATAAAGACAAATCTAGTGCACTGTTAGCAGGAGAACTAGCTGCGGATCAATTGATTATTCTCACTGCAGTTGATTATGTTTATACTCAATTTGGTAAAGAAAATCAAAAAGCTTTAACAGAGGTTAATGAGAATCAAATGATTGATTACGTTAACCAAGGTGAGTTTGCAAAAGGAAGCATGTTACCTAAAGTAGTAGCCTGTATGAGTTTCTTAGATCACAATCCGAAAGGAACAGCCTTAATCACCTCATTAAATGGTTTAGAAGATGCATTAGATGGGAAATTAGGAACACGTATAACTAAG

SEQ ID NO: 12766 - protein, 308 aa, Streptococcus agalactiae
MAKIVVALGGNALGNSPEEQLRLVKHTAKSLVALIKKGHEIVVSHGNGPQVGAINLGMNFAAESGQGTNFPFPECGAMSQGYIGYHLQQSLLNELRQEGINKEVATIITQIEVDESDQAFSAPTKPIGTFYDKETSEKIAIEKGYTFVEDAGRGYRRVVASPEPKKIIEINSIKTLIENDTLVIAGGGGGIPVINKGGYEGIAAVIDKDKSSALLAGELAADQLIILTAVDYVYTQFGKENQKALTEVNENQMIDYVNQGEFAKGSMLPKVVACMSFLDHNPKGTALITSLNGLEDALDGKLGTRITK

SEQ ID NO: 12767 - protein, 996 aa, Streptococcus agalactiae
ATGAAAAATTTACGTAACCGTAGTTTTCTTACTTTATTGGATTTTAGTACAGCAGAAGTTGAATTTCTTTTAAAACTTTCAGAAGATTTAAAACGTGCTAAATACGCAGGAATTGAACAACAAAAACTTGTTGGTAAAAATATCGCTTTGATTTTTGAAAAAGATTCTACACGGACACGTTGCGCTTTTGAAGTTGCTGCTCACGATCAAGGAGCTCATGTTACTTATTTAGGTCCAACAGGCAGTCAGATGGGTAAAAAAGAGACCTCAAAAGACACTGCGCGTGTGCTAGGTGGTATGTATGATGGTATTGAGTATCGTGGATTTTCTCAAGAAACAGTTGAGACTTTAGCCGAATTTTCAGGAGTTCCTGTGTGGAATGGCTTAACCGATGCTGATCATCCCACGCAAGTACTAGCCGATTTTCTGACTGCTAAGGAATGCTTACATAAGCCCTATAAAGATATTCGCTTTACGTATGTGGGTGATGGACGTAACAATGTCGCTAATGCCTTGATGATCGGTGCTTCTATTGTAGGCATGACTTATCATTTGGTTTGTCCTAAAGAATTAGAGCCAGATCCTGAACTACTCTCTAAATGTCAAGAAATTGCGAAAACTACTGGTGCTTCTATTGAAATCACTGATGATATTGCAGAAGGTGTCAGAGATTCAGACGTCCTATATACAGATGTTTGGGTTTCAATGGGAGAACCGGATGAAGTTTGGAAAGAAAGAATAGCTCTTTTAGAACCCTATCGTATTACCCAAGAAATGCTTAATATGACAGAAAATCCAAACGTTATTTTCGAGCATTGCTTGCCCTCATTTCATAATATAGATACTAAAGTTGGATACGACATTTATGAAAAATATGGTTTGAAGGAAATGGAAGTATCAGATGAAGTTTTTGAAGGCCCTCACTCAGTTGTTTTCCAAGAAGCTGAAAATCGTATGCATACTATTAAAGCAGTTATGGTAGCAACTTTAGGTGAT

SEQ ID NO: 12768 - protein, 332 aa, Streptococcus agalactiae
MKNLRNRSFLTLLDFSTAEVEFLLKLSEDLKRAKYAGIEQQKLVGKNIALIFEKDSTRTRCAFEVAAHDQGAHVTYLGPTGSQMGKKETSKDTARVLGGMYDGIEYRGFSQETVETLAEFSGVPVWNGLTDADHPTQVLADFLTAKECLHKPYKDIRFTYVGDGRNNVANALMIGASIVGMTYHLVCPKELEPDPELLSKCQEIAKTTGASIEITDDIAEGVRDSDVLYTDVWVSMGEPDEVWKERIALLEPYRITQEMLNMTENPNVIFEHCLPSFHNIDTKVGYDIYEKYGLKEMEVSDEVFEGPHSVVFQEAENRMHTIKAVMVATLGD

SEQ ID NO: 12769 - protein, 1293 aa, Streptococcus agalactiae
ATGCTAGATATATTATCAGAAAAACATCTAGAAAGAAAGCAGCGTATTATTATCTCTGCAATAGTTATCGCCTTAGCTGCTCAAATAAATATCTCAATACTTGCTGATGGGTTTATTATGACCTTATCTTTGTTCATTTTGCCTGTCTTTTTATATTTTAATGACGACATTAATCCAATTCTTCTCTGTCTAGGAATTACTTTTGCTTCTCCTATCTTCAGAGGAATCATATTAAGTATCGCTGGCGAGGCTGAGATTCATCAAATAATTGAATTCGTTTTAACTGATATGGCGTTTTATATTTGTTATGGCATCACCTTTTATACTATTTATTGGCATCGTTCCTACCGTAATAAAGGTACTTTTTTCTTTTCTATCATTATTTGTGATTATTTTGCCAACCTTGTAGAAATTAGTTTTCTCATAAAGTTTAACAATTATACTATAACTATATTCGCTACTTTATTTGCCATAGCACTTTTGCGAGCTTTTATTAGTTGCGCTGTGGCTTATACTTATAGTTATCTATCACTTCTCTTACAAAAAGACGATCACGAACGTCGATACTATTATTTTATGTGGTCAACTTCAGCCGTCAAAAGCGAGGTTTATTTTATGCAAAAAAATATCATTGAAATTGAAAACATCATGAAAAATGCTTATTTATTAGATAAAGAGTTATCCAAATATCACCTACCTAAAGAATACCAACACCTCTCTCTAGATATTTCGCGGGACGTTCACGAAGTTAAGAAAGATTACCAAAATATTATTAAAGGCTTAGGAACCTATTTTAGTGTAAAAAATGAATCAACTATGGCATTGAAAGATATCTTTCAAATTGTTTTATCTTATACTAGGAGTATTATTCAATTTCGGCATCAAGATATCATTATTCTCGAAAATAATAAATGTAATTTGATAATATCAAACTATTACTATTTACTAACCATTATTTCCAATATCGTTTTAAATGCAGTAGAAGCTATTGATAAACAAAAAAAGGGTACAATCAGTGTTCACACAGAAGAATTAGAAGATTTTATTAAAATTGAGATTAGTGATAACGGACCAGGAATACCTGATAAAATGAAACACATGATTTTCAAACCTGGATTTTCGACTAAATTTGATGCTAATGGTGATATCTATCGAGGAATCGGGCTATCCCACGTGCGTATTTTAATGGAAGAGCAATATCAAGGAACGATAACTGTTTGTCCTAATCAGCCAAATGGAACAACATTTACACTGTTATTCCGTAAAAATCGATTTAAGTTAGGAGATAATACG

SEQ ID NO: 12770 - protein, 431 aa, Streptococcus agalactiae
MLDILSEKHLERKQRIIISAIVIALAAQINISILADGFIMTLSLFILPVFLYFNDDINPILLCLGITFASPIFRGIILSIAGEAEIHQIIEFVLTDMAFYICYGITFYTIYWHRSYRNKGTFFFSIIICDYFANLVEISFLIKFNNYTITIFATLFAIALLRAFISCAVAYTYSYLSLLLQKDDHERRYYYFMWSTSAVKSEVYFMQKNIIEIENIMKNAYLLDKELSKYHLPKEYQHLSLDISRDVHEVKKDYQNIIKGLGTYFSVKNESTMALKDIFQIVLSYTRSIIQFRHQDIIILENNKCNLIISNYYYLLTIISNIVLNAVEAIDKQKKGTISVHTEELEDFIKIEISDNGPGIPDKMKHMIFKPGFSTKFDANGDIYRGIGLSHVRILMEEQYQGTITVCPNQPNGTTFTLLFRKNRFKLGDNT

SEQ ID NO: 12771 - protein, 831 aa, Streptococcus agalactiae
GTGAAATTCTATATTATTGATGATGACCCCACTATCACTATGATTTTACAAGATATTATTGAAGAAGATTTCAATAATACAGTAGTCAGAGTGAATAATGTCTCCAGTAAGGCATACAACGAATTGCTGATTGCAGATGTTGATATCGTATTGATTGATTTATTAATGCCAATATTAGACGGTGTAACATTAGTCCAAAAAATCTATAAACAGCGTTCCGATTTAAAATTTATTATGATTTCCCAAGTCAAAGATAATGATTTACGACAAGAAGCATATAAAGCAGGAATCGAATTTTTTATTAATAAACCCATTAATATTATTGAAGTAAAAAGCGTCGTGAAACGTGTCACTGATACTATCGAAATGCAAAAAAAATTAAATACAATCCAAAATCTCCTAGAAAATACGCCATCATATCAAAAGCCTATAACGACTAGTAACCTCACTAAAATCCGTTCAATACTCAGTTATTTAGGTATTACTTCAGAGACAGCCTACACAGATATTCTTAACATCTGTGAACTTTTATTAAAACAAGAATTAAATTTTGCCCAATTTGATTTTCAAAAAGAACTTTCTATCGATGAACACCAACAAAAAATCATTTTACAACGTATTCGTCGTGCCGTTAAAAAAGCTATGATAAATATGGCTCATCTGTACATTGATGATTTTGAAAATGAATTAACACTGCAATATGCTAATGCATTGTTTGGATTTCAGAATATCCATAATGAGGCACAACTTATTCAAGGAAAAAGCATGTATGGTGGTAAAATTTCACTTAAACGTTTTTTCGATGAACTTATTTTACAGAGTAAAACGTTT

SEQ ID NO: 12772 - protein, 277 aa, Streptococcus agalactiae
MKFYIIDDDPTITMILQDIIEEDFNNTVVRVNNVSSKAYNELLIADVDIVLIDLLMPILDGVTLVQKIYKQRSDLKFIMISQVKDNDLRQEAYKAGIEFFINKPINIIEVKSVVKRVTDTIEMQKKLNTIQNLLENTPSYQKPITTSNLTKIRSILSYLGITSETAYTDILNICELLLKQELNFAQFDFQKELSIDEHQQKIILQRIRRAVKKAMINMAHLYIDDFENELTLQYANALFGFQNIHNEAQLIQGKSMYGGKISLKRFFDELILQSKTF

SEQ ID NO: 12773 - protein, 720 aa, Streptococcus agalactiae
ATGATTTCATTTGAAAATGTTAGTAAATCATATGGTGATCATACCATCATTGATAATATTAGTTGCCATATTCAAAGAGGAGAATTCTTTGTCCTTGTGGGGGCCAGTGGCAGTGGTAAAACTACCATCCTCAAGATGATTAATCGTCTCATCGAACCAAGCCAAGGCGCTATTACTTTAGATGGGGAAAACATTACATCACTTGATTTGCGACAATTACGCTTAGAAACTGGTTATGTCTTGCAACAAATTGCACTTTTCCCTAATTTAACAGTTGGAGAAAATATAGAACTTATCCCTGAAATGAAGGGCTGGTCAAAAGGTGACCAAAAAAAAGCCGCTAGCGACCTTCTTGATAAGGTGGGTTTACCTGCTAAGGACTACTTTAATCGCTATCCTCATGAGCTCTCTGGTGGTGAACAACAACGCATAGGTATCTTACGAGCAATCGTTGCTAAACCTAAGGTACTACTTATGGATGAGCCATTTTCTGCTTTAGACCCTATCTCAAGACGTCAATTGCAAGATATCACCAAACAATTACAGTCTGAATTGGGTATTACATTAGTGTTTGTCACCCATGACATGAAAGAAGCTATGCGTCTTGCAGATAGAATTTGTGTTATTAAGGAAGGTAAGATAGTGCAATTGGATAGACCAGAAATAATTCAAAATAATCCCTCTGACCAATTTGTTAGAACCCTATTTGAAGAGGAGAAC

SEQ ID NO: 12774 - protein, 240 aa, Streptococcus agalactiae; identical to SEQ ID NO: 3824

SEQ ID NO: 12775 - protein, 587 aa, Streptococcus agalactiae
ATGACAACACTAATCACTACCTTTCAAGAGCGTTTTGGAGATTGGACTCAAAGTCTTATTGAACACCTCCAGCTATCACTACTAACACTTATTTTAGCAACCTTAATTGCTATTCCACTCGGTATCATCATTAGTCATTATAAAAAAATCAGTCATGTTGTCCTTCAGATAACTGGGATATTTCAAACAATTCCTTCTTTAGCCTTGCTTGGTTTATTTATACCTTTTATGGGAATTGGAACTGTACCAGCTGTCGTTGCACTAATTATTTACGCTCTATTTCCAATTTTACAAAATACTGTAACAGCACTGATGCAAATTGATGCTAATCTCATTGAGGCAGCAACTGCTTTTGGAATGACACGTTGGGAAAGGCTTAAAAAGTTTGAGTTAGCTTTAAGTATGCCTGTTATCATCTCAGGCATTAGAACTGCCTCTGTTATGATTATTGGTACAGCTACATTAGCTAGTCTTATCGGAGCTGGTGGCCTTGGATCATTTATTTTGTTAGGGATTGATCGCAACAATCCTTCTCTAATTCTCATAGGGGCAATCTCTTCTGCTGTCTTAGCTATTATATAGTGGTT

SEQ ID NO: 12776 - protein, 196 aa, Streptococcus agalactiae
MTTLITTFQERFGDWTQSLIEHLQLSLLTLILATLIAIPLGIIISHYKKISHVVLQITGIFQTIPSLALLGLFIPFMGIGTVPAVVALIIYALFPILQNTVTALMQIDANLIEAATAFGMTRWERLKKFELALSMPVIISGIRTASVMIIGTATLASLIGAGGLGSFILLGIDRNNPSLILIGAISSAVLAIILVV

SEQ ID NO: 12777 - protein, 828 aa, Streptococcus agalactiae
ATGCCTGGAACAAATACTGCAACGATAACTGTTGCAGGGAAGTTAGGAACTGAACCAGATATTTTAATTAATATGTACAAAGAACTTATTGAGGATCAGACAGATATCAAAGTTAAGCTTAAACCTAATTTCGGAAAAACAACTTTCTTATATCAAGCCCTAAAATCTGGTGACATTGATCTTTACCCAGAGTTTACAGGTACTATTACATCAAGTTTACTTAAAAATCCTCCTAAAGTAAGTAATAACCCTAAACAGGTTTACAACTTAGCCAAAAACGGTATTTTAAAACAAGATAAGTTGTCACTTTTGTCACCTATGGCTTATCAAAACACCTACGCTGTAGCTGTTAAAAAAGATTACGCTGAAGCTAATCAACTCAAAAATATCAGTGACCTAAAAAAATTAGATAAACTAAAAGCTGGTTTCACTTTAGAATTTAAGGATAGAGAGGATGGGAGTATTGGTTTACAGAAACATTATGGTTTAAACCTTGATATCTCAACCTTAGAACCTGCTTTACGATACCAAGCTATCAATAGTAAAGATGTCAATATTATTGACGCTTACTCTACCGATAGTGAATTAATCCAGTATCAACTTCAAATTCTCAAAGACGATAAGCATCTATTTCCGCCATATCAAGGAGCACCGCTACTAAGGCAAGATACGATTAAAAAATACCCTCAAGTAAAAAAAGCTCTCAATAAACTTGCTGGTCATATCACTGAAAAAGAAATGCAAGAAATGAACTACCAAGTAGCTGTAAAGCATAAATCAGCAGCTACAGTAGCTAAACAATATTTAAAAGCACATCATATTATAAAG

SEQ ID NO: 12778 - protein, 276 aa, Streptococcus agalactiae
MPGTNTATITVAGKLGTEPDILINMYKELIEDQTDIKVKLKPNFGKTTFLYQALKSGDIDLYPEFTGTITSSLLKNPPKVSNNPKQVYNLAKNGILKQDKLSLLSPMAYQNTYAVAVKKDYAEANQLKNISDLKKLDKLKAGFTLEFKDREDGSIGLQKHYGLNLDISTLEPALRYQAINSKDVNIIDAYSTDSELIQYQLQILKDDKHLFPPYQGAPLLRQDTIKKYPQVKKALNKLAGHITEKEMQEMNYQVAVKHKSAATVAKQYLKAHHIIK

SEQ ID NO: 12779 - protein, 2499 aa, Streptococcus agalactiae
GTGATTAAAATTGTATTTTTTATATCTGTTTTAGTGCTTATTATTGTTGAAATGATTCATTTGAAACGAACTATTTCTGTTGAGCAACTAAAGAGTGTTTTTGGGCAATTATCTCCAATGAATCTTTTCTTAATTATCCTTGTGGGGGTTATCGCTGTCTTACCGACAACTGGATATGACTTTGTACTGAATGGACTTTTACGTACAGATAAAAGCAAAAGGTATATTTTACAGACTAGTTGGTGTATCAACACTTTTAATAACTTGTCAGGATTCGGTGGCTTAATCGATATTGGGTTGCGCATGGCTTTTTATGGTAAAAAAGGTCAAGAGAAGAGTGACCTAAGAGAAGTGACTCGTTTTTTACCCTATCTTATTTCTGGTCTGTCATTTATTAGTGTGATTGCCTTAATCATGAGCCATATTTTTCATGCCAAAGCTAGTGTTGATTACTATTATTTGGTATTAATTGGTGCTAGTATGTATTTTCCTGTTATTTATTGGATTTCTGGTCATAAAGGAAGCCATTATTTCGGAGATATGCCATCTAGTACTCGTATAAAATTAGGTGTTGTTTCTTTTTTTGAATGGGGATGTGCGGCCGCAGCATTTATAATTATCGGTTATTTAATGGGCATTCATCTACCAGTTTATAAAATTTTACCACTATTTTGTATTGGTTGTGCCGTGGGGATTGTATCCCTTATTCCCGGTGGATTAGGAAGTTTTGAACTAGTTCTATTTACAGGGTTTGCTGCCGAGGGGCTACCTAAAGAAACTGTGGTTGCATGGTTATTACTTTATCGTTTAGCCTACTATATTATTCCATTCTTTGCAGGTATCTATTTCTTTATCCATTATTTAGGTAGTCAAATAAATCAACGTTATGAAAATGTCCCGAAAGAGTTAGTATCAACTGTTCTACAAACCATGGTGAGCCATTTGATGCGTATTTTAGGTGCATTCTTAATATTTTCAACAGCATTTTTTGAAAATATTACTTATATTATGTGGTTGCAGAAGCTAGGCTTGGACCCATTACAAGAACAAATGTTATGGCAGTTTCCAGGTTTATTGCTGGGGGTTTGTTTTATTCTCTTAGCTAGAACTATTGATCAAAAAGTGAAAAATGCTTTTCCAATTGCTATTATCTGGATTATTTTGACATTGTTTTATCTTAATTTAGGTCATATTAGTTGGCGACTATCTTTCTGGTTTATTTTACTATTGTTAGGCTTATTAGTCATTAAGCCAACTCTCTATAAAAAACAATTTATTTATAGCTGGGAAGAGCGTATTAAGGATGGAGTCATTATCGTTAGTTTAATGGGAGTTCTATTTTATATTGCAGGACTACTATTCCCTATCAGGGCTCATATTACAGGTGGTAGTATTGAACGCCTGCATTATATCATAGCATGGGAGCCGATAGCATTGGCTACGTTGATTCTTACTCTCGTTTATTTATGTTTGGTTAAGATTTTACAAGGAAAATCTTGTCAGATTGGCGATGTGTTCAATGTGGATCGTTATAAAAAACTACTTCAAGCTTATGGTGGTTCTTCGGATAGCGGTTTAGCCTTTTTAAATGATAAAAGGCTCTACTGGTACCAAAAAAATGGAGAAGATTGCGTTGCTTTCCAATTTGTAATTGTCAATAATAAATGTCTTATTATGGGTGAACCAGCCGGTGATGACACTTATATTCGTGAAGCTATTGAATCGTTTATTGATGATGCTGATAAGCTAGACTATGACCTTGTTTTTTACAGTATTGGACAGAAGTTGACACTACTTTTACATGAGTATGGTTTTGACTTTATGAAAGTTGGTGAGGATGCTTTAGTTAATTTAGAAACGTTTACTCTTAAAGGGAATAAGTACAAACCTTTCAGAAATGCCCTAAATAGAGTTGAAAAGGATGGTTTCTATTTCGAAGTTGTACAATCGCCACATAGTCAAGAGCTACTAAATAGTTTGGAAGAGATTTCTAATACTTGGTTAGAAGGACGTCCTGAAAAAGGTTTCTCATTAGGATATTTTAATAAAGATTATTTCCAACAAGCCCCAATAGCTTTGGTAAAAAATGCTGAACACGAAGTTGTTGCTTTTGCTAATATTATGCCAAACTATGAAAAGAGTATTATCTCTATTGATTTAATGCGTCACGATAAACAGAAAATTCCGAATGGCGTTATGGATTTCCTCTTTTTATCATTATTCTCTTATTATCAAGAGAAGGGATACCACTATTTTGATTTGGGGATGGCACCTTTATCAGGAGTTGGTCGCGTTGAAACAAGTTTTGCTAAAGAGAGAATGGCGTATCTTGTCTATCATTTCGGTAGTCATTTCTACTCATTTAATGGTTTACACAAGTATAAGAAGAAGTTTACACCATTGTGGTCGGAACGTTATATTTCTTGTTCTCGTTCGTCCTGGTTAATTTGTGCTATTTGTGCCCTATTAATGGAAGATAGTAAAATTAAGATTGTTAAA

SEQ ID NO: 12780 - protein, 833 aa, Streptococcus agalactiae
MIKIVFFISVLVLIIVEMIHLKRTISVEQLKSVFGQLSPMNLFLIILVGVIAVLPTTGYDFVLNGLLRTDKSKRYILQTSWCINTFNNLSGFGGLIDIGLRMAFYGKKGQEKSDLREVTRFLPYLISGLSFISVIALIMSHIFHAKASVDYYYLVLIGASMYFPVIYWISGHKGSHYFGDMPSSTRIKLGVVSFFEWGCAAAAFIIIGYLMGIHLPVYKILPLFCIGCAVGIVSLIPGGLGSFELVLFTGFAAEGLPKETVVAWLLLYRLAYYIIPFFAGIYFFIHYLGSQINQRYENVPKELVSTVLQTMVSHLMRILGAFLIFSTAFFENITYIMWLQKLGLDPLQEQMLWQFPGLLLGVCFILLARTIDQKVKNAFPIAIIWIILTLFYLNLGHISWRLSFWFILLLLGLLVIKPTLYKKQFIYSWEERIKDGVIIVSLMGVLFYIAGLLFPIRAHITGGSIERLHYIIAWEPIALATLILTLVYLCLVKILQGKSCQIGDVFNVDRYKKLLQAYGGSSDSGLAFLNDKRLYWYQKNGEDCVAFQFVIVNNKCLIMGEPAGDDTYIREAIESFIDDADKLDYDLVFYSIGQKLTLLLHEYGFDFMKVGEDALVNLETFTLKGNKYKPFRNALNRVEKDGFYFEVVQSPHSQELLNSLEEISNTWLEGRPEKGFSLGYFNKDYFQQAPIALVKNAEHEVVAFANIMPNYEKSIISIDLMRHDKQKIPNGVMDFLFLSLFSYYQEKGYHYFDLGMAPLSGVGRVETSFAKERMAYLVYHFGSHFYSFNGLHKYKKKFTPLWSERYISCSRSSWLICAICALLMEDSKIKIVK

SEQ ID NO: 12781 - protein, 741 aa, Streptococcus agalactiae
ATGACTGAGAACTGGTTACATACTAAAGATGGTTCAGATATTTATTATCGTGTCGTTGGTCAAGGTCAACCGATTGTTTTTTTACATGGCAATAGCTTAAGTAGTCGCTATTTTGATAAGCAAATAGCATATTTTTCTAAGTATTACCAAGTTATTGTTATGGATAGTAGAGGGCATGGCAAAAGTCATGCAAAGCTAAATACCATTAGTTTCAGGCAAATAGCAGTTGACTTAAAGGATATCTTAGTTCATTTAGAGATTGATAAAGTTATATTGGTAGGCCATAGCGATGGTGCTAATTTAGCTTTAGTTTTTCAAACGATGTTTCCAGGTATGGTTAGAGGGCTTTTGCTTAATTCAGGGAACCTGACTATTCATGGTCAGCGATGGTGGGATATTCTTTTAGTAAGGATTGCCTATAAATTCCTTCACTATTTAGGGAAACTCTTTCCGTATATGAGGCAAAAAGCTCAAGTTATTTCGCTTATGTTAGAGGATTTGAAGATTAGTCCAGCTGATTTACAGCATGTGTCAACTCCTGTAATGGTTTTGGTTGGAAATAAGGACATAATTAAGTTAAATCATTCTAAGAAACTTGCTTCTTATTTTCCAAGGGGGGAGTTTTATTCTTTAGTTGGCTTTGGGCATCACATTATTAAGCAAGATTCCCATGTTTTTAATATTATTGCAAAAAAGTTTATCAACGATACGTTGAAAGGAGAAATTGTTGAAAAAGCTAAT

SEQ ID NO: 12782 - protein, 247 aa, Streptococcus agalactiae; identical to SEQ ID NO: 3830

SEQ ID NO: 12783 - protein, 354 aa, Streptococcus agalactiae
ATGTCTACTTTAACAATAATTATTGCAACATTAACTGCTTTGGAACATTTTTATATTATGTATTTGGAGACGTTAGCCACCCAGTCAAATATGACTGGGAAGATTTTTAGTATGTCTAAAGAAGAGTTGTCATATTTACCCGTTATTAAACTTTTTAAGAATCAAGGTATATACAACGGCTTGATTGGTCTATTCCTCCTTTATGGGTTATATATTTCACAGAATCAAGAAATTGTAGCTATTTTTTTAATCAATGTGTTGCTAGTTGCTGTTTATGGTGCTTTGACAGTTGATAAAAAAATCTTATTAAAACAGGGTGGTTTACCTATATTAGCTCTTTTAACATTCTTATTT

SEQ ID NO: 12784 - protein, 118 aa, Streptococcus agalactiae
MSTLTIIIATLTALEHFYIMYLETLATQSNMTGKIFSMSKEELSYLPVIKLFKNQGIYNGLIGLFLLYGLYISQNQEIVAIFLINVLLVAVYGALTVDKKILLKQGGLPILALLTFLF

SEQ ID NO: 12785 - protein, 96 aa, Streptococcus agalactiae
TTGATAGTGACTGGGCTAGATACTGCATTGGCATTATCTTTATTTACAGAAACCATGGACAACTGGTCCCCAGCTTTCCCCAAAGAACTTGATAAT

SEQ ID NO: 12786 - protein, 32 aa, Streptococcus agalactiae
MIVTGLDTALALSLFTETMDNWSPAFPKELDN

SEQ ID NO: 12787 - protein, 2316 aa, Streptococcus agalactiae
ATGTTAGACGAATTAAAAGCAATCATAAAAAGCCCAAAATTATGGATTACGATGGCTGGGGTTGCACTGATTCCAACGCTATATAATGTTATCTTTCTAAGCTCAATGTGGGATCCTTATGGGAATACTAAAAATTTACCTGTGGCAGTCGTTAACCAAGATAAATCGGCTAAATTAAATGGAAAAACTATTTCAATTGGCAAAGATATGGAGGACAATTTGTCTAAAAATGATAGCTTAGATTTCCATTTTACAACGGCTAAAAGAGCAGAAAAAGAATTAGAAAAGGGTCACTATTATATGGTTATTACCTTTCCTAAAGATCTTTCTAGAAAAGCGACAACTCTCATGACAGAAAAACCAGAAAGGTTAAATATTACTTATAAAACTACTAAGGGGCGTAGTTTTGTAGCTTCAAAAATGAGTGAGACAGCAGCTAATAAACTAAAAGATGAGATAGCAGAATCTATTACAGGGACTTATACTGAATCAGTTTTTAAAAATATGGGTTCTATGAAAACAGGTATCAATAAAGCTGCTGATGGGAGTCAAGAATTATTAAATGGTTCTAATAAGCTACTGGATGGCAGTCAAACCTTGACAAGTAATTTAGATGTTTTAGCAAGCTCTAGTCAAACTTTTTCTGGAGGAGCTAATAAACTAAATAGTGGAATAAACCTTTATACAGATGGTGTGGGGACCCTATCTAACGGGTTAGAAACATTATCAGATGGTGTTACTGCTTACACAACAGGTGTGCATAAGTTGAGTGAAGGTAGTCAAAAATTAGATGATAAGTCTCAAGCATTGGTGGAAGGATCAGAAAAGTTGACGGATGGTTTACAACAATTGTCACAAGCAACTCAACTAAAACCAGAGCAAGAACGTACTTTGCAGAACCTTTCAGATGGATTAAAGAATCTAAATCAGATTATTACAAATTTACAATCGACAGCAACTACTGATAGCGATACTAATAGTAAGTTATTTAATTTTTTATCAACTATTGAATCAAGTACAAAGGCTTTGATGAATACGGCTGCTGCTGATAAACAAAAGCAAATGACTGCGGTACAATCAACGTCAGCTTTTAAAAGTTTAACCCCTGAGCAACAATCTCAAATTACCTCAGCGGTTACTGGAACACCTACTTCAGCTGAGACAATTGCAGCAAATATTTCTTCAAATATAGAAAATATGAAAACTGTGCTTAGTGAAGCATCTAGTTCAACCCCTTCTAATAATAACTCACAAAATCTTCAAACTTTGTCAGGAACAGCTAACAATTTAGTATTAAAAGCTATCTCAGATTTAGATAAAATTCAAAAATTGCCAACGGCTACTAAGCAGTTATATCAAGGTAGTCAAAAATTGACAAAAGGAATCACGGATTATACGAATGCTGTAGGGCAATTACGCAAAGGTGCAGAAACTTTAGATAGTAAATCCAATCAATTGATTTCAGGAACACAAAAAGCAAGTCAGGGAGCTCAAACTTTAGATAGTAAATCGGATCAATTGAGAGACGGAGCGGGGCAATTAGCTAGTGGTTCTGATAGAATTGCAGATGGTTCTAATAAGCTTGCTGGGGGAGGACATCAGTTGACAGATGGGTTGACAGAGTTGTCAGGTGGTGTTTCTCAATTATCAAGTTCTTTGGGGAAAGCTGGGGACCAGTTGTCCATGGTTTCTGTAAATAAAGATAATGCCAATGCAGTATCTAGCCCAGTCACTATCAAGCATGAAGATTATGATAGCGTTGATACGAATGGTGTTGGAATGGCACCATACATGATTTCAGTTGCGTTGATGGTGGTAGCTTTATCAGCCAATGTTATTTTTGCGAAAGCTTTATCTGGCAAAGAGCCAGATAATCGTTTTAGTTGGGCTAAAAATAAATTATTAATCAATGGATTCATTGCAACTCTAGCAGCAACTATCTTATTTTTTGCAGTTCAATTCATAGGTCTTAAACCAGATTACCCTGGAAAAACATACTTTATTATCCTATTGACAGCATGGACTTTGATGGCATTAGTAACTGCTTTAGTGGGATGGGATAATAGATATGGTTCCTTCTTGTCGTTATTAATATTATTATTCCAGCTTGGTTCAAGCGCAGGAACTTACCCAATAGAATTGAGTCCTAAGTTCTTTCAAACAATTCAACCATTTTTACCGATGACTTACTCTGTTTCAGGATTAAGAGAGACCATCTCGTTGACGGGAGACGTTAACCATCAATGGAGAATGCTAGTAATCTTTTTAGTATCATCGATGATACTTGCTCTTCTTATTTATCGTAAACAAGAAGAT

SEQ ID NO: 12788 - protein, 772 aa, Streptococcus agalactiae
MLDELKAIIKSPKLWITMAGVALIPTLYNVIFLSSMWDPYGNTKNLPVAVVNQDKSAKLNGKTISIGKDMEDNLSKNDSLDFHFTTAKRAEKELEKGHYYMVITFPKDLSRKATTLMTEKPERLNITYKTTKGRSFVASKMSETAANKLKDEIAESITGTYTESVFKNMGSMKTGINKAADGSQELLNGSNKLLDGSQTLTSNLDVLASSSQTFSGGANKLNSGINLYTDGVGTLSNGLETLSDGVTAYTTGVHKLSEGSQKLDDKSQALVEGSEKLTDGLQQLSQATQLKPEQERTLQNLSDGLKNLNQIITNLQSTATTDSDTNSKLFNFLSTIESSTKALMNTAAADKQKQMTAVQSTSAFKSLTPEQQSQITSAVTGTPTSAETIAANISSNIENMKTVLSEASSSTPSNNNSQNLQTLSGTANNLVLKAISDLDKIQKLPTATKQLYQGSQKLTKGITDYTNAVGQLRKGAETLDSKSNQLISGTQKASQGAQTLDSKSDQLRDGAGQLASGSDRIADGSNKLAGGGHQLTDGLTELSGGVSQLSSSLGKAGDQLSMVSVNKDNANAVSSPVTIKHEDYDSVDTNGVGMAPYMISVALMVVALSANVIFAKALSGKEPDNRFSWAKNKLLINGFIATLAATILFFAVQFIGLKPDYPGKTYFIILLTAWTLMALVTALVGWDNRYGSFLSLLILLFQLGSSAGTYPIELSPKFFQTIQPFLPMTYSVSGLRETISLTGDVNHQWRMLVIFLVSSMILALLIYRKQED

SEQ ID NO: 12789 - protein, 536 aa, Streptococcus agalactiae
ATGGTAAACGATACGAGGAGAGAAAAAACAAAAAGAGCTATTGAAGCAGCTATGATTACGTTATTAAAAGATCAGAGCTTCGATGAAATTTCAACGATTAATCTAACTAAAACAGCTGGAATCAGTCGTTCTAGTTTTTATACTCATTATAAAGATAAATATGAAATGATTGATCAATACCAACAGTCACTCTTCAATAAAGTCGAATATATTTTTGATCGCAATCAATTTAAAAAAGAAGATGCCTTGCTCGAAATTTTTCAATTCTTAGATAGAGAATCATTATTTGCTGCTCTCTTAACCCAAAATGGAACAAAAGAAATTCAGACTACATCCTTAATAAATTACAATTAATGCTTTCTAAAGAATTACCTGAGGTCAATCCAGATGCAACAAAGTCTGATATCAACCGTTTGTATTATAGTGTCTATCTCAGTCATGCTATTTTTGGAGTCTATCAAATGTGGATAACACGAGGAAAAAAAGAAAGCCCTCAACAAATTACACAAGTGCTACTCAGTTTATTACCTCAAACT

SEQ ID NO: 12790 - protein, 179 aa, Streptococcus agalactiae
MVNDTRREKTKRAIEAAMITLLKDQSFDEISTINLTKTAGISRSSFYTHYKDKYEMIDQYQQSLFNKVEYIFDRNQFKKEDALLEIFQFLDRESLFAALLTQNGTKEIQTYILNKLQLMLSKELPEVNPDATKSDINRLYYSVYLSHAIFGVYQMWITRGKKESPQQITQVLLSLLPQT

SEQ ID NO: 12791 - protein, 294 aa, Streptococcus agalactiae
ATGAATCTAAATGATAGATTAAAAATAGAAGAAATGGAAGAGAAGTATGATAGCTTCAAACCTAGAATCAATGCATTAGTAGAAGCTATAGATGATTTTCAAAAGCACTATGAAGATTACGTGAAATTAAGAGAATTTTATGGTAGCGAAGACTGGTTTAGACTATCAGAACAAGCAGAAAATAATCTCAAATGCGGTGTACTGAGTGAGGATCAGCTCTTTGATTTTATAGGAGAACATAACGAGCTTGTAGGCCAATTTTTAGATATGTCTTCTCAAATGTATCGTCATTTA

SEQ ID NO: 12792 - protein, 98 aa, Streptococcus agalactiae
MNLNDRLKIEEMEEKYDSFKPRINALVEAIDDFQKHYEDYVKLREFYGSEDWFRLSEQAENNLKCGVLSEDQLFDFIGEHNELVGQFLDMSSQMYRHL

SEQ ID NO: 12793 - protein, 345 aa, Streptococcus agalactiae
TTGGTATCTGATAATAAAACCCATAGCCTTATTATCCCTGAAACCGTACAAGAACAATTACAGGAGATAAAAAGCTATATTGAAACTACTTACTTTTCGGAGCAGGCAGGGGCTAACACCGTCAACAATATTCTTTACGGGCTAGAACGTCTTGAATTTTTCCCAGAAGCAGGATTTAACGCAGATGACAGAGTAGGTGAAACTATTTACCCGCCACATAATACTCGTTGTATTGTTTTAGGGGACTACCTAGCTTTTTATCACATTTTAGAAGACAGAAAAGCCGTTTTTGTATCTGATATTATCCATAGCAAACAAGACTATATCAAACTGTTTAAGAAAAAA

SEQ ID NO: 12794 - protein, 115 aa, Streptococcus agalactiae
MVSDNKTHSLIIPETVQEQLQEIKSYIETTYFSEQAGANTVNNILYGLERLEFFPEAGFNADDRVGETIYPPHNTRCIVLGDYLAFYHILEDRKAVFVSDIIHSKQDYIKLFKKK

SEQ ID NO: 12795 - protein, 285 aa, Streptococcus agalactiae
ATGCACGCTTTAGAAAAAAATACGCAGGTCAACTTTAAAACCAACAGTGATTTACTAGAGAAAGCTAAAGCTATTATCGCAGCCCAAAACCTTGACATGACAGCTAGCTTTAATTTGTTTTTAGAAAACATTGTACAAAATAAAGCCTTACCTTTTGAGACTGACACCGATAAAGAACGAGCTGAACTACTTGCAGGTTTACGAGCTGAAATTGCTAAAAGTTTTGACGATTTAGAGCATGGGCGGGTATACAACGCTAGTGAAGTGAGGGCTAACCTTGGTATC

SEQ ID NO: 12796 - protein, 95 aa, Streptococcus agalactiae
MHALEKNTQVNFKTNSDLLEKAKAIIAAQNLDMTASFNLFLENIVQNKALPFETDTDKERAELLAGLRAEIAKSFDDLEHGRVYNASEVRANLGI

SEQ ID NO: 12797 - protein, 117 aa, Streptococcus agalactiae
GTGGATGACTTATCATGGGATGAGATACCCGACAAGCTAGGTTATTCAAGGAATACTGCATTCAAATTACATAGAGAAGCTTTAGAGGTATTAGATGAGCAAGAAGAACGCTATTCG

SEQ ID NO: 12798 - protein, 39 aa, Streptococcus agalactiae; identical to SEQ ID NO: 4142

SEQ ID NO: 12799 - protein, 486 aa, Streptococcus agalactiae
ATGTTAGAACTAGCTATTGAGAGTATCATTAAACCAATGAAGAAACAGGAAAAGACTAGAGTTACAGGAACAATAAATGACCAATCTATCACCATAGACCTAGATAACCTAATCGTCCATTATGAGGGGCAAGAATTCTTACTTGAAACGATACCAGGAACTTATGGTGGTAAGCGCTACTTCTTCCTGTGTCCTGACTGTGAGAGACGTTGTAGAAAGTTATTTAAGGCTTCTCATGCCTTTGCTTGTGGTACTTGTCAGAAGCTTCATCAAGCGACATTCAATCGAAGTAAGACAGATTGTCAATACTATTGGCAACTAGCCTTTAAAGAGTGTCTGAAAGTAGATTCAAAAGCAAAACACAAACATGGTTATTATAGTTATGATGACTTTCCTAAGCGTCCAAAGTACATGAGAATGACTAAATACTTATATCATTGGAAGAGATTCCATTACTATATGGATAAGGGGGACAAATACTGGCTA

SEQ ID NO: 12800 - protein, 162 aa, Streptococcus agalactiae
MLELAIESIIKPMKKQEKTRVTGTINDQSITIDLDNLIVHYEGQEFLLETIPGTYGGKRYFFLCPDCERRCRKLFKASHAFACGTCQKLHQATFNRSKTDCQYYWQLAFKECLKVDSKAKHKHGYYSYDDFPKRPKYMRMTKYLYHWKRFHYYMDKGDKYWL

SEQ ID NO: 12801 - protein, 555 aa, Streptococcus agalactiae
ATGAGAACATTTTCAGACACACCAAAAACATTTACATTCCACTATACTTTTAAAGACTTTGATACTGCGCAAGTTGCCTGTCATGCCATTCTAGGGTATATGACTGGGAGCTATGAGCAACCAGTGATTGACGCAACTTATCACAATGATGATCAAGGTGGTCATGCTAACCAGTTAGTACTTGAATATGCCGAAGACAGAAAACTAAATAAGGTCTTCAAGCGTATCTGTGACAGCTTTAAGGACTATTACAACCAACCTGAGGATATGACGGATGAAGAACTTGATGACGTAGCTCAAGAAACTGAGTTACTAAAGGAGGTTGAAAGTACTGACAAGAAGCGCGTGGTTCCTTTATTTGACAATAGCCAAGAGAAAGCGGACAAACAAGACATATTCATGGCTTTCATCTCAGACCACAACCAACTCGCCGAACACGTTTCCATGAATTATAAAAAGATGACTCAAGAGGATTTAGGAGCTGTACTTGAATCTATCAGCCAAGGCTTTAATTATTTGTATGATATGGCTATTGAGGGTGAGTTACTGGTTAAA

SEQ ID NO: 12802 - protein, 185 aa, Streptococcus agalactiae
MRTFSDTPKTFTFHYTFKDFDTAQVACHAILGYMTGSYEQPVIDATYHNDDQGGHANQLVLEYAEDRKLNKVFKRICDSFKDYYNQPEDMTDEELDDVAQETELLKEVESTDKKRVVPLFDNSQEKADKQDIFMAFISDHNQLAEHVSMNYKKMTQEDLGAVLESISQGFNYLYDMAIEGELLVK

SEQ ID NO: 12803 - protein, 1392 aa, Streptococcus agalactiae
TTGAAAGATTATCAAAATAAACTATCACAAGCCACTCAACCTGCTTTTGCCCCTGCATTCAGGACGCGAAAAGGTAGAGGAGACAAAGAATATGTCATTAGTAGCCCCTACAATGTCGGTAAGGTTTTTGAATTCTACGAAAATATCTTCACAGGTATTAAATACAACGAATTTGAAAAAACTATTGAAATCACTAAAACACTCCCTTGGTCTAAAGAAAAAGGGCTATGGACGAATGAACAGACCAGCCTTTGTATTGCATTCATTGATGATAAATATCGGTTTACCCCTCGTAAAGAACATATAGAGGTAGCTATTACCGCTTTAGCTAAAAAGAACTCTTACCACCCCATTAAACAGCGTATTGAAAGTCAAAAATGGGATGGTAAAGCTAGAGGAGAACGCTACTTTATTGATCTATTAGGCTGTGCTGATAATTCCTATAATAGAGAAATTGCCAAAGTATGGCTAACAGGTCTTATAGCTAGAATTTATCTCCGTAAAGTAAAGTTTGAAGTCGTTCCTATTCTCATTGATAAAAGACAAGGAACTGGAAAAAGCACTGTTACTAAGCGCTTGCTTCCTAGCTACCACACCGATTCAGAAATCAAGTTTGGTAAAAATGATAGTGATTATCAGAAGATACAAGCCAATGCCATCATCGAGCTAGGGGAGCTAAAAGGTATGTCAAAGGCAGAAATTGAAACGGTTAAAAGCTTCATTTCCTCAGATAGTGATACTTATCGTGAACCTTATGAACGTAAAGCCACTCCTCATCCAAGGCACTGTGTCTTTATCGGGACAGCTAACAAAAAATCTTTTCTTAAGGATAGTGGAACAGAAAGACGCTTCTTCCCTATTGAATGTGGTATCAATGACGTGGAAAAACATCCTATGGAGGTGGAAGAAGATTATTTCTTACAGATACTCGCTGAAGCCAAAGTATGGTTTAACAATTATGAACCACTAACACCATCTAAAGAGTTGATGAATCAGTTAGCTGATATTCAAGAAGATTATAAAGTTGAAGACGTTGACAAAGAAATCATTGACCAATTACTGAATGAGTTTCAAATTGTTGAAGGTTGGGATAGTTTATCACAGTATGAACAACGGCAATACGTCCTAAAACAGTTGGGAGAACCTTTAGATAATGCTCAAAGTTATAGTGACTACCCTTCTGCACAGACAAATTGCTTACTCCAGGTCACAAGTCCTAACCATATTGCTTATCTGGGGTTTAACCAAAAACCAACGCAAGGCGGTAAAGCTCTTATTTCTCAAAAAATACGTGACCATTTAGATAATGATGACGGCTGGAAAAAAGGAGAGAATCCCGCAAGAAAAAGACTATTTAAAGGTGGCACTCCCGTATCTTACTATGAACGAGTT

SEQ ID NO: 12804 - protein, 464 aa, Streptococcus agalactiae
MKDYQNKLSQATQPAFAPAFRTRKGRGDKEYVISSPYNVGKVFEFYENIFTGIKYNEFEKTIEITKTLPWSKEKGLWTNEQTSLCIAFIDDKYRFTPRKEHIEVAITALAKKNSYHPIKQRIESQKWDGKARGERYFIDLLGCADNSYNREIAKVWLTGLIARIYLRKVKFEVVPILIDKRQGTGKSTVTKRLLPSYHTDSEIKFGKNDSDYQKIQANAIIELGELKGMSKAEIETVKSFISSDSDTYREPYERKATPHPRHCVFIGTANKKSFLKDSGTERRFFPIECGINDVEKHPMEVEEDYFLQILAEAKVWFNNYEPLTPSKELMNQLADIQEDYKVEDVDKEIIDQLLNEFQIVEGWDSLSQYEQRQYVLKQLGEPLDNAQSYSDYPSAQTNCLLQVTSPNHIAYLGFNQKPTQGGKALISQKIRDHLDNDDGWKKGENPARKRLFKGGTPVSYYERV

SEQ ID NO: 12805 - protein, 855 aa, Streptococcus agalactiae
ATGGCTATTTATGAAGCAAGAGGCTTTAGCTCTTATTTGTACCCCTACAAAGGACAATTAGAACCGTTTGACTATATCGCACAGTTTAAACCAATGAAAACGCCTGAGGCTATCGATATTGAAGAATACAAGCGAACACAAGCTCCGTACTGTTTGAGTGGCAAGGTAACCCCAGAGAAAAACGGTAGCTATAAGCGCAATAATGCTAGTCTAGTCTATCGTGATTTGATTTTTCTTGACTATGACGAGATAGAAACAGACGTAAACCTGCCTAAAATCGTTTCTAAGACACTTTGGGAATACAGCTATATTATTTATCCAACGATTAAACACACCCCTGAGAAGCCACGCTATCGCCTTGTCGTGAAGCCTAGTGACACTATGGACAAAACGACGTATAAACAAGTGGTCAAGGAGATAGCTAATAAGATTGGACTACCGTTTGATTTAGCTAGTCTTACCTGGTCGCAATTACAAGGCTTACCCGTCACAACAGGCGACCCAGAAGACTATCAGCGCTATGTGAACCGTGGTCTTGATTATCCTGTCCCTAAAGCACCCAACCGACAGGTTACTACTACTTACACGTCACGCCCTAGAAGTCAGCGTTCTATTACCATGAGGGTCATAGATACCTTGTTTAATGGTTTTGGAGACGAAGGCGGACGTAATGTAGCCTTAACTAAATTTGTTGGTTTGCTATTTAATAAATGGGTGGATTGTGATTTAGAGACGGCTTATGAGCTGGTACAAATAGCTAACAGCGTGACAACTAAGCCACTACCCATTGATGAGATAGACAAAACTTTTAGAAGCATACTCGATACAGAACTAAGAAAGAGAGGAATCAAGCCA

SEQ ID NO: 12806 - protein, 285 aa, Streptococcus agalactiae; identical to SEQ ID NO: 4266

SEQ ID NO: 12807 - protein, 270 aa, Streptococcus agalactiae
ATGAACGTATTTAGTCAAGATTATGAAGCAAAACTCTTAGAACAAAATCTGACCGCTTTTAATCGCTTCTTAGAAGTATACCAGCAACCTAAACCAAGAGTTTTAGGGTTGATCACGGCTGAACAGGTCAAAGAGGAATTAAATATCAAAGGTAAAACCCTAAAGCGGTGGGAAAACGCTGGGTTAAAACGATACCAACCACCACTAGAAGACACAAGGAAACATTATTACAAGGTCAGTGATATTCTTATCTTTTTGGGGGTGGATGTG

SEQ ID NO: 12808 - protein, 90 aa, Streptococcus agalactiae; identical to SEQ ID NO: 4268

SEQ ID NO: 12809 - protein, 189 aa, Streptococcus agalactiae
ATGCAAGAACTTAACTTTACACTAACACAGACACTTATTTTATTCATTGTTTTAGGTCTCATAGGGCTTCTTCTAAGCCGTTCTAAGCCATTAATAGAGATTGACTTACCAGAAGATACCCAAGCACCTAAACCACGTCAGAATGCAAACTATGGGGCTTATATTCAAGCACAGAACCATTATTACAAT

SEQ ID NO: 12810 - protein, 63 aa, Streptococcus agalactiae; identical to SEQ ID NO: 4270

SEQ ID NO: 12811 - protein, 219 aa, Streptococcus agalactiae
ATGAGGAGTATTGAAGAATTAAATGAAATCGCTAACGACATTTTAGTAGATTATGAAGGTCTTTGCGGTCAACTTATGGATATTCTAAATGTCCTAGATTTGGCTGCTCAAGAATATAGTAAGGAAACAACTAGTGCAATTATAAACACGAGTTGTCGCGCTTTGAAGTGCCTTATTTCTGACCATGATAAGATGACACATAAATACAGAAAGGAGTTG

SEQ ID NO: 12812 - protein, 73 aa, Streptococcus agalactiae
MRSIEELNEIANDILVDYEGLCGQLMDILNVLDLAAQEYSKETTSAIINTSCRALKCLISDHDKMTHKYRKEL

SEQ ID NO: 12813 - protein, 330 aa, Streptococcus agalactiae
ATGAAATATAGAGTAGAAACAAATCCTTTTTCAAAAGATAGATACACTCCTGAACAACGAGAAATGCTCAAAAAACGCCAACTCAGCAAAGATAAAGCGGAAGCCTATTTTGCTCGACTATATAACCATCATATCGCTAGGGTGATTATTGCTAATGTAATGGCAGAGTATACGACTACATTCAGGAAAAGTGCCACTACTTTTGAAGAAGCATGGGGCGCTTTAGGTTATAAACAAACCACAGAGATTGTCTTTAGAGCCGTTAACGGTTTACCATGTTCAGAGAAAGACACAGGGGAATTAGAAACTTATTTAAGTGAGGTATCCGCA

SEQ ID NO: 12814 - protein, 110 aa, Streptococcus agalactiae; identical to SEQ ID NO: 4272

SEQ ID NO: 12815 - protein, 450 aa, Streptococcus agalactiae
GTGCTCAAAAATCAAAACAATATGATTAAGAAAAAAAGAAATCCGAGAGTACTATTTAAAAATGTCGCTTATAAACTATCTGAAATTGAAGGGAAAACATTAACAGAAATCGCTTCTTTTCTTGGATTTGGGAATTCAGAAGTTTGCAGAAGTACCCTATATAATTGGAAGCGTAGAAAATGGCTAACATTCGACCTTAAAAACGGTCATTATCGCAATGTTGAAGTATTACATGAAGTTACTCTTGAAAAGATGGCTAACAAGGAATTAAAAGAACAAGGACTCATTTATAAAGCTAGCATTTACTATGAACAAGTGGTTTCAACATCCGAAATTATAGAAGACATTAAAACCAAAACACAAGATAGAATTAAAGCTATCCACTTACAACAAAAAGCGCTAGAGCGTATCCCTAGCGAGTTATTCGCAGAATTATACACTAACATGAAC

SEQ ID NO: 12816 - protein, 150 aa, Streptococcus agalactiae; identical to SEQ ID NO: 4274

SEQ ID NO: 12817 - protein, 171 aa, Streptococcus agalactiae
ATGACTGACAAAAGAGCAGTCGGCAGACCACCAAAGGGCGAGCAACCGAACAATATCAAGATAACGGTTAGAATTAGCCAAGGACTTGATGAAAAGGTACAAGCATATGCTGATAATCATGGCTTAACAAAGCCAGAAGCAATCAGAAAAGCCCTTGAAGATTTGTCAGAC

SEQ ID NO: 12818 - protein, 57 aa, Streptococcus agalactiae
MTDKRAVGRPPKGEQPNNIKITVRISQGLDEKVQAYADNHGLTKPEAIRKALEDLSD

SEQ ID NO: 12819 - protein, 636 aa, Streptococcus agalactiae
GTGAATATCATAAAACAAGTAAAAAGTTCTTTTGGAGAACTTGAAATTGATTTTTATCTGGACAGGAATAGAAATATTTTTGTGACGATTGAACAATTAGCGCAGAGATTTGGATATAAGAGCCGAAATGCTATTGAAAAGATGATAGAGCGCCAACCCTACCTCAAAGAAAAGCGATTTTCAGTTACTGACAAATTGTCAGCTACTGATGGCAAACAATACGAGACCCGACTATTCAATAAGCGAGGAATTTTTGAGATCGGTATGCTGTCCAAAACGGAGAAAGGTAAAATCTTTCGTCAATGGATTTATGACCATATCGAAGAACTAGAAAGAGAAAACGCTAACTTTAAACTGATACGAGAGCTTGAAAAGTCTAATCATAAAGAATTAACACAAGCTATCAAGGATTGGGAACACTTTAATCAATGGAGCTACAAGGCTATTAGCGACCTTTTGCTAAAATCTGTCACAGGACAGACTGCTAAACAACTGAAACAGTCACGGGTAGGTTATGAAATTGCATTAGATTGCCTAAGTGCTGATGAGTTGACGCGATATAGAAAACTTGAACAAAAAGTAATTGTCCTATTGGAGCTCAATGCAGAATATAACGATATTAAAAAATTAGTCCTT

SEQ ID NO: 12820 - protein, 212 aa, Streptococcus agalactiae; identical to SEQ ID NO: 4276

SEQ ID NO: 12821 - protein, 600 aa, Streptococcus agalactiae
TTGAGAACAGAAACATGGAATGGATATGATATCCGATTTGTAGAGCACCAAGGCGAATGGTGGGCAGTTCTTGCTGATATTTGTCACGCGCTAGACTTAAAACCAAAACGTGTGAAAGAGCGTTTAGTTGATGAGGTCGTTTCAACCGACCACGTCGCAGACAGTTTAGGACGTCAACAAGAAATGCTAATTGTTAACGAGTTTGGAATTTATGACACTATTTTTTCAAGTCGTAAACCAGAAGCAAAATCATTTAAGTTTTGGGTATTTGAAACCATTAAACAGTTAAGACAAGCAACTGGTCTAGAAGGCTTTGAGGTCTTTAGAATGCTGGATAAGGAACATCAAAAAGAAGCTATGGCAAGATTGACTAATAGCTTAGATAGGGTATCTAAGAAAGACTTGATTAAAGCTAACACAATCACAAATAAAGCCGTTTCCAACAAGTTTGGATATTCAAAAATGGTTAAAAAATCAGAAATGACACCAGATATGTTAGTTGCTAGAGAAATGATTTTAGATGATACTGTGGAACTCATGGGAATTAAAGAAAAGTTCGGATTGAATATCAGTGTGTCTGAGTCAATCTACAATAAAAAT

SEQ ID NO: 12822 - protein, 200 aa, Streptococcus agalactiae
MRTETWNGYDIRFVEHQGEWWAVLADICHALDLKPKRVKERLVDEVVSTDHVADSLGRQQEMLIVNEFGIYDTIFSSRKPEAKSFKFWVFETIKQLRQATGLEGFEVFRMLDKEHQKEAMARLTNSLDRVSKKDLIKANTITNKAVSNKFGYSKMVKKSEMTPDMLVAREMILDDTVELMGIKEKFGLNISVSESIYNKN

SEQ ID NO: 12823 - protein, 183 aa, Streptococcus agalactiae
TTGCTTATTACCTCAACACAAGCAAAAGCTATCCGAAGAAAACAAGCTGATAAACAATTAACTTCTAAATCAGCAAGCGCTGAAATTGGAGTTACAGAAGTGACTTATCGCAAAGTTCGTAATGGCGGAGAAGTAAAAAATGGCATTTATCAAAAAGTCATGGAATGGCTTGCTGAAGATTAC

SEQ ID NO: 12824 - protein, 61 aa, Streptococcus agalactiae
MLITSTQAKAIRRKQADKQLTSKSASAEIGVTEVTYRKVRNGGEVKNGIYQKVMEWLAEDY

SEQ ID NO: 12825 - protein, 585 aa, Streptococcus agalactiae
ATGAATAGATTGAAAGAATTAAGAGCTAATCAAAAAAAGACTCAGCAGGATATGTCTGAGTTTTTGAATATGAGTCGCCGAGGGTATCAGAAAATAGAGAATGGTGAAAGCCAAATCAAACCAGACAAAGCCCAAGCCCTAGCGGATTATTTTAACGTGTCTGTGGGGTATCTGTTGGGGTATAGCGATGATAAAAAAGACCCAATGCTAACCAGCTTTGAATTAGCTCGAAAAGATGATACAGGAGAGTATTTTGATTTACAAGACATGGTTACTCTTATGGATATATCTATGTTGAAAAATGTAGATACTCGCGATAAGATACTTTCAAATTTAAAAGAATATTATGATTATTATGGTATTCGAATGAAAGAAGAACACGAAATAAAAGACAGTGAGAAATTCAATGCTTTTTTAGCAGAATTTCAAGAAGATACAAACGACTATATCATCATGCTGCTTACGGGTATAGTTAAACTTCGTGATGACATTCGTTTCACCTTATTGGATATTCTAGCTATGGAAGGTGAGAAACTAGAAACCGTTAAAAATGTTGTCAAATTTATATCTGACAATGGTGACAAC

SEQ ID NO: 12826 - protein, 195 aa, Streptococcus agalactiae
MNRLKELRANQKKTQQDMSEFLNMSRRGYQKIENGESQIKPDKAQALADYFNVSVGYLLGYSDDKKDPMLTSFELARKDDTGEYFDLQDMVTLMDISMLKNVDTRDKILSNLKEYYDYYGIRMKEEHEIKDSEKFNAFLAEFQEDTNDYIIMLLTGIVKLRDDIRFTLLDILAMEGEKLETVKNVVKFISDNGDN

SEQ ID NO: 12827 - protein, 1155 aa, Streptococcus agalactiae
ATGAAAAAGAGAATTATTGTTGTGCTGGTCGCATTGCTAGCTATTGGTGGTGGTTCAGCTTATTATTTCCTAAGTTACGCCCCTCACCAAGAGGCTGTCACAAACTTTAATAAAGCTGTTCAGACAGTTAAGTCAAAGAATAAGACGCTAAAAAGTGAGATTGCCAAAGCTGAAAAGCTCGTTAAGTCAAACCAGCAGCCGCTAGATGTAAGGACTTTAGACAACCTAAAAGCAGCAGTAGCAACTGCCAAAAGTGACTTAAGAGAAATTCCAAAGGTAGCAGATAAAACCGAAGCTATCAAGAAACAAACCAAGTCGCTTAATCAACCAATAGATTATTCAAAAGCTACTCAGTCTTTAGCTGATAGTTCTTTAGCATATACAAATAGTGTTAAGCAACTAGCCCAAATAACCAATCCCAGTCAAAGTTTTGTTGAGGAGCGCTTAAAAGAGATTGATACAGTTACAGGCGTTCAGTCAGTGACAGAAAGCAATGACCCTAATGGAAAACTAAATAAACAAGGTGGTTATACTGCCTCAATCTACTTTACTGATAACCAGGTAACTGAAGCTGTAGAAGGTAAGGATGTGCTCGATAAGGGGACCGATGCAGGAGGAAATATTGAGGTTTTTAAAACCAAAGAAGAAGCAGAAAAACGTAATATATACCTGAGTGCATTTGACAGTGCAGGTATGTTTAATCCAGGTTCTCACTATGTATTTGGAACTGTTGTTATTAGGACATCTCACTATCTAACAGCAAGCCAACAGAAATCTTTAACACAAAAAATATATGAAAAATTGATAGAAATTAAATCAAAAAATTCTGGTTCTACCAAAGACTCCAAGAAGAAAGAAGTTAGCAAAGATAATACAAAAACAAGTACACAAGAACAGCCTGCACCTTCATCAACTACGGACAAAAGTCAGGAATCACAGTCAAGCAGTGAAACTTCAAATAGTGGTGGTAGAGGTGGCACTCGGGGTGTGGAAGATTCAAGTGATACATCTTCATCAAGTGAAATGACGGAAGAGGAATTAAATTCTGCAATTAAGGAAATCCAAGACTCAAGAGATTACTATGCACCGAATGAATTTGAAAATCAGGTTGGTGACACAACTAGCAGTGATAATGGAGATAGTACTTATCATCCA

SEQ ID NO: 12828 - protein, 385 aa, Streptococcus agalactiae
MKKRIIVVLVALLAIGGGSAYYFLSYAPHQEAVTNFNKAVQTVKSKNKTLKSEIAKAEKLVKSNQQPLDVRTLDNLKAAVATAKSDLREIPKVADKTEAIKKQTKSLNQPIDYSKATQSLADSSLAYTNSVKQLAQITNPSQSFVEERLKEIDTVTGVQSVTESNDPNGKLNKQGGYTASIYFTDNQVTEAVEGKDVLDKGTDAGGNIEVFKTKEEAEKRNIYLSAFDSAGMFNPGSHYVFGTVVIRTSHYLTASQQKSLTQKIYEKLIEIKSKNSGSTKDSKKKEVSKDNTKTSTQEQPAPSSTTDKSQESQSSSETSNSGGRGGTRGVEDSSDTSSSSEMTEEELNSAIKEIQDSRDYYAPNEFENQVGDTTSSDNGDSTYHP

SEQ ID NO: 12829 - protein, 168 aa, Streptococcus agalactiae
TTGACCCTTCCCACCGGTTTCCAAACTCGGATTGAACAACATTTTTTAATGATGGGGGGTAACCTTAAAGGAATAGCCATGAATGAATTACAATTTTTGATATATACGGCTAACAATAGCCAAGAGACAGCCAGCTTTTCTGGGCTATCTAAAAATTTACCAACTTAC

SEQ ID NO: 12830 - protein, 56 aa, Streptococcus agalactiae
MTLPTGFQTRIEQHFLMMGGNLKGIAMNELQFLIYTANNSQETASFSGLSKNLPTY

SEQ ID NO: 12831 - protein, 1182 aa, Streptococcus agalactiae
ATGGAAAGGTTTATAATCGTGAAAATAAATGAAGTAAAAAAGAAAGATGGTACGGTAATTTATCGTGCCAGTGTTTATCTTGGTACTGATAAAGTAACAGGTAAGAAAGTAACCACTAAAATAACAGGACGAACTAAGAAAGAAGTTAGAGAAAAAGCTAAGCAAGGAGCTGTTGAGTTTATAAAAAATGGTTCTACTCGCTTCAAAGCTACTTCCGTAACAAGCTATCAGGAACTTGCAACCTTATGGTGGGATAGTTACAAACATACCGTAAAATACAATACTCAGCTAGCTACTGAAAAGCTGTTAACCGTTCATGTCATACCAATTTTTGGAGCATATAAGCTTGATAAGTTAACGACACCACTTATACAGTCTATCATCAATAAACTAGCTGATAAAACTAATAAAGGAGAAAGAAAAGCTTATCTCCATTATGACAGAATACACGCGCTAAATAAACGTATACTACAATATGGTGTTATCATGCAAGCTATACCATTCAACCCTGCTCGTGAGGTCATTCTCCCTCGCAACACTAAGAAAGCTAACACTAAAAGAGTAAAGCATTTTGAAAATGATGAGCTAAGAACATTTTTCAACTACTTAAACAATCTAGATAAAAGTAAATATAGAAACTTCTACGAAGTCACACTTTATAAGTTTTTGTTAGCTACAGGTTGTCGCATTAATGAAGCGTTAGCTCTAAACTGGTCAGATATCGACTTGGATAATGCCGTTGTTCATATCACAAAAACGCTAAATTACAAGCAAGAAATTAATAGTCCAAAGTCAAAGTCAAGCTATCGTGATATTGACATAGATAGTCAAACAATTACAATGCTTAAGCAGTATAGACGAAGACAGATTCAAGAAGCATGGAAGTTAGGTCGTTCAGAAACAGTGGTATTTTCTGATTTTATCCATAAGTACCCCAACAATAGAACCTTACAAACTCGATTAAGAACACATTTTAAAAGAGCGAATGTACCGAATATAGGCTTTCATGGTTTTCGTCACACTCACGCTAGTTTATTGCTCAACACAGGTATCCCCTACAAAGAACTCCAATATAGGTTAGGGCACTCTACTCTATCTATGACTATGGATATTTATAGCCATTTATCAAAAGAGAATGCAAAAAAAGCTGTCTCATTCTTTGAAACAGCAATTAACTCAATA

SEQ ID NO: 12832 - protein, 394 aa, Streptococcus agalactiae
MERFIIVKINEVKKKDGTVIYRASVYLGTDKVTGKKVTTKITGRTKKEVREKAKQGAVEFIKNGSTRFKATSVTSYQELATLWWDSYKHTVKYNTQLATEKLLTVHVIPIFGAYKLDKLTTPLIQSIINKLADKTNKGERKAYLHYDRIHALNKRILQYGVIMQAIPFNPAREVILPRNTKKANTKRVKHFENDELRTFFNYLNNLDKSKYRNFYEVTLYKFLLATGCRINEALALNWSDIDLDNAVVHITKTLNYKQEINSPKSKSSYRDIDIDSQTITMLKQYRRRQIQEAWKLGRSETVVFSDFIHKYPNNRTLQTRLRTHFKRANVPNIGFHGFRHTHASLLLNTGIPYKELQYRLGHSTLSMTMDIYSHLSKENAKKAVSFFETAINSI

SEQ ID NO: 12833 - protein, 609 aa, Streptococcus agalactiae
ATGTCACGTTATACTGGTCCATCATGGAAACAATCACGTCGCCTTGGTTTATCACTTACAGGCACAGGTAAAGAATTGGCACGTCGTAACTACGTACCTGGTCAACACGGTCCTAATAACCGTAGCAAGCTTTCAGAATATGGCTTGCAGTTAGCTGAGAAACAAAAACTTCGTTTTTCATACGGACTTGGTGAAAAACAATTCCGTAACTTGTTCGTACAAGCTACTAAAGCAAAAGAAGGAACTCTTGGTTTCAACTTTATGGTTCTTTTAGAGCGTCGTCTTGATAACGTTGTTTATCGTTTAGGACTTGCAACAACTCGTCGCCAAGCTCGTCAATTTGTTAACCATGGTCATATCCTTGTTGATGGTAAACGTGTTGATATCCCATCATACCGCGTTACTCCAGGACAAGTTATTTCAGTTCGTGAAAAATCAATGAAAGTACCTGCTATCCTTGAAGCTGTTGAAGCTACTTTAGGACGTCCAGCTTTCGTATCATTTGATGCTGAAAAACTTGAAGGTTCATTGACTCGCCTTCCAGAACGCGATGAAATTAACCCAGAAATCAATGAAGCACTTGTCGTTGAATTCTACAACAAAATGCTT

SEQ ID NO: 12834 - protein, 203 aa, Streptococcus agalactiae; identical to SEQ ID NO: 3848

SEQ ID NO: 12835 - protein, 285 aa, Streptococcus agalactiae; identical to SEQ ID NO: 8549

SEQ ID NO: 12836 - protein, 95 aa, Streptococcus agalactiae; identical to SEQ ID NO: 3850

SEQ ID NO: 12837 - protein, 588 aa, Streptococcus agalactiae
ATGGTTGATTCTCATAGTTTACGAACTGGTCAGTTGACGGATCAAGATTGGAATAATGTAACGATTGCTCAAGGAGCTTTGGCGGATGCGCCAATTTATATTGATGATACGCCCGGGATTAAAATTACAGAAATTAGAGCACGCTCTAGGAAGTTATCTCAAGAAGTTGATGATGGTTTGGGTTTAATCGTCATTGACTACCTCCAATTAATTTCAGGAACTAGACCAGAAAATCGTCAGCAAGAAGTTTCTGAAATTTCAAGGCAGTTGAAGATTTTAGCTAAAGAATTAAAGGTTCCTGTTATCGCATTAAGCCAGCTCTCTCGTGGGGTTGAGCAAAGGCAGGATAAACGACCGGTCTTATCTGATATTCGTGAATCTGGATCGATTGAACAAGATGCTGACATTGTTGCTTTCTTATATCGAGATGATTATTATCGTAGAGAGGGCGAAGAAGCAGAGGAAATTGTAGAAGATAATACCGTTGAGGTTATTTTAGAAAAGAACCGTGCTGGTGCGCGTGGGACAGTAAAATTAATGTTTCAAAAGGAATATAATAAATTTTCTAGTATAGCTCAATTTGAAGAA

SEQ ID NO: 12838 - protein, 196 aa, Streptococcus agalactiae
MVDSHSLRTGQLTDQDWNNVTIAQGALADAPIYIDDTPGIKITEIRARSRKLSQEVDDGLGLIVIDYLQLISGTRPENRQQEVSEISRQLKILAKELKVPVIALSQLSRGVEQRQDKRPVLSDIRESGSIEQDADIVAFLYRDDYYRREGEEAEEIVEDNTVEVILEKNRAGARGTVKLMFQKEYNKFSSIAQFEE

SEQ ID NO: 12839 - protein, 572 aa, Streptococcus agalactiae
TTGGCAGAAGTATCTGAGCTAAGAGTACAACCTCAAGACCTGTTGGCAGAACAGGCCGTTTTAGGATCTATCTTTATCTCACCAGAGAAACTGATTATGGTGAGAGAATTTATAAGTCCAGATGACTTTTATAAATATTCACACAAAGTTATCTTCAGAGCGATGATTACCTTAGCTGATAGAAATGATGCAATTGATGCTGCTACTGTTAGAAATATTTTAGATGACCAAGGTGATCTTCAAAACATTGGTGGGTTGGGCTATATTGTTGAATTAGTTAATAGTGTTCCAACAAGTGCTAATGCGGAGTTTTATGCCAAAATAGTTTCTGAGAAAGCCATGTTGCGAGATATCATTTCTAAGTTGACAGATACTGTCAACATGGCCTATGAAGGAAATGATTCTGATGAAATTATTGCTACCGCTGAGAAGGCTTTAGTTGATATTAACGAACACAGTAATCGTAGCGGGTTTAGAAAGATATCTGATGTTTTAAAAGTTAATTACGAAAACTTAGAATTACGTTCACAGCAAACCTCAGATGTCACATTTACCAACTGGATTTAGAGATT

SEQ ID NO: 12840 - protein, 191 aa, Streptococcus agalactiae
MAEVSELRVQPQDLLAEQAVLGSIFISPEKLIMVREFISPDDFYKYSHKVIFRAMITLADRNDAIDAATVRNILDDQGDLQNIGGLGYIVELVNSVPTSANAEFYAKIVSEKAMLRDIISKLTDTVNMAYEGNDSDEIIATAEKALVDINEHSNRSGFRKISDVLKVNYENLELRSQQTSDVTVYQLDLEI

SEQ ID NO: 12841 - protein, 216 aa, Streptococcus agalactiae
GTGCAATTTATTGAAAAGGTAGGTCCAGATGGTCGTACGTTTGGTTCTATCACAGCCAAAAAGATTGCTGAAGAGTTACAAAAACAATACGGCATTAAAATTGACAAACGTCATATTGATTTAGATCATACTATTAGAGCGATTGGTAAGGTTGAAGTACCAGTAAAATTACATAAACAGGTTTCTTCACAGATTAAGCTTGATATCAAAGAAGCG

SEQ ID NO: 12842 - protein, 72 aa, Streptococcus agalactiae
MQFIEKVGPDGRTFGSITAKKIAEELQKQYGIKIDKRHIDLDHTIRAIGKVEVPVKLHKQVSSQIKLDIKEA

SEQ ID NO: 12843 - protein, 244 aa, Streptococcus agalactiae
ATGAAAGTTATTTTTTTACAAGATGTTAAGGGGAAAGGAAAAAAAGGTGAGGTTAAGGAAGTACCTACTGGTTATGCTCAAAATTTCTTATTAAAAAAGAATCTAGCTAAAGAAGCAACGACACAAGCTATCGGTGAATTAAAAGGAAAACAAAAGTCCGAAGAAAAAGCGCAAGCAGAATTTTAGCACAGGCACAGGAGCTGAAAACACAATTAGAATCCGAAACTACACGAGTGCAATTTAT

SEQ ID NO: 12844 - protein, 82 aa, Streptococcus agalactiae
  VARIANT 52: Xaa = Any Amino Acid
MKVIFLQDVKGKGKKGEVKEVPTGYAQNFLLKKNLAKEATTQAIGELKGKQXVRRKSASRNFSTGTGAENTIRIRNYTSAIY

SEQ ID NO: 12845 - protein, 1980 aa, Streptococcus agalactiae
ATGAAAAGATTTCGTTTTGCAACCGTCCATTTAGTTTTAATAGGCCTGATTTTATTTGGACTATTAGCTATTTGTGTTAGGTTATTTCAATCCTATACGGCTCTATTATTGGCTATTTTTGTTGCTTTATCTTTTGTTGTTGCCTTATTATATTACCAAAAGATAACTTATGAACTATCTGAAGTTGAACAAATTGAATTACTTAATGATCAAACAGAAGTTTCTCTTAAGAGTCTTCTTGAACAAATGCCAGTTGGTGTTATACAATTTGATCTTGAAACAAATGATATTGAGTGGTTTAACCCTTATGCAGAATTGATTTTTACTGGGGATAATGGTCATTTTCAGTCTGCTACTGTTAAAGACATCATTACTAGTAGACGTAATGGAACGGCTGGGCAATCATTTGAATACGGTGATAACAAATATTCAGCTTATTTGGATACAGAGACGGGTGTTTTCTATTTCTTCGATAATTTCATGGGGAATAGAAGAAACTATGATAGTTCAATGCTACGTCCAGTTATTGGTATTATTTCCATTGATAACTACGATGATATTATGGATACTATGTTAGAGGCTGATATGTCAAAGATTAACGCCTTCGTGACTAGTTTTATTTCTGATTTTACCCAGTCTAAAAATATTTTTTATCGTCGTGTCAATATGGATCGATACTATATTTTTACCGACTATAGTGTTTTAAATACATTGATAAAAGATAAATTTGATATTTTAAATGAGTTTCGAAAACGCGCTCAGGAAAACCATTTATCATTAACATTAAGTATGGGAATTTCTTATGGTGATGGTAACCATAATCAAATTGGGCAAATTGCTTTAGAAAATCTTAATACAGCACTCGTTCGCGGAGGAGATCAAATAGTAGTACGTGAAAATGATAGTAGTAAAAAAGCACTTTACTTTGGTGGTGGTGCTGTTTCAACTATTAAACGTTCACGAACACGTACTAGAGCTATGATGACTGCTATTTCTGACCGTTTGAAAGTAGTTGATAGTGTCTTTATTGTGGGACACAGGAAATTGGACATGGATGCACTAGGTGCATCTGTAGGGATGCAATTTTTTGCTAGTAATATTGTTAATGCCAGTTATGTAGTTTATGACCCAAATGACATGAATTCTGATATTGAAAGAGCAATTGATTACTTGCAAGAAGACGGCGAAACACGTCTCGTAAGTGTTGAGAGAGCTTTTGAATTAATTACTCAAAATTCTTTATTAGTCATGGTAGACCATTCTAAAACAGCTTTAACCTTATCTAAGGAATTCTTTAACAAGTTTGCAGATGTTATTGTGGTAGATCATCATAGAAGAGATGAAGATTTTCCCAAAAATGCTGTCCTTTCATTTATAGAAAGTGGCGCAAGTAGTGCCAGCGAATTAGTTACAGAATTGATTCAATTTCAACAAGCTAAAGATAAATTAAGCCGCAGTCAAGCAAGTATTTTAATGGCTGGTATCATGCTTGATACAAGAAATTTTGCATCTAATGTAACGAGTAGAACTTTTGATGTGGCAAGCTATTTACGCGGTTTAGGTAGTAATAGTATGGCTATTCAAAAAATATCAGCTACAGATTTTGATGAATATCGTTTAATTAATGAATTGATTTTAAAAGGTGAGCGTATTTATGATAACATCATTGTTGCTACCGGAGAAGAACATAAAGTTTACTCGCATGTTATAGCTAGTAAAGCAGCTGACACCATGTTGACAATGGCAGGTATTGAGGCTACTTTTGTTATTACTAAAAACAGTTCAAATATTGGTATTTCAGCGCGCAGTAGAAATAATATCAATGTCCAGCGCATTATGGAAAAACTTGGTGGTGGCGGACATTTTAGTTTTGCTGCTTGTCAAATACAAGACAAGTCTGTAAAGCAAGTTAGACGTATGTTACTGGAAATAATTGACGAAGATTTAAGAGAAAATAGTACAGTCGAAAATAGAAGGGAT

SEQ ID NO: 12846 - protein, 660 aa, Streptococcus agalactiae; identical to SEQ ID NO: 8556

SEQ ID NO: 12847 - protein, 1812 aa, Streptococcus agalactiae
ATGGGATGTAAGACACTTCTAGCTACTATCAACTTAGAAATGTTGGCATTTATGCCTTGTAATCCTTCTATAGGTGGCTCTGCTAAAGGTATCGTTGTCAGAGAGATTGACGCTTTAGGTGGTGAAATGGGTAAAAACATTGATAAAACCTATATCCAAATGAAAATGCTTAATACAGGTAAGGGGCCTGCTGTCCGTGCCTTAAGAGCACAAGCTGATAAAGCCCTCTATGCACAAACAATGAAGCAAACTGTAGAAAAGCAAGAAAACCTTACCTTAAGACAAGCTATGATTGATGAAATACTTGTTGAGGATGGAAAGGTTGTGGGGGTTCGTACAGCAACTAATCAGAAATTTTCAGCAAAATCTGTTGTTATAACAACAGGTACTGCTCTTCGAGGAGAGATTATATTAGGTGAGCTTAAGTACTCTTCGGGTCCTAATAATAGTTTAGCTTCTGTGACATTGGCAGATAATTTAAGAGACCTAGGATTAGAAATTGGTCGTTTCAAAACTGGAACACCTCCTCGTGTAAAAGCCTCCTCTATTAATTATGAAGAGACAGAGATACAACCTGGGGATGAGCAACCAAATCATTTTTCATTTATGTCTAGAGATGAAGATTATATTACTGACCAGGTACCGTGCTGGTTGACCTATACGAATACTTTGAGTCATGACATCATCAATCAAAATCTACACCGTGCTCCTATGTTTTCTGGAATCGTTAAGGGAGTTGGTCCTCGATATTGTCCGTCAATTGAAGATAAAATTGTGCGTTTTGCTGATAAAGAGCGCCACCAACTCTTCTTAGAACCAGAAGGTAGACACACTGAAGAAGTTTATGTTCAAGGGCTATCAACGAGTCTTCCTGAGGATGTTCAAGTTGATTTATTACGTTCTATAAAAGGGCTTGAAAATGCTGAAATGATGCGTACAGGCTATGCTATTGAGTATGATATTGTATTGCCTCATCAATTAAGAGCAACACTCGAAACAAAAGTAATTGCTGGTTTGTTTACTGCAGGACAGACTAATGGTACTTCAGGTTATGAAGAAGCTGCTGGTCAAGGGTTGGTTGCTGGGATCAACGCTGCTCTCAAAGTTCAAGGGAAGCCAGAACTTATTTTAAAACGAAGTGATGCTTACATTGGTGTCATGATTGATGATTTAGTTACCAAAGGGACTCTAGAACCATATCGTCTGTTGACAAGTCGCGCAGAATATCGTCTGATTCTTCGTCATGACAATGCAGATATGCGTTTAACAGAAATCGGTTATGAGATTGGCCTAGTAGATGAAGAGCGTTATGCGATATTTAAAAAGCGTCAAATGCAATTTGAAAATGAATTAGAACGTTTAGATTCTATAAAGTTAAAGCCAGTTTCTGAGACAAATAAACGGATTCAAGAATTGGGTTTTAAACCTTTGACAGATGCTTTAACTGCCAAAGAATTTATGCGCCGCCCACAAATCACATATGCAGTAGCAACGGATTTTGTTGGTTGTACTGATGAGCCATTAGACAGTAAGGTTATTGAACTTTTGGAAACTGAAATTAAATACGAAGGCTATATTAAAAAAGCTTTAGATCAAGTTGCAAAAATGAAACGAATGGAAGAAAAACGTATTCCCCCTCATATTGACTGGGATGACATTGATTCTATCGCAACAGAAGCTAGACAAAAATTCAAAAAAATTAACCCAGAAACGCTAGGTCAGGCTAGTCGTATTTCAGGAGTTAATCCAGCCGATATTAGTATTTTAATGGTTTACCTTGAAGGAAGACAAAAAGGTCGTAAAAATATCAAT

SEQ ID NO: 12848 - protein, 604 aa, Streptococcus agalactiae
MGCKTLLATINLEMLAFMPCNPSIGGSAKGIVVREIDALGGEMGKNIDKTYIQMKMLNTGKGPAVRALRAQADKALYAQTMKQTVEKQENLTLRQAMIDEILVEDGKVVGVRTATNQKFSAKSVVITTGTALRGEIILGELKYSSGPNNSLASVTLADNLRDLGLEIGRFKTGTPPRVKASSINYEETEIQPGDEQPNHFSFMSRDEDYITDQVPCWLTYTNTLSHDIINQNLHRAPMFSGIVKGVGPRYCPSIEDKIVRFADKERHQLFLEPEGRHTEEVYVQGLSTSLPEDVQVDLLRSIKGLENAEMMRTGYAIEYDIVLPHQLRATLETKVIAGLFTAGQTNGTSGYEEAAGQGLVAGINAALKVQGKPELILKRSDAYIGVMIDDLVTKGTLEPYRLLTSRAEYRLILRHDNADMRLTEIGYEIGLVDEERYAIFKKRQMQFENELERLDSIKLKPVSETNKRIQELGFKPLTDALTAKEFMRRPQITYAVATDFVGCTDEPLDSKVIELLETEIKYEGYIKKALDQVAKMKRMEEKRIPPHIDWDDIDSIATEARQKFKKINPETLGQASRISGVNPADISILMVYLEGRQKGRKNIN

SEQ ID NO: 12849 - protein, 609 aa, Streptococcus agalactiae
ATGATTTCAAAATTTATTTTAGCTTTCATGGCTTTTTTCGCCATTATGAATCCCATTTCTAATTTGCCAGCTTTTATGGCTTTAGTAGCTGATGATGATCAGAAGATTTCACGTCGAATTGCAGCAAAAGGAGTATTACTTGCTTTTGTCATTATTGTAATCTTTGTATTAAGTGGCCACTTACTTTTTAACTTATTTGGGATTACCCTAGCCGCCCTAAAAATATCTGGTGGGATATTGGTCGGCATTATAGGTTATAAAATGATTAATGGTATACATTCACCAACCAATAAAAACCTAGAGGAGCATAAGGATGATCCAATGAATGTGGCAGTTTCACCATTAGCAATGCCCCTTTTGGCAGGTCCGGGTACTATTGCAACTGCTATGGGTTTATCAAGTGGTGGTTTATCTGGCAAACTCATTACTATACTTGCTTTTGCCATACTATGTGTGATAATGTATGTTATTTTAATAAGTGCAAACGAAATTACTAAATTTCTTGGAAAAAATGCAATGACTATAATCACCAAAATGATGGGACTTATTTTGATGACTATCGGGATAGAGATGCTAATAACAGGCATAAAAATTGGTTTTCATTTAACA

SEQ ID NO: 12850 - protein, 203 aa, Streptococcus agalactiae; identical to SEQ ID NO: 8560

SEQ ID NO: 12851 - protein, 1119 aa, Streptococcus agalactiae
ATGACTGATAATTCAAACATTCGTGTCGTTGTAGGCATGAGTGGAGGTGTTGATTCATCAGTAACTGCCCTACTTTTAAAAGAGCAAGGTTATGATGTTATTGGTGTTTTTATGAAAAATTGGGATGACACAGATGAATTTGGTGTTTGTACGGCTACTGAAGATTATAAAGATGTTGCTGCTGTTGCTGATCAGATCGGCATACCATACTACTCTGTCAACTTTGAAAAAGAGTATTGGGACAGGGTTTTCGAATATTTTTTAGCAGAATATCGAGCAGGTCGTACCCCAAACCCAGATGTTATGTGTAATAAGGAAATTAAATTTAAAGCATTTCTAGATTATGCGATGACATTAGGTGCTGACTATGTAGCAACAGGTCATTATGCACAAGTAACACGTGATAAAAACGGAATAGTTCATATGCTCAGAGGAGTAGATAATAATAAGGATCAAACTTATTTTCTAAGTCAATTATCTCAGGAGCAATTGCAAAAAACGTTATTTCCACTTGGTCATTTACAAAAACCAGAAGTTCGCCGTATAGCTGAAGAAGCAGGACTTGCGACCGCTAAGAAAAAAGACTCTACTGGTATTTGTTTTATTGGAGAAAAAAATTTCAAGGATTTCCTGGGTCAATATTTACCGGCTCAACCAGGTCGTATGATGACTGTTGATGGTCGTGACATGGGTGAACATGCTGGTTTAATGTATTATACTATTGGTCAAAGAGGGGGCCTTGGTATTGGTGGGCAACATGGTGGAGATAATAAACCTTGGTTTGTAGTTGGAAAGGATTTAAGTAAAAATATTCTTTATGTCGGTCAAGGTTTCTATCATGACTCATTGATGTCAACTAGCTTGACAGCTTCTGAAATCCACTTTACACGTGATATGCCTAATGAATTTAAGCTAGAATGTACGGCTAAGTTCAGATATCGTCAACCTGACAGTAAAGTTACAGTTTACGTAAAAGGTAATCAAGCAAGGGTTGTGTTTGATGATTTACAACGAGCAATCACACCAGGTCAAGCTGTTGTTTTTTATAATGAACAAGAATGTTTAGGTGGTGGGATGATTGATCAGGCTTATCGTGATGATAAAATCTGTCAATACATT

SEQ ID NO: 12852 - protein, 373 aa, Streptococcus agalactiae
MTDNSNIRVVVGMSGGVDSSVTALLLKEQGYDVIGVFMKNWDDTDEFGVCTATEDYKDVAAVADQIGIPYYSVNFEKEYWDRVFEYFLAEYRAGRTPNPDVMCNKEIKFKAFLDYAMTLGADYVATGHYAQVTRDKNGIVHMLRGVDNNKDQTYFLSQLSQEQLQKTLFPLGHLQKPEVRRIAEEAGLATAKKKDSTGICFIGEKNFKDFLGQYLPAQPGRMMTVDGRDMGEHAGLMYYTIGQRGGLGIGGQHGGDNKPWFVVGKDLSKNILYVGQGFYHDSLMSTSLTASEIHFTRDMPNEFKLECTAKFRYRQPDSKVTVYVKGNQARVVFDDLQRAITPGQAVVFYNEQECLGGGMIDQAYRDDKICQYI

SEQ ID NO: 12853 - protein, 666 aa, Streptococcus agalactiae
ATGAAACATTTAAAATTTCAATCGGTCTTCGACATTATCGGTCCTGTTATGATTGGACCATCAAGTAGTCATACTGCAGGAGCTGTCCGCATTGGCAAAGTTGTCCATTCTATTTTTGGTGAACCTAGTGAAGTAACCTTTCATTTATACAATTCTTTTGCTAAAACTTACCAAGGACACGGTACTGATAAAGCATTGGTTGCAGGGATTCTAGGAATGGATACAGATAATCCAGATATTAAAAACTCTCTTGAAATTGCTCATCAAAAAGGAATTAAGATTTACTGGGATATCCTAAAAGATAGTAATTCACCACATCCAAATACTGCGAAAATAACTGTTAAAAATGGGGATAGGAGCATGAGTATTACAGGAGTGTCAATTGGTGGCGGAAACATCCAAGTTACTGAGTTGAATGGATTCTCAGTTTCATTAACAATGAATACTCCTACTTTAATTATCGTTCATCAAGATATACCTGGCATGATTGCTAAAGTAACTGATATTTTATCTGACTTTAACATTAATATTGCTCAAATGAATGTAACACGCGAAAGTGCAGGAGAAAAAGCTATCATGATTATAGAAGTAGATTCACGAGATTGTCAACAAGCTGTCAAAAAGATAGAAGCTATTCCTCATTTACACAATGTCAACTTCTTTGAT

SEQ ID NO: 12854 - protein, 222 aa, Streptococcus agalactiae; identical to SEQ ID NO: 3872

SEQ ID NO: 12855 - protein, 870 aa, Streptococcus agalactiae
ATGTTTTATACAATTGAAGAGCTGGTAGAGCAAGCTAATAGCCAACATAAGGGTAACATAGCAGAGCTCATGATCCAAACGGAAATTGAAATGACTGGTAGAAGTCGTGAAGAAATTCGTTATATTATGTCCCGAAACCTTGAGGTTATGAAAGCTTCTGTTATTGATGGATTGACCCCTAGTAAATCAATCAGTGGTTTAACAGGCGGTGATGCTGTCAAGATGGATCAATATTTACAATCAGGAAAAACTATTTCAGATACCACAATCCTAGCTGCCGTTAGGAATGCTATGGCTGTTAATGAGTTAAATGCTAAGATGGGACTGGTCTGTGCAACACCAACTGCAGGTAGTGCAGGATGTTTACCAGCTGTGATTTCTACAGCCATTGAAAAGCTTAATTTAACAGAAGAAGAGCAACTTAATTTTCTATTTACAGCCGGCGCATTTGGTCTTGTCATTGGTAATAATGCCTCTATCTCAGGTGCAGAAGGAGGTTGCCAAGCTGAAGTTGGGTCAGCTAGTGCTATGGCTGCGGCTGCTTTAGTTATGGCTGCTGGAGGTACTCCTTTCCAAGCTAGCCAAGCTATAGCATTTGTTATTAAAAATATGCTTGGACTTATCTGTGACCCTGTTGCAGGTTTAGTTGAAGTCCCTTGTGTGAAGCGGAATGCTCTTGGATCAAGTTTTGCACTTGTTGCTGCTGATATGGCCTTGGCTGGTATTGAATCGCAAATTCCAGTAGATGAAGTTATTGATGCAATGTATCAAGTTGGATCAAGTTTACCGACTGCTTTTCGTGAAACTGCAGAAGGAGGACTTGCTGCCACGCCGACAGGAAGACGTTATAGCAAAGAAATTTTTGGGGAA

SEQ ID NO: 12856 - protein, 290 aa, Streptococcus agalactiae
MFYTIEELVEQANSQHKGNIAELMIQTEIEMTGRSREEIRYIMSRNLEVMKASVIDGLTPSKSISGLTGGDAVKMDQYLQSGKTISDTTILAAVRNAMAVNELNAKMGLVCATPTAGSAGCLPAVISTAIEKLNLTEEEQLNFLFTAGAFGLVIGNNASISGAEGGCQAEVGSASAMAAAALVMAAGGTPFQASQAIAFVIKNMLGLICDPVAGLVEVPCVKRNALGSSFALVAADMALAGIESQIPVDEVIDAMYQVGSSLPTAFRETAEGGLAATPTGRRYSKEIFGE

SEQ ID NO: 12857 - protein, 645 aa, Streptococcus agalactiae
ATGAATGTAAAAAAACAACATTTAGCTTACGGAGCTATCACTTTAGTAGCCCTTTTTTCATGTATTTTGGCTGTAACGGTCATCTTTAAAAGTTCACAAGTTACTACTGAATCTTTGTCAAAAGCAGATAAAGTTCGCGTAGCCAAAAAATCAAAAATGAATAAGGCAACATCTAAATCAAAAGTAGAAGGTGTAAAACAGGCTCCAAAACCAAGTTCTCAATCTACAGAAGCTAATTCTCAGCAACAAGTTACTGCGAGTGAAGAGGCAGCTGTAGAACAAGCAGTTGTAACAGAAAATACCCCTGCTACCAGTCAAGCACAACAAGCTTATGCTGTTACTGAGACAACTTATAGACCTGCTCAACACCAGCCGAGTGGCCAAGTATTGAGCAATGGAAATACTGCAGGGGCTATTGGCTCAGCAGCAGCAGCACAAATGGCTGCTGCAACGGGAGTTCCTCAGTCTACTTGGGAACATATTATTGCCCGTGAATCAAATGGTAATCCTAACGTTGCTAATGCCTCAGGAGCTTCAGGACTTTTCCAAACGATGCCAGGTTGGGGTTCAACAGCTACAGTTCAGGATCAAGTTAATTCAGCTATTAAAGCTTATCGTGCTCAAGGTTTATCGGCTTGGGGCTAC

SEQ ID NO: 12858 - protein, 215 aa, Streptococcus agalactiae
MNVKKQHLAYGAITLVALFSCILAVTVIFKSSQVTTESLSKADKVRVAKKSKMNKATSKSKVEGVKQAPKPSSQSTEANSQQQVTASEEAAVEQAVVTENTPATSQAQQAYAVTETTYRPAQHQPSGQVLSNGNTAGAIGSAAAAQMAAATGVPQSTWEHIIARESNGNPNVANASGASGLFQTMPGWGSTATVQDQVNSAIKAYRAQGLSAWGY

SEQ ID NO: 12859 - protein, 537 aa, Streptococcus agalactiae
ATGTCAATAACCTCGGTTAAAAAATCAAAACCATTTAAATTAGGAGTGGCAGGTCTTTTAGTGGGTGCTTCATTAGCTTTACCACTTTCAGTAAGCGCAGCATCTTATACCGTGAAATCAGGTGATACCTTATCAGCTATTGCTAAAAATCATAAAACTACGGTACAAGAGTTAGTGTCTCTCAATAGTATCAGTAACGCTGACGTCATCAGTATAGGTGATGTTTTAAAATTGGATAATTCTACAACTAGTCAAGCAGAAGCAAAATCTCAACCAACAATTGAAAATTCAATGAATTCTTCATCAAATTTGAGTTCAAGTGATTCAGCCGCAAAAGAAGAAATAGCTCGTCGTGAATCAAATGGTAGTTATACTGCACAGAATGGACAATATTATGGAAGATATCAACTGTCTCAATCTTACCTAAATGGCGACTTATCTCCTGAAAATCAAGAAAAAGTAGCGGACAATTATGTGGCTTCTCGTTACGGATCTTGGTCGGCAGCGCTATCATTTTGGAATAGTAACGGTTGGTAT

SEQ ID NO: 12860 - protein, 179 aa, Streptococcus agalactiae
MSITSVKKSKPFKLGVAGLLVGASLALPLSVSAASYTVKSGDTLSAIAKNHKTTVQELVSLNSISNADVISIGDVLKLDNSTTSQAEAKSQPTIENSMNSSSNLSSSDSAAKEEIARRESNGSYTAQNGQYYGRYQLSQSYLNGDLSPENQEKVADNYVASRYGSWSAALSFWNSNGWY

SEQ ID NO: 12861 - protein, 792 aa, Streptococcus agalactiae
ATGGATAAATTGATTTTGGGACGTTACATACCAGGTAATTCTCTCATTCATAAATTAGATCCTCGAAGTAAGTTACTAGCCATGTTACTTTTTATCATTATTGTTTTTTGGGCAAATAATGTAGTGACAAATGTGATCGTATTCATTTTTACGTTGGTTATTGTGGGTTTATCTCAGATAAAATTTTCCTATTTTTTCAATGGTATTAAACCGATGGTTGGTATTATTTTATTTACCACCCTATTCCAGATGCTGTTTGCACAAGGCGGGCAGGTTATCTTCTCGTTTTGGATTTTTAGCATCACTAGCCTTGGGTTACAACAAGCAGCACTTATTTTTATGAGATTTGTTTTAATTATCTTCTTTTCGACATTACTTACCTTAACTACTACTCCGTTAAGTTTAGCAGATGCTGTTGAATCTTTGTTAAAACCATTGGAAGTACTGAGAGTACCAGCACACGAGATTGGTTTGATGTTATCCCTTAGCTTACGTTTCGTTCCTACTTTAATGGATGATACAACACGTATCATGAATGCTCAAAGAGCTCGTGGAGTTGATTTTGGAGAGGGAAACCTAATTCATAAGGTTAAGTCCATTATCCCTATTTTGATTCCATTATTTGCTTCTAGTTTTAAAAGAGCAGATGCGTTGGCAATTGCTATGGAAGCAAGAGGTTATCAAGGCGGAGCCAATCGTAGTAAGTACCGTTTATTGAAGTGGACTGTTCGGGATACTTTTAGTATATTACTTATGTTATTATTGGGTTTGAGTTTGTTTCTATTAAAAAAT

SEQ ID NO: 12862 - protein, 264 aa, Streptococcus agalactiae; identical to SEQ ID NO: 3880

SEQ ID NO: 12863 - protein, 840 aa, Streptococcus agalactiae
ATGGGAATTGAATTTAAAAATGTAAGTTATACCTATCAAGCCGGCACTCCTTTTGAAGGGCGTGCCCTTTTTGACGTTAATCTGAAAATTGAAGATGCTTCCTATACCGCATTCATTGGGCACACAGGTTCTGGAAAATCAACTATTATGCAACTTTTGAATGGTTTACATATTCCTACAAAAGGTGAGGTAATTGTCGATGATTTTTCTATTAAAGCAGGGGACAAGAACAAAGAAATCAAATTTATAAGGCAAAAAGTTGGTTTAGTTTTTCAATTTCCAGAAAGTCAGCTTTTTGAAGAGACAGTTTTAAAGGATGTTGCTTTTGGACCACAAAATTTTGGTATTTCTCAGATTGAAGCTGAAAGGCTGGCTGAAGAAAAATTAAGGTTAGTTGGTATTAGTGAGGATTTATTCGATAAAAATCCATTTGAACTTTCTGGAGGGCAGATGAGGCGGGTTGCTATAGCTGGTATTTTAGCGATGGAACCCAAAGTACTAGTACTGGATGAGCCAACAGCTGGACTTGATCCTAAGGGAAGAAAAGAATTAATGACTCTTTTTAAAAATCTTCATAAAAAAGGAATGACTATCGTCTTAGTGACTCACTTAATGGACGATGTAGCGGATTATGCTGACTATGTGTATGTTTTAGAAGCAGGGAAAGTAACCTTATCAGGACAACCAAAACAGATTTTTCAAGAAGTAGAACTTTTAGAAAGTAAACAATTAGGAGTTCCCAAAATCACCAAGTTTGCTCAAAGACTATCTCATAAGGGATTAAATTTACCTAGTTTACCAATTACTATTAACGAATTTGTGGAGGCTATTAAGCATGGA

SEQ ID NO: 12864 - protein, 280 aa, Streptococcus agalactiae; identical to SEQ ID NO: 3882

SEQ ID NO: 12865 - protein, 369 aa, Streptococcus agalactiae
ATGCGTCCACAAGTTATCATCTTGGATGAGGCGACTAGTATGCTTGATCCTGAGGGACGATTGGAACTGATAAGAACGATACGAGCTATTCGTCAAAAATATAATCTTACTGTTATTTCAATTACACACGACTTAGATGAAGTTGCATTGAGTGATCGTGTCATCGTTATGAAAAATGGTAAAGTTGAGTCAACATCCACTCCAAAAGCGTTATTTGGTCGTGGAAATCGTTTGATTAGTTTAGGTTTAGATGTTCCCTTTACAAGTAGGTTAATGGCAGCACTGGCTGCTAATGGTCTTGATATAGGGACAGAGTATCTTACAGAGAAGGAATTAGAAGAACAATTATGGGAATTGAATTTAAAAATG

SEQ ID NO: 12866 - protein, 123 aa, Streptococcus agalactiae
MRPQVIILDEATSMLDPEGRLELIRTIRAIRQKYNLTVISITHDLDEVALSDRVIVMKNGKVESTSTPKALFGRGNRLISLGLDVPFTSRLMAALAANGLDIGTEYLTEKELEEQLWELNLKM

SEQ ID NO: 12867 - protein, 379 aa, Streptococcus agalactiae
ATGACAAATATTATTACTGTTAATAATCTCTTTTTTAAATATGATAGTAATCAAACACATTATCAATTGGAGAATGTATCGTTTCATGTGAAACAAGGAGAATGGCTATCTATTATCGGTCATAATGGTTCTGGGAAATCCACTACTGTTCGTTTAATAGATGGGCTTTTAGAGGCGGAGTCAGGCCAGATTATCATTGATGGACAAGAGTTAACCGAAGATAATGTCTGGGAGTTACGTCACAAGATTGGCATGGTATTTCAAAATCCTGATAACCAATTTGTAGGGGCAACTGTTGAAGATGACGTCGCCTTTGGTTTGGAAAATAAAGGTATTCCTTTGAAACATGAAGAAAGAGTGGGCCAAGCACTTGATTTGG

SEQ ID NO: 12868 - protein, 127 aa, Streptococcus agalactiae
  VARIANT 117: Xaa = Any Amino Acid
MTNIITVNNLFFKYDSNQTHYQLENVSFHVKQGEWLSIIGHNGSGKSTTVRLIDGLLEAESGQIIIDGQELTEDNVWELRHKIGMVFQNPDNQFVGATVEDDVAFGLENKGIPLKTXKKEWAKHLIW

SEQ ID NO: 12869 - protein, 540 aa, Streptococcus agalactiae
ATGGTGAAGAAAGAAAATATTCCGAATCTATTAACTGTAGTCAGAATTTTAATGATTCCGTTATTTATAGTATTAACTTCAGTAACAACAAGTACAACTTGGCATATTGTTGCAGCTATTGTATTTGCTATTGCAAGCTTGACCGATTACCTAGACGGTTATCTAGCACGTAAATGGCAAGTAGTAACAAATTTTGGGAAATTTGCAGACCCATTAGCTGATAAAATGCTAGTTATGAGTGCTTTTATCATGTTAGTTGGACTAGGCTTAGCACCGGCTTGGGTTTCAGCTATTATCATTTGTAGAGAGTTAGCAGTTACAGGTTTGCGTTTACTTTTAGTTGAAACAGGTGGAACAGTACTTGCTGCAGCTATGCCAGGGAAAATAAAGACGGCTACTCAAATGTTTGCAGTTATTTTTTTGTTAGTACATTGGATGACACTTGGTAACATCATGTTATACATTGCTTTATTCTTTACCTTGTATTCAGGCTACGACTATTTTAAAGGTGCAGGCTTCTTATTTAAGGATACTTTTAAA

SEQ ID NO: 12870 - protein, 180 aa, Streptococcus agalactiae
MVKKENIPNLLTVVRILMIPLFIVLTSVTTSTTWHIVAAIVFAIASLTDYLDGYLARKWQVVTNFGKFADPLADKMLVMSAFIMLVGLGLAPAWVSAIIICRELAVTGLRLLLVETGGTVLAAAMPGKIKTATQMFAVIFLLVHWMTLGNIMLYIALFFTLYSGYDYFKGAGFLFKDTFK

SEQ ID NO: 12871 - protein, 255 aa, Streptococcus agalactiae
TTGCAATCATCTGATCTTACCGAAAGCCACTTACAAAACGTTAAGAGAGAGCTCTATGGCGATTTTTTAAGGAGCTTAGATTCTATTGAAAATCTCGCAATGCAATTCGTCACCTATTTATATGATGGAAAAACGATGTATTTAGATTTGCCATCTATCGTTGAAGAATTAGACTTGGAAGATGTCATTACGATTGGTAAGGATTTCTTAGATAATGCTGACACATCTGACTTCGTTATTTTTCCAAAATCTTCG

SEQ ID NO: 12872 - protein, 85 aa, Streptococcus agalactiae
MQSSDLTESHLQNVKRELYGDFLRSLDSIENLAMQFVTYLYDGKTMYLDLPSIVEELDLEDVITIGKDFLDNADTSDFVIFPKSS

SEQ ID NO: 12873 - protein, 627 aa, Streptococcus agalactiae
ATGACTGATAATTCAAACATTCGTGTCGTTGTAGGCATGAGTGGAGGTGTTGATTCATCAGTAACTGCCCTACTTTTAAAAGAGCAAGGTTATGATGTTATTGGTGTTTTTATGAAAAATTGGGATGACACAGATGAATTTGGTGTTTGTACGGCTACTGAAGATTATAAAGATGTTGCTGCTGTTGCTGATCAGATCGGCATACCATACTACTCTGTCAACTTTGAAAAAGAGTATTGGGACAGGGTTTTCGAATATTTTTTAGCAGAATATCGAGCAGGTCGTACCCCAAACCCAGATGTTATGTGTAATAAGGAAATTAAATTTAAAGCATTTCTAGATTATGCGATGACATTAGGTGCTGACTATGTAGCAACAGGTCATTATGCACAAGTAACACGTGATAAAAACGGAATAGTTCATATGCTCAGAGGAGTAGATAATAATAAGGATCAAACTTATTTTCTAAGTCAATTATCTCAGGAGCAATTGCAAAAAACGTTATTTCCACTTGGTCATTTACAAAAACCAGAAGTTCGCCGTATAGCTGAAGAAGCAGGACTTGCGACCGCTAAGAAAAAAGACTCTACTGGTATTTGTTTTATGGAGAAAANNNNNTTAATTAAT

SEQ ID NO: 12874 - protein, 209 aa, Streptococcus agalactiae
  VARIANT 205, 206: Xaa = Any Amino Acid
MTDNSNIRVVVGMSGGVDSSVTALLLKEQGYDVIGVFMKNWDDTDEFGVCTATEDYKDVAAVADQIGIPYYSVNFEKEYWDRVFEYFLAEYRAGRTPNPDVMCNKEIKFKAFLDYAMTLGADYVATGHYAQVTRDKNGIVHMLRGVDNNKDQTYFLSQLSQEQLQKTLFPLGHLQKPEVRRIAEEAGLATAKKKDSTGICFMEKXXLIN

SEQ ID NO: 12875 - protein, 969 aa, Streptococcus agalactiae
ATGACAGTTAATAAAATAACTTATCAGAACCTTCAGGAGGAAGTATATAAGTTAACATTAGAGAGCGGGCTAAATGTATACCTTATTCCAAAACCATCATTTAAGGAAACTGTTGGAGTATTGACAGCAAATTTTGGATCACTCCATACAAGATATACGAGGAATGGTTGTGTAGAACATTATCCGGCAGGAATTGCTCACTTCTTAGAACATAAATTATTTGAACTGGATAAAGGACAAGACGCTGCAACTCAATTTACTAAATATGGCGCCGAGAGTAATGCCTTTACAACTTTTGATAAAACTAGTTTTTATTTTTCAACTATAAGTCACATTACAAACTGCTTAGATATACTACTTGACTTTGTATTGACAACAAACTTTACAGAAGAGTCAATTACTAAAGAAAAAGACATTATCAAACAAGAAATTGAAATGTATCAAGATGACCCAGAATATAGGCTTTATCAAGGAGTGTTATCGAACCTTTACCCCAACTCTCCATTAGCATTTGATATCGCTGGAGATTACCAATCAATCTCTCAAATAACCTTAACCGATTTACAAGAAAATCACAAAGACTTTTATCAGTTGTCTAATATGAATTTAGTTCTTGTTGGACAATTTAGTCCACAAGAAATTATAACTTACCTTCAAAAAAATTCTCATTTAACAAATTACTCACAGAATATTGACCGAGATTCTATTAGTCTTGAACCTGTTATAAAAAACAACTCTTGCCATATGACAGTGACAAAACCTAAATTAGCTATTGGTTATCGAAAATCAAGTCATATGAGACATGGTTCTTACCTAAAAGAGAAAATCGGATTACAGCTATTTTTTGCAATGCTTTTAGGATGGACTTCTACAATTAATCAAGACTGGTACGAATCTGGTCAAATTGATGACTCTTTTGATATAGAAATTGAAGATCATCCAGATTTTGAGTGCGTTATNNNNNTTAAT

SEQ ID NO: 12876 - protein, 323 aa, Streptococcus agalactiae
  VARIANT 320, 321, 322: Xaa = Any Amino Acid
MTVNKITYQNLQEEVYKLTLESGLNVYLIPKPSFKETVGVLTANFGSLHTRYTRNGCVEHYPAGIAHFLEHKLFELDKGQDAATQFTKYGAESNAFTTFDKTSFYFSTISHITNCLDILLDFVLTTNFTEESITKEKDIIKQEIEMYQDDPEYRLYQGVLSNLYPNSPLAFDIAGDYQSISQITLTDLQENHKDFYQLSNMNLVLVGQFSPQEIITYLQKNSHLTNYSQNIDRDSISLEPVIKNNSCHMTVTKPKLAIGYRKSSHMRHGSYLKEKIGLQLFFAMLLGWTSTINQDWYESGQIDDSFDIEIEDHPDFECVXXXN

SEQ ID NO: 12877 - protein, 1242 aa, Streptococcus agalactiae
ATGAAAATAGTTGAAGGCGTTTCTCTACATTTAATTAAAAACCAACAATTTAAGACTAATCATCTTACTTTTCGATTTTCAGGTGATTTTAATAATAAAACAGTAGCACGTAGATCGCTCGTTGCTCAAATGTTAGTTACTGCAAATGCTAAGTACCCTAAGGTACAAGAATTTCGAGAAAAGTTAGCTTCCTTATATGGTGCTAGTTTATCAACTAAGATTTCTACTAAGGGTCTTGTTCACATTGTTGATATTGATATTGTATTTGTTAAAAATACCTTTACTTTAGAACAAGAAAATATCGTTGAACAAATTATTACATTCTTGGAGGATATGCTGTTTTCTCCTTTAATTTCTTTAGAACAGTATCAAACATCTATTTTTGATACTGAGAAGAAAAACCTTATTCAATATTTAGAGGCCGATATTGAAGATAATTTTTATAGCAGTGACTTAGCACTAAAATCTTTATTCTACAATAATAAGACACTTCGTTTACCTAAGTATGGTACAGCATCTTTAGTGGAATCAGAAAATTCATTTACAGCTTATCAAGAATTTCAGAAGATGCTTAAGGAAGATCAATTAGATATTTTTGTCGTAGGAGATTTTGATGACTATCGAATGATTCAGGCATTTAATCGTATGGCATTTGAGCCACGTCACAAAGTATTAGCTTTTGATTATACGCAGACTTATGAAAATATCACGAGAAGTCAAGTAGAAGATAAGGACGTTAATCAATCTATTATGCAATTGGCTTATCATCTTCCAATAACTTATAAAGATGAAGATTATTTTGCTTTAATAGTATTTAACGGTTTATTTGGTGCTTTTGCCCATTCCTTGTTGTTTACAGAAATTCGAGAAAAGCAAGGTTTAGCCTATACTATAGGTAGTCAATTTGACAGCTTTACAGGTCTCTTTACGATATATGCAGGTATTGATAAAGAGAATCGTGAGCGTTTTTTGAAGCTTATTAATAAGCAATTCAATAATATTAAGATGGGCAGGTTCTCTTCTACATTATTGAAACAAACAAAAGATATATTGAAAATGAACTATGTTTTAGCTTCTGATAATCCTAAGGTCATAGTTGACCACATTTATCATGAACATTATTTAGATCAGTTTCATACTTCAGCACTATTCATTGACAAAGTGGACGATGTAACAAAATCAGATATTGTCAGCGTAGCAACAAAATTAAAATTACAAGCTTTTTATTTTTTGGAAGGAAAC

SEQ ID NO: 12878 - protein, 414 aa, Streptococcus agalactiae; identical to SEQ ID NO: 8584

SEQ ID NO: 12879 - protein, 351 aa, Streptococcus agalactiae
ATGGATTATAAATTATTTGATGAATATATTACTTTACAATCACTTCTAAAAGAGATTGGTATCATTCAAAGTGGCGGAGCCATTAAAAAATTTTTAGCGGATAATCAAGTATTGTTTAACGGTGACCTTGAAAATAGGCGTGGAAAGAAACTCCGCCTGGGGGATATTATTACTATTCCTGATCAAAATGTCGAGATCATTATAAGGAAGCCATCAGATCAAGAAATTGAAGAACGTAATGTAGAAATAGCTGAAAAACAGCGTGTTTCAGCAATCGTTAAAGAAATGAATAAAAACACCAACAAAGATAAATCAAAAACTAGCAAAAAACCAGTTCGCTTTCCAGGGACA

SEQ ID NO: 12880 - protein, 117 aa, Streptococcus agalactiae
MDYKLFDEYITLQSLLKEIGIIQSGGAIKKFLADNQVLFNGDLENRRGKKLRLGDIITIPDQNVEIIIRKPSDQEIEERNVEIAEKQRVSAIVKEMNKNTNKDKSKTSKKPVRFPGT

SEQ ID NO: 12881 - protein, 1107 aa, Streptococcus agalactiae
ATGTGGATAAAAAATATTTCTTTAAAACATTATCGTAATTATGAAGAAGCACAAGTAGATTTTTCACCCAACCTCAATATTTTCATTGGCCGCAATGCTCAAGGAAAGACAAATTTTTTAGAAGCAATCTACTTCTTGGCTTTGACTCGAAGTCATCGTACCCGTTCTGATAAAGAACTTGTACATTTTAAACACCATGATGTACAAATTACAGGTGAGGTAATCCGCAAAAGCGGCCATCTTAGCTTAGATATTCAATTATCTGAAAAAGGAAGAATCACTAAGGTTAACCATCTTAAACAGGCAAAATTATCTGATTATATTGGGGCTATGACTGTCGTACTTTTTGCCCCTGAAGATCTTCAATTAGTTAAAGGTGCACCTAGCCTAAGACGGAAATTTTTAGATATAGATATTGGACAAATTAAGCCAACGTACTTAGCTGAACTTTCAAATTACAATCATGTATTAAAACAAAGAAACACTTATCTAAAAACTACTAATAACGTCGACAAAACTTTTTTATCAGTCCTTGATGAACAATTAGCTGATTATGGAAGTCGTGTCATTGAACACCGTTTTGATTTTATCCAAGCCCTAAATGATGAAGCGGACAAGCATCACTACATTATCAGTACTGAGTTAGAACATTTATCTATTCACTACAAATCGTCAATAGAGTTTACAGATAAGTCAAGTATTAGGGAACATTTTTTAAACCAATTATCTAAAAGCCACTCAAGAGACATCTTTAAGAAAAACACAAGCATCGGACCTCATCGTGATGATATTACTTTCTTTATTAATGATATCAATGCTACTTTTGGTAGCCAAGGGCAACAAAGAAGCCTTATTTTATCATTGAAATTAGCAGAAATTGAGCTAATAAAAACCGTTACCAACGATTATCCGATTCTCTTACTTGACGACGTCATGAGTGAACTTGACAACCATCGTCAACTAAAACTCTTAGAGGGAATCAAAGAGAATGTTCAAACATTTATTACTACAACAAGTTTAGAGCATTTAAGTGCTTTACCTGATCAACTCAAAATCTTTAATGTTAGTGATGGTACTATTAGTATTAATGAAAAAAAAGCAACAGAT

SEQ ID NO: 12882 - protein, 369 aa, Streptococcus agalactiae
MWIKNISLKHYRNYEEAQVDFSPNLNIFIGRNAQGKTNFLEAIYFLALTRSHRTRSDKELVHFKHHDVQITGEVIRKSGHLSLDIQLSEKGRITKVNHLKQAKLSDYIGAMTVVLFAPEDLQLVKGAPSLRRKFLDIDIGQIKPTYLAELSNYNHVLKQRNTYLKTTNNVDKTFLSVLDEQLADYGSRVIEHRFDFIQALNDEADKHHYIISTELEHLSIHYKSSIEFTDKSSIREHFLNQLSKSHSRDIFKKNTSIGPHRDDITFFINDINATFGSQGQQRSLILSLKLAEIELIKTVTNDYPILLLDDVMSELDNHRQLKLLEGIKENVQTFITTTSLEHLSALPDQLKIFNVSDGTISINEKKATD

SEQ ID NO: 12883 - protein, 834 aa, Streptococcus agalactiae
ATGTTTGCGTGGGGAAGTATTGGATTTGTTAGTAATAAAATTGGAGGCCGTCCAAATCAACAAACATTTGGAATGACTTTAGGAGCATTGCTATTTGCGATTATCGTATGGTTATTTAAACAGCCAGAGATGACTGCCTCATTGTGGATTTTTGGTATCTTAGGTGGTATCCTATGGTCAGTCGGCCAAAATGGTCAATTTCAAGCAATGAAATATATGGGAGTCTCTGTTGCTAATCCACTGTCAAGTGGTGCACAATTAGTAGGTGGAAGCCTAGTTGGTGCTTTAGTCTTTCATGAATGGACTAAGCCAATCCAATTTATTTTAGGATTGACAGCGTTGACATTATTAGTTATCGGCTTCTATTTCTCAAGTAAACGTGATGTCTCAGAACAAGCTTTGGCAACACATCAAGAGTTTTCAAAAGGATTTGCTACAATTGCTTATTCAACTGTAGGTTACATCTCATACGCAGTTTTATTTAATAACATTATGAAGTTCGACGCTATGGCCGTTATTTTACCCATGGCTGTTGGAATGTGTCTAGGTGCAATTTGTTTCATGAAGTTTCGTGTTAACTTTGAGGCTGTTGTTGTTAAAAATATGATTACAGGTCTCATGTGGGGCGTTGGTAATGTCTTCATGTTATTGGCAGCAGCTAAAGCAGGGCTAGCAATTGCTTTTAGTTTTTCTCAACTTGGAGTAATTATCTCTATTATTGGTGGTATTTTATTTTTAGGTGAGACAAAAACGAAGAAAGAGCAGAAATGGGTTGTCATGGGTATCCTTTGTTTTGTTATGGGTGCTATATTACTTGGTATTGTTAAATCTTAT

SEQ ID NO: 12884 - protein, 278 aa, Streptococcus agalactiae
MFAWGSIGFVSNKIGGRPNQQTFGMTLGALLFAIIVWLFKQPEMTASLWIFGILGGILWSVGQNGQFQAMKYMGVSVANPLSSGAQLVGGSLVGALVFHEWTKPIQFILGLTALTLLVIGFYFSSKRDVSEQALATHQEFSKGFATIAYSTVGYISYAVLFNNIMKFDAMAVILPMAVGMCLGAICFMKFRVNFEAVVVKNMITGLMWGVGNVFMLLAAAKAGLAIAFSFSQLGVIISIIGGILFLGETKTKKEQKWVVMGILCFVMGAILLGIVKSY

SEQ ID NO: 12885 - protein, 660 aa, Streptococcus agalactiae
ATGAAAAATTATGGAAAAATTTTAAAAGAGTTGAGAGAAGACAAAGGTATATCCCTAAGTTCTCTAGCCAAAAGTGCTCAATTATCAAAATCAACTCTATCACGTTTTGAAAATGGTGAGACACAAATAGGTATTGATAAATTTATTAAAGCTTTACAAACGTTGGAGGTTAGGGTAACTATCAATGAAGTATCCATTCTAGATTCAAAAGTTAAGGCTGGAACTTCTAATACTGATTTAGAGCAATTAACTTTACTGGAATCTTATCGAGATAATGAAGATATCATGAGAATTTTCAGTTTCCAAAAACAACAATCCTGTGATAGAATAGAAAGCAATGTTCTCAAAATATTGGCTAAACTTTTTATTTCAAATTTAGGGTTAAATATGAGGCTGCCTCAAGATGAGATTAACCTGGTAGTTACTTATCTGAATGGTGTGACACAGTACAATGATTTTTATTTCAAAGTCATCTGCTATTTTCAAGATATTTTACCTAAAGATGTTATTTTAAATAAGATTAGTAATATGACTAAAGAACAGTTACCTTATTCTAAATCACTGGTCAATTTATTGATAAAACAAGTCATTATAGCTTTGGAAAAAGATAGTGTTGATAAAGCTATAGTATTTGCTGATTTTGCTAATAAAGTTAGTCAA

SEQ ID NO: 12886 - protein, 220 aa, Streptococcus agalactiae
MKNYGKILKELREDKGISLSSLAKSAQLSKSTLSRFENGETQIGIDKFIKALQTLEVRVTINEVSILDSKVKAGTSNTDLEQLTLLESYRDNEDIMRIFSFQKQQSCDRIESNVLKILAKLFISNLGLNMRLPQDEINLVVTYLNGVTQYNDFYFKVICYFQDILPKDVILNKISNMTKEQLPYSKSLVNLLIKQVIIALEKDSVDKAIVFADFANKVSQ

SEQ ID NO: 12887 - protein, 1479 aa, Streptococcus agalactiae
ATGTCAAATTGGGATACTAAGTTTTTGAAAAAAGGTTTTACTTTTGATGATGTTCTGCTTATTCCTGCTGAAAGCCATGTTTTACCAAATGAAGTTGATATGAAGACAAAGTTGGCTGATAATTTGACATTAAACATTCCAATCATTACAGCTGCAATGGATACAGTTACAGATAGTAAGATGGCTATTGCTATTGCGCGTGCTGGTGGGCTTGGTATCATTCATAAAAATATGTCAATAGTTGATCAAGCAGAAGAAGTTCGTAAAGTTAAACGCTCAGAAAATGGTGTTATTATTGACCCATTCTTCTTGACACCAGATAATACTGTCTCTGAAGCTGAGGAATTGATGCAAAACTATCGCATTAGTGGAGTTCCTATTGTAGAGACACTCGAGAATCGTAAATTAGTTGGAATTATTACTAACCGTGATATGCGTTTCATTTCTGATTATAAACAACTAATCTCAGAGCACATGACAAGTCAAAATCTTGTAACAGCTCCTATTGGTACAGATCTTGAAACTGCAGAGCGTATTCTTCATGAGCATCGTATTGAAAAGCTACCTTTAGTAGATGATGAGGGACGTCTTTCAGGACTTATTACTATTAAGGATATCGAAAAAGTTATTGAATTTCCGAAGGCAGCAAAAGATGAATTTGGACGTCTCTTAGTTGCTGGTGCAGTAGGTGTAACCTCTGATACTTTTGAACGTGCAGAAGCTTTGTTTGAAGCAGGTGCAGATGCTATTGTCATTGATACAGCACATGGACATTCAGCTGGTGTGCTCCGTAAAATTGCTGAAATTCGTGCTCACTTCCCTAATCGCACATTGATTGCGGGAAATATTGCTACAGCAGAAGGAGCGCGTGCACTTTATGATGCAGGTGTGGATGTCGTTAAAGTTGGTATTGGTCCAGGTTCAATTTGTACGACTCGTGTCGTTGCTGGGGTAGGTGTTCCTCAGATTACAGCTATTTACGATGCAGCGGCTGTTGCGCGTGAGTACGGTAAGACTATCATTGCTGATGGTGGTATTAAATATTCAGGTGATATTGTAAAAGCACTTGCAGCAGGTGGAAATGCAGTTATGCTAGGTTCAATGTTTGCAGGAACAGATGAAGCGCCAGGAGAAACAGAAATTTTCCAAGGGCGTAAGTTCAAGACATACCGTGGTATGGGCTCAATTGCAGCAATGAAAAAAGGTTCAAGCGATCGTTATTTCCAAGGTTCTGTAAACGAGGCTAACAAATTGGTTCCAGAAGGTATTGAAGGTCGTGTAGCATACAAAGGTTCAGTAGCCGATATTGTTTTCCAAATGCTTGGTGGCATTCGTTCTGGTATGGGATATGTAGGTGCAGCGAACATAAAAGAACTTCATGATAATGCTCAATTTGTTGAAATGTCAGGAGCTGGTTTGAAAGAAAGCCATCCCCATGATGTTCAAATTACAAATGAGGCACCAAATTATTCAGTACAC

SEQ ID NO: 12888 - protein, 493 aa, Streptococcus agalactiae; identical to SEQ ID NO: 3896

SEQ ID NO: 12889 - protein, 483 aa, Streptococcus agalactiae; identical to SEQ ID NO: 8595

SEQ ID NO: 12890 - protein, 161 aa, Streptococcus agalactiae; identical to SEQ ID NO: 8596

SEQ ID NO: 12891 - protein, 678 aa, Streptococcus agalactiae
GTGATTACAAAAGAACAATATTTTTATTTCAGACAACTAGATGATTTTAAACACTTTACTATTGAACAATTTGACCATATTGTGAGCCACATTAAACATCGTACAGCTCTAAAAAATCATACCTTATTTTTTGAAGGTGATTACCGTGAAAAACTGTTTTTAATCCAGTCAGGACATGTAAAAATTGAACAATCAGACGCTTCTGGTTCTTTTATTTATACAGATTATGTTAGACAAGATACGGTTTTTCCTTATGGAGGTCTCTTTTTGGATGATGATTACCATTTTTCAGCAGTGGCTATTACGGATATTGAGTATTTTTCTCTGCCAATGGCTTTATACGAAGAATACTCTCTTCAAAATATCAATCAAATGAAGCATCTTTGTCGGAAATATTCTAAGCTATTACGAGTTCATGAAATACGACTTCGTAATATGGTGACTTCAAGTGCCAGTATGAGAGTTATCCAATCGCTTGCAACTCTACTTTTGCAAGTTCCTACAGAAAGGGGACATTTACCTTTTCCTATTACAACGATTGAAATTGCCAATATGAGCGGAACTACTCGCGAGACAGTTAGTCATGTTTTAAAGGAATTACGCCAAAAAGATATCGTTGAAATGAAAGGAAAGAAGCTTCTCTATAATAATAAAAATTATTTCAAGAAATTCATTGAA

SEQ ID NO: 12892 - protein, 226 aa, Streptococcus agalactiae
MITKEQYFYFRQLDDFKHFTIEQFDHIVSHIKHRTALKNHTLFFEGDYREKLFLIQSGHVKIEQSDASGSFIYTDYVRQDTVFPYGGLFLDDDYHFSAVAITDIEYFSLPMALYEEYSLQNINQMKHLCRKYSKLLRVHEIRLRNMVTSSASMRVIQSLATLLLQVPTERGHLPFPITTIEIANMSGTTRETVSHVLKELRQKDIVEMKGKKLLYNNKNYFKKFIE

SEQ ID NO: 12893 - protein, 702 aa, Streptococcus agalactiae
ATGACTAAATTTATTGTTGATTCATCGTACTGGAATTTGTTTCCAACTTCTAAAATTGGAGTAATCTTAATCAAAGATTATCACATGGACAGGAACCTTGAAACAGAACTTAAACAGTTACTGTCTGATAGTCATTCTTTAGCAAAAAAATATTTGCAAGAGAAAGAATTCAGTCAAAACAGAGTTATTCAAACTTATCGTAAAGCATATCAAACCTTTAAAACTAAAAAAGGTGCACGTTCAAGTATCGAAGCATTATTGAAGCGAGTTAATTCAGGAAACGAAATTACTAGTATAAATCCTCTAGTTGATATCTATAATGCCGCTAGCCTTAGGTTTGGATTACCTATTGGTGCTGAGGATAGTGATACATTTAGAGGTGATTTAAAACTAACTATTACCAATGGTGGTGATGAATTTTACTTGATTGGCGAAGATTTTAACAGACCAACTCTTTCAGGTGAGCTTGCCTATGTTGATGATGTTGGAGCAGTTTGCCGCTGTTTTAATTGGCGTGATGGAAAACGTACTATGATTACCGATAATACTCAGAACGCTTTTTTAGTTATCGAATTAATTGATAATGGAAGAGAAATTATTTTTAAAGAAGCGTTGGACTTTATCGCCACCAATACAAATCGTTTTCTAAAAGCTAAAACACAGACCATCATATTAGATAAAGAACACAGTGAAATAACGCTA

SEQ ID NO: 12894 - protein, 234 aa, Streptococcus agalactiae; identical to SEQ ID NO: 3902

SEQ ID NO: 12895 - protein, 1230 aa, Streptococcus agalactiae
ATGACTCAAACACATCCAATTCATGTTTTCTCAGAAATTGGAAAACTTAAAAAAGTTATGCTACACCGTCCAGGTAAAGAAATAGAAAATCTGATGCCTGATTATTTAGAGAGACTCTTGTTTGATGATATCCCATTTTTGGAAGATGCACAAAAAGAACACGATGCGTTTGCACAAGCACTTCGCAACGAAGGAGTCGAAGTACTTTACCTTGAAAATCTTGCTGCCGAGTCGTTAACAAACCAAGGAATTCGTGAACAGTTTATCGATGAGTACATTGGCGAAGCAAATGTTCGCGGTCGTGCTACTAAAAAAGCTATTCGAGAATTATTACTCAATATCAAAGATAATAAAGAACTTATCGAAAAAACTATGGCAGGTATCCAAAAGTCTGAGCTACCTGAAATCCCATCTTCTGAAAAAGGTCTAACTGATCTTGTCGAATCTAATTATCCATTTGCCATAGATCCGATGCCAAATCTTTACTTTACACGTGATCCATTTGCAACTATTGGGAATGGAGTTTCATTAAATCATATGTTCTCTGAAACACGTAATCGCGAAACTTTATACGGTAAATATATCTTTACACATCACCCAGAGTACGGTGGAAAAGTCCCTATGGTCTATGAACGTGAAGAAACAACTCGTATTGAAGGTGGAGATGAGCTTGTCCTTTCTAAAGATGTCCTTGCCGTTGGTATCTCTCAACGTACTGATGCTGCCTCTATTGAAAAACTCTTAGTCAATATTTTTAAACAAAATTTAGGTTTTAAAAAGGTTTTAGCATTTGAATTTGCAAATAATCGTAAATTTATGCACCTTGACACAGTCTTTACAATGGTTGACTATGACAAGTTTACAATTCACCCAGAAATTGAAGGCGATCTTCGCGTTTACTCTGTAACTTACGAAAACCAAGATCTTCATATTGAAGAAGAAAAAGGTGATTTGGCAGATCTTCTAGCGAAAAACCTAGGAGTTGAGAAAGTGGAATTGATTCGTTGTGGGGGTGACAACTTAGTCGCTGCTGGACGTGAACAATGGAATGATGGTTCAAATACATTAACTATAGCACCAGGTGTCGTTGTCGTTTACAACAGAAATACAATCACAAATGCAATCTTAGAGTCCAAAGGATTGAAATTAATTAAGATTAATGGAAGTGAATTAGTTCGTGGGCGTGGTGGACCACGCTGCATGTCAATGCCATTTGAACGTGAAGACCTT

SEQ ID NO: 12896 - protein, 410 aa, Streptococcus agalactiae
MTQTHPIHVFSEIGKLKKVMLHRPGKEIENLMPDYLERLLFDDIPFLEDAQKEHDAFAQALRNEGVEVLYLENLAAESLTNQGIREQFIDEYIGEANVRGRATKKAIRELLLNIKDNKELIEKTMAGIQKSELPEIPSSEKGLTDLVESNYPFAIDPMPNLYFTRDPFATIGNGVSLNHMFSETRNRETLYGKYIFTHHPEYGGKVPMVYEREETTRIEGGDELVLSKDVLAVGISQRTDAASIEKLLVNIFKQNLGFKKVLAFEFANNRKFMHLDTVFTMVDYDKFTIHPEIEGDLRVYSVTYENQDLHIEEEKGDLADLLAKNLGVEKVELIRCGGDNLVAAGREQWNDGSNTLTIAPGVVVVYNRNTITNAILESKGLKLIKINGSELVRGRGGPRCMSMPFEREDL

SEQ ID NO: 12897 - protein, 429 aa, Streptococcus agalactiae
ATGAAGCTATTAGTCAATCACTTGCCTTACCAAAGAGCTGCAAGCCTATATATTCGCTTTTCTGTTTTCGTTATCGAAAGAAATATAAAAATGGAAGAAGAATTCGATGATAATGACGAGCAAGATACTATTTATGCTGTTCTTTATGATGGGAAACAGCCAGTTTCAACAGGACGCTTTCTTCCTGAAACTCAAACAGAAGCTCGTTTGACTCGAATTGCGACTTTAAAAGGTTATCGTGGTAACGGCTATGGTACCAAAATTATTATAGCACTAGAAAATTATGCAAAAGAAAATGGTTATCACTATCTAACTATACATGCTGAATTGACAGCAAAAGATTTCTACCAGACACTTGGGTATCAAGCTACTGGGGATATTTATATGGAAGACGGGGAAGCCTGTCAAACACTCGAAAAATATTTAATT

SEQ ID NO: 12898 - protein, 143 aa, Streptococcus agalactiae
MKLLVNHLPYQRAASLYIRFSVFVIERNIKMEEEFDDNDEQDTIYAVLYDGKQPVSTGRFLPETQTEARLTRIATLKGYRGNGYGTKIIIALENYAKENGYHYLTIHAELTAKDFYQTLGYQATGDIYMEDGEACQTLEKYLI

SEQ ID NO: 12899 - protein, 1011 aa, Streptococcus agalactiae
ATGACACAAGTATTTCAAGGACGTAGTTTCTTAGCAGAAAAAGATTTTTCTCGTGAGGAATTTGAATATCTTATTGATTTTTCAGCTCATTTAAAAGACCTTAAAAAACGTGGTGTTCCTCATCATTATCTTGAAGGTAAAAATATTGCTCTCTTATTTGAAAAAACATCTACTCGTACTCGCGCAGCCTTTACAACTGCAGCAATTGACCTAGGCGCTCATCCGGAATACCTTGGTGCAAATGATATTCAACTTGGTAAAAAAGAATCAACAGAAGATACTGCTAAGGTTTTAGGACGTATGTTTGATGGTATTGAATTCCGTGGTTTTAGCCAAAGAATGGTTGAAGAGCTTGCTGAATTTTCTGGAGTACCTGTCTGGAATGGTTTAACAGATGAATGGCATCCAACACAAATGCTAGCTGACTACCTTACTATCAAAGAAAACTTCGGTAAACTTGAAGGTATTACTCTTGTTTACTGTGGTGACGGACGTAACAACGTTGCCAACTCACTTTTAGTGGCTGGGACTTTGATGGGAGTCAATGTACACATCTTTTCTCCAAAAGAACTTTTCCCTGCTGAAGAGATTGTTAAATTGGCTGAAGGATATGCCAAAGAGTCTGGGGCTCACGTTCTCGTTACTGATAATGTAGACGAAGCTGTAAAGGGAGCAGACGTCTTTTACACTGATGTCTGGGTATCGATGGGAGAAGAAGATAAGTTCAAAGAACGCGTTGAACTTCTTCAACCATATCAAGTAAACATGGATCTGATTAAAAAAGCTAATAATGATAATCTTATCTTCTTACACTGCTTACCTGCGTTCCATGATACAAATACCGTTTATGGCAAAGACGTCGCTGAAAAATTTGGAGTCAAGGAAATGGAAGTTACTGATGAAGTCTTCCGTAGCAAATATGCCCGTCATTTCGACCAAGCTGAAAATCGTATGCACACTATTAAAGCTGTAATGGCTGCAACCCTTGGAAATCTTTTCATTCCAAAAGTT

SEQ ID NO: 12900 - protein, 337 aa, Streptococcus agalactiae
MTQVFQGRSFLAEKDFSREEFEYLIDFSAHLKDLKKRGVPHHYLEGKNIALLFEKTSTRTRAAFTTAAIDLGAHPEYLGANDIQLGKKESTEDTAKVLGRMFDGIEFRGFSQRMVEELAEFSGVPVWNGLTDEWHPTQMLADYLTIKENFGKLEGITLVYCGDGRNNVANSLLVAGTLMGVNVHIFSPKELFPAEEIVKLAEGYAKESGAHVLVTDNVDEAVKGADVFYTDVWVSMGEEDKFKERVELLQPYQVNMDLIKKANNDNLIFLHCLPAFHDTNTVYGKDVAEKFGVKEMEVTDEVFRSKYARHFDQAENRMHTIKAVMAATLGNLFIPKV

SEQ ID NO: 12901 - protein, 1425 aa, Streptococcus agalactiae
ATGGAAAAAGAAAAAAAATTAGGTCTTTTACCACTAACAATGCTTGTCATTGGCTCTCTTATCGGTGGCGGAATCTTTGATTTAATGCAAAATATGAGTTCCAGAGCCGGTTTGGTACCAATGCTTATTGCTTGGGTAATTACTGCTATCGGGATGGGGACTTTCGTTTTAAGTTTTCAAAATTTATCTGAAAAAAGGCCGGACCTAACAGCTGGAATCTTTAGTTACGCTAAAGAGGGGTTTGGAAACTTTATGGGATTTAACTCTGCATGGGGTTATTGGTTATCAGCTTGGCTTGGAAATGTTGCCTACGCTGCACTCTTATTCAGTTCACTCGGTTATTTCTTTAAATTCTTTGGTAATGGAAATAATATCATTTCAATTATTGGAGCAAGTATAGTTATTTGGGTTGTCCATTTCTTAATTTTAAGAGGTGTTAATACAGCTGCATTTATTAATACCATAGTTACCTTTGCAAAATTAGTACCTGTTATTATTTTCTTAATTTCAGCGTTATTAGCTTTCAAATTTAACATTTTTAGTCTTGATATCTGGGGAAATGGATTACATCAATCAATTTTCAACCAAGTCAATTCAACTATGAAAACCGCTGTTTGGGTATTTATTGGTATTGAGGGCGCCGTTGTCTTCTCAGGTCGTGCTAAAAAACACTCTGATATTGGTAAAGCAAGTATCCTAGCATTATTCACTATGATTTCACTTTATGTATTGATTTCTGTTTTATCACTTGGTATCATGTCACGTCCAGAACTTGCAAACTTAAAAACACCAGCTATGGCTTACGTTCTAGAAAAGGCTGTTGGTCACTGGGGCGCTATCTTAGTTAACCTTGGTGTTATCATTTCAGTATTTGGCGCTATTCTTGCTTGGACTTTATTTGCAGCAGAATTACCATATCAAGCTGCTAAAGAAGGTGCTTTTCCTAAATTCTTTGCAAAAGAAAATAAAAACAAAGCTCCAATCAACTCACTCTTAGTCACTAATCTTTGTGTACAAGCATTCTTAATCACGTTCTTATTCACACAAAGTGCTTATCGTTTTGGTTTCGCATTAGCATCATCTGCTATCTTAATTCCTTATGCTTTTACAGCACTATATCAATTACAATTCACACTCCGTGAGGATAAGTCAACTCCAGGACATCAAAAGAATTTAATTATCGGTATCCTCGCTACAATCTATGCTGTTTACCTTATCTACGCTGGTGGTTTTGATTACTTACTTTTGACAATGATTGCTTACACTCTAGGTATGATTCTCTATATTAAAATGAGAAAAGATGACAAGCTTCCTATCTTTGTGGGATATGAAAAAATTAGTGCCATTGTCATTCTAGCGCTTTGCTTACTATGTATTATTGAAATTATGACTGGACAAATTGACATTGCTGCAATCCTAGCAGGT

SEQ ID NO: 12902 - protein, 475 aa, Streptococcus agalactiae; identical to SEQ ID NO: 3910

SEQ ID NO: 12903 - protein, 954 aa, Streptococcus agalactiae
TTGGTAAAAGAACATCAAAAAATCGTAGTTGCCTTAGGTGGTAACGCTATTCTATCAACAGATGCTTCAGCAAAAGCACAACAAGAAGCATTAATCAACACATCAAAATCACTGGTCAAACTGATTAAAGAAGGCCATGATGTCATTGTTACTCATGGAAATGGTCCCCAAGTTGGTAACTTATTGCTACAGCAAGCAGCTGCAGATTCTGAAAAAAATCCAGCAATGCCTTTGGATACTTGTGTTGCCATGACAGAAGGAAGTATTGGTTTTTGGTTACAAAATGCTCTTAACAATGAATTACAAGAACAAGGCATTGACAAAGAGGTTGCAACAGTGGTAACTCAAGTTATTGTTGATGAAAAAGATCAAGCTTTCACTAATCCAACAAAACCTATTGGCCCATTCTTATCTGAAGAAGATGCCAAGAAACAAGCCCAAGAAACAGGTTCAAAATTTAAAGAAGATGCTGGTCGTGGATGGCGTAAAGTCGTTCCTTCACCAAAACCGGTTGGTATCAAAGAAGCTTCTGTTATTAGACGGTTAGTGGACTCTGGTGTGGTTGTTATTAGCGCAGGTGGCGGAGGTGTACCAGTTATTGAAGATGCTAATACAAAGGCATTAAAAGGGGTTGAAGCTGTTATTGACAAAGACTTTGCCAGTCAAACTTTATCAGAACTTGTTGATGCTGACTTATTCATCGTCTTAACTGGCGTTGACAACGTTTTTGTTAATTTTAATAAACCTAATCAAGAAAAATTAGAAGAAGTTACTGTTTCACAAATGAAACAATATATCACTGAAAATCAATTTGCCCCTGGCAGTATGCTACCAAAGGTAGAAGCTGCGATTGCTTTTGTTGAAAATAAACCAGAAGCGCGTGCTATCATTACTTCACTTGAAAATATTGATAATGTCTTAGCAGAAAATGCAGGGACACAAATTGTTGCAAAT

SEQ ID NO: 12904 - protein, 318 aa, Streptococcus agalactiae
MVKEHQKIVVALGGNAILSTDASAKAQQEALINTSKSLVKLIKEGHDVIVTHGNGPQVGNLLLQQAAADSEKNPAMPLDTCVAMTEGSIGFWLQNALNNELQEQGIDKEVATVVTQVIVDEKDQAFTNPTKPIGPFLSEEDAKKQAQETGSKFKEDAGRGWRKVVPSPKPVGIKEASVIRRLVDSGVVVISAGGGGVPVIEDANTKALKGVEAVIDKDFASQTLSELVDADLFIVLTGVDNVFVNFNKPNQEKLEEVTVSQMKQYITENQFAPGSMLPKVEAAIAFVENKPEARAIITSLENIDNVLAENAGTQIVAN

SEQ ID NO: 12905 - protein, 1023 aa, Streptococcus agalactiae
ATGACGAAACCAATTATCTTAACAGGTGATAGACCGACAGGAAAGTTGCATATTGGACATTATGTAGGTAGCTTAAAAAATAGAGTTCTACTTCAAAATGAGGGTAGCTATACTTTATTTGTCTTTTTAGCAGACCAACAAGCATTGACAGACCATGCTAAAGATCCGCAAACTATTGTTGAATCAATTGGTAATGTTGCACTTGATTATTTAGCTGTTGGGCTAGATCCAAACAAGTCGACTTTATTCATTCAAAGTCAAATTCCTGAGTTAGCAGAATTAAGTATGTATTATATGAACTTGGTTTCACTTGCACGTTTGGAACGTAATCCAACTGTAAAAACAGAAATTGCTCAAAAAGGTTTTGGTGAGTCTATTCCAGCAGGATTCTTAGTTTATCCTGTTGCACAAGCAGCTGATATAACCGCTTTTAAAGCTAACCTTGTTCCTGTAGGGACTGACCAAAAACCAATGATTGAACAAACACGTGAAATAGTTAGATCTTTCAATCATGCTTATAATTGTCAGGTTTTAGTTGAACCAGAAGGAATCTATCCAGAAAATGATGCAGCAGGTCGTCTGCCAGGGTTAGATGGTAATGCAAAAATGTCTAAGTCATTAAATAATGGAATCTTTTTAGCAGATGATATGGATACAGTTAAGAAAAAAGTTATGAGTATGTATACTGATCCAAACCATATTAAAGTAGAAGAACCAGGACAAATCGAAGGTAATATGGTATTTCATTACCTTGATGTTTTTGGAAGAGATGAAGACCAAAAAGAGATTACTGCTATGAAAGAACACTATCAAAAAGGTGGACTTGGAGATGTTAAAACAAAACGTTATCTACTTGATATCTTAGAGCGTGAATTATCACCTATTAGAGAACGTCGCCTCGAATATGCTAAAGATATGGGACAAGTTTATCAAATGTTACAAAAAGGTAGTGAGAAAGCTCAAGCTGTTGCAGCCTCTACTTTGGATGAGGTTAAATCAGCCATGGGTTTGAACTATTTTAAA

SEQ ID NO: 12906 - protein, 341 aa, Streptococcus agalactiae; identical to SEQ ID NO: 3914

SEQ ID NO: 12907 - protein, 690 aa, Streptococcus agalactiae
ATGCGCAGAGATGATATTATAATGCCACAAGATGGAAGAAAAATGGCTGTATTATTGGGTTTTATTGGTGGTTTTATTGACGTTTATAGTCACATGCAGTTTCACTCCCTTGTTGCAACACAGACAGGTAATATTATCTTGATGGTGGCAAATCTCGGACAAAATGATTTTCACTTTTTTATCACTAAATTATTTTCTATTTTCTTTTTTTCAATTGGTTTTTTGGTTGGTATTGTGATTAAAGAACGTGCAGTAACAGCTTTTTGGCGTCTATATGCATTATGTCCCCTTTTACTGTCTACTATGTTTATTCCTTTTGTTGAAAATGTAAACCACAATATCTGGGTAGCTTTATTAGCCTTTAGCACAGGTATTTTAATGTTGACATTTTCAGGAAGTCGCATTGAATCTGAACCATATACTATCTTAATGACTTCTGGTAATTATCGAAAAATGCTACAATTTTGGTATGAGTATATTGTTAATCGTCAGAGAACGGCTATGCAAAAAAGACGAGCTATCAATTATTCACTGGTAGTTCTAGCATTTATTGTTGGAGCATTGGTAGCTGCAATAGTTTACGATATCTTTGCATATAGAGCTATTTTAGGTGTGACGATAACGCTTTTAATTATTATGATTCATTATACGATTGAAATTATTAAGAACGATTTAACGTTACATAATGTT

SEQ ID NO: 12908 - protein, 230 aa, Streptococcus agalactiae
MRRDDIIMPQDGRKMAVLLGFIGGFIDVYSHMQFHSLVATQTGNIILMVANLGQNDFHFFITKLFSIFFFSIGFLVGIVIKERAVTAFWRLYALCPLLLSTMFIPFVENVNHNIWVALLAFSTGILMLTFSGSRIESEPYTILMTSGNYRKMLQFWYEYIVNRQRTAMQKRRAINYSLVVLAFIVGALVAAIVYDIFAYRAILGVTITLLIIMIHYTIEIIKNDLTLHNV

SEQ ID NO: 12909 - protein, 870 aa, Streptococcus agalactiae
ATGTCTAAAAAAATTAAGAATTTTATACTATTAAATATTGGATCTCTAATTGTTGCATTTGGTTTCAACGCTTTCTTCCTTCATAATCATATTGTCACGGGGGGGATTAGTGGTTTGGCAGTTAGTTTTCATGAAGTATTTGGTTGGGATTCTGCTTTTTTTATTATGATTATCAATATTCCATTGCTCCTTCTTTGCTACTTTGGCTTAGGTAAACAAACCTTTTTAAAAACTGTCTATGGTTCTTGGATTTTTCCTGTTTTTATTAAGTTAACACAAAGTGTACCAACTTTGACCCACAACCCACTCCTCGCAGCACTTTTTGGAGGTGTTATTGTAGGATGTGGTTTGGGGATTGTTTTTTGGAGTGACTCTTCAACTGGTGGAACGGGGATTATCATTCAATTCTTAGGAAAATATACTCCTATAAGCCTTGGACAAGGGGTTATATTGATTGATGGACTTGTTACAATTGTTGGTTTCCTAGCTTTTGACAGTGATACGGTTATGTTTTCTATTATTGGGTTGATAACTATTAGTTATATTATTAATGCTATCCAAACTGGTTTTACAACCTTAAGCACTGTCTTAATCGTTTCTCAAGAGCACCAAAAAATTAAGACATATATCAATACTGTCGCAGATAGAGGAGTAACAGAAATTCCCGTTAAAGGGGGATATTCTGGAACTAATCAAATCATGCTTATGACCACTATTGCTGGTTATGAGTTTGCTAAATTACAAGAGGCAATAGCAGAAATTGACGAAACAGCCTTCATAACAGTAACTCCAACATCACAAGCTTCTGGACGTGGATTTAGTCTTCAAAAAAATCATGGACGTCTTGATGAAGACATTCTTATGCCAATG

SEQ ID NO: 12910 - protein, 290 aa, Streptococcus agalactiae; identical to SEQ ID NO: 2

SEQ ID NO: 12911 - protein, 1617 aa, Streptococcus agalactiae
TTGCTTACAGTTTCAGATGTTTCACTACGTTTTAGTGATCGCAAATTATTTGATGAAGTTAACATTAACTTTACAGCAGGAAATACCTATGGTCTTATCGGAGCAAATGGCGCTGGTAAATCAACTTTCCTTAAAATTTTAGCTGGTGATATTGAACCAACAACAGGACATATTGCACTTGGCCCAGATGAACGCCTTTCTGTACTTCGCCAAAATCATTTTGATTATGAAGATGAGCGCGTCATTGATGTCGTTATCATGGGTAATGAAACACTTTATAGTATCATGAAAGAAAAGGATGCTATCTACATGAAAGAAGATTTTTCTGATGAAGATGGTGTTCGCGCTGCGGAATTAGAAGGAGAATTTGCTGAACTCGGTGGATGGGAGGCTGAAAGTGAGGCTTCTCAATTACTCCAAAATCTAAATATTTCAGAAGAGCTTCATTATCAAAATATGAGTGAACTAGCTAATGGAGACAAAGTTAAAGTTCTCCTTGCAAAAGCTCTCTTTGGTAAACCAGATGTACTTCTCCTTGACGAGCCTACCAATGGACTTGATATCCAGTCTATTACTTGGTTAGAAGATTTCTTGATTGACTTTGAAAATACAGTTATTGTAGTTTCCCACGACCGTCATTTCTTGAATAAAGTATGTACACATATGGCTGACCTTGATTTTGGAAAAATTAAACTGTTCGTCGGTAACTATGATTTCTGGAAAGAATCATCAGAATTAGCAGCTCGTTTACAAGCTGATCGTAATGCTAAAGCAGAAGAAAAAATTAAACAACTTCAAGAATTCGTTGCACGATTTTCAGCGAATGCTTCAAAATCAAAACAAGCAACTTCTCGTAAAAAAATGCTTGATAAAATTGAACTTGAAGAGATTGTACCATCAAGCCGTAAATACCCATTCGTTAACTTTAAAGCCGAACGCGAAATGGGAAATGATTTATTGACCGTTGAAAATCTCTCTGTCACTATTGATGGGGAAAAAATCCTTGATAATATCAGTTTCATTCTTCGTCCTGGTGATAAAACTGCACTTATTGGACAAAATGATATCCAAACTACTGCACTTATTCGAGCATTGATGGGGGATATCGAATATGAAGGAACAATCAAATGGGGAGTAACAACTAGTCGTTCTTACCTTCCAAAAGACAATTCACGAGACTTTGCTTCTGGCGAGTCAATCTTAGAATGGCTTCGTCAATTTGCTAGTAAAGAAGAAGACGATAATACCTTCTTACGTGGCTTCCTAGGTCGTATGCTTTTCTCTGGAGATGAGGTTAACAAATCTGTTAATGTCTTATCTGGGGGTGAAAAAGTACGCGTTATGCTTTCGAAATTAATGCTATTAAAATCTAATGTTCTTGTTCTTGATGATCCAACAAACCACTTAGATTTGGAATCTATTTCAAGTCTCAACGATGGACTAAAAGATTTCAAAGAATCTATTATTTTTGCAAGTCATGACCACGAGTTTATTCAAACTTTAGCGAACCATATTATTGTTCTTTCTAAAAACGGAGTTGTCGATCGTATCGATGAAACTTACGATGAATTTCTTGAAAATGCCGAAGTACAAGCTAAGGTCGCTCAACTCTGGAAA

SEQ ID NO: 12912 - protein, 539 aa, Streptococcus agalactiae
MLTVSDVSLRFSDRKLFDEVNINFTAGNTYGLIGANGAGKSTFLKILAGDIEPTTGHIALGPDERLSVLRQNHFDYEDERVIDVVIMGNETLYSIMKEKDAIYMKEDFSDEDGVRAAELEGEFAELGGWEAESEASQLLQNLNISEELHYQNMSELANGDKVKVLLAKALFGKPDVLLLDEPTNGLDIQSITWLEDFLIDFENTVIVVSHDRHFLNKVCTHMADLDFGKIKLFVGNYDFWKESSELAARLQADRNAKAEEKIKQLQEFVARFSANASKSKQATSRKKMLDKIELEEIVPSSRKYPFVNFKAEREMGNDLLTVENLSVTIDGEKILDNISFILRPGDKTALIGQNDIQTTALIRALMGDIEYEGTIKWGVTTSRSYLPKDNSRDFASGESILEWLRQFASKEEDDNTFLRGFLGRMLFSGDEVNKSVNVLSGGEKVRVMLSKLMLLKSNVLVLDDPTNHLDLESISSLNDGLKDFKESIIFASHDHEFIQTLANHIIVLSKNGVVDRIDETYDEFLENAEVQAKVAQLWK

SEQ ID NO: 12913 - protein, 2577 aa, Streptococcus agalactiae
ATGACAATTAACCACTATAAGCTTCGTATACCTTACTATACAATAAGCTTTCTACTCCCCTTCATAATCATAGTCTGCATCCTCTTTACTAAGAATATTTATTGGGGAAGTCCAACAACCATATTAGCAAGCGATGGCTTTCATCAATATGTTATCTTTAATCAAGCATTAAGAAATATTCTTCATGGTTCAAACAGCTTATTCTATACCTTTACAAGCGGTTTAGGTTTAAATTTTTATGCTCTGAGTAGTTACTATTTGGGAAGTTTTTTATCCCCAATAGTTTATTTCTTTAATCTAAAAAATATGCCTGATGCTATCTACCTTTTAACAATATGTAAAATAGGGTTGATAGGTTTGTCAATGTTTGTCACTCTTTGTAAACGTCATTGTAAAGTTAATCGTATCTTACTTTTAGTAATTTCTACTTGCTATAGCTTAATGAGTTTCTCAATTAGCCAAATTGAAATTAATATGTGGCTAGATGTATTTATTCTAATTCCCCTTGTTGTTTTAGGAGTTGATCAGCTACTATGGGAAAGAAAACCTATACTTTATTTCCTCTCTCTGACAGCCTTATTCATCCAAAACTATTATTTTGGTTTTATGACTGCCATCTTTACTAGCCTTTACTTCATCGTACAAATAACCCGTAATACTGATAGTACGGTTGCATTTAAACAATTTCTTCATTTTACCTTTTTATCTCTTTTAGCTGGTATGACTAGTAGCATTATGATTTTGCCAACTTATTTTGATTTAACTACTCATGGTGAAAAGTTGACAAAGGTATCGAAGATGTTTACAGAAAATTCTTGGTACATGGATTTGTTTGCTAAAAATATGATTGGAGCCTATGATACAACAAAATTTGGCTCTATTCCTATGATTTATGTAGGTTTACTTCCTTTACTCCTTTCTTTACTTTACTTTACAATAAAGGAAGTTCCTCGAAGGACTAGATTAGCATATGGATTTTTACTAATATTTGTTATTGCTAGTTTTTATATAACACCTCTAGATTTATTTTGGCAAGGGATGCATGCTCCAAATATGTTTCTCCATCGCTACTCTTGGGTACTTTCAGTACTTATCTGTCTGCTAGCTGCTGAATGCCTTGAGTATTTAGACAACATTTCTTGGAAAAAGATTTTAGGGGTCAATTTAATTTTAGTAAGTGGTTTCATAATCACGTTTTTATTTAAAAAGCATTATCATTACCTTAATCTTGAATTACTTCTTTTAACCTTAACTTTCCTCTCAGCTTATATTATTCTAACTATTAGTTTTGTCAGTAAGCAAATACCTAAACTAGTTTTTTATCCCTTTCTTATTGGTTTTGTTGTGTTAGAGATGACTTTAAACACTTTTTACCAACTAAATAGTCTTAACAATGAGTGGGTATTTCCATCTAGGCAAGGATATGCTAAATATAATCACAGCATTAGCAAACTTATCAGAAAGACTGAGAGAAATAGCTCTACATTCTTCCGTACAGAGCGCTGGTTAGGACAAACCGGCAACGACTCTATGAAATATAATTATAATGGTATTTCACAATTTTCATCTATTAGAAATCGTTCTTCCAGTCAAGTGCTTGATAGACTTGGCTTTAAATCAGATGGTACAAATTTAAATTTACGTTATCAAAATAATACTTTGATCGCAGATAGTCTATTTGGTGTAAAATATAACCTTACAGAATATCCTTTTGATAAATTTGGTTTTATCAGAAAAGCTCAAGATAAACAAACCATTCTTTACAAAAATCAGTTTGCCAGTCAATTAGCTATACTAACGAATCAAGTATATCAAGATAAACCATTTACTGTGAATACTTTGGATAATCAGACAACTCTTTTAAATCAATTAAGTGGTTTGAAAGAGACGTATTTTGATCATCTTATTCCAAATAGCGTTTCTGGGCAAACCACTCTTAATAAACAAGTATTTGTTAAAAAGAATAAACAAGGGAATACTGAAATTACCTATAACATAACTATCCCTAAAAACAGTCAGTTATATGTTAGTATGCCGTTTATAAATTTTAATAATGAGGAAAATAAAATTGTTCAAATCTCCGTTAATAATGGACCATTTGTACCTAATACTCTTGATAATGCTTATTCATTTTTTAATATTGGTTCCTTTGCTGAAAACAGTCGTATCAAAGTAAAATTTCAATTTCCACACAATGATCAAGTTTCTTTCCCAATTCCTCACTTTTATGGGCTCAAGTTAGAAGCTTATCAAAAAGCTATGACTGTTATTAATAAACGAAAAGTAAAAGTAAGAACTGATCATAATAAAGTTATTGCTAATTATACAAGTCCTAATAGAAGTTCTCTTTTCTTCACTATTCCCTATGATAGGGGTTGGAAAGCTTATCAAAATAATAAAGAAATAAAAATTTTCAAAGCTCAGAAAGGTTTTATGAAAATAAATATTCCTAAAGGAAAAGGCAAAGTAACATTAATTTTTATCCCTTACGGCTTTAAATTTGGGGTAGGCCTATCTATTACTGGAATAGTATTATTTACTGTCTATTATTTTAAATTTGGAAAAAATAAAATAGGA

SEQ ID NO: 12914 - protein, 859 aa, Streptococcus agalactiae
MTINHYKLRIPYYTISFLLPFIIIVCILFTKNIYWGSPTTILASDGFHQYVIFNQALRNILHGSNSLFYTFTSGLGLNFYALSSYYLGSFLSPIVYFFNLKNMPDAIYLLTICKIGLIGLSMFVTLCKRHCKVNRILLLVISTCYSLMSFSISQIEINMWLDVFILIPLVVLGVDQLLWERKPILYFLSLTALFIQNYYFGFMTAIFTSLYFIVQITRNTDSTVAFKQFLHFTFLSLLAGMTSSIMILPTYFDLTTHGEKLTKVSKMFTENSWYMDLFAKNMIGAYDTTKFGSIPMIYVGLLPLLLSLLYFTIKEVPRRTRLAYGFLLIFVIASFYITPLDLFWQGMHAPNMFLHRYSWVLSVLICLLAAECLEYLDNISWKKILGVNLILVSGFIITFLFKKHYHYLNLELLLLTLTFLSAYIILTISFVSKQIPKLVFYPFLIGFVVLEMTLNTFYQLNSLNNEWVFPSRQGYAKYNHSISKLIRKTERNSSTFFRTERWLGQTGNDSMKYNYNGISQFSSIRNRSSSQVLDRLGFKSDGTNLNLRYQNNTLIADSLFGVKYNLTEYPFDKFGFIRKAQDKQTILYKNQFASQLAILTNQVYQDKPFTVNTLDNQTTLLNQLSGLKETYFDHLIPNSVSGQTTLNKQVFVKKNKQGNTEITYNITIPKNSQLYVSMPFINFNNEENKIVQISVNNGPFVPNTLDNAYSFFNIGSFAENSRIKVKFQFPHNDQVSFPIPHFYGLKLEAYQKAMTVINKRKVKVRTDHNKVIANYTSPNRSSLFFTIPYDRGWKAYQNNKEIKIFKAQKGFMKINIPKGKGKVTLIFIPYGFKFGVGLSITGIVLFTVYYFKFGKNKIG

SEQ ID NO: 12915 - protein, 477 aa, Streptococcus agalactiae
ATGAAATTAAAAATAATTACAGTTGGAAAATTGAAAGAGAAATACCTTAAAGAAGGTGTTGCAGAGTATCAGAAACGTCTGAATCGCTTTTCTAAAATTGAGACAATTGAGCTAGCTGATGAAAAGACGCCTGATAAAGCTAGTATATCTGAAAATCAAAGAATTTTAGATATAGAAGGGGAACGTATTTTGAGTAAAATAGGTGAGAGGGATTATGTCATTGGTTTGGCTATAGAAGGGAAACAATTGCCATCTGAATCATTTAGCCATCTAATCGATCAAAAAATGATATCCGGCTACTCTACTATTACTTTTGTTATTGGTGGTAGTTTGGGCTTATCTCCAAAAGTGAAAAAACGTGCTGATTATTTAATGAGTTTTGGACTGCTAACATTACCTCATCAACTTATGAAATTAGTCTTGATGGAACAAATTTATCGTGCTTTTATGATTCGTCAAGGCACTCCTTACCACAAA

SEQ ID NO: 12916 - protein, 159 aa, Streptococcus agalactiae
MKLKIITVGKLKEKYLKEGVAEYQKRLNRFSKIETIELADEKTPDKASISENQRILDIEGERILSKIGERDYVIGLAIEGKQLPSESFSHLIDQKMISGYSTITFVIGGSLGLSPKVKKRADYLMSFGLLTLPHQLMKLVLMEQIYRAFMIRQGTPYHK

SEQ ID NO: 12917 - protein, 1227 aa, Streptococcus agalactiae
GTGAAAAAAAAATTAGTCTCATCACTTCTAAAGTGTTCTCTAATCATTATTGTTAGCTTTGCTGGTGGAGCATTTGCTAGTTTTGTCATGAATCATAATGACAATATTCCAAATGGTGGTGTCACTAAAACTAGTAAAGTAAATTATAATAACATAACGCCTACAACAAAAGCTGTTAAAAAGGTACAAAATAGTGTTGTTTCTGTTATCAATTATAAACAACAAGAGAGTCGTTCTGACCTATCAGACTTCTATAGTCATTTTTTTGGTAATCAGGGAGGCAACACTGATAAGGGCTTACAAGTTTACGGTGAAGGCTCTGGAGTCATCTATAAAAAAGATGGTAAAAATGCCTATGTTGTCACTAATAACCACGTCATTGATGGGGCTAAACAAATTGAAATTCAACTAGCCGATGGCTCAAAAGCAGTTGGGAAACTTGTTGGGTCAGATACCTACTCTGATTTAGCCGTCGTCAAAATTCCATCAGATAAAGTTTCAAATATTGCAGAATTTGCTGATTCATCAAAACTCAACATTGGTGAAACTGCTATAGCGATCGGAAGCCCTCTTGGAACTGAGTATGCAAATTCTGTAACTCAAGGTATTGTATCTAGTTTAAAAAGAACTGTAACAATGACTAATGAAGAAGGACAAACAGTTTCTACAAATGCTATCCAGACTGATGCTGCTATCAATCCTGGTAATTCAGGTGGAGCACTTATCAATATTGAAGGACAGGTTATTGGAATTAATTCTAGTAAAATTTCTTCTACATCAAATCAAACCTCAGGACAATCGTCAGGAAATAGCGTTGAAGGTATGGGATTTGCCATTCCTTCAAATGATGTTGTTAAGATTATCAATCAACTTGAGAGTAACGGACAAGTAGAGAGACCTGCTCTAGGTATTTCTATGGCTGGATTAAGTAATTTACCATCCGATGTTATTAGTAAACTGAAAATCCCAAGTAATGTTACTAATGGTATTGTAGTAGCATCTATCCAATCTGGCATGCCAGCTCAAGGCAAACTAAAGAAATACGATGTCATTACTAAAGTTGACGATAAAGAAGTAGCATCTCCAAGTGATTTACAAAGTTTACTCTATGGCCACCAGGTAGGAGATTCCATAACAGTAACCTTTTATCGTGGTGAAAATAAACAAACAGTCACTATAAAACTTACTAAAACTAGTAAAGATTTAGCTAAACAACGAGCAAATAAC

SEQ ID NO: 12918 - protein, 409 aa, Streptococcus agalactiae
MKKKLVSSLLKCSLIIIVSFAGGAFASFVMNHNDNIPNGGVTKTSKVNYNNITPTTKAVKKVQNSVVSVINYKQQESRSDLSDFYSHFFGNQGGNTDKGLQVYGEGSGVIYKKDGKNAYVVTNNHVIDGAKQIEIQLADGSKAVGKLVGSDTYSDLAVVKIPSDKVSNIAEFADSSKLNIGETAIAIGSPLGTEYANSVTQGIVSSLKRTVTMTNEEGQTVSTNAIQTDAAINPGNSGGALINIEGQVIGINSSKISSTSNQTSGQSSGNSVEGMGFAIPSNDVVKIINQLESNGQVERPALGISMAGLSNLPSDVISKLKIPSNVTNGIVVASIQSGMPAQGKLKKYDVITKVDDKEVASPSDLQSLLYGHQVGDSITVTFYRGENKQTVTIKLTKTSKDLAKQRANN

SEQ ID NO: 12919 - protein, 771 aa, Streptococcus agalactiae
ATGGAATATTTAGAAACGATCAACATCAATCATATTGCTCCAAATCCGTATCAACCTCGCCTAGAATTTAATACAAAAGAACTAGAAGAATTAGCCGACTCTATTAAAATTAATGGCCTTATTCAACCCATTATTGTAAGACCGTCAGCAGTCTTTGGTTACGAACTGGTAGCCGGAGAACGACGGCTAAGAGCCGCAAAGTTAGCTAAATTGGAAAGTATACCTGCAATTATAAAATCCTATAATAATGATGATAGTATGCAATTAGCTATTGTCGAAAATTTACAACGATCTAATTTGTCACCCATTGAAGAGGCTAAAGCCTACTCTCAACTTCTACAAAAGAAAAGTATGACACATGAAGAGTTAGCAAAATATATGGGAAAATCTCGTCCCTATATATCAAATACGATACGACTACTAAATTTACCGCCACTAATTACTTCAGCTATTGAAGAAGGAAAACTTTCCTCTGGTCATGCGCGTGCACTACTCAGTCTACCAGATGCTAGTCAACAGAAAGATTGGTATCAGAGAATCCTCACTGAAGATATTAGTGTAAGACGACTAGAGAAGTTATTAAAACAAGAAAAGAAAACAAATCATAAGTCACTTCAAAATAAAGATGTCTTTCTAAAACATCAAGAAAATGAGTTAGCTCAATTTCTTGGTAGCAAAGTGAAACTTACTATTAATAAAGATGGTGCTGGCAATATAAAGATTGCTTTCGCTAACCAAGAAGAATTAAACAGAATTATCAACACTCTAAAA

SEQ ID NO: 12920 - protein, 257 aa, Streptococcus agalactiae
MEYLETININHIAPNPYQPRLEFNTKELEELADSIKINGLIQPIIVRPSAVFGYELVAGERRLRAAKLAKLESIPAIIKSYNNDDSMQLAIVENLQRSNLSPIEEAKAYSQLLQKKSMTHEELAKYMGKSRPYISNTIRLLNLPPLITSAIEEGKLSSGHARALLSLPDASQQKDWYQRILTEDISVRRLEKLLKQEKKTNHKSLQNKDVFLKHQENELAQFLGSKVKLTINKDGAGNIKIAFANQEELNRIINTLK

SEQ ID NO: 12921 - protein, 1359 aa, Streptococcus agalactiae
ATGACGGAAAACGAACAACTATTTTGGAATAGAGTACTAGAGCTATCTCGTTCTCAAATAGCACCAGCAGCTTATGAATTTTTTGTTCTAGAGGCTAGACTCCTCAAAATTGAACATCAAACTGCAGTTATTACTTTAGATAACATTGAAATGAAAAAGCTATTCTGGGAACAAAATTTGGGGCCTGTTATCCTAACAGCTGGTTTTGAAATTTTCAATGCTGAAATTACAGCTAACTATGTCTCAAACGATTTACATTTACAAGAAACTAGTTTTTCTAACTACCAGCAATCTAGCAATGAAGTAAATACTTTACCAATTAGAAAAATCGACTCTAATCTTAAAGAGAAATATACTTTTGCTAATTTTGTTCAAGGAGATGAAAATAGATGGGCTGTTTCAGCATCAATTGCTGTAGCTGATAGTCCTGGCACGACTTATAATCCTCTATTTATCTGGGGGGGACCTGGTCTAGGAAAGACGCATCTACTAAATGCTATTGGAAATCAAGTCTTAAGAGATAATCCAAACGCGAGGGTTTTATACATCACTGCTGAGAATTTTATTAATGAATTCGTCAGTCATATTCGTTTAGATTCGATGGAAGAATTAAAAGAAAAGTTTCGCAACTTGGACTTACTCCTGATTGATGATATTCAGTCGCTTGCTAAGAAAACCTTAGGGGGGACCCAAGAGGAGTTCTTCAATACTTTCAATGCTTTACATACAAACGATAAACAAATCGTATTGACCAGTGACCGAAATCCAAATCAATTAAATGATCTAGAAGAACGTCTAGTCACGCGCTTTAGTTGGGGACTCCCAGTAAATATCACACCACCTGATTTTGAAACACGAGTTGCTATTTTAACCAATAAAATTCAAGAATATCCTTATGATTTTCCTCAAGATACCATTGAATACTTAGCAGGAGAATTTGATTCCAACGTACGTGAATTAGAAGGAGCCTTGAAAAATATTAGTCTAGTTGCTGACTTTAAGCATGCTAAAACTATTACAGTAGATATAGCTGCAGAAGCTATCAGAGCACGTAAAAATGACGGTCCTATTGTTACTGTCATTCCTATAGAAGAAATTCAAATACAGGTTGGTAAATTCTATGGCGTAACTGTAAAAGAGATAAAAGCAACTAAAAGAACACAAGATATTGTCCTTGCAAGACAGGTAGCCATGTACTTAGCTCGTGAGATGACAGATAACAGTCTCCCCAAAATAGGTAAAGAATTTGGGGGACGAGATCACTCAACTGTTCTCCACGCTTATAATAAAATAAAAAATATGGTTGCTCAAGATGACAACTTACGAATTGAGATAGAAACTATCAAAAATAAAATCAGG

SEQ ID NO: 12922 - protein, 453 aa, Streptococcus agalactiae; identical to SEQ ID NO: 14

SEQ ID NO: 12923 - protein, 1134 aa, Streptococcus agalactiae
ATGATTCATTTTTCAATAAATAAAAATTTCTTCTTGCATGCTCTAACGGTAACCAAACGAGCTATTAGTCATAAAAATGCGATTCCAATCCTTTCAACTGTTAAAATAGAAGTGACTAGAGATGCTATCATTTTAACGGGGTCAAATGGACAAATTTCAATTGAAAATACTATTCCTGCTTCAAATGAAAACGCAGGTTTACTAGTAACGAATCCAGGCTCTATTTTGTTAGAAGCTGGTTTCTTTATTAATATTATTTCAAGTTTACCAGATGTAACTTTAGAATTTACAGAGATTGAACAACATCAAATTGTTCTTACTAGTGGAAAATCAGAGATTACTTTGAAAGGTAAGGATGTCGATCAATACCCTCGTCTGCAGGAAATGACAACAGATACTCCATTAACATTAGAAACTAAACTGTTAAAATCAATTATTAATGAAACTGCTTTTGCTGCTAGCCAACAAGAAAGCCGTCCAATCTTAACAGGTGTTCATTTGGTTATCAGTCAAAATAAATACTTTAAGGCTGTTGCGACAGATTCACACCGTATGAGTCAACGCACTTTCCAATTAGAGAAATCGGCTAATAATTTTGATTTGGTTGTTCCAAGTAAATCCCTTCGAGAATTTTCGGCTGTTTTTACAGATGATATTGAAACTGTAGAGGTTTTCTTCTCAGATAGTCAAATGTTATTTAGAAGTGAAAATATCAGCTTCTATACACGTTTGCTTGAAGGAAACTACCCTGATACTGATCGCCTCCTAACTAATCAGTTTGAAACCGAAATTATCTTTAATACAAATGCTTTACGCCATGCTATGGAACGTGCTTATTTAATTTCGAATGCAACTCAGAACGGTACTGTTCGTTTAGAAATTCAAAATGAAACAGTCTCAGCTCATGTAAACTCTCCAGAAGTTGGTAAAGTTAATGAGGAATTGGATACTGTTAGCCTTAAAGGTGATAGTTTAAATATTAGTTTTAATCCAACTTACCTAATTGAATCTTTAAAAGCAGTAAAAAGCGAAACAGTTACGATTCGATTTATTTCTCCAGTACGTCCATTTACTTTGACACCTGGTGAAGATACTGAAGATTTCATACAATTAATAACTCCTGTTCGTACTAAC

SEQ ID NO: 12924 - protein, 378 aa, Streptococcus agalactiae; identical to SEQ ID NO: 16

SEQ ID NO: 12925 - protein, 333 aa, Streptococcus agalactiae
TTGGGTAGTTTTCTTATTCTAAGATATGCTATAATGATGAGTAATATGACTCTATATATAATAGCTAACCCCCATGCTGGTAATAAAAATGCCTCCACTATTGTTGGTCAAATTCAGGAGTTTTATCATACTGAAGATATTTCTGTGTTCTATACAGAACAGAAAGATGATGAAAAAAAACAAGTCATTAATATACTAAGGTCTTTTAAAGAAAGTGATCATCTAATGATTATAGGAGGAGATGGTACCTTATCAAAAGTAATGACTTATCTCCCCAACATATTCCGTGCGCTTATTATCCTGTTGGTTCGGGAAATGATTTTGCCAGAGCTT

SEQ ID NO: 12926 - protein, 111 aa, Streptococcus agalactiae
MGSFLILRYAIMMSNMTLYIIANPHAGNKNASTIVGQIQEFYHTEDISVFYTEQKDDEKKQVINILRSFKESDHLMIIGGDGTLSKVMTYLPNIFRALIILLVREMILPEL

SEQ ID NO: 12927 - protein, 591 aa, Streptococcus agalactiae
TTGAAAATTCCTAACCTCAAAGAAACCCTTACCGCTATTCAGACAGAAAGATTAAAGGAAATTAATTGCTTTATTTATGATAAAGGGCTGATTTTGAATAGTTTAGATTTAGGTTTTGCAGCCTATGTCGTTTGGAAAGCGTCTAACTCTAAAATAAAAAATATTTTGAATAGATATCGTCTAGGAAAAATAACTTACATTGTTATAGCTATCAAATCATTATTACATTCTTCTAAAGTACAAGTATTAGTGGAAGGAGAGACAGGACAGCGGATAAAACTAAATGACCTTTATTTTTTCGCATTAGCAAATAACACTTATTTTGGAGGTGGCATTACTATTTGGCCTAAAGCAAGTGCTTTAACTGCAGAGTTAGATATGGTTTACGCTAAAGGGCATACTTTTCTAAAACGATTAAGTATTTTATTATCTTTGGTTTTTAAAAGGCATACTACCTCTAAAAGTATAAAACACCAGACTTTCAAAGCTATGACCGTATATTTTCCTAAAAATAGTTTGATTGAAATAGATGGCGAAATAGTTGAGTTAGATCAGATTAGTTTAAAATGTCAAAAAAGGTATTTATATATG

SEQ ID NO: 12928 - protein, 197 aa, Streptococcus agalactiae
MKIPNLKETLTAIQTERLKEINCFIYDKGLILNSLDLGFAAYVVWKASNSKIKNILNRYRLGKITYIVIAIKSLLHSSKVQVLVEGETGQRIKLNDLYFFALANNTYFGGGITIWPKASALTAELDMVYAKGHTFLKRLSILLSLVFKRHTTSKSIKHQTFKAMTVYFPKNSLIEIDGEIVELDQISLKCQKRYLYM

SEQ ID NO: 12929 - protein, 477 aa, Streptococcus agalactiae
ATGTTGACTTTATTTGTGATACATTGTATAATTCTTCTTGTGAAGGTAAGTTTTATTTTTTTATTTAATTTGTATCTTTTTAAAAAGATACAAAAGAAAATTCTCTTATTCTTTATTATAACATACAAGGAGGTTTGTTCCATGCAACAAACAAAACAATTTTTAGATGCTTCAATTTCAATATTAGGGAATAAATTTATCGCAATTTCATATGAAGATAGCGTTAAATTTAACACCTCAGAAAAGGATGGAATAAAATTGATGGTTTCACTTCAAGATGAAAATTCACCAGTTTTTCTAGATTTGATTCAAGTTAAAGTGAGAAATACTAGTCCTAACTTATCAGTACATGAATTAGCAAATTTAAAAGGCAAGCAAGTCAATTTTAAAAATTTAAGAATAGGGATTTATAACAGTCAATTTACTTTTGCTGCTGAAGATGTCTCAATAATAAATAAATCTGCTAAAGGAAATGAA

SEQ ID NO: 12930 - protein, 159 aa, Streptococcus agalactiae
MLTLFVIHCIILLVKVSFIFLFNLYLFKKIQKKILLFFIITYKEVCSMQQTKQFLDASISILGNKFIAISYEDSVKFNTSEKDGIKLMVSLQDENSPVFLDLIQVKVRNTSPNLSVHELANLKGKQVNFKNLRIGIYNSQFTFAAEDVSIINKSAKGNE

SEQ ID NO: 12931 - protein, 381 aa, Streptococcus agalactiae
ATGGATACTCAAACGAAAATAAGATTAGGTAAAAAAATACATGACTTAAGAAAATTAAATAATTACTCAATGGAAGAGTTTGGAGAAAGAATTGGTGTTTCTAGGGGTGTTGTAAATAACTATGAGAAAGGCAGAGTTGCACCAAGGCCTAAAATCCAGAAAAAAATTCTATCATTGACTGATAAACCAGACCAAGATTTAACTGAGTTTATCTTTGGAACACCAAGAGAATACTTATTTGAAATATTTGAAGGAATAGATTCATTGAGTAATCCTTTTATTAGATCAGGTAGTAGTTATCCAGTTGGAACAGTTAGAGATTATCCAGAAGTTATTAATATACTTTCAAAAAATGTTAATAAGTGGAAAATTAATATATGG

SEQ ID NO: 12932 - protein, 127 aa, Streptococcus agalactiae
MDTQTKIRLGKKIHDLRKLNNYSMEEFGERIGVSRGVVNNYEKGRVAPRPKIQKKILSLTDKPDQDLTEFIFGTPREYLFEIFEGIDSLSNPFIRSGSSYPVGTVRDYPEVINILSKNVNKWKINIW

SEQ ID NO: 12933 - protein, 138 aa, Streptococcus agalactiae
ATGTTAATAAGTGGAAAATTAATATATGGTAATGATTCAGATATTATACGGAAAGCATATGAATTAGAGCCTAAGTTAGCTAATGATTGGAAATTTGCTGACTATATAAAAAATATAACAGAACCGTTTAAATTAAGA

SEQ ID NO: 12934 - protein, 47 aa, Streptococcus agalactiae
  VARIANT 34, 41: Xaa = Any Amino Acid
MLISGKLIYGNDSDIIRKAYELEPKLANDWKFAXLYKKYNXEPFKLR

SEQ ID NO: 12935 - protein, 219 aa, Streptococcus agalactiae
ATGGACGAATATAATCGCTCAATAAAAAAAGCTCAAGAAATGAATAGATTACTAATTCCAAAATATGGTAAAGAAAATGAAAAAATAGATTTATTAAAATATTTTTCAAAAGATGAGCTAAAAGATAAGTCTAGTTCAAAAAAAGAAGTTTTAGACATTATTGGATGATTTGTAATAAATTATTTTGGTTTATTAAATCTTTTGACAGTCAATTTGCTT

SEQ ID NO: 12936 - protein, 74 aa, Streptococcus agalactiae
  VARIANT 52, 55: Xaa = Any Amino Acid
MDEYNRSIKKAQEMNRLLIPKYGKENEKIDLLKYFSKDELKDKSSSKKEVLXHYXDDLVINYFGLLNLLTVNLL

SEQ ID NO: 12937 - protein, 288 aa, Streptococcus agalactiae
ATGGAAACGCAAATTCTGAATAGTTTACATTCTGTATTGAAACAATTTGGTAATAAATATTATACAGGAAGTTATTTAAATAAATCTAAAGTAATTGAGGATATTGACAAATATGATGAAGAATTAATTTTAGCAATGTTGAATGCGCCTTTAATTAAAAAGCATTACTTTAAAAAAATCGATGAATACACGATATTTGAAACCAATAAATTGATTGAGACATTCGAAATGAATGACTATTGGATGGATTCACTTACAAAATATACTAAGAGAATAGGATACNNNNNT

SEQ ID NO: 12938 - protein, 96 aa, Streptococcus agalactiae
  VARIANT 95, 96: Xaa = Any Amino Acid
METQILNSLHSVLKQFGNKYYTGSYLNKSKVIEDIDKYDEELILAMLNAPLIKKHYFKKIDEYTIFETNKLIETFEMNDYWMDSLTKYTKRIGYXX

SEQ ID NO: 12939 - protein, 84 aa, Streptococcus agalactiae
TTGACGGAAGAGAGCTAGAGAAAAAAACTTCAGCATTTCAGCTGAATACAAAATATTGAAGAATGTCGTCAGGGGAAANNNNNT

SEQ ID NO: 12940 - protein, 30 aa, Streptococcus agalactiae
  VARIANT 12, 29, 30: Xaa = Any Amino Acid
MTEEELEKKNFXAISAESQNIEECRQGKXX

SEQ ID NO: 12941 - protein, 89 aa, Streptococcus agalactiae
ATGGTTACAGCAGAAAAAAATAGAGCTGTCACATTCCAAGCTAACAAAGAATTGGTAAGCGAAGCAATGACAGTATTAAACAGAAAATT

SEQ ID NO: 12942 - protein, 30 aa, Streptococcus agalactiae
MVTAEKNRAVTFQANKELVSEAMTVLNKKI

SEQ ID NO: 12943 - protein, 1218 aa, Streptococcus agalactiae
ATGACAATTACAAAAACCAAGAATGGCACTTATCGCCTGAGAGTATATATACCAGAAGAAGCAAAAAAATCACTCGGTATTGATAAAAAATTAATAGAAAAAAGGTTTAAATTAAGAAGTGATGCAAAGAAATATGAATTAGAACTTCAAAATAAAATTGATAATGTACTCAATGGTTCGTTTCAAAATATTCATGATACTGGTGATATATTATTCTCAGAATTCTACAAAAATATTTGGTGGAATTCTTATAAATCTGGTCAAACCACTACTACAAATAAACCACCATCAAAAGTTACAATAGATAATACTGAAATTGTTTTTAGACTTCATATTTTGCCATTGTTGGGTAATTATTCAATAAACTTTTTGAATCAGAACAAACAAGTAGTACTTAATCTATTAACTAAAAAAGCAGAAGAATATGCGAATTTCAAAGTAATAAGAAGTTATGTCAATTCAATATTTGACTGGGCTGAAGAACTTGAATATATTGAAGCAAATCGAGTTTCAAAGACAATTAAGAGAATAAAGGCTACTAAAAAAATAATGTTACAAGAATCAAAAGAAGATTCAGACTTATTTTTATCTCAAAAAGAACTATTAGAATGGTTTAAAGCGTTTGAAGAAGATCTTTTAAATAATAAAATTCTTTTTAAGGATTATGTTTTATTTTATACAACCTTTTTCCTTGGAGATAGGAAATCGGAAACTTATGCTTTACAGTGGAAACATATCGACTTTAATAGTCGTCAAATTCAACTAGTACAAGCCCTAGATAAATACAAAAACAAAAAAGCTACAAAAGGAAATAAAAAAACCACCTTTAATATCCCTCTTGAATTACAGGAACTACTTATTTCTTGGAAAAATCAACAAAAATTGGAACTCAGTAAACTTGGAATTAGTCAAACAAATGATCAATATGTTTTTACTTATATAGATACCAAAGGAAACTTAAATAGTCCTCTTCATACTGATTACTTAAATAATAAGATGAAATCAGTTAATAGAAGACATCCTGAGCTAAAGCATGCTACTCCACACAAATTAAGGCATACTGGAGCAACACTTGCTAAACAAGCTGGAACATCCTTGGAGGACATTTCTCAAGCTTTAACGCATAGTGATACCTTAATTACTAAAACATATGTTAATACATCAAACATAGTTCCTATGACTGTTGGTGAAATAGCCTTTAGAAATTTAAAAAACGAA

SEQ ID NO: 12944 - protein, 406 aa, Streptococcus agalactiae
MTITKTKNGTYRLRVYIPEEAKKSLGIDKKLIEKRFKLRSDAKKYELELQNKIDNVLNGSFQNIHDTGDILFSEFYKNIWWNSYKSGQTTTTNKPPSKVTIDNTEIVFRLHILPLLGNYSINFLNQNKQVVLNLLTKKAEEYANFKVIRSYVNSIFDWAEELEYIEANRVSKTIKRIKATKKIMLQESKEDSDLFLSQKELLEWFKAFEEDLLNNKILFKDYVLFYTTFFLGDRKSETYALQWKHIDFNSRQIQLVQALDKYKNKKATKGNKKTTFNIPLELQELLISWKNQQKLELSKLGISQTNDQYVFTYIDTKGNLNSPLHTDYLNNKMKSVNRRHPELKHATPHKLRHTGATLAKQAGTSLEDISQALTHSDTLITKTYVNTSNIVPMTVGEIAFRNLKNE

SEQ ID NO: 12945 - protein, 273 aa, Streptococcus agalactiae
TTGAAAGGACATACTATGCAAGTTATTTTACCTGATGAACAAGTTAAAGAAATTCAATTATTAGTTTCAAATGTTATCAAGTCAGAAATACAACAATTTAAAACTGATATTGGTCTTGAAAAACCATATTTGAATAAACTCCAAACTTGTCAGTATTTAGGTATTTCAAATAATACTCTAGACTCATGGATTAAGTTGGGTTTACCTGTAATTAAAATAGGAAAAACAATTAGATTTGATAAAAATGCAATAAATAGTTGGCTACAAAGCCAC

SEQ ID NO: 12946 - protein, 91 aa, Streptococcus agalactiae
MKGHTMQVILPDEQVKEIQLLVSNVIKSEIQQFKTDIGLEKPYLNKLQTCQYLGISNNTLDSWIKLGLPVIKIGKTIRFDKNAINSWLQSH

SEQ ID NO: 12947 - protein, 744 aa, Streptococcus agalactiae
ATGTTATACAATAAAAAGATTGTACAAACTCCTTCTTATCTCGAAATATGGGAATATGGAACTCCAATAAAAATAGGATTTACAAAGAAAAAGACTTCAAGTAAAACAAATAAAAAAATTGATGATATTGATAAGTTAAAACGATTAGTTAAATCACGAAAAAATGCAAAACATGAGTTGATGAGATTAATAGACACAAATTTTGACGAACGATTAACGAAATTTATTACAATAACGACTAAAGAAAATATTCAGGATCGAAAAATTTTTAACCAAGAATTTGATAAATTTATGAAACGATTAAACTATAATGTTTTTCACTCCAAGAAAAAAATGATTAAGTATGTTGCAGTTTTGGAAAAACAAAAACGGGGTGCTTATCATGCTCATATTTTAGTTTTCAATCTCCCATTCATAAAGTTTGAAAAACTTCGAGAATTATGGAAACTTGGAAGTATTAGAATTAATAAAGTGAATGTTGACTCTATAGATAATAGGGGAAGATATATCACAAAATATATGGAAAAAGGTATAGGGCAAGAACTAATTGAAAATAAAGGGAAAAAATCATATTATTCTTCTAATAATCTGAAACAACCATTTATGACAAAACTATTAGATGATGATTCTATTGATGACCTTGTATCTGACAAGTTTATTGTAAATCAATCCGAATACATCTCAAAAAAATATAAGGATGGTGAATGGATTGAAAATAAAGTTAAATACCGGAAAGTTAAAATT

SEQ ID NO: 12948 - protein, 248 aa, Streptococcus agalactiae
MLYNKKIVQTPSYLEIWEYGTPIKIGFTKKKTSSKTNKKIDDIDKLKRLVKSRKNAKHELMRLIDTNFDERLTKFITITTKENIQDRKIFNQEFDKFMKRLNYNVFHSKKKMIKYVAVLEKQKRGAYHAHILVFNLPFIKFEKLRELWKLGSIRINKVNVDSIDNRGRYITKYMEKGIGQELIENKGKKSYYSSNNLKQPFMTKLLDDDSIDDLVSDKFIVNQSEYISKKYKDGEWIENKVKYRKVKI

SEQ ID NO: 12949 - protein, 789 aa, Streptococcus agalactiae
ATGTTAGTGAAAAATGGTGAACCTTTTATACAATTAGATAAAGAAAAAAAATGGTTTTGGCATCTGGATCCTATGGGACAAGTAAGTGGACCTCGCTCAAGTGGAAAAACATTTTTTCTATACTATTTAATGTTGAGTGTTGCAGAAATAGGAGCAGATATTTATATCCTTGATCCAAAACGTAGTGATTTTTCCTCTCTCAAATATTGCTATCCTGAATCAGAAAGAGAATCACACGTTGCAACAACGCCAAATTCTATATGCAAAGTTTTAAGAGAATTAACTGAATTAATGAATGATAGATATGAAAAATACTTTCAAATTTCTTCAAGCACCCTTGGCTTTGATGCACAAAAATTAGGTTTACGTCCAATTTTTATTTTTTTTGATGAGGTACTATCCCTAATCGAAGAAGATAAAAAATTAGGAAAAGAGGCAGAACAATACCTCAAACAAATTATTTTAAAGGGTAGACAATCTGGTATTTACATTATCATTTCTTCACAAAGGCTGAGTGCTGACGTTTTAAATACAGTAATCCGAGAAAATTGTGGACTAAGAGTCATATTTGGAAAAGTTCAAGAAGAATCCTATAGAATGGCTCTAGGAGAATCTTTTAAAAAATTACCTAGAGCTGAAAAAGGTGTTGGAAAAGGATATATTTATCTAGACGGTCAGGGATGGCAAACGCCTAAAGCATTTATTGCACCATATATGGATAGTTCGAAGATGGATATTAAACAAATTTTTAAAAATCTATTGAATAATCCTCCTAAGGTTTATAAAGAA

SEQ ID NO: 12950 - protein, 263 aa, Streptococcus agalactiae
MLVKNGEPFIQLDKEKKWFWHLDPMGQVSGPRSSGKTFFLYYLMLSVAEIGADIYILDPKRSDFSSLKYCYPESERESHVATTPNSICKVLRELTELMNDRYEKYFQISSSTLGFDAQKLGLRPIFIFFDEVLSLIEEDKKLGKEAEQYLKQIILKGRQSGIYIIISSQRLSADVLNTVIRENCGLRVIFGKVQEESYRMALGESFKKLPRAEKGVGKGYIYLDGQGWQTPKAFIAPYMDSSKMDIKQIFKNLLNNPPKVYKE

SEQ ID NO: 12951 - protein, 297 aa, Streptococcus agalactiae
TTGAAATCGAAATTAAAACAAATAATATTTAATAATAACTTTTATTCAAAAAATGAGCATGTAAGAGAGATATCAAAATCTTCGTATTTTCTTTTTTATAAAAAGAATAGTAAATTATTTTTAGAGTTCCATCCAAATGGTTTAAGTGTTGCTAATAAAATGAATGAACTTCAACCAATTTTAGAAACTGCATTAAACTTATACGTTGAAGAAGTAGACGATAGTAAGCCTAATTTTACATTATATGTTCTTTCTAAAAACAATGGGGGAAATAGAATCGATGTTAGTGAAAAATGG

SEQ ID NO: 12952 - protein, 99 aa, Streptococcus agalactiae
MKSKLKQIIFNNNFYSKNEHVREISKSSYFLFYKKNSKLFLEFHPNGLSVANKMNELQPILETALNLYVEEVDDSKPNFTLYVLSKNNGGNRIDVSEKW

SEQ ID NO: 12953 - protein, 915 aa, Streptococcus agalactiae
ATGACCTATCACTACGAACCGAGTCCCTTTATGCTTCCGACTTCTCGTTACGACAAGGCAAAGGCAGATAGAGCAGTGACCTTTATTAATAACCTATCTCATACCAAGGGGAAGTGGGCTGGGAAGAAATTTGATTTGTTGCCGTGGCAGGAACAGATAGTTCGTGACCTCTTTGGGATTGTTAAGGAAGATGGCAATCGTCAATTTCTGACAGCCTATATCGAGATTCCAAAGAAAAACGGAAAGTCTGAACTGGCCGCTGCTATTGCTCTTTACCTTCTTTATGCAGATAATGAAGCCAGTGCGGAAGTTTATGGTGCAGCATGCGACCGTAATCAAGCCTCGATTGTTTTTGATGTCGCAAAACAGATGGTTCAGATGAGTCGTCCGCTAGAGAAACGTTCCAAGATTATGGCAGCAACCAAGCGGATAGTGAATTATTCCAATGCTGGATTTTACCAAGTCCTCTCAGCTGAGACAGGAACCAAACACGGACTCAACGTGTCAGGTCTTGTCTTTGATGAAATCCATGCCCAACCCAATCGCCATCTCTATGATGTTTTAACCAAGGGTTCTGGTGATGCCAGGGAACAACCCCTCTTTTTCATCATCACAACAGCTGGAACGGTTAAAAACTCCATCTGTTATGAACTCCACACCAAGGCACTTGACATTCTTAAAGGTCGAAAGAAGGACACGTCCTTTTATCCAGTGGTTTATGGATTGTCTGATGAAGATGATTGGAATGACGAAGCCAACTGGCTAAAAGCCAATCCCTCACTTGGTCATACCATTGGGATTGACCGTGTTCGTGAAGCCTACCAACAGGCTCTTGATAACCCAGCTGAAGAGAATGTCTTTAAGCAACTCCGTCTCAACATGTGGACGAGTTCCCATGTGGNNNNNTTAATTAAT

SEQ ID NO: 12954 - protein, 305 aa, Streptococcus agalactiae
  VARIANT 301, 302: Xaa = Any Amino Acid
MTYHYEPSPFMLPTSRYDKAKADRAVTFINNLSHTKGKWAGKKFDLLPWQEQIVRDLFGIVKEDGNRQFLTAYIEIPKKNGKSELAAAIALYLLYADNEASAEVYGAACDRNQASIVFDVAKQMVQMSRPLEKRSKIMAATKRIVNYSNAGFYQVLSAETGTKHGLNVSGLVFDEIHAQPNRHLYDVLTKGSGDAREQPLFFIITTAGTVKNSICYELHTKALDILKGRKKDTSFYPVVYGLSDEDDWNDEANWLKANPSLGHTIGIDRVREAYQQALDNPAEENVFKQLRLNMWTSSHVXXLIN

SEQ ID NO: 12955 - protein, 471 aa, Streptococcus agalactiae
GTGGCAGTTAGAGGGCGAAAACCAAAGCCTACAAATTTGAAAATACTTGAAGGAAACCCTGGGAAACGACCTCTACCTACTAACGAGGTTAAACCCAAACAGAAAGCCCCACGTTGCCCACAGTGGCTCGAAGACGATGCCAAGAAGGAATGGAAGCGGATGGGCAAAATCCTCGAACAGATAGGGATATTAACGGAGATGGATATGACAGCCTTCGCAGGCTATTGCCAAGCCTATGCCCGTTGGAAGGAAGCCGAAGAGTTTCTCTCTAAACATGGGTCTATCATCAAGACTCCAAATGGTTATCTCCAACAAGTGCCACAGGTATCTATCAGCCAGACCAATCTGAAAATCATGCTTAAGTTCTGTGAGCAGTTTGGTCTGACACCATCAGCTCGTAATCGCTTGGCGACCATGGACGCAGAGGTTGGCACTGGTGATGAGATGGAGGATTTATTAGGAGGTGTTTTA

SEQ ID NO: 12956 - protein, 157 aa, Streptococcus agalactiae
MAVRGRKPKPTNLKILEGNPGKRPLPTNEVKPKQKAPRCPQWLEDDAKKEWKRMGKILEQIGILTEMDMTAFAGYCQAYARWKEAEEFLSKHGSIIKTPNGYLQQVPQVSISQTNLKIMLKFCEQFGLTPSARNRLATMDAEVGTGDEMEDLLGGVL

SEQ ID NO: 12957 - protein, 447 aa, Streptococcus agalactiae
ATGGATGATAAAACCCTTGAACGGTTAAGAAAAACATACCCAACTGGTACTCGAGTTCGTTTAGTGCATATGGACGCCCCTTACAGTGTTCCAATAGGTATGCTAGGAACAGTAGAAGATGTGGATGATATTGGATCGCTAATCGTTTCTTGGGACAATGGGCAGAGCTTAAACGTGTTGCATGGTATTGATAGGGTGGTTATTGTAGAACCAAATAGGCATGATTTTATAAGAAGTATTTATTGCTATTTAAGAGCTGGGCACAATGAATTTGTTTTTGATAGTGGTGATATTCCTGTACAGTTAACCCACGAAGAAGTCATCACTCTTATGACTAGTACGCATCCGCAAACTGAAATTGATATCTACATTGATGAATGTAATCATTTTAATCTTAAGCCGACAACTGTCTTGACGAAAGAAGAAATAGAAAAGGCAATACAAGAA

SEQ ID NO: 12958 - protein, 149 aa, Streptococcus agalactiae
MDDKTLERLRKTYPTGTRVRLVHMDAPYSVPIGMLGTVEDVDDIGSLIVSWDNGQSLNVLHGIDRVVIVEPNRHDFIRSIYCYLRAGHNEFVFDSGDIPVQLTHEEVITLMTSTHPQTEIDIYIDECNHFNLKPTTVLTKEEIEKAIQE

SEQ ID NO: 12959 - protein, 1182 aa, Streptococcus agalactiae
ATGACCTGTCTTGGCTACTGTGAAAAGGACAAGTTTGCACGAAAGTCCTACGAAGCAATGTATGATACAGAAGGAGAATGGTTTCATGACGACATCACAAGCATTGACCCCACACGACTTCCAAAAGCAGATTTATGGACTGCGGGAAGCCCTTGTCAAAATGTGTCTATCGCAGGAAAGCGAGCAGGCTTATACGGTGAGCGAAGTGGACTCTTTTTTACATTTGTTGACCTCCTCCAGAGCCAAAAAGAAGAAGATAAACCCGAGTGGGTACTCCTTGAAAATGTTAAGGGACTTCTATCAAGTGGCGGAGGACGAGATTATCTCGACTATCTCTCTATCCTGGACCAAGCAGGGTATGACCTCGAATGGCAAGTGTTCAACTCAAAAGATTACGGAGTTCCCCAAAACCGAGAACGCATCTATACTCTCGGACATCTTAGAAGCCGGGGTCGACGACAAGTATTACCTCTCAGCGGAGAAAGCGGTAGCCATCTTAAGCAACTTATAGGTGGTATGCAGAGCTACCGAGTCTACGACCCTAGTGGCATTGCCACAACCCTTGTTGGTGAGGGTGGAGGACTGGGAGCTAAGACAGGTCTTTATCTGATTGACCAGTCTTTGACTGAATCAAAGCTAACTGATGAAGCACGGTGTATCACCGCTCGCTACACGGCAGGTGCTACAAAGAGAACTGCCATGAACTCTGGTGTCCTTGAAGTCCAACCCATTCTAACACCAGACAGGGTAATAAAACGGCAAAATGGCAGACGGCTTAAGGAACAGGATGAGCCGATGTTTACTCTTACCTCTCAAGACCGACATGGTGTTCTTGAGGGTATCAAGGTCAGAAATGGCACAAAGCAGGGCTACCAAGTGGCAGAACTTGGAGATTCAGTTGATCTTTCCTATCCAGGCTCACAAACGAGACGAGCTAAGGTTGGGAAAGGCATCGCCCACAATCTATCTTGTGGTGGACGGATGGGAGCTGTGGTTTGGAATGGTCGAGTCGTAAAAATCAGACGCTTGACTCCACGAGAGTGCTTCAGGCTCCAAGGCTTTTCAGATGACTTATTTGACAAAGCTCAGGCTGTCAACTCTGATGCCCAGCTCTACAAACAAGCTGGTAATGGCGTGACGGTAACGGTGGTTTATACTATTGGGAAGGCCATTTTATCTGCT

SEQ ID NO: 12960 - protein, 394 aa, Streptococcus agalactiae
MTCLGYCEKDKFARKSYEAMYDTEGEWFHDDITSIDPTRLPKADLWTAGSPCQNVSIAGKRAGLYGERSGLFFTFVDLLQSQKEEDKPEWVLLENVKGLLSSGGGRDYLDYLSILDQAGYDLEWQVFNSKDYGVPQNRERIYTLGHLRSRGRRQVLPLSGESGSHLKQLIGGMQSYRVYDPSGIATTLVGEGGGLGAKTGLYLIDQSLTESKLTDEARCITARYTAGATKRTAMNSGVLEVQPILTPDRVIKRQNGRRLKEQDEPMFTLTSQDRHGVLEGIKVRNGTKQGYQVAELGDSVDLSYPGSQTRRAKVGKGIAHNLSCGGRMGAVVWNGRVVKIRRLTPRECFRLQGFSDDLFDKAQAVNSDAQLYKQAGNGVTVTVVYTIGKAILSA

SEQ ID NO: 12961 - protein, 1254 aa, Streptococcus agalactiae
ATGACAACTCAACCCAATATGGAAATTAAGGAACTCCCCCTAAGTGACTTAAAGCCGGCCTCTTATAACCCTCGAAAGAAATTGAAGAAGGGCGATAAGGAGTACGAAAAGATTAAACAGAGTCTACTCAAGTTTGGCTACGTTGACCCCATCATTGTCAATGACGATTTGACGGTCATCGGTGGTCACCAACGCCTAACGGTTCTTAAAGACCTCAAGTATGAAACCGCAAAATGCGTCATTGTCTCTCTTTCCAAGGAAGATGAAAAGGCACTGAATATTGCCCTTAATAAAATCACTGGTCAATGGGATGACCAGCTCCTCGCTGACTTGCTTTTGGACTTGCAAGAGTCTGATTTCAACCTTGATTTGACTGGGTTTGAGCCACCAGAGATTGATGACATTCTGTCCAACATCCATGACAAGGACTTGTCTGAAGACGATTTCGATGTGGATGAGGAGTTGAAGAAACCAACGGTCGCAAGACGTGGTGACATCTGGCAACTCGGAAAACACCGAGTGATTTGTGGTGACTCCACCAAATCAGAAAACTACGAGCAATTGCTGGGGGATAAGAAAGCCAATCTTATTGTGACGGATCCGCCTTATAACGTGGACGTTGAAGAGACCGCTGGAAAAATCCTCAATGACAATATGTCGGACAGGGACTTCTACCAGTTCCTTTTTGATATGTTCACTCAAGTGGAAAGTCATATGGAAGCCGATGCGTCTATCTATGTTTTCCATGCAAACACGGAAGGTCTGAATTTCCGGAAGGCTTTTAAGGACGCTGGTTTCTATTTAAGTGGGAGTTGCATTTGGAAGAAGAACTCACTGGTTCTCGGACGTAGTCCTTACCAATGGCAACACGAACCCTGTCTCTTTGGTTGGAAACAAAAGGGAAAACACCAGTGGTTCAGCGACCGTAAGCAGACAACTATCTGGGAATACGACCGTCCTAAGTCTAGTAAAGACCACCCAACCATGAAGCCTATTCAGCTTATGGCTTATCCTATTCAAAACTCATCCATGCGAGGAACGCTTGTTTTTGATCCATTTCTTGGTTCAGGGTCAACCCTCATGGCAGCAGACCAGACTGGTCGAGTTTGTTATGGGATTGAGCTTGATGAAAAGTTTGTGGATGTCATTGTCAAACGCTACATGGAGTCAACTAGTAATAGAGATGTGTCGGTACTCCGAAACGGTGAGACTTTGAGCTATGACCAAGCCTTAGAAGTAATGGAGGAACACTCA

SEQ ID NO: 12962 - protein, 418 aa, Streptococcus agalactiae
MTTQPNMEIKELPLSDLKPASYNPRKKLKKGDKEYEKIKQSLLKFGYVDPIIVNDDLTVIGGHQRLTVLKDLKYETAKCVIVSLSKEDEKALNIALNKITGQWDDQLLADLLLDLQESDFNLDLTGFEPPEIDDILSNIHDKDLSEDDFDVDEELKKPTVARRGDIWQLGKHRVICGDSTKSENYEQLLGDKKANLIVTDPPYNVDVEETAGKILNDNMSDRDFYQFLFDMFTQVESHMEADASIYVFHANTEGLNFRKAFKDAGFYLSGSCIWKKNSLVLGRSPYQWQHEPCLFGWKQKGKHQWFSDRKQTTIWEYDRPKSSKDHPTMKPIQLMAYPIQNSSMRGTLVFDPFLGSGSTLMAADQTGRVCYGIELDEKFVDVIVKRYMESTSNRDVSVLRNGETLSYDQALEVMEEHS

SEQ ID NO: 12963 - protein, 1035 aa, Streptococcus agalactiae
ATGATTTTTACCAGTGAACAAGTTTCAAGTGGACACCCCGACAAGCTCTGTGACCAAATCTCAGATGCTATTGTGACGAAATGTCTCAAGCATGATAAGAACAGCCGTGTGGCGGTTGAAACCTTAATCAAAGATAACCAAGTGGTTGTGGCAGGTGAAGTCTCAACCAAGCACTTATTTAACCTTGAAGGTATTGTCAAAAAGGTTCTTGAACCTTACGGTATGACAGATGTCATGGTGACGAACCTTCTTGGAGTTCAAAGCCCAGACATCGCTCAAGGTGTGGATAAGGGTGGTGCAGGTGACCAAGGGATTATGTTTGGTTATGCGACCGATGAAACACCTGAGTTCTTACCATTACCTTATGTACTTGCGACTCGAGTGCTTGAGAAACTGATGAACCTTGGTCATCCTGCCTTGGGCAAAGATGCCAAAGCTCAAGTCACATACGACTATGAAAACAAGTGTATCGAGACTTTCCTAGTGTCTATCCAACACGACGAGGAGGTTGACCTTGCCTCAGTCAAACGAATTGTCACCCAAGCTATGATGTCGGTTGCTCAACGCTACCGTCAGAACCTTGACTTCAGGGTTTTGGTTAACCCAACTGGTCGCTTTGTTCTTGGTGGCTCTTACGCTGATGCTGGTGTGACTGGTCGTAAGATTGTAGCAGATACCTACGGTGGCTTTGCCTGTCACGGTGGTGGAGCTTTCTCTGGGAAAGATCCAAGCAAGGTCGACCGTTCAGCCGCCTACATGGCACGGAAGATTGCAAAGGACTTTGTTCGTGAAGGGTATGCCAAACGCTGTGAAGTCCAGTTAGCTTATGCCATTGGGGTTGCGGAGCCTGTAGGTGTTTATGTGAACATCTTTGGGACAAGTGATTATCCTCTTGAACAACTAGTAGGAGTGGTTCGTGAACGCTATGATCTTACCCCACAAGGAATTATCAAGGAGCTGAATCTCTTGGATGTGGACTACACCAAGACCACTTGCCTTGGGCATTTCACCAAGCCTTATCTTCCTTGGGAGCAG

SEQ ID NO: 12964 - protein, 345 aa, Streptococcus agalactiae
MIFTSEQVSSGHPDKLCDQISDAIVTKCLKHDKNSRVAVETLIKDNQVVVAGEVSTKHLFNLEGIVKKVLEPYGMTDVMVTNLLGVQSPDIAQGVDKGGAGDQGIMFGYATDETPEFLPLPYVLATRVLEKLMNLGHPALGKDAKAQVTYDYENKCIETFLVSIQHDEEVDLASVKRIVTQAMMSVAQRYRQNLDFRVLVNPTGRFVLGGSYADAGVTGRKIVADTYGGFACHGGGAFSGKDPSKVDRSAAYMARKIAKDFVREGYAKRCEVQLAYAIGVAEPVGVYVNIFGTSDYPLEQLVGVVRERYDLTPQGIIKELNLLDVDYTKTTCLGHFTKPYLPWEQ

SEQ ID NO: 12965 - protein, 192 aa, Streptococcus agalactiae
ATGAAAACGAAATTGACAAAACGCCAACAAGAAAAACTCAACGCTCTTTTAACAGCGATTGCTCAAGAAGAACTTTTGGTTGAAACCTTGGAAACACGAAAAAGTGATAACCTAGATTTCTACGATGTTTCGGTTTGGGGAGTTAAAAGAGCACTCGAGAGAGCCTACGAAGCAGGCCAACAATCAGTAAAA

SEQ ID NO: 12966 - protein, 64 aa, Streptococcus agalactiae
MKTKLTKRQQEKLNALLTAIAQEELLVETLETRKSDNLDFYDVSVWGVKRALERAYEAGQQSVK

SEQ ID NO: 12967 - protein, 507 aa, Streptococcus agalactiae
ATGGATAGAATTGAGTATTTGATGAAAAACTATAGCGATGTGAAGTTGAAGCTTGCATTGGTGGAAAATCAACTTCTAAACTTTCGTCCCATTAGCGAGGAGAGTGTGATTCAGTCATTGGTTTATGAAAAACCAGATATGGAGAGGGTAAAGACTTCTCAGATCAATTCACGTTCAGAGACTATTGCTCTCAGTTTCAGAGAAAAATTGGAAAAAGAAAACAAGGAATATTGGGATAGTTTGATGGAGTGCTATCATTTTCTAAAGACTGAACTCGAGTTCTTTGAAAGTATGGTCAACCTTATACCAGATGACTTGAAGCAGTTTTCGAAGGACTTGATTTTCAATGAGATGAGCTGGGACGATATATCTAGCCACTATGAGATTAGTCGTTCCACAATTTCTTACCGTAAACGTAAGGTGCATCAGCAACTAAAGAAATGTTATGGTTGGATGAGTAGGAGTATTGATCTTGATGAATCAGCGTTTCAAATTCCTCTTTCGAAC

SEQ ID NO: 12968 - protein, 169 aa, Streptococcus agalactiae
MDRIEYLMKNYSDVKLKLALVENQLLNFRPISEESVIQSLVYEKPDMERVKTSQINSRSETIALSFREKLEKENKEYWDSLMECYHFLKTELEFFESMVNLIPDDLKQFSKDLIFNEMSWDDISSHYEISRSTISYRKRKVHQQLKKCYGWMSRSIDLDESAFQIPLSN

SEQ ID NO: 12969 - protein, 1374 aa, Streptococcus agalactiae
ATGAAATTGAGTTTACATGATTATCAAGAAGTCACCAAGGACTTTATCATAAGGACACCTTATGCGGCAGTCATCCTAGACATGGGGATGGGAAAGACTGCCACAACCTTATCAGCCATCAACGAGCTGATGTTTGACCGTTACGAGGTCTCAAAGGTCTTGGTGATTGCGCCCCTTCGTGTCGCAAACACGGTGTGGAGTGATGAGATTGAGCAGTGGGAGGAACTAAGACACCTCCGTTATGCCAAGATTGTGGGAACACCAAAACAAAGGCGAGCTGCCCTTGAGCAAGATGCGGATATCTACATCGTCAACCGTGAAAACCTCCCCTGGCTGGTGGAACAATGTAGTCCCTATTTCAAGTGGGATATGGTAGTTATTGATGAGCTATCGTCCTTCAAGTCTTGGCAGTCCAAACGTTTCAAGGCATTCATGGTCATGCGTCCCTACATGAAGCGTGTCGTGGGATTGACTGGCACACCGAGTTCAAATGGGCTTATGGACTTGTTCGCAGAGTTCAAGGTCATTGATGGTGGCGAGCGTCTGGGGCGATTCATCGGAGAGTATCGTAGTCGCTACTTCCGTGAGGGAGCTCGCAATGGTCAGGTGGTTTATAACTACCTCCCTATGGATTATGCGGAGTGCCAAATCTATGACAAGATTGACGACATCACCATTTCCATGAAAGCTATGGATTATCTTGAGATGCCAGAACTGATTTCGACCAAGAAGGTGGTTCATCTCACTGACAAAGAAAAATCTGATTATAAGCAGTTCAAGAAAGATTACGTACTTGCAGACCTTGAGAATGGCGAGGTGACTGCTGCCAATGCGGCAAGCCTTTCAAACAAGTTGCTACAAATGGCAAATGGTGCGGTTTACTCAAACGACCATCAAGTGGTGAGCCTACATGACCAAAAACTGGATGCTCTGGAAGATATCATCGAAGCTGCCAATGGTGAGCCAGTTCTTGTGGCCTATTGGTTCAAACATGATGTTCAGCGTATTGAGGAACGTTTGGTAAAGCTCAAGGTTAAGGGCACAATCCTTAAAACTGAGGAGGATATTCGTGAGTGGAATAAAGGGAAAATTTCTGTCGGCTTATTACATCCAGCAAGTGCTGGACATGGTTTGAACTTGCAAAAGGGTGGTCATCACTTGGTATGGTTTGGTTTGATTTGGTCCTTGGAGTTGTACCAACAAACCAACGCTCGTCTGTGGCGACAAGGGCAACAAGCAGATACTGTGGTCATCCAGCACATTGTAACGCAAGGAACTATTGACGAGGAAATCCTCAAAGCACTGGAAAGCAAAGACGCCCAGCAGTCACGGCTGATTGAAGCCGTCAAAGCACAAGTAGGAGGAATGAATGGA

SEQ ID NO: 12970 - protein, 458 aa, Streptococcus agalactiae
MKLSLHDYQEVTKDFIIRTPYAAVILDMGMGKTATTLSAINELMFDRYEVSKVLVIAPLRVANTVWSDEIEQWEELRHLRYAKIVGTPKQRRAALEQDADIYIVNRENLPWLVEQCSPYFKWDMVVIDELSSFKSWQSKRFKAFMVMRPYMKRVVGLTGTPSSNGLMDLFAEFKVIDGGERLGRFIGEYRSRYFREGARNGQVVYNYLPMDYAECQIYDKIDDITISMKAMDYLEMPELISTKKVVHLTDKEKSDYKQFKKDYVLADLENGEVTAANAASLSNKLLQMANGAVYSNDHQVVSLHDQKLDALEDIIEAANGEPVLVAYWFKHDVQRIEERLVKLKVKGTILKTEEDIREWNKGKISVGLLHPASAGHGLNLQKGGHHLVWFGLIWSLELYQQTNARLWRQGQQADTVVIQHIVTQGTIDEEILKALESKDAQQSRLIEAVKAQVGGMNG

SEQ ID NO: 12971 - protein, 327 aa, Streptococcus agalactiae
GTGAACTGCACTTTTCCTTTGGCGATGTTTCTGACGGAAGGATTGGGTATGCGTGAAAAAATTGTTGAACAGAAGTTAGTGAGTGAAGTGAAAAAGCGTGGTGGGGTTTGTCCCAAATGGGTGTCGCCTTCGTTTGGCGGTGTGCCAGACAGGTTGGTGTTTTTACCCAAGGGTAAGTTTGGCATGGTGGAAGTAAAAGCCCCTGGTGGAAAGCCACGTTTACTACAAGTGACAAGGCACAAGATGTTTGACGGATTGGGTTTCAAGGTACATGTGCTAGATAGTGTTGAGAAGATTGGAGAAGTGCTAGATGAAATTGAGTTTACA

SEQ ID NO: 12972 - protein, 109 aa, Streptococcus agalactiae
MNCTFPLAMFLTEGLGMREKIVEQKLVSEVKKRGGVCPKWVSPSFGGVPDRLVFLPKGKFGMVEVKAPGGKPRLLQVTRHKMFDGLGFKVHVLDSVEKIGEVLDEIEFT

SEQ ID NO: 12973 - protein, 2277 aa, Streptococcus agalactiae
ATGCAATTTACCTTATCTCATTCAGGGCAATCTGGTGTTCAAACAACAACGGTCTACCCGCACCAAGTGACAATCACGGATGAAACTAGTCTAAAACGTATTGCTCAGTACGACCATGTGGCAGGATTGTTTTCCAATAACACTCGATCGAACGCTAATTTCCTTAAGTCAGATGTATTAGTCATGGATATTGATAATGACCATACAGAAAATCATGATGATTGGATTACAGAGGAATACCTAAAAATACTGTTTTCGGATTACCATTTTGCTTTGGTTACAAGTCGAAACCACATGGTTCAAAAAGGCAGTAAGGTAGCAAGACCTAAATTCCATATTTATTTCCAGATCAATGAAGTCAGTGATAAAGATGCCTATGCCTTTCTAAAAGAAGAGATGACGAATCGGTATAACTTCTTTGATACGAACGCCAAAGATGCAGCACGTTTCTTTTTTGGTAATCCCAATGCACAAGTTTTATGGAATGACTCATGGCTAACTATAGATGCTGATTTATTGGATTCATCATTTGATGATGAAGAAGATTTCGATGCAGATTTCTATCAACCACCAACAGGACCAATCACAGAAGGTAGTCGGAACTCAACCATGTCGGTTTTTGCGGCGAAAATCCTTAAGCGATTAGGTGTAACAAAAGAAGCACGAGACGGCTTTGATGAACAAGCTCTCAAATGTGTTCCCCCTCTTGAGAAAGCAGAGCTTGATACCATTTGGGGCAGTGCTGTTCGCTTCTATAACAAAACCATCAAAAACTCAAAAGATTATAAATCTCCAGAAGAGTTTCAACGTGGGGAGATGCAACCAGATGATTATTCAGATATCGGAGAAGCAGGTCTTCTCGCTAGAGAGTTTGGTGACAAGATTGCCTTTACTAGGGAAACAGACTACCTCGCTTACGATGGTAAGCACTGGGTGGAAGATGAGCAGTTAGCCATGCGTCAAATTCATCAGTTCCTTGATATGCAGCTAGAAGTTGCAGTAACCAAGCTTAATAATGCCACTCAAAAACTGAAGCAATCTGGTATTCCTGAAATGCTAATCCAACAAGGTGGTAAAAAGCTAGAAAATGCGATTGAGACACCAATTCAACTGGTTGCTTATCAGGACTATAAGAAAGCATTCGAGTTTTATAAGTTTGTTATGAAATACCGTGACTATCGAAATTTATCAGCAATCGCCAAAATGGCCAAACATATGGTTCGCATGAGTGTGTCTGATTTAGATAAGAATGAACTCTTACTGAATACTCCAGAGGCGACTATTGATTTATCACAAGGCTTGTCTGGTATTAGGGAACATGATTCTGCTGATTACTTAACCAAAATGACCAATGCCTCTCCGAGTGATAAGGGAGATGGTCTGTGGCAGGAGACCCTTGCGACCTTCTTTTGTGATGATACAGATCTTATCAATTATGTTCAAGAGATTGTAGGCATGGCTGCTATTGGTAAAGTTTATCAAGAGCATATGATTATTGCCTACGGTAGCGGTGCAAACGGCAAGTCTACCTTTTGGAACACCATTGCAAGAGTTCTTGGTAACTATTCAGGAAAACTCTCGGCTGAAGCTCTGACCATGAGTGTGAGACGGAATGTCAGTCCAGAAATGGCTGAACTTAAAGGGAAACGTCTTATCATTGCTTCAGAGATGAGTGAGGGAATGCGATTGAATACAGCCATGGTTAAACAGCTCTGTTCGACAGATGAAATTTTAGCTGAGAAAAAGTACAAGGCACCTTTCCATTTTGTCCCATCACATACGCTGGTTCTTTACACTAACCACCTGCCTAAAGTAGGTGCGAACGATGATGGGATTTGGAGACGACTGATTGTCATTCCTTTTAATGCCAAAATCACTGGTCGGTCAGACATCAAAAACTTTGCGGACTACCTTTACAACGAAGCAGCACCAGCTATCATGTCTTGGATTATTGAGGGAGCAGAAAAAGCCATCAAAGCAAACTTCAAATTGATCTTGCCACAAGTAGTTGCGGACTCTGTCTCAGCTTATCGAGAAGCCAATGACTGGATGGGTCAATTCCTTGGAGATTGTTGTGAAATCGGTGACCACTTGACTGAGAAATCAGGAGAACTTTACTCTGCTTATCGAGCTCACTGTGCTCGTATCAATGAGTACACGCGCAGCACGACGGACTTTTATACAGCTTTGGCAAACGCTGGATTCACCAAGAAAAGAACTAATAAGGGTGTCATGGTAAAAGGTCTACAGTTGAAATTAGAAGATGATTTTCTTGAT

SEQ ID NO: 12974 - protein, 759 aa, Streptococcus agalactiae
MQFTLSHSGQSGVQTTTVYPHQVTITDETSLKRIAQYDHVAGLFSNNTRSNANFLKSDVLVMDIDNDHTENHDDWITEEYLKILFSDYHFALVTSRNHMVQKGSKVARPKFHIYFQINEVSDKDAYAFLKEEMTNRYNFFDTNAKDAARFFFGNPNAQVLWNDSWLTIDADLLDSSFDDEEDFDADFYQPPTGPITEGSRNSTMSVFAAKILKRLGVTKEARDGFDEQALKCVPPLEKAELDTIWGSAVRFYNKTIKNSKDYKSPEEFQRGEMQPDDYSDIGEAGLLAREFGDKIAFTRETDYLAYDGKHWVEDEQLAMRQIHQFLDMQLEVAVTKLNNATQKLKQSGIPEMLIQQGGKKLENAIETPIQLVAYQDYKKAFEFYKFVMKYRDYRNLSAIAKMAKHMVRMSVSDLDKNELLLNTPEATIDLSQGLSGIREHDSADYLTKMTNASPSDKGDGLWQETLATFFCDDTDLINYVQEIVGMAAIGKVYQEHMIIAYGSGANGKSTFWNTIARVLGNYSGKLSAEALTMSVRRNVSPEMAELKGKRLIIASEMSEGMRLNTAMVKQLCSTDEILAEKKYKAPFHFVPSHTLVLYTNHLPKVGANDDGIWRRLIVIPFNAKITGRSDIKNFADYLYNEAAPAIMSWIIEGAEKAIKANFKLILPQVVADSVSAYREANDWMGQFLGDCCEIGDHLTEKSGELYSAYRAHCARINEYTRSTTDFYTALANAGFTKKRTNKGVMVKGLQLKLEDDFLD

SEQ ID NO: 12975 - protein, 180 aa, Streptococcus agalactiae
GTGGAAAATCCACTCAAAACCTTACTTAGTAAGATAGGAGGACCCAATATGGCAAACGAACCATACATCGAACCTGATGATGATGTGGCTGATACCCTCATAGCCATCAGCGTTATCTCAAAACTACTCGCTCGGAAAATTACGGAGGAAAGACAACATGAGCAAAATGAAACAACTGAA

SEQ ID NO: 12976 - protein, 60 aa, Streptococcus agalactiae
MENPLKTLLSKIGGPNMANEPYIEPDDDVADTLIAISVISKLLARKITEERQHEQNETTE

SEQ ID NO: 12977 - protein, 321 aa, Streptococcus agalactiae
ATGAGCAAAATGAAACAACTGAATGAACTGATTAATGAAATGGAAGGCACAGCCAAATACTATCTTCGCTTAGTAGATGAGTTCAAGAAGATCCTCTCTACTGAGGAAGAAACTACAACAACTTCAAAAGAACCAAAACATAAACCACAAAAGGAACTCAAACTCGAAGACGTTCGTTCCGTCCTTGCGACAAAAGCCAAAGATGGCTACAAGAACGAAGTTCGTGCTCTTCTCAATAAATATGGTGCAGAATCCCTATCAGCCTTAGCAACTGAGCACTACGCAGCGGTTCTTGAAGAAGCTGGAGGAATTGGCCATGAC

SEQ ID NO: 12978 - protein, 107 aa, Streptococcus agalactiae
MSKMKQLNELINEMEGTAKYYLRLVDEFKKILSTEEETTTTSKEPKHKPQKELKLEDVRSVLATKAKDGYKNEVRALLNKYGAESLSALATEHYAAVLEEAGGIGHD

SEQ ID NO: 12979 - protein, 1119 aa, Streptococcus agalactiae
ATGACTAACCATGCTGTCCTATCTGCTTCCGCATCCCATCGCTGGCTCAACTGTCCGCCTTCTGTTCGCTTAACCGAGGACATGCCAGATGTTACTTCTGAATTTGCCCTTGAGGGAACTGACGCTCACGAGCTCTGTGCTTACCTTGTTGAGAAGGCACTAGGCAGAAAGGCGCGTGATCCAACTGAGGATCTGTCCTTCTACAATGAAGAGATGCAAAATTGTGCCGAGGAATATCGCAACTACGTCATGGAACAGGTCGAGAAAGCTAAAGACTACTCTCATGACCCAACAGTACTTATCGAGCAACGTTTGGACTTCTCCAAATGGGTACCTGAAGGGTTCGGTACTGGCGACTGTCTGATTGTGGCAGATGGACTTCTTCAAGTGATCGACTACAAGCACGGTTTGGGCATTCTGGTCGATGCCGACCACAACCCACAAATGATGTGCTATGCCCTAGGTGCTCTTGAGATGTTCGATGGAATCTATGATTTTGATAATGTCACCATGACTATCTTTCAACCACGGAAGAACAATATCTCTACCTTTGAAATGGATAAGGCTGAACTGCTTGAATGGGCGGAAGACCAGCTCTCACCTAAAGCTGAACTTGCCTTTAAAGGCGAGGGAGAACTGAAATCTGGTAAACACTGCCAGTTCTGCAAGATTAAGAATGTCTGTCGCAAACGTGCGGAGGATAATTTAGCACTTGCCAAGATGGAGTTTGCGGATCCTGCTACTCTAGACTATGAGGATATTGCAGAGATTTTGCCTAAACTGGACTTACTGGTTTCATGGGCAAACGATGTCAAAGCCTATGCTTTGAAAGAAGCTACTGAGGGACACTCCATTCCAGGCTACAAATTAGTAGAGGGACGCTCAGTTCGTAAGTTTTCAGACGAAGCTGCCGTCAGTCAAGCTGTGATGGATGCTGGCTTTGATCCTTACGAAAAGAAACTCCTAACTATCACTGCCATGACTAAACTCCTTGGCAAGAAAACCTTTAACGACCTGCTTGGTGGTCTGATTGTAAAACAAAGCGGTAAACCAACACTCGTTCCTCTTGACGACAGTCGTCAAGAATTGAACCTAGCTACTAATGAATTTAAAGAGGAT

SEQ ID NO: 12980 - protein, 373 aa, Streptococcus agalactiae
MTNHAVLSASASHRWLNCPPSVRLTEDMPDVTSEFALEGTDAHELCAYLVEKALGRKARDPTEDLSFYNEEMQNCAEEYRNYVMEQVEKAKDYSHDPTVLIEQRLDFSKWVPEGFGTGDCLIVADGLLQVIDYKHGLGILVDADHNPQMMCYALGALEMFDGIYDFDNVTMTIFQPRKNNISTFEMDKAELLEWAEDQLSPKAELAFKGEGELKSGKHCQFCKIKNVCRKRAEDNLALAKMEFADPATLDYEDIAEILPKLDLLVSWANDVKAYALKEATEGHSIPGYKLVEGRSVRKFSDEAAVSQAVMDAGFDPYEKKLLTITAMTKLLGKKTFNDLLGGLIVKQSGKPTLVPLDDSRQELNLATNEFKED

SEQ ID NO: 12981 - protein, 561 aa, Streptococcus agalactiae
ATGACAACTAAAGTACAAACTACAAAAGTAATCACTGGTAAAAACACACGCTTCAGCTACTTGAATGCCAATGAACCTAAGTCCATCAACGGAAGCACGCCAAAGTACAGCGTCTCTCTTATCATTCCAAAGGATGATATTGAAACTGTCGATAAAATCAAAGCAGCCATTGAGCTTGCCTACAAGGAAGGCGAGTCCAAACTCAAAGGTAATGGAAAATCTGTCCCAGCACTTTCTATCCTTAAAACTCCACTTCGTGATGGAGACTTAGAGCGTCCTGATGATGAAGCTTATCGCAATGCCTACTTCGTCAATGCCAACTCACCACATAAGCCTGGGGTTGTGGACGCTAATCGACAAGAGATTATAGATACTTCTGAACTCTACTCAGGTATCTATGGCCGTGCGTCTATTTCCTTCTATGCCTTCAACTCTAACGGTAACAAGGGTATCGCCTGTGGTTTGAATAACTTGCAAAAACTCCGTGATGGAGAGCCACTTGGTGGACGTACTCGTGCTGAAGACGACTTTGCGACTGATGACGATGATGATTTCTTGAAC

SEQ ID NO: 12982 - protein, 187 aa, Streptococcus agalactiae
MTTKVQTTKVITGKNTRFSYLNANEPKSINGSTPKYSVSLIIPKDDIETVDKIKAAIELAYKEGESKLKGNGKSVPALSILKTPLRDGDLERPDDEAYRNAYFVNANSPHKPGVVDANRQEIIDTSELYSGIYGRASISFYAFNSNGNKGIACGLNNLQKLRDGEPLGGRTRAEDDFATDDDDDFLN

SEQ ID NO: 12983 - protein, 162 aa, Streptococcus agalactiae
ATGTTTGAAACAATTTTCTTTTACTCACTTATTGGCATTTACCTATTCTTTGGTCTGTACCTCAACTACATGACCATCCGTGATGATATTCGTCGTGAAAAAGAACGTAAGGCTGAAAAGAAACATCATAGCAACAACACAACACCGCTACATCGTAGCCGA

SEQ ID NO: 12984 - protein, 54 aa, Streptococcus agalactiae
MFETIFFYSLIGIYLFFGLYLNYMTIRDDIRREKERKAEKKHHSNNTTPLHRSR

SEQ ID NO: 12985 - protein, 1953 aa, Streptococcus agalactiae
ATGCTAATAAAAGAACTATCCATCGACTTAGAGACCTACTGTGAGGTAGATTTGAGAAAGTCTGGTGTTTATAGCTACGCAGAAGATGATTCTTTTGAAATCCTTCTCTTAGCAGTCTCTGTTGACAATGGTCCAGTAACAGTTTATGACCTAACTAAAGAAAATCTTCCTGATCAAATCCTACAAGCATTGGTGAATGACTCCATTATTAAGTGGGCTTTTAATGCCTCATTTGAACGCATCTGTCTGTCTAACTGGCTAAAGAAACATCATCCAAAATTATTGTCCGAGGGCTTTCTGTCTCCAAACTCATGGCGTTGTAGCATAGTTTGGTCAGCATATCTTGGACTTCCACTCTCCCTTGAAGGAGTCGGAACAGTTCTAAAACTCAAAGAACAGAAGTTAAAAGAAGGCGGGGATGTGATTCGTTACTTCTGCCTGCCCTACAAACCTACCAAAATTAATGGTGGACGAAAACGAAACTTCCCTCATCACGCACCTGATAAGTGGGCAGCCTTTATCAACTACAACAAGCGTGACGTTGAGGTTGAGTTAGCCATCAAAAATAAACTCCGTAACCACCCTGTTCCTGACTTTCTTTGGGAAGAGTATCATCAAGACCAAAATATCAATGATAGTGGGATTGGTATTGATGTAGACTTTGTCAAAGCAGCTATTACCATTGACGAGGAAAGCAAATCTAAAATTCAAGAGGAACTTAAAGAACTTACTGGGCTTGAAAATCCCAACTCTGTTCTTCAAATGATTGGCTGGCTACGAGAACACGGAGTAACGACTAATTCTCTTGATAAGAAAGCTGTCAAAGAGCTATTAAAGGTAGTCGATGCAAAGACAACTAAAGTCCTAAAGTTAAGACAACAGGCGGCTAAATCTAGCGTTTCTAAATACCAAGCTATGGTGAACTGTGTTTGTTTGGATGGTCGAGCTAGAGGGATGTTCCAATTCTACGGAGCAAATCGAACGGGTCGTTGGGCTGGGCGATTGGTACAACTTCAGAACCTCCCACAGAACCATCTTCCTGACCTTAAAGAGGCTAGAGACCTCTTCAAAACTGGTGACTTAGAGGCAACTGATCTCCTCTATGGTACGCAAGATACCCTATCTCAACTCATCCGTACTGCTTTTGTACCTAGTGATGGGAAAAAGTTTATCGTCTGTGACTTTTCTGCCATAGAAGCGCGAGTATTATCTCACCTAGCTGGCGAAAAATGGCGAAGCATGGTCTTTGAACAAGGCAAGGACATCTACTGTATGTCAGCTAGCCAGATGTTTGGAGTGCCTGTTGAGAAACATGGACGTAACGCAGACTTGCGTCAGAAAGGGAAAATTGCAGAGTTGGCCTGTGGCTATGGCGGAGCAGTCGGGGCACTTAAAGCCATGGGGGCTATTGACATGGGGCTTGATGAACAGGAGCTGCAGCCTCTTGTGGACTCGTGGAGACAAGCCAACCCAAACATCGTACTCTTTTGGTGGGATGTTGATAAAGCTGTAAAGACTGCAATAAAATACCAAAAGCAAACTGAAACCCATGGTATTCAATTCAAAGTAAGAAAAGGGATGTTATTTATTACTCTTCCTTCTGGACGCAAACTCGCCTATGTCAAACCTAAAATGGGAGAAAACCAATTTGGTGGAGAGTCCGTCACCTACGAAGGTACAGGAACTGCTAAACGTTGGGAGAGACTTGAAAGCTATGGTCCAAAATTTGTCGAGAATATTATTCAAGCTATAAGTCGAGACATACTCGCTTACTCTATGAAACAACTGAAAGACTTCAGAATTGTAGGACATGTGCATGATGAAATCATCATTGAGTGTGACCAGAGCCAAAATCTTGAGCAAATCGCAACTTTGATGGGAAAAGCACCATACTGGATGCCTGATATTAACCTCAGAGCTGATGGATACGAGTGTCTCTTCTATCAAAAAGAC

SEQ ID NO: 12986 - protein, 651 aa, Streptococcus agalactiae
MLIKELSIDLETYCEVDLRKSGVYSYAEDDSFEILLLAVSVDNGPVTVYDLTKENLPDQILQALVNDSIIKWAFNASFERICLSNWLKKHHPKLLSEGFLSPNSWRCSIVWSAYLGLPLSLEGVGTVLKLKEQKLKEGGDVIRYFCLPYKPTKINGGRKRNFPHHAPDKWAAFINYNKRDVEVELAIKNKLRNHPVPDFLWEEYHQDQNINDSGIGIDVDFVKAAITIDEESKSKIQEELKELTGLENPNSVLQMIGWLREHGVTTNSLDKKAVKELLKVVDAKTTKVLKLRQQAAKSSVSKYQAMVNCVCLDGRARGMFQFYGANRTGRWAGRLVQLQNLPQNHLPDLKEARDLFKTGDLEATDLLYGTQDTLSQLIRTAFVPSDGKKFIVCDFSAIEARVLSHLAGEKWRSMVFEQGKDIYCMSASQMFGVPVEKHGRNADLRQKGKIAELACGYGGAVGALKAMGAIDMGLDEQELQPLVDSWRQANPNIVLFWWDVDKAVKTAIKYQKQTETHGIQFKVRKGMLFITLPSGRKLAYVKPKMGENQFGGESVTYEGTGTAKRWERLESYGPKFVENIIQAISRDILAYSMKQLKDFRIVGHVHDEIIIECDQSQNLEQIATLMGKAPYWMPDINLRADGYECLFYQKD

SEQ ID NO: 12987 - protein, 135 aa, Streptococcus agalactiae
TTGAGTTTGACAGTAGTTGAAAAAGTTGACATTGATTGGCATGCTTTTGACTCCGTTTCTTTGGCAAGCAAAGAAAAAGAGTATGACAAACCAATATTCAGTTGTGTATTTGACCACATCAGCAATTCCTTTGCT

SEQ ID NO: 12988 - protein, 45 aa, Streptococcus agalactiae
MSLTVVEKVDIDWHAFDSVSLASKEKEYDKPIFSCVFDHISNSFA

SEQ ID NO: 12989 - protein, 510 aa, Streptococcus agalactiae
GTGGAGCCATCAAAGGGTGAAGTACTAGCGCCAATGTTCGTTCAGGACTATTATATGTCCTCAGAATATTCAGGACTGATTCGTGGTACATTTCGACAATGCCGTATTATGAGTATTCCCATTCTAACAGCCTTTGTCCCTGTGGCAGAAGAGGAGTATGAACAAATGGTTTGGTGGTATAACAACTCAGTCAATGATTATCTCAAGGATTTTCGTAAACCTAAAAAGAATACTTTAGAGGTCTCCTCCTGGGAAGTCTTCACTGAAAAGCAGGATTTAGCAATTGCTGATGAAGGTATTGAACTATATCTAGTAATGGATCAACTGGACTTCTTGAAAGCTAAACTCGCAGCAACCAATTTCCAAGCACCAGAAATTTTAGATATGCTTTTTGAAGGTTATGAGAATAAAGAAATCTTCGAGTACCTAGGTGTTAAGAAATCTGCAGGCTATAAGAAAGTCAATAATGCCCAGAAAGAAGGGCTGAAACTTTACAAAGAACTCAACAAA

SEQ ID NO: 12990 - protein, 170 aa, Streptococcus agalactiae
MEPSKGEVLAPMFVQDYYMSSEYSGLIRGTFRQCRIMSIPILTAFVPVAEEEYEQMVWWYNNSVNDYLKDFRKPKKNTLEVSSWEVFTEKQDLAIADEGIELYLVMDQLDFLKAKLAATNFQAPEILDMLFEGYENKEIFEYLGVKKSAGYKKVNNAQKEGLKLYKELNK

SEQ ID NO: 12991 - protein, 132 aa, Streptococcus agalactiae
TTGACATTGATTGGCATGCTTTTGACTCCGTTTCTTTGGCAAGCAAAGAAAAAGAGTATGACAAACCAATATTCAGTTGTGTATTTGACCACATCAGCAATTCCTTTGCTTAATCATGGTCAACTGGCTTTA

SEQ ID NO: 12992 - protein, 44 aa, Streptococcus agalactiae
MTLIGMLLTPFLWQAKKKSMTNQYSVVYLTTSAIPLLNHGQLAL

SEQ ID NO: 12993 - protein, 1866 aa, Streptococcus agalactiae
ATGTTCGATAAATATATTTTTGATACCTACTATGAGCAAATAGTCAAAACTGTTAAAGGATTTATTTTTAATAATAAAGATAATACTGATTTGTCTACATACATGGTGCCAGAACCGAATGGTTTTATTGAGTTTGATAATTTTGAGTTATATAAGATAAACTATGAAATTATTAATAATTGCGAATTAAATCTTGAAATCATTGTAATTGCTAATGTAATTGTTCGGCAGTATATCAAAGGTGAGATGGAGATTGATACTAAAACTAAGTTTGTGTCTGTATATGCTGAAGTAGAACTTGATTCTGGTATCAAAAACTTTCGAATTTACAATACAGAATTTAAATCAGATCAGTACAAAAAGTCCCGAAACTTAAAATTGAGTAAAGACTGGGTTCCATATATAAGGAAGAAGGACTTTGATGCTATTGCTGAAAAATTCTTAAGGAAGTACTATCCTCAAGCCCTGACTCAACCAACCCCTGTTCCAGTTGAGACAATAGTTTCTGAAATGGGACTGTCTATCCATCAAGAGAAACTAACTATAGATAATTCAGTTTTCGGGAAAATGGTTTTTAAAGATACTGATGTTGAGGTCATAGAGGATGAGCAGTTAGTTTCTGAGCATTTTAACAAAGGGAGTATCCTTGTAGATAAGGATGTTGTTTTCAAACGGAATGTAGGTTCGTATAACAATACGGTCATCCATGAATGTGTTCACTGGGAACTCCATAAAGTATTTCACGAAGTCAAGATGGTACTTGATAAAGACCACTCACAAGTTAGTAGCTGGACAGAAGAAAATTTAGCTGATTCTAGTATGTGGACGTCGCTTGACTGGATGGAGTGGCAAGCTAATGGAATTGCTCCCCGAATTCTTATGCCCAAAGTCCAAACTAGAATAAAGATTAGGGAGCTATTTCAAACTTTGACATTGGTTAATCCTGATATAAGTCGTTCTGAATTAGTGCAAGAAGTGGTAGACAACTTAGCTACTTTCTTTGAGGTATCTAGACAGGCTGCTAAAATTAGAATGATTGATTTAGGATTTAAGGAAGCAAATGGTGTATATAATTATCTTGATGATAGATATATGCATAACTTTGCTTTTGAACTTGAAGCATTTGATAAAGGAAGTAGTTATACTATTACTTCAAATGACTTGTGTTTTGAGTATTGTTTTAACGAGAGTTTTAGACAGATTATTGATAGAAATAAGTTTATTTACGTTGATAACCATCTTTGTTTAAAGGATAAGAAATTTATTTATATGACAAAAGATGGGCCAATTATGACTGACTATGCTTACGAGCACATGGATGAATGTTGTCTAATCTTTAAAGTAAAGTCTAAAAATTTCACCTCGATTTCTAATGAGACATACTATGATTATGTACTGAATAGAGGCGTAACAAAGGAAAGTGAGATTAAGGCTGACTTTGTAGATATTCTCCAGAATCCAAGTTTGATGGATCAGCTCCCTCCACTGGATATGATGAAACTCGGGAAAAAAATCTCTGAATTATTGAAAGAACTACCTTTTGAATTTTCTGGGACATTACGTAGTCATAGAAAGCGAAAAAATTGCACACAACCATTTTTGGCTAAGCTAGTCGGAATTACAGAACGAACGTTGAGAGATTATGAAACACTAGAAGATAATTTACCAAGGCTTGAGTTAACATTGTCATTTTGTTTTGCTTTAAAATTAAGACCTGAACTTAGTGACGATATGATAAAGAAAGCAGGTCATCAACTTACAATTTCTCCACCACACCAAGTATATAAAATGTTGCTATCAACAAGTTACTATAAACCCTTGGGTGAAATAAATTCAATATTACAAGCTGCAGAAATGAAAACCTTA

SEQ ID NO: 12994 - protein, 622 aa, Streptococcus agalactiae
MFDKYIFDTYYEQIVKTVKGFIFNNKDNTDLSTYMVPEPNGFIEFDNFELYKINYEIINNCELNLEIIVIANVIVRQYIKGEMEIDTKTKFVSVYAEVELDSGIKNFRIYNTEFKSDQYKKSRNLKLSKDWVPYIRKKDFDAIAEKFLRKYYPQALTQPTPVPVETIVSEMGLSIHQEKLTIDNSVFGKMVFKDTDVEVIEDEQLVSEHFNKGSILVDKDVVFKRNVGSYNNTVIHECVHWELHKVFHEVKMVLDKDHSQVSSWTEENLADSSMWTSLDWMEWQANGIAPRILMPKVQTRIKIRELFQTLTLVNPDISRSELVQEVVDNLATFFEVSRQAAKIRMIDLGFKEANGVYNYLDDRYMHNFAFELEAFDKGSSYTITSNDLCFEYCFNESFRQIIDRNKFIYVDNHLCLKDKKFIYMTKDGPIMTDYAYEHMDECCLIFKVKSKNFTSISNETYYDYVLNRGVTKESEIKADFVDILQNPSLMDQLPPLDMMKLGKKISELLKELPFEFSGTLRSHRKRKNCTQPFLAKLVGITERTLRDYETLEDNLPRLELTLSFCFALKLRPELSDDMIKKAGHQLTISPPHQVYKMLLSTSYYKPLGEINSILQAAEMKTL

SEQ ID NO: 12995 - protein, 228 aa, Streptococcus agalactiae
GTGAGGATAGATAGGGTTTCTGCCTACCATCCAATGACTGCTTCGGAAGATTTTTCATATATTCCTAGAGCATTGGGAATCCCTTATCTTTATTGGGGATTCGGAGGTTTCACGAAAGAACAAGAGATTTATTCAAACCATAATTCTAAGTTTGCACCAGCTATTCAACCGACCTTAACAACTGGTACTGAAGCTGCAGTTGTGGCTATTTTACGGTATCTTGGCAAA

SEQ ID NO: 12996 - protein, 76 aa, Streptococcus agalactiae
MRIDRVSAYHPMTASEDFSYIPRALGIPYLYWGFGGFTKEQEIYSNHNSKFAPAIQPTLTTGTEAAVVAILRYLGK

SEQ ID NO: 12997 - protein, 999 aa, Streptococcus agalactiae
ATGTCAGTTCAAAGTGTGCTTGAGTCCTTGATAATGATTAAAGAGTGGCAAGAGGAAACTTACAAATATTTTCATAGCCATCCCGAATTATCAATGCAAGAGAAAAATACTAGTCAATTTATTTATAAAACCTTGCTGTCTTATGGTTACCAAACTCTACGAATTGGAGGAGGCGTTGTTGGTATTTTAGAAAATGGAGATGGTCCTAAAGTACTATTTAGGGCGGATATGGATGCTCTGCCTGTAAAAGAAGAAACAGGATTGGAATATGCTTCTAAAGTAGTCATGAAAGACTTAGATGGTAAGACAGTACCTGTGATGCATGCCTGTGGTCATGATGTTCATATTGTAGCTGGCTTAGGGGCAGCTTGGGCTTTGGCTAATCATTTATCGGAGTGGCAAGGAACTTATATTGCTTTGTTTCAACCAGGTGAAGAAATAGCTGCAGGGGCTAAATCTATGATAAAAGATGGACTTTTTGAAAAGATACCTCATCCAGACTTAGCTTTATCACAACATGTTTTAACTGAACCCATTTCAGGTAAAGTAGGTACGCTAGCAGGGCCCTTTTTATCGAGTGCCACTTCATTAAAGATTACTGTGTATGGAAAAGGTGCTCATAGTTCAATGCCACATTTAAGTATTGATCCTATTATTATAGCATGTGATATTGTAATAAAACTACAAACAATAGTTTCAAGAGAAGTAAATCTATTTAAATTTGCTGTTGTATCTGTTGGTTCTTTTCAATCTGGTTTTAAAGCGAATATTATTCCTGACAAAGCAATATTATTATTGAATATTAGAGCTTACGATGAACAGATTCAAAAACAAGTAATTGATAGTATTAAACGTATTGTTAAATCAGAATGTGAAGTAGGTGGTTGCATAATTGACCCCAAAGTAGAAACTTACGATGAGTATCCCCTAACAGATAATGACCCCCAGATAACCAAGGAAGTCACGGAAGCATTTCAGAAATATTTAGGTGAGGATAGA

SEQ ID NO: 12998 - protein, 333 aa, Streptococcus agalactiae
MSVQSVLESLIMIKEWQEETYKYFHSHPELSMQEKNTSQFIYKTLLSYGYQTLRIGGGVVGILENGDGPKVLFRADMDALPVKEETGLEYASKVVMKDLDGKTVPVMHACGHDVHIVAGLGAAWALANHLSEWQGTYIALFQPGEEIAAGAKSMIKDGLFEKIPHPDLALSQHVLTEPISGKVGTLAGPFLSSATSLKITVYGKGAHSSMPHLSIDPIIIACDIVIKLQTIVSREVNLFKFAVVSVGSFQSGFKANIIPDKAILLLNIRAYDEQIQKQVIDSIKRIVKSECEVGGCIIDPKVETYDEYPLTDNDPQITKEVTEAFQKYLGEDR

SEQ ID NO: 12999 - protein, 725 aa, Streptococcus agalactiae
GTGACGTACCAGATGGTTCAACAGATACTGTTGATGTGACTGTTAAAGTCGTAGATCCAAGTACAGACGCTGATAAGAACGAACCTAAGGTTAAAGACCAAACAGTTAACATTGGGGAAACACCTAAGGCAGAAGATTCAATTGAAAACTTGAAAGATTTACCAGATGGAACTAAAGTAGAGTTTGAAACACCAATTGATACCACAACAGCAGGTGACAAGCCAGGTAAAGTTGTCGTGACGTACCCAGATGGTTCAACAGATACTGTTGATGTGACTGTTAAAGTCGTAGATCCAAGTACAGACGCTGATAAGAACGAACCTAAGGCTAAAGACCAAACAGTTAACATTGGGGAAACACCTAAGGCAGAAGATTCAATTGAAAACTTGAAAGATTTACCAGATGGAACTAAAGTAGAGTTTGAAACACCAATTGATACCACAACAGCAGGTGACAAGCCAGGTAAAGTTGTCGTGACGTACCCAGATGGTTCAACAGATACTGTTGATGTGACTGTTAAAGTCGTAGATCCAAGTACAGACGCTGATAAGAACGAACCTAAGGCTAAAGACCAAACACAAGCTTTATCAAGTATCGCAAATAATAAAGATAGAGGAAATAAATTGCCTACAACAGGTGAGGATGAGAACCCATTCTTTAACATTGCTGCTTTGACAATTATAGCTTCAGTTGGTTTACTATCTATTTTAAAGAAAAAAGAGGAT

SEQ ID NO: 13000 - protein, 242 aa, Streptococcus agalactiae
MTYPDGSTDTVDVTVKVVDPSTDADKNEPKVKDQTVNIGETPKAEDSIENLKDLPDGTKVEFETPIDTTTAGDKPGKVVVTYPDGSTDTVDVTVKVVDPSTDADKNEPKAKDQTVNIGETPKAEDSIENLKDLPDGTKVEFETPIDTTTAGDKPGKVVVTYPDGSTDTVDVTVKVVDPSTDADKNEPKAKDQTQALSSIANNKDRGNKLPTTGEDENPFFNIAALTIIASVGLLSILKKKED

SEQ ID NO: 13001 - protein, 498 aa, Streptococcus agalactiae; identical to SEQ ID NO: 6983

SEQ ID NO: 13002 - protein, 166 aa, Streptococcus agalactiae; identical to SEQ ID NO: 6984

SEQ ID NO: 13003 - protein, 173 aa, Streptococcus agalactiae
ATGGCATTAAACATTGAAAATATTATTGCTGAAATTAAAGAAGCTACAATTCTTGAACTTAACGATCTTGTAAAAGCTATCGAAGAAGAATTTGGTGTAACTGCTGCTGCTCCTGTAGCTGCTGCCGCTGCTAGTGGTGAAGCTGCTGCTGCTAAACTCATTTGACGTTGAAT

SEQ ID NO: 13004 - protein, 58 aa, Streptococcus agalactiae
MALNIENIIAEIKEATILELNDLVKAIEEEFGVTAAAPVAAAAASGEAAAAKTHLTLN

SEQ ID NO: 13005 - protein, 3608 aa, Streptococcus agalactiae
ATGGCAATAAAGGGAATTACATTAAAAGAGAGTATGAATCGCTCTGTTCAAGCAATTATGCCACTTGATGAAGAAAAAGAGGTATTTAATCAAAAATTGGTTAGTTTTTGACTCATTTAAAAGACAAAGAGGATGAGTCAGAGGAATACCAGAAAAATCTTCTCAAGGTATTTTTAGAAAGTGTATTACCTTACAATTTTATAAATACTTCTAGTAGGATTGACCTTGCTATCTATAATGGTAAAGATGCCAATTCGTCACTAGGTATTCTTTTTGAATGCAAGAGTCTTTTCAATAAATCTGAAATGATGTCAACGGAAAAAATTAATTCTAAAGCATTTCAAGAAATTGTCTATTATTACCTACAAGAACGCCTATTTAATAAAAATTTAGAAATCAAAAAGTGTATTATCACAAACGGTCTATCTTGGTTTGTAATAGAGGCTAAAGAATTTGAAAAGCATTTTTTCAAAAATAAAAAGCTAGTTGACCTCGTGACAAAGTTCAGAAATAATCAACTTTCTAGCAATAAAACAGATTTCCTTTATAGTGAGGTTATTGCACCAGAAATTGACAAAGCATTTGAAAAGGGAATCGTTATTGCTCACTTTGATCTTAGTCAAGCTCTAGTTAAGACCAGTAAGTCTATTGAAATCAAGAAAAATAATCTGACTCAGCTTTATCGATTCTTCACAGCAGAGAATCTCCTCAATAAAGAGATTTTTACTGATTCAAACAAACTCAATAAGAATTTCTATGATGAATTGCTTTATTTGATGGGGCTGGAAGAAACGAAGTCAGGGACTTCAAAAATTATTTCACGCTTAAAACCCATCAAACGTCAGCGATATTCTTTTGTTGAGAATATCATTAATAAATTGGAGATGAAAGATGTTTCAAAAGAAAAGCAGGAAGATATTGCTATTCAACTAACAGTTGTCTGGACAAATAGAATTCTATTTTTGAAACTGTTAGAATCTCAGCTTGTACTCTTTAACAAAGATGAATCTTATAGGTTCTTGACGTATGAAAAACTCCCTAATTTTGAAGAAATTTACGGTCTATTCTTTGCTGTACTTGCTAAGAAAGTATCGGAAAGAAATGATCGAGTGCAAGAAAAGTTCGGTTATGTCCCTTATCTGAACTCATCACTGTTTGAAGAAACAGAAATAGAAATTTCTAGAGATGGGATTGGTATTGATAGATTACCAGAGGGAGATATTGAAATTTTCTCCAAAACAGCCCTTAAAGGCGTAGATAAAAAACGTAAAAAAGGGAACATCAATTTTATTGAATATCTCTTTGAGTTTTTGGATTCTTATGACTTCTCGACCTCCATCAGCCACCATGAAAAATCTAAGAATGACCTTATCAATGCGTCAGTTCTGGGATTAATTTTTGAGAAAATCAACGGCTACCGTGATGGCTCTTTTTATACGCCAGGTAACATTACAATGTATATGTCACGTAAAGCGATTCGTACAGCAGCAGTGGACAAAGTTAATGAATTGCTTGGTTGGAATTGTGAAACTGTTGAAGAGATTAAGTTTGCGATTGGACATAGTGTTGAAAATGCTCGTAAAGTCAGCCAAGCAATTGATGATCTTAAGGTTTGTGACCCAGCGGTTGGATCCGGTCACTTCCTTGTTTCAATCCTGAATGAAATTATTGCTCTTAAAAGTGATTTAAATATTTTGTTTGACGCTGATGGCAACTATATTGGAAACCTGATTCAATGTTATGTTATCAATGATGAGCTAGTCATTCAAGATATGTCTGGAAATAATTTTTTGTATCAGACAGGTAATCAGCAGTCAGAACAAATTCAAAAGGCAATTTTCAACCAGAAAAGGCATATTCTGGAAAATTCGCTCTTTGCAGTGGATATTAACCCAAGCTCGGTCAATATTTGCCGTTTGCGTCTTTGGATTGAACTCTTAAAATCTTCTTATTACTACCAGGATACTGATACCAACCAACCTGTTTTGACGACTTTGCCAAATATTGATATCAGTATTAAAGTAGGCGATAGTCTCTTACATAAGTTTGAATTTGACTATGAATTTGATATGAGAAAAACAGATTTCAAGGACTATCTATCTCTAGTTAAAGACTATAAGGAGACGAATAATAAACGAGTTAAAGCAGAAATCTGGGAGAAAATCGAAAGGCTCAAACATTCCTTTGATGACACAGCTTCAAGCCCTGAATTAAAGAAATTATCTCGGCTCATATCTGAACGAAATAAGGCTGGTGCCATTAGCTTATTTGAGGATGAAAATAAAAATTCTAAAGAAGTAGCGGAATTAAATAAGCAACTAGCAAAAGCTGAAAAGGAATTGGAATACAGACTGAAAAATCCATTATTCGCTAAAGGTATGGAATGGCGAATGGAATTTCCTGAGATCTTGGGAGAAGCTGGCGAATTTATCGGCTTTGACCTTGTAATTGGGAATCCGCCTTATATCTTTGCTCGTAATCAGTCCTTTACAGATGAGATGAAATCCTACTATTCAAGGACTTATCAAGTAAGTGAATACCAAGCCAATACCTATACTATATTCATGGAATTGGCTTATCAACTCTTACGTAAAGGTGGGACATTCTCTTATATCATTCCAAATAATTTTCTGACCATTCAGACCAATTCAAGAGTTCGTCAGTTTATCACGGAGCAGACGAGTGATGTTGTTCTGATTAATTCTCTGGATAAGATTTTTGCGGATGCTAGCGTGGATAACTGTATCATTTTCTTCAAGAAGAATGCGCCAAACTGGATTGAAGTAGCAGAATTGTATCACGGCGAGTTCAACACTGTTGGACGAGTTGCGCCAGATTTCTTTGGTGAAATCCCTACCTTTTCAATCTCGATGGTCAAGTATCGTCAGGCGATTGATATCTTCTGGAAAGTAAACCATTTTCCAATACTAGGACGACCAGAAATTTCGACTGTAAAATCTGGAATCAAAGCCTATGAAACTGGAAAAGGGAATCCTAAAATGACCGCTCAAGATAAGAATAATCGAATTTATCATGCAAGAGAAAGGTCAGATGATTCATACCGTCCCTATCTTGATGGCGAGAATGTATCACGCTATAAACTGACTTGGAATGGTGAATATGTCAAGTATGGTGAAAATTTAGCTGCACCAAGAGATAAAGAAATTTTTGAAAAACCACGAATTTTAGTTCGTCAGATTCCAAGTAAATCAACTTATGCTGTTGAAGCTGTTTATACTGATAGTGATGTTATTAACGACTTAAACTCCATGGTCATCACAGATATTCAGGTTAATCCTTTTTATCTTTTGGGTATTTTGAACTCTCGCTTAATCTCTCTTTGGTTTTTCATGAAGTTTGATAAATTCCAACGTCGCCTATTCCCACAGTTCAAAGTTAATGAACTAGGAGATTTTCCAATTCCAGATGCTACTGATTCCCAGCAAGAAGACATAGCACAAGTTGTTGAGCAACTGATGGAGGAGATGAAAAAAGATTCTCCTGACACTGAAAAAGTCAATCAGCTTAATCTGGAAATTGATGAACTTGTCATGGACTTGTTTGACTTGGCTGAAGAAGAAAAACAAACAGTTAGAGATTTTGAAGTA

SEQ ID NO: 13006 - protein, 1203 aa, Streptococcus agalactiae
  VARIANT 36: Xaa = Any Amino Acid
MAIKGITLKESMNRSVQAIMPLDEEKEVFNQKLVSXLTHLKDKEDESEEYQKNLLKVFLESVLPYNFINTSSRIDLAIYNGKDANSSLGILFECKSLFNKSEMMSTEKINSKAFQEIVYYYLQERLFNKNLEIKKCIITNGLSWFVIEAKEFEKHFFKNKKLVDLVTKFRNNQLSSNKTDFLYSEVIAPEIDKAFEKGIVIAHFDLSQALVKTSKSIEIKKNNLTQLYRFFTAENLLNKEIFTDSNKLNKNFYDELLYLMGLEETKSGTSKIISRLKPIKRQRYSFVENIINKLEMKDVSKEKQEDIAIQLTVVWTNRILFLKLLESQLVLFNKDESYRFLTYEKLPNFEEIYGLFFAVLAKKVSERNDRVQEKFGYVPYLNSSLFEETEIEISRDGIGIDRLPEGDIEIFSKTALKGVDKKRKKGNINFIEYLFEFLDSYDFSTSISHHEKSKNDLINASVLGLIFEKINGYRDGSFYTPGNITMYMSRKAIRTAAVDKVNELLGWNCETVEEIKFAIGHSVENARKVSQAIDDLKVCDPAVGSGHFLVSILNEIIALKSDLNILFDADGNYIGNLIQCYVINDELVIQDMSGNNFLYQTGNQQSEQIQKAIFNQKRHILENSLFAVDINPSSVNICRLRLWIELLKSSYYYQDTDTNQPVLTTLPNIDISIKVGDSLLHKFEFDYEFDMRKTDFKDYLSLVKDYKETNNKRVKAEIWEKIERLKHSFDDTASSPELKKLSRLISERNKAGAISLFEDENKNSKEVAELNKQLAKAEKELEYRLKNPLFAKGMEWRMEFPEILGEAGEFIGFDLVIGNPPYIFARNQSFTDEMKSYYSRTYQVSEYQANTYTIFMELAYQLLRKGGTFSYIIPNNFLTIQTNSRVRQFITEQTSDVVLINSLDKIFADASVDNCIIFFKKNAPNWIEVAELYHGEFNTVGRVAPDFFGEIPTFSISMVKYRQAIDIFWKVNHFPILGRPEISTVKSGIKAYETGKGNPKMTAQDKNNRIYHARERSDDSYRPYLDGENVSRYKLTWNGEYVKYGENLAAPRDKEIFEKPRILVRQIPSKSTYAVEAVYTDSDVINDLNSMVITDIQVNPFYLLGILNSRLISLWFFMKFDKFQRRLFPQFKVNELGDFPIPDATDSQQEDIAQVVEQLMEEMKKDSPDTEKVNQLNLEIDELVMDLFDLAEEEKQTVRDFEV

SEQ ID NO: 13007 - protein, 489 aa, Streptococcus agalactiae
ATGGCAAAAAGTTTGCAAAGTCAATTCAGAGATATTGAGAGAAATTTAGTCAGAGAAACGAATAAAATGGTGAAGAGAGCTAATAAGAAGATAAAACCTGTTATCCTTCCAACACAACTAGATTCCTCTAAAACAGCACTAAACTTTAACGAATATCATCAAGATAATAGTACTCATGTTTCTGTTAATGGAGATTTGATAAACTCACAGATTGGTGGACAAAATAATGCGTTAAATATTACCTATACTGAGATAGAAATTGAGAGAGTATTTGAGAATATCAGAGAGTACTCTAGAACATTAGATGAAGAAGAACAGACAGAATTAGTGACAATTTTAAATGAGGTACAAGAAGTCGGAAAAGTTGATAACCATCAAACTTTTTTTGAAAAACACCCTATACTTGCAATGGCTCTTAGTGCTAGTGTAAGCTGGGGAGTGGAGAATGGAATTGATAGATTAGTTAGTGTCATTTCAAATACATTTAAG

SEQ ID NO: 13008 - protein, 163 aa, Streptococcus agalactiae
MAKSLQSQFRDIERNLVRETNKMVKRANKKIKPVILPTQLDSSKTALNFNEYHQDNSTHVSVNGDLINSQIGGQNNALNITYTEIEIERVFENIREYSRTLDEEEQTELVTILNEVQEVGKVDNHQTFFEKHPILAMALSASVSWGVENGIDRLVSVISNTFK

SEQ ID NO: 13009 - protein, 1203 aa, Streptococcus agalactiae
ATGTTGGACTTAGAGAAAATTTTGAGGGGAATGATTTCTGCAAAATTCAAGGACTTGAGGGGAAGCATTCCACCAGATATCATTTCAAATGGCCAAAGAACTGCAATCTACAACATTGAAAAAGGTAAAAATCCTAAAAGCGGAAATTTTGTAACCGATACTTTACTGGAGGATTACTCTAGCTATTTTGGAATGGATAAATCAGATCTTATCTTTGGAGATGCTCTATTATTAGAACTGACTCTTTACCATGTATTTTCTCAAATTTTTTATCAAATAGTACCAGATGATAATCGTATTGGCTTGAAGATTGATAGGAACAAAATTCAAAACAATATTGATTCAAGCATTATTGAGCCATTTTTAGAACTATTCTATATTTTTGGGGATTTTGGGCGATGGTATAATATTAGAAGGAAGGATGATGATGAATCAGATAAAGATATAGATTATACGACAATGTATGAAATCGTTTGGCGTTTGATAAAAAGTAGAGTGGTTAGTTCATTTAATCAACATGTAGTTGGAGAAATGTTTGAAAAAGACAAGGTATTTAATTTTAATCAAATCAACAATGTCTTTAATAATTGGTATCATAAGCATTTTGTAAAAATCATAATCCCTGAGGCGTTAAAAAAATTGGAGTCTGACAGTATTTTTAAGATGGGATTTATGGTTAGGAATTTGATTGAAAATTTTTTGGTTTTAGATTTACCACTATCATATTTAGAAGATGTTCCATTAGAGGAATACTACTTACCAATAACGAACTATACCATAGATATTTCAAAGATAGAATCTGAAGAAGTAGAGAATAAAGTTTTAAGAGAATATTTAAGATGGATATTAAGATATAACAGCTTAGAAACATCTGATGATGCAAAGAAATTTGCTGATGAAAATTTTTTTGAAGAATTTGATTTTGTTACTGAAGAAAGGCGTCCATTAGTTGACCAAACCACTAAAATAAATGTAAAAGAGTTGTTAGATTCTATTATAAAGTCCCCAAAACAATTTGATAATGGTCATATTTTACATGCTAGTATAAGAGAAATTCCAGGACTATTAACAGTCAATAGTCAGGTATCAAAATTATTTCAAACAAGAGTTAATGAAGTTTACTTAAAACAAATAGATGATTTAGTCATGTATCAAAACATATATATCAACTTAATCAAACCAGATGAACTAGATTCATTTTTA

SEQ ID NO: 13010 - protein, 401 aa, Streptococcus agalactiae
MLDLEKILRGMISAKFKDLRGSIPPDIISNGQRTAIYNIEKGKNPKSGNFVTDTLLEDYSSYFGMDKSDLIFGDALLLELTLYHVFSQIFYQIVPDDNRIGLKIDRNKIQNNIDSSIIEPFLELFYIFGDFGRWYNIRRKDDDESDKDIDYTTMYEIVWRLIKSRVVSSFNQHVVGEMFEKDKVFNFNQINNVFNNWYHKHFVKIIIPEALKKLESDSIFKMGFMVRNLIENFLVLDLPLSYLEDVPLEEYYLPITNYTIDISKIESEEVENKVLREYLRWILRYNSLETSDDAKKFADENFFEEFDFVTEERRPLVDQTTKINVKELLDSIIKSPKQFDNGHILHASIREIPGLLTVNSQVSKLFQTRVNEVYLKQIDDLVMYQNIYINLIKPDELDSFL

SEQ ID NO: 13011 - protein, 312 aa, Streptococcus agalactiae
ATGAAGACAAGAAATCGTAAAGGTGGTTATTTAGCGAATACTGCAAATGAGTACATCGACTCTAAACAGGCAATTCATTGCTTGAGTGTAGAACTTGAACCGCAAATTAGGTTTGAAGAGGGTCAGCCTACTGGGGAGATTATCGCTTATAAGGCTTGGTTCTCTCAAAAAGGGCTTCCGCCTTTTATGGTGAAGTTTGAAAATGAAGTGACACTACCAGCATATATGGTAATGGTGCAATTTGAGAATCTTCAAGCTTGTGAGGTTGGGTTCAATGTTTATTTCAAGGCAGACAATCTCAAGGAGGTCAAA

SEQ ID NO: 13012 - protein, 104 aa, Streptococcus agalactiae
MKTRNRKGGYLANTANEYIDSKQAIHCLSVELEPQIRFEEGQPTGEIIAYKAWFSQKGLPPFMVKFENEVTLPAYMVMVQFENLQACEVGFNVYFKADNLKEVK

SEQ ID NO: 13013 - protein, 501 aa, Streptococcus agalactiae
ATGACCAAGAAGGAATTGTCACAGTATCTGCTTCAAAGTCTCAATATGGGACTTGGAGCTCTTATGCAAGGGGAAACAAGTTATACCAATAGTTTTGACTGCAAAATTATGGAAGAAGGATTTCTCTTTCTTCCCCGCTTACCAGCGGGATATATTATTGATGATGAACTCTATCAAAAAATATTCCTAATCGCCAATGCTTCACTCTTCCCTCGTTACACACTATTGAAACAAAATTCTGCCTATTTCATGGCACTTGATACAGAAGATATTCATGTTCAACGTGGGCTATTTTTCCCATGGAAAGAAGGCGTATCTGAACGCTTAATCATTTCTGACTTGGAAGATTTCGCAAGCTCTCAAAAGGAAACTCTGATTCCTATCATGAAAAATCTATCTCTTGATTTTAACAAGGTCAATCATATTGCCATTGCAGGAAATTCAGGATCAGGTAAATCTTATGCTCTGACCTACTTTCTGAGTCTCTTAAAAGGGATTTCT

SEQ ID NO: 13014 - protein, 167 aa, Streptococcus agalactiae
MTKKELSQYLLQSLNMGLGALMQGETSYTNSFDCKIMEEGFLFLPRLPAGYIIDDELYQKIFLIANASLFPRYTLLKQNSAYFMALDTEDIHVQRGLFFPWKEGVSERLIISDLEDFASSQKETLIPIMKNLSLDFNKVNHIAIAGNSGSGKSYALTYFLSLLKGIS

SEQ ID NO: 13015 - protein, 507 aa, Streptococcus agalactiae
GTGATTCACCCTCAAAAGAATCGCTCTAAGTCTGATTTTGTATCGGAAATCAATGAGAATCTAAGTTCGTGCTTAGAGCTTATCCAACAACGCCAAGAAATTCTCTATGAAAATCCTGACCACGAATTTGACCATCTAACCATTGTCATCGATGAAGTTTTGGCACTTTCAGAAGGAGTGAACAAAGTTATCAAAGAATCCTTTTTCTCACTACTTTCTCAAATAGCTTTACTTGGTAGAGCTACTAAAATTCACTTACTACTGGTATCACAACGATTTGACCATAACACGATTCCGATTTCCGTACGTGAACAGTTAAATGTCTTGATTCAAATTGGCAACATCAATAAAAAAACGACTCAGTTCCTCTTTCCTGACTTAGACCCTGAAGGTATTGTCATTCCAATAGGAAAAGGAACTGGCTTAATTCAAATACTTGATAACGAACATCCTTATCAAGTATTGCCACTCCTTTGTCCAACCTACTATACTAAGAAAGGTATTTTA

SEQ ID NO: 13016 - protein, 169 aa, Streptococcus agalactiae
MIHPQKNRSKSDFVSEINENLSSCLELIQQRQEILYENPDHEFDHLTIVIDEVLALSEGVNKVIKESFFSLLSQIALLGRATKIHLLLVSQRFDHNTIPISVREQLNVLIQIGNINKKTTQFLFPDLDPEGIVIPIGKGTGLIQILDNEHPYQVLPLLCPTYYTKKGIL

SEQ ID NO: 13017 - protein, 306 aa, Streptococcus agalactiae
ATGATTGAGACAATTCTTAGACAGGAAGAACATTCTGAACCTGTTATGACAATAGAAAATCAAACGGTCACTCGCTTTAATCCTATCCTAAGAAGTTTCAATCGGGTTGTTTCTAAGTGCACGGTGGATGCCCGAAAGGATTCTGTTTCTGTCTTTCTAAAAGTCCCTAAAACGCAACAGGCACAAAAACTCTTGCGAGAAATGGAAGAACATATCAAGGAAGAAATTTCGAGCCGAAATCCTAAGTATTATTTCTCTACCCCAAATCGGGAGAAAAGTAAGCTCTGGTTTACAGGTACTAAACGG

SEQ ID NO: 13018 - protein, 102 aa, Streptococcus agalactiae
MIETILRQEEHSEPVMTIENQTVTRFNPILRSFNRVVSKCTVDARKDSVSVFLKVPKTQQAQKLLREMEEHIKEEISSRNPKYYFSTPNREKSKLWFTGTKR

SEQ ID NO: 13019 - protein, 983 aa, Streptococcus agalactiae
GTGACTGTTAAAGTCGTAGATCCAAGTACAGACGCTGATAAGAACGAACCTAAGGCTAAAGACCAAACAGTTAACATTGGGGAAACACCTAAGGCAGAAGATTCAATTGAAAACTTGAAAGATTTACCAGATGGAACTAAAGTAGAGTTTGAAACACCAATTGATACCACAACAGCAGGTGACAAGCCAGGTAAAGTTGTCGTGACGTACCCAGATGGTTCAACAGATACTGTTGATGTGACTGTTAAAGTCGTAGATCCAAGTACAGACGCTGATAAGAACGAACCTAAGGCTAAAGACCAAACAGTTAACATTGGGGAAACACCTAAGGCAGAAGATTCAATTGAAAACTTGAAAGATTTACCAGATGGAACTAAATAGAGTTTGAAACACCAATTGATACCACAACAGCAGGTGACAAGCCAGGTAAAGTTGTCGTGACGTACCCAGATGGTTCAACAGATACTGTTGATGTGACTGTTAAAGTCGTAGATCCAAGTACAGACGCTGATAAGAACGAACCTAAGGTTAAAGACCAAACAGTTAACATTGGGGAAACACCTAAGGCAGAAGATTCAATTGAAAACTTGAAAGATTTACCAGATGGAACTAAAGTAGAGTTTGAAACACCAATTGATACCACAACAGCAGGTGACAAGCCAGGTAAAGTTGTCGTGACGTACCCAGATGGTTCAACAGATACTGTTGATGTGACTGTTAAAGTCGTAGATCCAAGTACAGACGCTGATAAGAACGAACCTAAGGCTAAAGACCAAACAGTTAACATTGGGGAAACACCTAAGGCAGAAGATTCAATTGAAAACTTGAAAGATTTACCAGATGGAACTAAAGTAGAGTTTGAAACACCAATTGATACCACAACAGCAGGGACAAGCCAGGTAAAGTTGTCGTGACGTACCCAGATGGGTTCACAGATACTGTGATGTGACTGTTAAAGTCGTAGATCCAGTACAGACGCTGAT

SEQ ID NO: 13020 - protein, 329 aa, Streptococcus agalactiae
  VARIANT 127, 315: Xaa = Any Amino Acid
MTVKVVDPSTDADKNEPKAKDQTVNIGETPKAEDSIENLKDLPDGTKVEFETPIDTTTAGDKPGKVVVTYPDGSTDTVDVTVKVVDPSTDADKNEPKAKDQTVNIGETPKAEDSIENLKDLPDGTKXEFETPIDTTTAGDKPGKVVVTYPDGSTDTVDVTVKVVDPSTDADKNEPKVKDQTVNIGETPKAEDSIENLKDLPDGTKVEFETPIDTTTAGDKPGKVVVTYPDGSTDTVDVTVKVVDPSTDADKNEPKAKDQTVNIGETPKAEDSIENLKDLPDGTKVEFETPIDTTTAGDKPGKVVVTYPDGFTDTXDVTVKVVDPSTDAD

SEQ ID NO: 13021 - protein, 159 aa, Streptococcus agalactiae
ATGTTTGGTAGTAAAGCAGTTCCAGGTATGGTTGATGCCATCAAGAGTGGGGCTTTATGTTTTGAAGATTTAGCAGGAACAGCTGATAAAGCAGTTGGGATTGTCACTCAGACCTATGAGGGGACGATTGATCTTATTGATCAGTTTACNNNNNTTAAT

SEQ ID NO: 13022 - protein, 53 aa, Streptococcus agalactiae
  VARIANT 51, 52: Xaa = Any Amino Acid
MFGSKAVPGMVDAIKSGALCFEDLAGTADKAVGIVTQTYEGTIDLIDQFTXXN

SEQ ID NO: 13023 - protein, 159 aa, Streptococcus agalactiae
ATGTTCAAGCATGGTGAGGAGGCGCGTGGTAGTGGTATCAAGATTATCATCGCTGGAGCAGGTGGAGCAGCCCACTTGCCGGGTATGGTAGCAGTTAAAACAACCCTGCCTGTTATCGGTGTGCCTGTCAAATCACGTGCCCTCTNNNNNTTAATTAAT

SEQ ID NO: 13024 - protein, 53 aa, Streptococcus agalactiae
  VARIANT 49, 50: Xaa = Any Amino Acid
MFKHGEEARGSGIKIIIAGAGGAAHLPGMVAVKTTLPVIGVPVKSRALXXLIN

SEQ ID NO: 13025 - protein, 1104 aa, Streptococcus agalactiae
ATGGCAAATAAAAAATATCGTGGTGTATCACGTGATAAACAAGGAAGAATATATTATCAAACGGAGTTCAAGGCTAATAATATAACTGGTAAACGCCAACGCAAAAAGAGTTATAAAGACCAATTTGGAAATCCTTTTCGTTCCGAAAAGCAAGCATATGATGAACTTTGTAGAGTGAGAGTTGAATTCCAAACGAAAGATAACAATGATGGTTATTATCTAAGTTTTTCTCAATACATGGAAGAAGTGTATCTACCTTATTACAAACAAACGGTTCAAGCGGTCACTTATCGGACTGCTCTAACTCATCACAAAATGTTTGTTGAAATCTTTGGTAGTAAAAGACTTTCTGAAATTGATGTTCGAGAGTGCGAAAAATTCAGGATATATCTGATTGAAAAGTATTCACCAAATTATGCTAAAGGTGTATGGATTCGATTTAAGCATTGTATTGGGTACGCAGAGAGGCTGGGATATATTGATGAATTCCCTTGCAAATCTCTTGATAATCCGAAAGGGAAAAGACCAGATACAAAGTTTTGGACTCTAGAAGACTTAAAAAAAGTAGTCGCTACCTTTGACCTACGGGATTATGAAGAAAGGCATAGATTTACTGCCATATGGCTCTATTTCTTTACGGGTCTTCGTGTATCAGAGGGTTTAAGTTTAATTTGGTCTGATATTGATTTCGACAAAAAGCTCTTACATGTTCAAAGTACACTTGAGTATGAAGGAAACGGAGTCTTTACTCGCAAAAATCCAACTAAGACTTCAGCTGGTATAAGGTGGATTGAGTTAGATGATGAAACTCTAAATGTTCTTCTAAGATGGCGTTCAATTCAAGTGGAAAATGGTGATGACAGTTATGTATTGGCTAGATTCGGAAAACCACTCAATAAATGCACATTAAGTAGAATTCTAAAACGCCAAGCTAAAAAAGCAGGAGTAGAAGTAATCACTGGAAAAGGGTTGCGACATTCTCACGACAGTTTTTTGATAAACGTACTAGGAAAAGATGTTCTGTATGTTTCTAAACGTTCTGGACGAGTTGATAAGGCAACTACCTTGAATACCTATTCTCATTTGTATGATAGCAAAAAAGAA

SEQ ID NO: 13026 - protein, 368 aa, Streptococcus agalactiae
MANKKYRGVSRDKQGRIYYQTEFKANNITGKRQRKKSYKDQFGNPFRSEKQAYDELCRVRVEFQTKDNNDGYYLSFSQYMEEVYLPYYKQTVQAVTYRTALTHHKMFVEIFGSKRLSEIDVRECEKFRIYLIEKYSPNYAKGVWIRFKHCIGYAERLGYIDEFPCKSLDNPKGKRPDTKFWTLEDLKKVVATFDLRDYEERHRFTAIWLYFFTGLRVSEGLSLIWSDIDFDKKLLHVQSTLEYEGNGVFTRKNPTKTSAGIRWIELDDETLNVLLRWRSIQVENGDDSYVLARFGKPLNKCTLSRILKRQAKKAGVEVITGKGLRHSHDSFLINVLGKDVLYVSKRSGRVDKATTLNTYSHLYDSKKE

SEQ ID NO: 13027 - protein, 231 aa, Streptococcus agalactiae
TTGACAAGAACAATAAATCATAAAAGATTAATGGAGCTTGGCTTTCCAGAACATACTGCAAGAAATATTATTAAACAATCAAAAGCGATAGCAGTAGCAAAGTTTGAAGAAACTAGTAATTCTACAAATAATTTGGTAAAATTGAGGAAATCGCCCTTTGAAAATTCTAGACTAGACCTTGCACCTACCTATATTGTAGAAGATTTGCTAGGCTTCGAGTTACCTTTTAAG

SEQ ID NO: 13028 - protein, 77 aa, Streptococcus agalactiae
MTRTINHKRLMELGFPEHTARNIIKQSKAIAVAKFEETSNSTNNLVKLRKSPFENSRLDLAPTYIVEDLLGFELPFK

SEQ ID NO: 13029 - protein, 621 aa, Streptococcus agalactiae
ATGGGGTTACTACGCCCCCCCATTACACCAATAATCAATAATCACGAAAGGAAGTATATGTCAAAAGACAAACGCTCGAATAAATGGGCTTTTCTGCTCTATCAGGAAAGTGTGCCTAAGAACTATTTAGAGGTGCTTGAAGAGTTACATATCCCCTTTGTTTTAAGTCCGTGGCATGATAAAGACGTAAACAAGGAAACAGGGGAATTCAAAAAAGCTCACAAACATGGGGCTCTCTTCTTTGAATCTCTCAAAAGCTATTCACAAGTCTCTGAATTATTGACGAAGCACCTAAACACACCAAGTCATGTTGAAGTTATCATGTCACCTAAAGGAATGTATGACTACTTTATTCATGCGGAGAATCCAGATAAAACACTCTATGATATCAATGACATTGAATCAGGTTGTGGATTTGAGTTAGATAAATTTCTCACCAGCAATAACAATGATAAATTTTTATCTCTGGTAATTGACATTATCGAAGAACAAAATTTCACAGAGTTTAATAATCTGGTTAGATATGCGAGAAGTGAAAATCCTCAACTGCTTGCCTTGATAATGAATAAAACCTATTTCTTTGCAAAATATCTGGATTCGAGAAGATATTCAAGGAGGAAG

SEQ ID NO: 13030 - protein, 207 aa, Streptococcus agalactiae
MGLLRPPITPIINNHERKYMSKDKRSNKWAFLLYQESVPKNYLEVLEELHIPFVLSPWHDKDVNKETGEFKKAHKHGALFFESLKSYSQVSELLTKHLNTPSHVEVIMSPKGMYDYFIHAENPDKTLYDINDIESGCGFELDKFLTSNNNDKFLSLVIDIIEEQNFTEFNNLVRYARSENPQLLALIMNKTYFFAKYLDSRRYSRRK

SEQ ID NO: 13031 - protein, 744 aa, Streptococcus agalactiae
GTGACTTACCCAGATGGTTCAAAAGATACTGTAGATGTGACTGTTAAGGTTGTCGATCCACGTACAGATGCCGATAAGAATGATCCAGCAGGTAAAGATCAGCAAGTCAAAGTAGGAGAAACACCGAAGGCAGAAGATTCTATTGGTAACTTATCAGATCTTCCGAAAGGTACAACAGTAGCCTTTGAAACTCCAGTTGATACGGCAACACCGGGAGACAAACCAGCAAAAGTTGTTGTGACTTACCCAGATGGTTCAAAAGATACTGTAGATGTGACTGTTAAGGTTGTCGATCCACGTACAGATGCCGATAAGAATGATCCAGCAGGTAAAGATCAGCAAGTCAAAGTAGGAGAAACACCGAAGGCAGAAGATTCTATTGGTAACTTACAGATCTTCCGAAAGGTACAACAGTAGCCTTTGAAACTCCAGTTGATACGGCAACACCGGGAGACAAACCAGCAAAAGTTGTTGTGACTTACCCAGATGGTTCAAAAGATACTGTAGATGTGACTGTTAAGGTTGTCGATCCACGTACAGATGCCGATAAGAATGATCCAGCAGGTAAAGATCAGCAAGTCAAAGTAGGAGAAACACCGAAGGCAGAAGATTCTATTGGTAACTTACAGATCTTCCGAAAGGTACAACAGTAGCCTTGAAACTCCAGTTGATACGGCAACACCGGGAGACAAACCAGCAAAAGTTGTTGTGACTTACCCAGATGTTCAAAAGATNNNNNTTAAT

SEQ ID NO: 13032 - protein, 249 aa, Streptococcus agalactiae
  VARIANT 131, 210, 246, 247, 248: Xaa = Any Amino Acid
MTYPDGSKDTVDVTVKVVDPRTDADKNDPAGKDQQVKVGETPKAEDSIGNLSDLPKGTTVAFETPVDTATPGDKPAKVVVTYPDGSKDTVDVTVKVVDPRTDADKNDPAGKDQQVKVGETPKAEDSIGNLXDLPKGTTVAFETPVDTATPGDKPAKVVVTYPDGSKDTVDVTVKVVDPRTDADKNDPAGKDQQVKVGETPKAEDSIGNLXDLPKGTTVAFETPVDTATPGDKPAKVVVTYPDVQKXXXN

SEQ ID NO: 13033 - protein, 528 aa, Streptococcus agalactiae
GTGACTTACCCAGATGGTTCAAAAGATACTGTAGATGTGACTGTTAAGGTTGTCGATCCACGTACAGATGCCGATAAGAATGATCCAGCAGGTAAAGATCAGCAAGTCAAAGTAGGAGAAACACCGAAGGCAGAAGATTCTATTGGTAACTTATCAGATCTTCCGAAAGGTACAACAGTAGCCTTTGAAACTCCAGTTGATACGGCAACACCGGGAGACAAACCAGCAAAAGTTGTTGTGACTTACCCAGATGGTTCAAAAGATACTGTAGATGTGACTGTTAAGGTTGTCGATCCACGTACAGATGCCGATAAGAATGATCCAGCAGGTAAAGATCAGCAAGTCAAAGTAGGAGAAACACCGAAGGCAGAAGATTCTATTGGTAACTTACCAGATCTTCCGAAAGGTACAACAGTAGCCTTTGAAACTCCAGTTGATACGGCAACACCGGGAGACAAACCAGCAAAAGTTGTTGTGACTTACCCAGATGGTTCAAAAGATACTGTAGATGTGACTGGNNNNNTTAAT

SEQ ID NO: 13034 - protein, 176 aa, Streptococcus agalactiae
  VARIANT 174, 175: Xaa = Any Amino Acid
MTYPDGSKDTVDVTVKVVDPRTDADKNDPAGKDQQVKVGETPKAEDSIGNLSDLPKGTTVAFETPVDTATPGDKPAKVVVTYPDGSKDTVDVTVKVVDPRTDADKNDPAGKDQQVKVGETPKAEDSIGNLPDLPKGTTVAFETPVDTATPGDKPAKVVVTYPDGSKDTVDVTGXXN

SEQ ID NO: 13035 - protein, 709 aa, Streptococcus agalactiae
TTGAAAGATTTACCAGATGGAACTAAAGTAGAGTTTGAAACACCAATTGATACCACAACAGCAGGTGACAAGCCAGGTAAAGTTGTCGTGACGTACCCAGATGGTTCAACAGATACTGTTGATGTGACTGTTAAAGTCGTAGATCCAAGTACAGACGCTGATAAGAACGAACCTAAGGTTAAAGACCAAACAGTTAACATTGGGGAAACACCTAAGGCAGAAGATTCAATTGAAAACTTGAAAGATTTACCAGATGGAACTAAAGTAGAGTTTGAAACACCAATTGATACCACAACAGCAGGTGACAAGCCAGGTAAAGTTGTCGTGACGTACCCAGATGGTTCAACAGATACTGTTGATGTGACTGTTAAAGTCGTAGATCCAAGTACAGACGCTGATAAGAACGAACCTAAGGCTAAAGACCAAACAGTTAACATTGGGGAAACACCTAAGGCAGAAGATTCAATTGAAAACTTGAAAGATTTACCAGATGGAACTAAAGTAGAGTTTGAAACACCAATTGATACCACAACAGCAGGTGACAAGCCAGGTAAAGTTGTCGTGACGTACCCAGATGGTTCAACAGATACTGTTGATGTGACTGTTAAAGTCGTAGATCCAAGTACAGACGCTGATAAGAACGAACCTAAGGTTAAAGACCAAACAGTTAACATTGGGGAAACACCTAAGGCAGAAGATTCAATGAAAA

SEQ ID NO: 13036 - protein, 237 aa, Streptococcus agalactiae
MKDLPDGTKVEFETPIDTTTAGDKPGKVVVTYPDGSTDTVDVTVKVVDPSTDADKNEPKVKDQTVNIGETPKAEDSIENLKDLPDGTKVEFETPIDTTTAGDKPGKVVVTYPDGSTDTVDVTVKVVDPSTDADKNEPKAKDQTVNIGETPKAEDSIENLKDLPDGTKVEFETPIDTTTAGDKPGKVVVTYPDGSTDTVDVTVKVVDPSTDADKNEPKVKDQTVNIGETPKAEDSIEN

SEQ ID NO: 13037 - protein, 120 aa, Streptococcus agalactiae
TTGACCCATCTCATCGGTGGAATGGGGGTTTTAGTACCTGCCCTCCCCATCATGGAAAATTCTAAAAATAGCCATTTAGAGGTTATGAGAGCTGAAGTTCCTGGACNNNNNTTAATTAAT

SEQ ID NO: 13038 - protein, 40 aa, Streptococcus agalactiae
  VARIANT 36, 37: Xaa = Any Amino Acid
MTHLIGGMGVLVPALPIMENSKNSHLEVMRAEVPGXXLIN

SEQ ID NO: 13039 - protein, 401 aa, Streptococcus agalactiae
ATGATACCTAAAGTTATACATTATTGTTGGTTTGGAGGAAATCCCTTACCAGATAATTTAAAGAAATATATAAAAACTTGGAGAGAACAATGTCCGGATTATGAAATTATTGAATGGAATGAGCATAATTATGATGTTAGTAAAAATGTTTTTATGAGAGAAGCATATACTAAGAAGAATTTTGCTTATGTTTCTGACTATGCAAGATTGGATATTATTTATACTTATGGGGGGTTCTATCTAGATACTGATGTGGAGCTTTTAAAAAGTTTAGATCCTTTGAGGATTCATGAGTGTTTTCTAGCAAGGGAGATTAGTTGTGATGTGAATACAGGATTAATAATTGGCGCTGTTAAAGGACATCACTTTTTAAAATCAAATATGTCTATATATGACAAAAG

SEQ ID NO: 13040 - protein, 134 aa, Streptococcus agalactiae
  VARIANT 134: Xaa = Any Amino Acid
MIPKVIHYCWFGGNPLPDNLKKYIKTWREQCPDYEIIEWNEHNYDVSKNVFMREAYTKKNFAYVSDYARLDIIYTYGGFYLDTDVELLKSLDPLRIHECFLAREISCDVNTGLIIGAVKGHHFLKSNMSIYDKX

SEQ ID NO: 13041 - protein, 297 aa, Streptococcus agalactiae
ATGAGTCGCAGAAACATCGGACAAGCTGCTAAAATCTTGGCAGACAGTGGTTATCAAGGGATCATGAAGATGTATTCACAAGCGCAAACTCCGAGGAAATCAAGCAAACTTAAGCCACTAACTCTTGAAGATAAAACCTATAACCATACGCTATCCAAAGAGAGAATCAAGGTTGAGAATATTTTTGCCAAAGTAAAAACGTTTAAAATATTTTCAACAACCTATCGAAATCGACGCAAACGGTTTGGATTACGAATGAATTTGATTGCTGGAATGATCAACCGTGAACTAGGATTT

SEQ ID NO: 13042 - protein, 99 aa, Streptococcus agalactiae
MSRRNIGQAAKILADSGYQGIMKMYSQAQTPRKSSKLKPLTLEDKTYNHTLSKERIKVENIFAKVKTFKIFSTTYRNRRKRFGLRMNLIAGMINRELGF

SEQ ID NO: 13043 - protein, 1224 aa, Streptococcus agalactiae
ATGGCAAAAACACGTTATAGTGGTGTGTTTATAGACACGAAAGGAAAATATTTCTATGAAACAGAGCTAGGAATTGACAAAATCAGCGGTAAGCGAATTCGTAAGAAAAGCAGAAAAGATAGCAATGGGAAACCTTTTTCTACTGCCAGAGAAGCCTATTTAGAGCTTACTAGAATAAAACGAGAATATCATAAGGCTCACGCCTACGCTAACTACAATATGAACGTAAAGCAATTTATTTTAGATTGTTATATTCCATATTATAAATCGTATGTAGAAGAAAGCACCTATGCTGTTAGAATCAAAAACCTTGAAAAAATTGCAGAACGCTTTGAAAATAGGACGTTACGTAATTTAACTATTGAAGATATTCAGAATTATAGAATATGGTTACTATCAAGGAAGGAAGAAAACGGCTCTGGTTATTCTCAAGCCTATGCTAGTCTTATCTTTGGTATGTTTAGAAAATCCCTAGATTATGCTGTAGAAATGGGGTATTTGGAAAATAATATTTCTAAAAAGGCTAAAGCTATTCCAAAAGGAAAAGCTATCGTTCCCTACTGGACTAAAGTCGAATTTGAGCGTGTCATTGCTCAAATCTGTATTGATGATTTTTACGAACATCTGAATTTCGTTATGCTCTGGACTTATTTTACAACAGGCATACGCATCAACGAAGGCATGGGGCTGTTCTGGAACGATATTGACTTCGCTAAGAAACGAATGCGTGTACATCATATGCTTATTCTAAAATCAAGGAAAAACTGGCAAAGAAACGCCTACACTAAAACAAGTGATGGCAAACGAATTATTTCCCTAGATGATGATACTATTGCTATTCTAAAGCATTGGAAGAAAAGACAAAAAGAAATCGGCTTAGGTAATGAAACTGATTTTGTCTTTACCTATGATAGCTTTCCGATGATAAAATCTACACTAGCTAGAATTATTAAACGATACTCTGAACTTGCTGGCGTAAAGCGAATACAAGGTAAAGGGCTTCGCCATAGTAACGCTTCTTATTTGATAAACGAATTTAATGTATCTGTCTTGATTTTATCGAAAAGGTTAGGTCATTCTAGCCCAGAAATTACTTTGAAACATTACTCACACCTTTGGAGTGGAGCTGATGAATCTATTGCTGAAATAATGAGTGGGAATATATCCATACATACGGCTCCAAAAACAAAAATTCAATTTAACGGGAATCAAAACCTAAAAAGA

SEQ ID NO: 13044 - protein, 408 aa, Streptococcus agalactiae
MAKTRYSGVFIDTKGKYFYETELGIDKISGKRIRKKSRKDSNGKPFSTAREAYLELTRIKREYHKAHAYANYNMNVKQFILDCYIPYYKSYVEESTYAVRIKNLEKIAERFENRTLRNLTIEDIQNYRIWLLSRKEENGSGYSQAYASLIFGMFRKSLDYAVEMGYLENNISKKAKAIPKGKAIVPYWTKVEFERVIAQICIDDFYEHLNFVMLWTYFTTGIRINEGMGLFWNDIDFAKKRMRVHHMLILKSRKNWQRNAYTKTSDGKRIISLDDDTIAILKHWKKRQKEIGLGNETDFVFTYDSFPMIKSTLARIIKRYSELAGVKRIQGKGLRHSNASYLINEFNVSVLILSKRLGHSSPEITLKHYSHLWSGADESIAEIMSGNISIHTAPKTKIQFNGNQNLKR

SEQ ID NO: 13045 - protein, 816 aa, Streptococcus agalactiae
ATGACAAGAGAAGTATATAACACAAAAATAGTTCAATATAGCTCGAATACTTTTGAAATAATTCATTATAGAAATCCCAAGATTAGACGATTAGGAGAAAATGGTATTAAAGATACTACTCCTTCTTGCAAAAAGCCAAGCTATGATGAGTTATATCAACAATCTCATCGAATCAAAAGACGAATCCGTCACTATCTATTATGTAATGATTTCGATTTATTTTGGACATTAACTTTTGACGATGCGAAAATCAATTCTCATGATTATTTAATAGTAAAAAAGAAAATACGTACTTGGCTCAAAGCTCAGCGTGAAAAATATGGAAAATTTCGTTACATTTTCATACCAGAATTACACAAGAATGGACGGCTTCATTTTCATGGAGTAACAGGCGGTTTTAGTCCAAAATTAACAAAAGCAAGAAATACTAAAACTGGTCGATTGATAAAAAAGAATGGCAAGCAAGTCTATAATGTTGATTCGTATCAATTAGGATTTAGTACCGTTACAAAAATCGATTCTTCTAAAAAAGTTGCTAACTACATTACAAAATATATCACAAAAGATTTACTAGCTATTCCAAGTGGATATAAACAGCCAAAATATTTTTCATCTCGTGGTTTAATAAAACCGATAGTAAGTTATGAAAATCTAGAAAGAAACTATTTTGAGGGATTAACCCCTAGTTTTTCCTTAGGTCATTTAGATAATCTTGAATATAAAGAAGATATTGCTATTTACAACCTATCAATAGATGAGAATGGAGATATTACCGCAAATTCAACTGGCACAAAAATAAGAATAAGAAAGGAACTG

SEQ ID NO: 13046 - protein, 272 aa, Streptococcus agalactiae
MTREVYNTKIVQYSSNTFEIIHYRNPKIRRLGENGIKDTTPSCKKPSYDELYQQSHRIKRRIRHYLLCNDFDLFWTLTFDDAKINSHDYLIVKKKIRTWLKAQREKYGKFRYIFIPELHKNGRLHFHGVTGGFSPKLTKARNTKTGRLIKKNGKQVYNVDSYQLGFSTVTKIDSSKKVANYITKYITKDLLAIPSGYKQPKYFSSRGLIKPIVSYENLERNYFEGLTPSFSLGHLDNLEYKEDIAIYNLSIDENGDITANSTGTKIRIRKEL

SEQ ID NO: 13047 - protein, 1407 aa, Streptococcus agalactiae
ATGATACTAAATAAAATAAAACGAAATTTTAGTAGATATGATTTTCGTGAGGATTCCCCTACTTATTTATCTATATCAGAAACCATAGAAGTTCGTAAAGGAAAGCAATCTGCTATTCTCAAGAAACTATTTAAGGTTCTCCTACTATCTCTTCCTATTACCTTTCTTTCATCAATGTTGCCTATATTAAACGTTGTTTACAAGATAGGTATTATTGTATCTTCTGCTCTTGTCGCTCTTTTTATCGGTCATATTGGTATGAGACTCTTATTTTCAGTTTATTCTCCTATCTGGAAATACAGATTTTTAAGCATTCTTGAGCTTGCAACAGAACGACTAGATTTAATACAACTCCCTTCTAATAAAACCCAGATAAAAACAGTTGAATGGAAATTTTATAAAGAAGCTGACAGGATTGTAATTAAGCTCAATCCGTCTGGGACTATACCTAGTATTCAGCAAGTAAAAGAAATATCTAGAAGGTTGACCGAATTTCTTATCCAGGCTACCCACGAAGAATGGAATCTTTTGGAATCCACTATAGATAGTAATATTGTTGTCCTTAAATACGGCGAAAATCCAATAAGATATTCCGTAAGTGAATTGTTTGAGATTACTGATGATGATTACTGTGTAAATCACAATCCAATAAAACTTTATGACAATATTTTCTTCGATATAGCTAGTGAGGCTAGTCATCAGATTATAATAGCCCCTAGTGGAGCTGGAAAATCACTTTACTTAGCCACACTAGCTGGCTTATTAATCAAACAAGGGCACTCTGTAAGTTTAATTGATGCAAAACAAACCTCTTTAGGTGCTACTTTTGAAAATCTAGGTATTCCTGTCGCACGCAATGCAGAAGAGATTGTTCTACTTCTAGAACAAATGGTATTTGAAATGGAAGATATATATAAACGCTACTTCTCCTTTTCTTCAGTTGATTTTTCAACTACATATAAAGATTTCTCTCTACCAGCCCATTATCTTATATTTGATGAGGTACTGGCAGCATTAGAATCTGGAACTCCAGCTCAACAAAAGGAAATGGTTAGATTATTAAAAATACTCGCCTTAAAATCAAGAGCTTCTGGAAGAGGATTGCTTATTCTAGCAAGCCAAAAACTCCTCGCCTCTGATTTACCTAGGGCAATCACCGAACAATGTCAAACTAGAATAATACTTGCAAGCGACGCTAGTATATCCGAGGAAACTTTTTATAGTATCATGGGCAAAGAGAAAAAAGACCTTTTGGTTGATTACAGAGGAGGAGTTGGAAAAGGATATATTCTAACTCCGAAAACAAACGGAATAAAATATTTTGAGACTCCATATTTTGATTTGAATTCAAGAGATTTCAAAGATAAAATAAGAGACTTTCAAACTATTCCAAGAAAGCAGATAGAA

SEQ ID NO: 13048 - protein, 469 aa, Streptococcus agalactiae
MILNKIKRNFSRYDFREDSPTYLSISETIEVRKGKQSAILKKLFKVLLLSLPITFLSSMLPILNVVYKIGIIVSSALVALFIGHIGMRLLFSVYSPIWKYRFLSILELATERLDLIQLPSNKTQIKTVEWKFYKEADRIVIKLNPSGTIPSIQQVKEISRRLTEFLIQATHEEWNLLESTIDSNIVVLKYGENPIRYSVSELFEITDDDYCVNHNPIKLYDNIFFDIASEASHQIIIAPSGAGKSLYLATLAGLLIKQGHSVSLIDAKQTSLGATFENLGIPVARNAEEIVLLLEQMVFEMEDIYKRYFSFSSVDFSTTYKDFSLPAHYLIFDEVLAALESGTPAQQKEMVRLLKILALKSRASGRGLLILASQKLLASDLPRAITEQCQTRIILASDASISEETFYSIMGKEKKDLLVDYRGGVGKGYILTPKTNGIKYFETPYFDLNSRDFKDKIRDFQTIPRKQIE

SEQ ID NO: 13049 - protein, 435 aa, Streptococcus agalactiae
ATGTCTATAAATATTGAAAATGTGAGTTTCAGCTCACCTAGCTTAAAAAATCTACTTATTGGAACTTCTAATGTCGAACATATTCCTACTACTGCTTTTGTTATTGAATGCAGAGATATTCCTAAGCGTAATGAAAAAAATGAAGTCATTGATGGAACCATAAGTAAAAAAGTTTTATCTGCTCTCCAGCCAGAAATTGTAAAAGCTATTCAAGAAGTAGGAGGAGATTTAAGCACTATAAAACCCTTTACGATTGAAGTACAAAACGATGAAGCATCTTTAAAGAAACTCAATAACGAAGCTATTATAGCTAAAACCATCGACTTAGATGAAGCACTTTTAGCATTGAAATGGGTGTCTGATGGTCGGAATAGCGGTGCTTACAGAGAATTCAAACTCATAATTTCAGAAGTAAAGTTATTGGGCGGTAAATCA

SEQ ID NO: 13050 - protein, 145 aa, Streptococcus agalactiae
MSINIENVSFSSPSLKNLLIGTSNVEHIPTTAFVIECRDIPKRNEKNEVIDGTISKKVLSALQPEIVKAIQEVGGDLSTIKPFTIEVQNDEASLKKLNNEAIIAKTIDLDEALLALKWVSDGRNSGAYREFKLIISEVKLLGGKS

SEQ ID NO: 13051 - protein, 657 aa, Streptococcus agalactiae
ATGCCAATAACAAAATTTAAAAACTCGTGTCATATAATTTTTAAAAACTGTTCAGAACGAATTCAAAAAGTGTATGAAGATTATGGCTATCAATCTAATATATCTTTTTATCCAAATGATGAGAAACTAATAGGAAATATTTTAAGTTATTCTAGTCTAGACAAATTACGTGCAGAATATTTGATAACTCCCGGTGTGATAAATTTTCTAGTCAAACAAGAGCATTATTTTCATGATGAAAACGAATTACTTTGGGGTGACAATATAGATGATTATTTAGAAGATTTTTTTATCGCAATGATACTTGATATTCAGAAATACCGGAATATGCCAGCATCTATTGAATTTATCTTTACTAGATACAAATTCTATCAAAGAGTATTTTCAAGTAATTTTTCTTTTGGTAGTTCCAATTATGATGAACTGAAAGATAAATTTATTGATTTTACATACAATCAATTTGATACAATAGAAATTTTAGAGGAAGATTCAATATTTTCATTTATAGAAAAAGATTCTGTTCTTCTATCTTCGAAAAACAAAGATACTTTTCTTACTTTCAAGTATCTTCCTGATAAGTTAGAGTTGCTAGCAAAGTATGTTTTATTACCAATAATAGATAAAATAACACTTGAAAATTTGATAAACAAAAATGAT

SEQ ID NO: 13052 - protein, 220 aa, Streptococcus agalactiae
  VARIANT 105, 112: Xaa = Any Amino Acid
MPITKFKNSCHIIFKNCSERIQKVYEDYGYQSNISFYPNDEKLIGNILSYSSLDKLRAEYLITPGVINFLVKQEHYFHDENELLWGDNIDDYLEDFFIAMILDIXEIPEYAXHLLNLSLLDTNSIKEYFQVNFSFGSSNYDELKDKFIDFTYNQFDTIEILEEDSIFSFIEKDSVLLSSKNKDTFLTFKYLPDKLELLAKYVLLPIIDKITLENLINKND

SEQ ID NO: 13053 - protein, 108 aa, Streptococcus agalactiae
ATGGCAAATAAAAAATATCGTGGTGTATCACGTGATAAACAAGGAAGAATATATTATCAAACGGAGTTCAAGGCTAATAATATAACTGGTAAACNNNNNTTAATTAAT

SEQ ID NO: 13054 - protein, 36 aa, Streptococcus agalactiae
  VARIANT 32, 33: Xaa = Any Amino Acid
MANKKYRGVSRDKQGRIYYQTEFKANNITGKXXLIN

SEQ ID NO: 13055 - protein, 231 aa, Streptococcus agalactiae; identical to SEQ ID NO: 13027

SEQ ID NO: 13056 - protein, 77 aa, Streptococcus agalactiae; identical to SEQ ID NO: 13028

SEQ ID NO: 13057 - protein, 290 aa, Streptococcus agalactiae
GTGTCACTGACAGCGATGGGAGAAGCGATTAGTGAGTTAAAATCAGGCAAGGTAGAAGCCGTTGTTTAGAAAAACCCGTAGCTGAAGGTTACTTGGCCCAGAATCCAGACCTTGTTCTTGCTAAGTTTGCCCTTAAAACAGGAGAAGGGGATGCTAAGGCTGTAGCTCTACCTAAAGACAGTGGAAAAATGTTGAAGACTGTTAACAAAGTGATAAAGAGACTTGAAAAAGAAGATAAATATAAAGTTTATATTTCAGATGCGGCTAAATTAACTGGCAATCAAGTTGAA

SEQ ID NO: 13058 - protein, 97 aa, Streptococcus agalactiae
  VARIANT 22: Xaa = Any Amino Acid
MSLTAMGEAISELKSGKVEAVXLEKPVAEGYLAQNPDLVLAKFALKTGEGDAKAVALPKDSGKMLKTVNKVIKRLEKEDKYKVYISDAAKLTGNQVE

SEQ ID NO: 13059 - protein, 452 aa, Streptococcus agalactiae
TTGACTAAGAATAATAGCATAAAGGCAGAGGAATATATGGTTCAGGGTTCAATTAATATTGAAAAATATAAAGATTTGGCGCTCCAAAAACAAAGCGAGCATCGTAAATTTTTAGCAAGTTTAAAAAAGAAAGCTCCTAAAAACTTAGATAGAATAGTCCAACAAATACATCAAGAGGTTTTTCAAGAAATTGATTGTACAGCATGTGCTAATTGTTGTAAAACTTTGGGTCCTCTATTTACAGAAGCTGATATTTCTAGGATTTCTAAACATTTCCGGATGAAGTTATCGGCTTTTGAAGATTTATTTTTAGGAGTAGATGAAGATGGAGATAAAGTATTTAAAGCAATGCCTTGTCCGTTTTTAGGCGAGGTACTTATGTAGTATATACGATGTCAGACCTAAAGCTTGTCGTGAATTCCACATACTGATCGTAAGAATCTATCAAATTA

SEQ ID NO: 13060 - protein, 152 aa, Streptococcus agalactiae
  VARIANT 152: Xaa = Any Amino Acid
MTKNNSIKAEEYMVQGSINIEKYKDLALQKQSEHRKFLASLKKKAPKNLDRIVQQIHQEVFQEIDCTACANCCKTLGPLFTEADISRISKHFRMKLSAFEDLFLGVDEDGDKVFKAMPCPFLGEDNLCSIYDVRPKACREFHILIVRNLSNX

SEQ ID NO: 13061 - protein, 486 aa, Streptococcus agalactiae
GTGACTTACCCAGATGGTTCAAAAGATACTGTAGATGTGACTGTTAAGGTTGTCGATCCACGTACAGATGCCGATAAGAATGATCCAGCAGGTAAAGATCAGCAAGTCAAAGTAGGAGAAACACCGAAGGCAGAAGATTCTATTGGTAACTTATCAGATCTTCCGAAAGGTACAACAGTAGCCTTTGAAACTCCAGTTGATACGGCAACACCGGGAGACAAACCAGCAAAAGTTGTTGTGACTTACCCAGATGGTTCAAAAGATACTGTAGATGTGACTGTTAAGGTTGTCGATCCACGTACAGATGCCGATAAGAATGATCCAGCAGGTAAAGATCAGCAAGTCAAAGTAGGAGAAACACCGAAGGCAGAAGATTCTATTGGTAACTTACCAGATCTTCCGAAAGGTACAACAGTAGCCTTTGAAAATCCAGTTGATACGGCAACACCGGGAGACAAACCAGCAAAAGAGGGTGTGACTTACCCA

SEQ ID NO: 13062 - protein, 162 aa, Streptococcus agalactiae
MTYPDGSKDTVDVTVKVVDPRTDADKNDPAGKDQQVKVGETPKAEDSIGNLSDLPKGTTVAFETPVDTATPGDKPAKVVVTYPDGSKDTVDVTVKVVDPRTDADKNDPAGKDQQVKVGETPKAEDSIGNLPDLPKGTTVAFENPVDTATPGDKPAKEGVTYP

SEQ ID NO: 13063 - protein, 567 aa, Streptococcus agalactiae
TTGAAAGATTTACCAGATGGAACTAAAGTAGAGTTTGAAACACCAATTGATACCACAACAGCAGGTGACAAGCCAGGTAAAGTTGTCGTGACGTACCCAGATGGTTCAACAGATACTGTTGATGTGACTGTTAAAGTCGTAGATCCAAGTACAGACGCTGATAAGAACGAACCTAAGGCTAAAGACCAAACAGTTAACATTGGGGAAACACCTAAGGCAGAAGATTCAATTGAAAACTTGAAAGATTTACCAGATGGAACTAAAGTAGAGTTTGAAACACCAATTGATACCACAACAGCAGGTGACAAGCCAGGTAAAGTTGTCGTGACGTACCCAGATGGTTCAACAGATACTGTTGATGTGACTGTTAAAGTCGTAGATCCAAGTACAGACGCTGATAAGAACGAACCTAAGGTTAAAGACCAAACAGTTAACATTGGGGAAACACCTAAGGCAGAAGATTCAATTGAAAACTTGAAAGATTTACCAGATGGAACTAAAGTAGAGTTTGAAACACCAATTGATACCACAACAGCAGGTGACAAGCCAGGTAAAGTTGTCNNNNNT

SEQ ID NO: 13064 - protein, 189 aa, Streptococcus agalactiae
  VARIANT 188, 189: Xaa = Any Amino Acid
MKDLPDGTKVEFETPIDTTTAGDKPGKVVVTYPDGSTDTVDVTVKVVDPSTDADKNEPKAKDQTVNIGETPKAEDSIENLKDLPDGTKVEFETPIDTTTAGDKPGKVVVTYPDGSTDTVDVTVKVVDPSTDADKNEPKVKDQTVNIGETPKAEDSIENLKDLPDGTKVEFETPIDTTTAGDKPGKVVXX

SEQ ID NO: 13065 - protein, 126 aa, Streptococcus agalactiae
TTGTCACGTGCTATTGTTTTTGCTTGTGGCAACGGTGCTTTTGCTCCGCGTTTACTAGGTTTGGAAAATGAAGAAAATTATGCAGATAATAATTTATTCTATAACGTTACAAAGTTAGAANNNNNT

SEQ ID NO: 13066 - protein, 42 aa, Streptococcus agalactiae
  VARIANT 41, 42: Xaa = Any Amino Acid
MSRAIVFACGNGAFAPRLLGLENEENYADNNLFYNVTKLEXX

SEQ ID NO: 13067 - protein, 300 aa, Streptococcus agalactiae
GTGACTGTTAAAGTCGTAGATCCAAGTACAGACGCTGATAAGAACGAACCTAAGGTTAAAGACCAAACAGTTAACATTGGGGAAACACCTAAGGCAGAAGATTCAATTGAAAACTTGAAAGATTTACCAGATGGAACTAAAGTAGAGTTTGAAACACCAATTGATACCACAACAGCAGGTGACAAGCCAGGTAAAGTTGTCGTGACGTACCCAGATGGTTCAACAGATACTGTTGATGTGACTGTTAAAGTCGTAGATCCAAGTACAGACGCTGATAAGAACGAACNNNNNTTAATTAAT

SEQ ID NO: 13068 - protein, 100 aa, Streptococcus agalactiae
  VARIANT 96, 97: Xaa = Any Amino Acid
MTVKVVDPSTDADKNEPKVKDQTVNIGETPKAEDSIENLKDLPDGTKVEFETPIDTTTAGDKPGKVVVTYPDGSTDTVDVTVKVVDPSTDADKNEXXLIN

SEQ ID NO: 13069 - protein, 512 aa, Streptococcus agalactiae
GTGAAGATCATAGCTAAAAAAGATCTATTCATTAACGATGAAATTCGCGTTCGTGAAGTTCGTCTGGTTGGTCTCGAGGGTGAACAATTAGGTATTAAACCATTGTCTGAAGCTCAAGCAATTGCAGATGATGCTAATGTTGATTTGGTTTTAATTCAGCCACAAGCTACACCACCTGTTGCGAAAATTATGGACTATGGTAAGTTCAAATTTGAGTATCAAAAGAAACAAAAAGAACAACGTAAAAAACAAAGCGTTGTTACTGTTAAGGAAGTTCGTCTTAGCCCAGTTATTGATAAAGGGGATTTTGAAACAAAACTTCGTAACGGTCGTAAGTTCCTTGAAAAAGGTAACAAAGTTAAAGTTTCTATCCGATTCAAAGGACGTATGATTACTCATAAAGAAATTGGAGCAAAGGTATTGGCGGAATTTGCTGAAGCGACACAAGATATCCTATTATTGAGCAAAGAGCTAAGATGGATGGTCGCCCAAATGTTTATGCNNNNNTTAAT

SEQ ID NO: 13070 - protein, 171 aa, Streptococcus agalactiae
  VARIANT 152, 169, 170: Xaa = Any Amino Acid
MKIIAKKDLFINDEIRVREVRLVGLEGEQLGIKPLSEAQAIADDANVDLVLIQPQATPPVAKIMDYGKFKFEYQKKQKEQRKKQSVVTVKEVRLSPVIDKGDFETKLRNGRKFLEKGNKVKVSIRFKGRMITHKEIGAKVLAEFAEATQDIXIIEQRAKMDGRPNVYAXXN

SEQ ID NO: 13071 - protein, 114 aa, Streptococcus agalactiae
GTGACTTACCCAGATGGTTCAAAAGATACTGTATATGTGACTGTTAAGGTTGTCGATCCACGTACAGATGCCGATAAGAATGATCCAGCAGGTAAAGATCAGCAAGTCAAAGTA

SEQ ID NO: 13072 - protein, 38 aa, Streptococcus agalactiae
MTYPDGSKDTVYVTVKVVDPRTDADKNDPAGKDQQVKV

SEQ ID NO: 13073 - protein, 93 aa, Streptococcus agalactiae
GTGACTTACCCAGATGGTTCAAAAGATACTGTAGATGTGACTGTTAAGGTTGTCGATCCACGTACTGATGCCGATAAGAATGATCCANNNNNT

SEQ ID NO: 13074 - protein, 31 aa, Streptococcus agalactiae
  VARIANT 30, 31: Xaa = Any Amino Acid
MTYPDGSKDTVDVTVKVVDPRTDADKNDPXX

SEQ ID NO: 13075 - protein, 93 aa, Streptococcus agalactiae
ATGGAAAAACGTGTTTTAATTGCTAATGGTGCATCAGCATGTCTTTCAGCAGCCTTCTATGCTCCTATTGCAGGCCTTTTATTNNNNNTTAAT

SEQ ID NO: 13076 - protein, 31 aa, Streptococcus agalactiae
  VARIANT 28, 29, 30: Xaa = Any Amino Acid
MEKRVLIANGASACLSAAFYAPIAGLLXXXN

SEQ ID NO: 13077 - protein, 141 aa, Streptococcus agalactiae
GTGACTGTTAAGGTTGTCGATCCACGTACAGATGCCGATAAGAATGATCCAGCAGGTAAAGATCAGCAAGTCAAAGTAGGAGAAACACCGAAGGCAGAAGATTCTATTGGTAACTTACCAGATCTTCNNNNNTTAATTAAT

SEQ ID NO: 13078 - protein, 47 aa, Streptococcus agalactiae
  VARIANT 43, 44: Xaa = Any Amino Acid
MTVKVVDPRTDADKNDPAGKDQQVKVGETPKAEDSIGNLPDLXXLIN

SEQ ID NO: 13079 - protein, 465 aa, Streptococcus agalactiae
TTGAAAGATTTACCAGATGGAACTAAAGTAGAGTTTGAAACACCAATTGATACCACAACAGCAGGTGACAAGCCAGGTAAAGTTGTCGTGACGTACCCAGATGGTTCAACAGATACTGTTGATGTGACTGTTAAAGTCGTAGATCCAAGTACAGACGCTGATAAGAACGAACCTAAGGCTAAAGACCAAACAGTTAACATTGGGGAAACACCTAAGGCAGAAGATTCAATTGAAAACTTGAAAGATTTACCAGATGGAACTAAAGTAGAGTTTGAAACACCAATTGATACCACAACAGCAGGTGACAAGCCAGGTAAAGTTGTCGTGACGTACCCAGATGGTTCAACAGATACTGTTGATGTGACTGTTAAAGTCGTAGATCCAAGTACAGACGCTGATAAGAACGAACCTAAGGTTAAAGACCAAACAGTTAACATTGGGGAAACACCTAAGGCAGAANNNNNT

SEQ ID NO: 13080 - protein, 155 aa, Streptococcus agalactiae
  VARIANT 154, 155: Xaa = Any Amino Acid
MKDLPDGTKVEFETPIDTTTAGDKPGKVVVTYPDGSTDTVDVTVKVVDPSTDADKNEPKAKDQTVNIGETPKAEDSIENLKDLPDGTKVEFETPIDTTTAGDKPGKVVVTYPDGSTDTVDVTVKVVDPSTDADKNEPKVKDQTVNIGETPKAEXX

SEQ ID NO: 13081 - protein, 105 aa, Streptococcus agalactiae
TTGCATGCCCTTTTTGGTGATAAATCACGTGAAGTTCGTGATACTTCACTACGTGTCCCTCACGGTGGCGATGGAGTAGTTCGTGACGTTAAATTCTTTNNNNNT

SEQ ID NO: 13082 - protein, 35 aa, Streptococcus agalactiae
  VARIANT 34, 35: Xaa = Any Amino Acid
MHALFGDKSREVRDTSLRVPHGGDGVVRDVKFFXX

SEQ ID NO: 13083 - protein, 420 aa, Streptococcus agalactiae
GTGACTTACCCAGATGGTTCAAAAGATACTGTAGATGTGACTGTTAAGGTTGTCGATCCACGTACAGATGCCGATAAGAATGATCCAGCAGGTAAAGATCAGCAAGTCAAAGTAGGAGAAACACCGAAGGCAGAAGATTCTATTGGTAACTTACCAGATCTTCCGAAAGGTACAACAGTAGCCTTTGAAACTCCAGTTGATACGGCAACACCGGGAGACAAACCAGCAAAAGTTGTTGTGACTTACCCAGATGGTTCAAAAGATACTGTAGATGTGACTGTTAAGGTTGTCGATCCACGTACAGATGCCGATAAGAATGATCCAGCAGGTAAAGATCAGCAAGTCAAAGTAGGAGAAACACCGAAGGCAGAAGATTCTATTGGTAAAAAACCAGATCTTCCGAAAGNNNNNTTAATTAAT

SEQ ID NO: 13084 - protein, 140 aa, Streptococcus agalactiae
  VARIANT 136, 137: Xaa = Any Amino Acid
MTYPDGSKDTVDVTVKVVDPRTDADKNDPAGKDQQVKVGETPKAEDSIGNLPDLPKGTTVAFETPVDTATPGDKPAKVVVTYPDGSKDTVDVTVKVVDPRTDADKNDPAGKDQQVKVGETPKAEDSIGKKPDLPKXXLIN

SEQ ID NO: 13085 - protein, 303 aa, Streptococcus agalactiae
GTGACTTACCCAGATGGTTCAAAAGATACTGTAGATGTGACTGTTAAGGTTGTCGATCCACGTACAGATGCCGATAAGAATGATCCAGCAGGTAAAGATCAGCAAGTCAAAGTAGGAGAAACACCGAAGGCAGAAGATTCTATTGGTAACTTATCAGATCTTCCGAAAGGTACAACAGTAGCCTTTGAAACTCCAGTTGATACGGCAACACCGGGAGACAAACCAGCAAAAGTTGTTGTGACTTACCCAGATGGTTCAAAAGATACTGTAGATGTGACTGTTAAGGTTGTCGATCCANNNNNT

SEQ ID NO: 13086 - protein, 101 aa, Streptococcus agalactiae
  VARIANT 100, 101: Xaa = Any Amino Acid
MTYPDGSKDTVDVTVKVVDPRTDADKNDPAGKDQQVKVGETPKAEDSIGNLSDLPKGTTVAFETPVDTATPGDKPAKVVVTYPDGSKDTVDVTVKVVDPXX

SEQ ID NO: 13087 - protein, 570 aa, Streptococcus agalactiae
ATGCCTGATGCTCCATCGATCCCACCCAACTGGAGGGGGTTTGAAACGCTGCTCGTTCTTTTGGCAACTCCGCTTGCGTCGCTTCGTCGATACATGCATGTGGCGCGCTGTATTATCGAGTCTCAGTCCCTCCCCATTCCCGTGCGTCAACGTCTGCAGGTAGACTTTGTTGACTTGTTGGTGCTTCGTCTAGCCGAAGAGCACAGCATTGTTTTTGACGAGTTGGCGAAGCAAGACATTTCTCACATCATGGCGCTCATTGACGAGGTGTCACCCCCGGCACCATCGGAAGCACACAAAAAGAAATTTCCCCGTATTCGTTTGGACGAGGACGGTAGCCGCACACTTGTGCATTACGGTCGTCTTATTAAGCGATTCCGTCGTGGTCGCCATGAACGACTGGTGTTCCTCTTTAGTGACTGGCTCTGTTATGTGGAGGAGCAGACGAACGGACGCATGCGGCTGCGTGCGTCCATCTCTCTTGAGTCGCTGCGGGTTGTCGAGCTTGACGACACAGCGGAAGTTGTGAATGGCTTTGATATTGTGACAAAAGATATGCGNNNNNTTAAT

SEQ ID NO: 13088 - protein, 190 aa, Streptococcus agalactiae
  VARIANT 188, 189: Xaa = Any Amino Acid
MPDAPSIPPNWRGFETLLVLLATPLASLRRYMHVARCIIESQSLPIPVRQRLQVDFVDLLVLRLAEEHSIVFDELAKQDISHIMALIDEVSPPAPSEAHKKKFPRIRLDEDGSRTLVHYGRLIKRFRRGRHERLVFLFSDWLCYVEEQTNGRMRLRASISLESLRVVELDDTAEVVNGFDIVTKDMRXXN

SEQ ID NO: 13089 - protein, 531 aa, Streptococcus agalactiae
GTGACTTACCCAGATGGTTCAAAAGATACTGTAGATGTGACTGTTAAGGTTGTCGATCCACGTACAGATGCCGATAAGAATGATCCAGCAGGTAAAGATCAGCAAGTCAAAGTAGGAGAAACACCGAAGGCAGAAGATTCTATTGGTAACTTACCAGATCTTCCGAAAGGTACAACAGTAGCCTTTGAAACTCCAGTTGATACGGCAACACCGGGAGACAAACCAGCAAAAGTTGTTGTGACTTACCCAGATGGTTCAAAAGATACTGTAGATGTGACTGTTAAGGTTGTCGATCCACGTACAGATGCCGATAAGAATGATCCAGCAGGTAAAGATCAGCAAGTCAAAGTAGGAGAAACACCGAAGGCAGAAGATTCTATTGGTAACTTACCAGATCTTCCGAAAGGTACAACAGTAGCCTTTGAAACTCCAGTTGATACGGCAACACCGGGAGACAAACCAGCAAAAGTTGTTGTGACTTACCCAGATGGTTCAAAAGATACTGTAGATGTGACTGTTAAGGTTNNNNNT

SEQ ID NO: 13090 - protein, 177 aa, Streptococcus agalactiae
  VARIANT 176, 177: Xaa = Any Amino Acid
MTYPDGSKDTVDVTVKVVDPRTDADKNDPAGKDQQVKVGETPKAEDSIGNLPDLPKGTTVAFETPVDTATPGDKPAKVVVTYPDGSKDTVDVTVKVVDPRTDADKNDPAGKDQQVKVGETPKAEDSIGNLPDLPKGTTVAFETPVDTATPGDKPAKVVVTYPDGSKDTVDVTVKVXX

SEQ ID NO: 13091 - protein, 486 aa, Streptococcus agalactiae
TTGTATTTGGAATATGGTACTTCTATTGATCGTTGGTCCCTGGGGTGTGTGCTTGCCGAGCTCCACACCGGTGTGCCGCTCTTTGATGGACGGACAGAAGCAGCACAACTAGCCCGCTTTGAGGCAATGTTGGGACCAATCCCCGTAGAAATGTTGGAAGCCTCGCCAAAGTTGGCCAAGTTCTACGGGACAACAGAGAATGGCTACAAACTAAAGGAACAGCCGCTGCCAAGACGCTCCCTGGAGTGTGTTTTGGGTGTCACCACTGGTGGTCCTCGTGGTTCGCGAAAAGGCACACCAGGGCATAGTGAAGAATCCTACCGTCAATTCCATGATTTTCTTAGTGGATTGCTGAAATACAGACCAACAGAACGAATGAGTTGCTCTGATGCGCTGCGGCATCCGTTTATAGAACCGCTCTGGATATCAGACCAGCAACAACAGCAAATCACTCGAAAACCACCCCCGCCTCCAAATCCTCCACCA

SEQ ID NO: 13092 - protein, 162 aa, Streptococcus agalactiae
MYLEYGTSIDRWSLGCVLAELHTGVPLFDGRTEAAQLARFEAMLGPIPVEMLEASPKLAKFYGTTENGYKLKEQPLPRRSLECVLGVTTGGPRGSRKGTPGHSEESYRQFHDFLSGLLKYRPTERMSCSDALRHPFIEPLWISDQQQQQITRKPPPPPNPPP

SEQ ID NO: 13093 - protein, 504 aa, Streptococcus agalactiae
TTGTTCCGCTACTGGGGAAGGAAGAAGGGTCCTGCACAAAAGCTGCCTCTGATATCGTCCGTCTTCTTACTTTTGCTTTTGCTCTCCATCTTTATTCTTGGCTGTTTGGCGTGTCATTGTCTCTTGGGCGCCGCATCGTTTTTTGTTTTTGTTTTTGTTTTTCTCCGGCACTTTTCGAAGGTCTTTTCGCTCGTGACGTTGACCGTTCATCCTTCTTACATATCCAACAACGGGGGCGGAGTTCTCCCCTCACGTTTGCTTTTTTTTTTTCTCTCTCCCCTCTTCGGCGAATTGAGGAAATGCTGCACTCCCACGCACCCACCGGAATGTCACCCAATGGTAAAGCGAATAGATGTAGGGGTGGTGAGGCGGCACCCGGAGACGTATTGGGGGAACTTGCAGAGAAGGGACATGGACAAGAAGAAGGGTGCCACTTGCAGCAGCCCCATTCCAATCCAACGGAATCAAAAACATTCGATCCCTGTGGCTCNNNNNTTAATTAAT

SEQ ID NO: 13094 - protein, 168 aa, Streptococcus agalactiae
  VARIANT 164, 165: Xaa = Any Amino Acid
MFRYWGRKKGPAQKLPLISSVFLLLLLLSIFILGCLACHCLLGAASFFVFVFVFLRHFSKVFSLVTLTVHPSYISNNGGGVLPSRLLFFFLSPLFGELRKCCTPTHPPECHPMVKRIDVGVVRRHPETYWGNLQRRDMDKKKGATCSSPIPIQRNQKHSIPVAXXLIN

SEQ ID NO: 13095 - protein, 752 aa, Streptococcus agalactiae
GTGACGTACCCAGATGGTTCAACAGATACTGTTGATGTGACTGTTAAAGTCGTAGATCCAAGTACAGACGCTGATAAGAACGAACTAAGGTTAAAGACCAAACAGTTACATTGGGGAAACACCTAAGGCAGAGATTCAATTGAAAACTTGAAAGATTTACCAGATGGAACTAAAGTAGAGTTTGAAACACCAATTGATACCACAACAGCAGGTGACAAGCCAGGTAAAGTTGTCGTGACGTACCCAGATGGTTCAACAGATACTGTTGATGTGACTGTTAAAGTCGTAGATCCAAGTACAGACGCTGATAAGAACGAACCTAAGGCTAAAGACCAAACAGTTAACATTGGGGAAACACCTAAGGCAGAAGATTCAATTGAAAACTTGAAAGATTTACCAGATGGAACTAAAGTAGAGTTTGAAACACCAATTGATACCACAACAGCAGGTGACAAGCCAGGTAAAGTTGTCGTGACGTACCCAGATGGTTCAACAGATACTGTTGATGTGACTGTTAAAGTCGTAGATCCAAGTACAGACGCTGATAAGAACGAACCTAAGGTTAAAGACCAAACAGTTAACATTGGGGAAACACCTAAGGCAGAAGATTCAATTGAAAACTTGAAAGATTTACCAGATGGAACTAAAGTAGAGTTTGAAACACCAATTGATACCACAACAGCAGGTGACAAGCCAGGTAAAGTTGTCGTGACGTACCCAGATGGTTCAACAGATACTGTTGATGTGACTGT

SEQ ID NO: 13096 - protein, 252 aa, Streptococcus agalactiae
  VARIANT 29, 252: Xaa = Any Amino Acid
MTYPDGSTDTVDVTVKVVDPSTDADKNEXKVKDQTVNIGETPKAEDSIENLKDLPDGTKVEFETPIDTTTAGDKPGKVVVTYPDGSTDTVDVTVKVVDPSTDADKNEPKAKDQTVNIGETPKAEDSIENLKDLPDGTKVEFETPIDTTTAGDKPGKVVVTYPDGSTDTVDVTVKVVDPSTDADKNEPKVKDQTVNIGETPKAEDSIENLKDLPDGTKVEFETPIDTTTAGDKPGKVVVTYPDGSTDTVDVTX

SEQ ID NO: 13097 - protein, 671 aa, Streptococcus agalactiae
GTGACGTACCCAGATGGTTCAACAGATACTGTTGATGTGACTGTTAAAGTCGTAGATCCAAGTACAGACGCTGATAAGAACGAACCTAAGGTAAAGACCAAACAGTTAACATTGGGGAAACACCTAAGGCAGAAGATTCAATTGAAAACTTGAAAGATTTACCAGATGGAACTAAAGTAGAGTTTGAAACACCAATTGATACCACAACAGCAGGTGACAAGCCAGGTAAAGTTGTCGTGACGTACCCAGATGGTTCAACAGATACTGTTGATGTGACTGTTAAAGTCGTAGATCCAAGTACAGACGCTGATAAGAACGAACCTAAGGTAAAGACCAAACAGTTAACATTGGGGAAACACCTAAGGCAGAAGATTCAATTGAAAACTTGAAAGATTTACCAGATGGAACTAAAGTAGAGTTTGAAACACCAATTGATACCACAACAGCAGGTGACAAGCCAGGTAAAGTTGTCGTGACGTACCCAGATGGTTCAACAGATACTGTTGATGTGACTGTTAAAGTCGTAGATCCAAGTACAGACGCTGATAAGAACGAACCTAAGGTAAAGACCAACAGTTAACATTGGGGAAACACCTAAGGCAGAAGATTCAATTGAAAACTTGAAAGATTTACCAGATGGAACTAAAGTAGAGTTGAAACACCAANNNNNT

SEQ ID NO: 13098 - protein, 225 aa, Streptococcus agalactiae
  VARIANT 31, 110, 189, 192, 224, 225: Xaa = Any Amino Acid
MTYPDGSTDTVDVTVKVVDPSTDADKNEPKXKDQTVNIGETPKAEDSIENLKDLPDGTKVEFETPIDTTTAGDKPGKVVVTYPDGSTDTVDVTVKVVDPSTDADKNEPKXKDQTVNIGETPKAEDSIENLKDLPDGTKVEFETPIDTTTAGDKPGKVVVTYPDGSTDTVDVTVKVVDPSTDADKNEPKXKDXTVNIGETPKAEDSIENLKDLPDGTKVELKHQXX

SEQ ID NO: 13099 - protein, 150 aa, Streptococcus agalactiae
GTGACGTACCCAGATGGTTCAACAGATACTGTTGATGTGACTGTTAAAGTCGTAGATCCAAGTACAGACGCTGATAAGAACGAACCTAAGGCTAAAGACCAAACAGTTAACGTTGGGGAAACACCTAAGGCAGAAGATTCNNNNNTTAAT

SEQ ID NO: 13100 - protein, 50 aa, Streptococcus agalactiae
  VARIANT 48, 49: Xaa = Any Amino Acid
MTYPDGSTDTVDVTVKVVDPSTDADKNEPKAKDQTVNVGETPKAEDSXXN

SEQ ID NO: 13101 - protein, 153 aa, Streptococcus agalactiae
TTGAAAGATTTACCAGATGGAACTAAAGTAGAGTTTGAAACACCAATTGATACCTCAACAGCAGGTGACAAGCCAGGTAAAGTTGTCGTGACGTACCCAGATGGTTCATCAGATACTGTTGATGTGACTGTTAAAGTCGTAGANNNNNTTAAT

SEQ ID NO: 13102 - protein, 51 aa, Streptococcus agalactiae
  VARIANT 48, 49, 50: Xaa = Any Amino Acid
MKDLPDGTKVEFETPIDTSTAGDKPGKVVVTYPDGSSDTVDVTVKVVXXXN

SEQ ID NO: 13103 - protein, 570 aa, Streptococcus agalactiae
GTGACTTACCCAGATGGTTCAAAAGATACTGTAGATGTGACTGTTAAGGTTGTCGATCCACGTACAGATGCCGATAAGAATGATCCAGCAGGTAAAGATCAGCAAGTCAAAGTAGGAGAAACACCGAAGGCAGAAGATTCTATTGGTAACTTATCAGATCTTCCGAAAGGTACAACAGTAGCCTTTGAAACTCCAGTTGATACGGCAACACCGGGAGACAAACCAGCAAAAGTTGTTGTGACTTACCCAGATGGTTCAAAAGATACTGTAGATGTGACTGTTAAGGTTGTCGATCCACGTACAGATGCCGATAAGAATGATCCAGCAGGTAAAGATCAGCAAGTCAAAGTAGGAGAAACACCGAAGGCAGAAGATTCTATTGGTAACTTACCAGATCTTCCGAAAGGTACAACAGTAGCCTTTGAAACTCCAGTTGATACGGCAACACCGGGAGACAAACCAGCAAAAGTTGTTGTGACTTACCCAGATGGTTCAAAAGATACTGTAGATGTGACTGTTAAGGTTGTCGATCCACGTACAGATGCCGATAAGAATGATCCNNNNNTTAAT

SEQ ID NO: 13104 - protein, 190 aa, Streptococcus agalactiae
  VARIANT 188, 189: Xaa = Any Amino Acid
MTYPDGSKDTVDVTVKVVDPRTDADKNDPAGKDQQVKVGETPKAEDSIGNLSDLPKGTTVAFETPVDTATPGDKPAKVVVTYPDGSKDTVDVTVKVVDPRTDADKNDPAGKDQQVKVGETPKAEDSIGNLPDLPKGTTVAFETPVDTATPGDKPAKVVVTYPDGSKDTVDVTVKVVDPRTDADKNDPXXN

SEQ ID NO: 13105 - protein, 657 aa, Streptococcus agalactiae
GTGCTCTCCCGCAACCCGCACCTTTGCGCCCTGTATGCTGCGCATAAACCAGATGAGGAGGGGTGTATTACGGGAGATGTAAAAAAGAATAGTGGAGGCGACACACCGCACCACGAGGCAGATTGGCCACACCCACTCTCTGTTCTTGAGAAAATGACGCATTTAAAGAAACTTTCGCTGAGTGGATGTGGACTGGTGTCACTGCCCCTGCACTGGTTTCTTCCCATGGTGACAGAGCTGCGGCTGAGCCATAACGCACTAAGCAGTCTTGTTCCAGAAGGTGTTATTTTTCGCTCGGTGAAGATACTTGACGTTAGCCATAATGCTCTCACAGATGTCTCAACATTGCGACGGTGTCGCTTTGTTCGTCAATTAAGCATAAGCGGTAATCCGTTCTTGAGGGTGGATGAGGCGTCATCCGCAAAGAAGGACGAGGAGGTGAGAAGAGGAGTCTACTTACCACCTGAAGTCATTCGTTTTCTCACACGAAAGATGCCTCATCTTGAGGTGGTGGACAGTACGTTGCTCTCATCCATTCAATTAGGAGATGATGCAGGTGAGAATAGACTTAAGAGTTGTGATGCCGCGGAAGACGAGAGCTTTCAAAAGAAAGATAAGAATAACCCAATGGAAGCAAACGTGANNNNNTTAATTAAT

SEQ ID NO: 13106 - protein, 219 aa, Streptococcus agalactiae
  VARIANT 215, 216: Xaa = Any Amino Acid
MLSRNPHLCALYAAHKPDEEGCITGDVKKNSGGDTPHHEADWPHPLSVLEKMTHLKKLSLSGCGLVSLPLHWFLPMVTELRLSHNALSSLVPEGVIFRSVKILDVSHNALTDVSTLRRCRFVRQLSISGNPFLRVDEASSAKKDEEVRRGVYLPPEVIRFLTRKMPHLEVVDSTLLSSIQLGDDAGENRLKSCDAAEDESFQKKDKNNPMEANVXXLIN

SEQ ID NO: 13107 - protein, 99 aa, Streptococcus agalactiae
GTGACTTACCCAGATGGTTCAAAAGATACTGTAGATGTGACTGTTAAGGTTGTCGATCCACGTACAGATGCCGATAACAATGATCNNNNNTTAATTAAT

SEQ ID NO: 13108 - protein, 33 aa, Streptococcus agalactiae
  VARIANT 29, 30: Xaa = Any Amino Acid
MTYPDGSKDTVDVTVKVVDPRTDADNNDXXLIN

SEQ ID NO: 13109 - protein, 657 aa, Streptococcus agalactiae
GTGACGTACCCAGATGGTTCAACAGATACTGTTGATGTGACTGTTAAAGTCGTAGATCCAAGTACAGACGCTGATAAGAACGAACCTAAGGTTAAAGACCAAACAGTTAACATTGGGGAAACACCTAAGGCAGAAGATTCAATTGAAAACTTGAAAGATTTACCAGATGGAACTAAAGTAGAGTTTGAAACACCAATTGATACCACAACAGCAGGTGACAAGCCAGGTAAAGTTGTCGTGACGTACCCAGATGGTTCAACAGATACTGTTGATGTGACTGTTAAAGTCGTAGATCCAAGTACAGACGCTGATAAGAACGAACCTAAGGCTAAAGACCAAACAGTTAACATTGGGGAAACACCTAAGGCAGAAGATTCAATTGAAAACTTGAAAGATTTACCAGATGGAACTAAAGTAGAGTTTGAAACACCAATTGATACCACAACAGCAGGTGACAAGCCAGGTAAAGTTGTCGTGACGTACCCAGATGGTTCAACAGATACTGTTGATGTGACTGTTAAAGTCGTAGATCCAAGTACAGACGCTGATAAGAACGAACCTAAGGCTAAAGACCAAACAGTTAACATTGTGGAAACACCTAAGGCAGAAGATTCAATTGAAAACTTGAAAGATTTACCAGATGGAACNNNNNTTAAT

SEQ ID NO: 13110 - protein, 219 aa, Streptococcus agalactiae
  VARIANT 217, 218: Xaa = Any Amino Acid
MTYPDGSTDTVDVTVKVVDPSTDADKNEPKVKDQTVNIGETPKAEDSIENLKDLPDGTKVEFETPIDTTTAGDKPGKVVVTYPDGSTDTVDVTVKVVDPSTDADKNEPKAKDQTVNIGETPKAEDSIENLKDLPDGTKVEFETPIDTTTAGDKPGKVVVTYPDGSTDTVDVTVKVVDPSTDADKNEPKAKDQTVNIVETPKAEDSIENLKDLPDGTXXN

SEQ ID NO: 13111 - DNA, 555 bp, Streptococcus agalactiae
atgggaactatgattttaatagcaattattgctttgtttgttatttggttgattgttgcttataacagtttagttagaagtcgcatgcatactaaagaatcatggagtcaaatagacgttcaattgaaacgtcgtaacgatttaattccaaacctaatcgaaactgttaaaggctatgctgcgtacgaagggaaaacacttgagaagattgcagaactgcgtgctcaagttgctaaagctaacacacctgctgaagcaatgacagcaagtaatgagctaacaagacagctttcaagtattttagcggttgctgaaaattacccagatttaaaagccaacaatagctttgttaaacttcaagaagaactaactaatacggaaaataaaatttcttattcacgtcagttatataacacaacaacatccaattataatgtgaaattagaaactttcccaagtaatattgttggaaaactatttgggttcaaaccaagccaattcttagaaactcctgaagaagaaaagaagtgccaaaagtttcctttgacttttaat

SEQ ID NO: 13112 - protein, 185 aa, Streptococcus agalactiae
MGTMILIAIIALFVIWLIVAYNSLVRSRMHTKESWSQIDVQLKRRNDLIPNLIETVKGYAAYEGKTLEKIAELRAQVAKANTPAEAMTASNELTRQLSSILAVAENYPDLKANNSFVKLQEELTNTENKISYSRQLYNTTTSNYNVKLETFPSNIVGKLFGFKPSQFLETPEEEKKCQKFPLTFN

SEQ ID NO: 13113 - DNA, 300 bp, Streptococcus agalactiae
atgttagctgtgttaaaaacagcttatcaacgtaaacacgcaaaaggtggccgaacccctaagttaagcttagaagatctcctcatggctactcttcaatacatgcgagaataccgcacttatgaacaaattgcggctgattttggcattcacgaaagcaacttaatccgtcgaagtcaatgggttgaatcaactcttattcaaagtggttttacgatttcaaaaactcatcttagtgctgaggatacggtgattgtggatgcaacagaggtaaaaatcaatcgtcctaaaaaaatcaac

SEQ ID NO: 13114 - protein, 100 aa, Streptococcus agalactiae
MLAVLKTAYQRKHAKGGRTPKLSLEDLLMATLQYMREYRTYEQIAADFGIHESNLIRRSQWVESTLIQSGFTISKTHLSAEDTVIVDATEVKINRPKKIN

SEQ ID NO: 13115 - DNA, 414 bp, Streptococcus agalactiae
atgaaggctcaggcgattgtcacaagccaagggagaattgtttctttggatattgcagtgaactattgccacgatatgaagttgttcaaaatgagtcgcagaaacatcggacaagctgctaaaatcttggcagacagtggttatcaagggatcatgaagatgtattcacaagcgcaaactccgaggaaatcaagcaaacttaagccactaactcttgaagataaaacctataaccatacgctatccaaagagagaatcaaggttgagaatatttttgccaaagtaaaaacgtttaaaatattttccacaacctatcgaaatcgacgccaacgggtttggattacgaatgaatttgattgctggaatgatcaccgtgaactaggatttagtttcgcaaggagtctattaaatctt

SEQ ID NO: 13116 - protein, 138 aa, Streptococcus agalactiae
MKAQAIVTSQGRIVSLDIAVNYCHDMKLFKMSRRNIGQAAKILADSGYQGIMKMYSQAQTPRKSSKLKPLTLEDKTYNHTLSKERIKVENIFAKVKTFKIFSTTYRNRRQRVWITNEFDCWNDHRELGFSFARSLLNL

SEQ ID NO: 13117 - DNA, 654 bp, Streptococcus agalactiae
  misc_feature 645, 646, 647, 648, 649: n = A,T,C or G
gtgacgtacccagatggttcaacagatactgttgatgtgactgttaaagtcgtagatccaagtacagacgctgataagaacgaacctaaggttaaagaccaaacagttaacattggggaaacacctaaggcagaagattcaattgaaaacttgaaagatttaccagatggaactaaagtagagtttgaaacaccaattgataccacaacagcaggtgacaagccaggtaaagttgtcgtgacgtacccagatggttcaacagatactgttgatgtgactgttaaagtcgtagatccaagtacagacgctgataagaacgaacctaaggctaaagaccaaacagttaacattggggaaacacctaaggcagaagattcaattgaaaacttgaaagatttaccagatggaactaaagtagagtttgaaacaccaattgataccacaacagcaggtgacaagccaggtaaagttgtcgtgacgtacccagatggttcaacagatactgttgatgtgactgttaaagtcgtagatccaagtacagacgctgataagaacgaacctaaggttaaagaccaaacagttaacattggggaaacacctaaggcagaagattcaattgaaaacttgaaagatttaccagatggnnnnnttaat

SEQ ID NO: 13118 - protein, 218 aa, Streptococcus agalactiae
  VARIANT 216, 217: Xaa = Any Amino Acid
MTYPDGSTDTVDVTVKVVDPSTDADKNEPKVKDQTVNIGETPKAEDSIENLKDLPDGTKVEFETPIDTTTAGDKPGKVVVTYPDGSTDTVDVTVKVVDPSTDADKNEPKAKDQTVNIGETPKAEDSIENLKDLPDGTKVEFETPIDTTTAGDKPGKVVVTYPDGSTDTVDVTVKVVDPSTDADKNEPKVKDQTVNIGETPKAEDSIENLKDLPDGXXN

SEQ ID NO: 13119 - DNA, 807 bp, Streptococcus agalactiae
  misc_feature 802, 803, 804, 805, 806: n = A,T,C or G
gtgacttacccagatggttcaaaagatactgtagatgtgactgttaaggttgtcgatccacgtacagatgccgataagaatgatccagcaggtaaagatcagcaagtcaaagtaggagaaacaccgaaggcagaagattctattggtaacttaccagatcttccgaaaggtacaacagtagcctttgaaactccagttgatacggcaacaccgggagacaaaccagcaaaagttgttgtgacttacccagatggttcaaaagatactgtagatgtgactgttaaggttgtcgatccacgtacagatgccgataagaatgatccagcaggtaaagatcagcaagtcaaagtaggagaaacaccgaaggcagaagattctattggtaacttatcagatcttccgaaaggtacaacagtagcctttgaaactccagttgatacggcaacaccgggagacaaaccagcaaaagttgttgtgacttacccagatggttcaaaagatactgtagatgtgactgttaaggttgtcgatccacgtacagatgccgataagaatgatccagcaggtaaagatcagcaagtcaaagtaggagaaacaccgaaggcagaagattctattggtaacttatcagatcttccgaaaggtacaacagtagcctttgaaactccagttgatacggcaacaccgggagacaaaccagcaaaagttgttgtgacttacccagatggttcaaaagatactgtagatgtgactgttaaggttgtcgatccacgtacagatgccgataagaatgatccagcannnnnt

SEQ ID NO: 13120 - protein, 269 aa, Streptococcus agalactiae
  VARIANT 268, 269: Xaa = Any Amino Acid
MTYPDGSKDTVDVTVKVVDPRTDADKNDPAGKDQQVKVGETPKAEDSIGNLPDLPKGTTVAFETPVDTATPGDKPAKVVVTYPDGSKDTVDVTVKVVDPRTDADKNDPAGKDQQVKVGETPKAEDSIGNLSDLPKGTTVAFETPVDTATPGDKPAKVVVTYPDGSKDTVDVTVKVVDPRTDADKNDPAGKDQQVKVGETPKAEDSIGNLSDLPKGTTVAFETPVDTATPGDKPAKVVVTYPDGSKDTVDVTVKVVDPRTDADKNDPAXX

SEQ ID NO: 13121 - protein, 213 aa, Streptococcus agalactiae
TTGCAAGTCAAAGTAGGAGAAACACCGAAGGCAGAAGATTCTATTGGTAACTTATCAGATCTTCCGAAAGGTACAACAGTAGCCTTTGAAACTCCAGTTGATACGGCAACACCGGGAGACAAACCAGCAAAAGTTGTTGTGACTTACCCAGATGGTTCAAAAGATACTGTAGATGTGACTGTTAAGGTTGTCGATCCACGTACAGATGCCGAT

SEQ ID NO: 13122 - protein, 71 aa, Streptococcus agalactiae
MQVKVGETPKAEDSIGNLSDLPKGTTVAFETPVDTATPGDKPAKVVVTYPDGSKDTVDVTVKVVDPRTDAD

SEQ ID NO: 13123 - protein, 375 aa, Streptococcus agalactiae
TTGTCGATCCACGTACAGATGCCGATTAAGAATGATCCAGCAGGTAAAGATCAGCAAGTCAAAGTAGGAGAAACACCGAAGGCAGAAGATTCTATTGGTAACTTACCAGATCTTCCGAAAGGTACAACAGTAGCCTTTGAAACTCCAGTTGATACGGCAACACCGGGAGACAAACCAGCAAAAGTTGTTGTGACTTACCCAGATGGTTCAAAAGATACTGTAGATGTGACTGTTAAGGTTGTCGATCCACGTACAGATGCCGATAAGAATGATCCAGCAGGTAAAGATCAGCAAGTCAAAGTAGGAGAAACACCGAAGGCAGAAGATTCTATTGGTAACTTACCAGATCTTCCGAAAGGTACAACAGTAGCCTTT

SEQ ID NO: 13124 - protein, 125 aa, Streptococcus agalactiae
MSIHVQMPIKNDPAGKDQQVKVGETPKAEDSIGNLPDLPKGTTVAFETPVDTATPGDKPAKVVVTYPDGSKDTVDVTVKVVDPRTDADKNDPAGKDQQVKVGETPKAEDSIGNLPDLPKGTTVAF

SEQ ID NO: 13125 - protein, 702 aa, Streptococcus agalactiae
GTGACGTACCCAGATGGTTCAACAGATACTGTTGATGTGACTGTTAAAGTCGTAGATCCAAGTACAGACGCTGATAAGAACGAACCTAAGGTTAAAGACCAAACAGTTAACATTGGGGAAACACCTAAGGCAGAAGATTCAATTGAAAACTTGAAAGATTTACCAGATGGAACTAAAGTAGAGTTTGAAACACCAATTGATACCACAACAGCAGGTGACAAGCCAGGTAAAGTTGTCGTGACGTACCCAGATGGTTCAACAGATACTGTTGATGTGACTGTTAAAGTCGTAGATCCAAGTACAGACGCTGATAAGAACGAACCTAAGGCTAAAGACCAAACAGTTAACATTGGGGAAACACCTAAGGCAGAAGATTCAATTGAAAACTTGAAAGATTTACCAGATGGAACTAAAGTAGAGTTTGAAACACCAATTGATACCACAACAGCAGGTGACAAGCCAGGTAAAGTTGTCGTGACGTACCCAGATGGTTCAACAGATACTGTTGATGTGACTGTTAAAGTCGTAGATCCAAGTACAGACGCTGATAAGAACGAACCTAAGGTTAAAGACCAAACAGTTAACATTGGGGAAACACCTAAGGCAGAAGATTCAATTGAAAACTTGAAAGATTTACCAGATGGAACTAAAGTAGAGTTTGAAACACCAATTGATACCACAACAGCAGGTGACAAGCCCAGG

SEQ ID NO: 13126 - protein, 234 aa, Streptococcus agalactiae
MTYPDGSTDTVDVTVKVVDPSTDADKNEPKVKDQTVNIGETPKAEDSIENLKDLPDGTKVEFETPIDTTTAGDKPGKVVVTYPDGSTDTVDVTVKVVDPSTDADKNEPKAKDQTVNIGETPKAEDSIENLKDLPDGTKVEFETPIDTTTAGDKPGKVVVTYPDGSTDTVDVTVKVVDPSTDADKNEPKVKDQTVNIGETPKAEDSIENLKDLPDGTKVEFETPIDTTTAGDKPR

SEQ ID NO: 13127 - protein, 105 aa, Streptococcus agalactiae
GTGACGTACCCAGATGGTTCAACAGATACTGGTGATGTGACTGTTAAAGTCGTAGATCCAAGTACAGACGCTGATAAGAACGAACCTAGGCTAAAGACAAACAGT

SEQ ID NO: 13128 - protein, 35 aa, Streptococcus agalactiae
MTYPDGSTDTGDVTVKVVDPSTDADKNEPRLKTNS

SEQ ID NO: 13129 - protein, 276 aa, Streptococcus agalactiae
TTGCTTAATAACCCTCTTCATAGGTTAAAACAAGTCTTTGAAATGATTTTTGCTGGAAAAAAATTAGTTGTTGAAACTGGCCAAGTGGCTAAACAAGCAAATGGATCAGTTGTCGTTCGTTATGGAGATTCTACTGTACTCACAGCAGCAGTTATGTCTAAGAAAATGTCAACAGGTGATTTTTCCCACTTCAAGTCAATTACGAAGAAAAAATGTATGCTGCTGGGAAATTTCCGGGAGGCTTTAACAAACGTGAAGGGCGNNNNNTTAATTAAT

SEQ ID NO: 13130 - protein, 92 aa, Streptococcus agalactiae
  VARIANT 88, 89: Xaa = Any Amino Acid
MLNNPLHRLKQVFEMIFAGKKLVVETGQVAKQANGSVVVRYGDSTVLTAAVMSKKMSTGDFSHFKSITKKKCMLLGNFREALTNVKGXXLIN

SEQ ID NO: 13131 - DNA, 180 bp, Streptococcus agalactiae
gtgacttacccagatggttcaaaagatactgtagatgtgactgttaaggttgtcgatccacgtacagatgccgataagaatgatccagcaggtaaagatcagcaagtcaaagtaggagaaacaccgaaggcagaagattctattggtaacttatcagatcttccgaaaggtacaacccag

SEQ ID NO: 13132 - protein, 60 aa, Streptococcus agalactiae
MTYPDGSKDTVDVTVKVVDPRTDADKNDPAGKDQQVKVGETPKAEDSIGNLSDLPKGTTQ

SEQ ID NO: 13133 - DNA, 762 bp, Streptococcus agalactiae
gtgactgttaaattcgtagatccaagtacagacgctgataagaacgaacctaaggttaaagaccaaacagttaacattggggaaacacctaaggcagaagattcaattgaaaacttgaaagatttaccagatggaactaaagtagagtttgaaacaccaattgataccacaacagcaggtgacaagccaggtaaagttgtcgtgacgtacccagatggttcaacagatactgttgatgtgactgttaaagtcgtagatccaagtacagacgctgataagaacgaacctaaggctaaagaccaaacagttaacattggggaaacacctaaggcagaagattcaattgaaaacttgaaagatttaccagatggaactaaagtagagtttgaaacaccaattgataccacaacagcaggtgacaagccaggtaaagttgtcgtgacgtacccagatggttcaacagatactgttgatgtgactgttaaagtcgtagatccaagtacagacgctgataagaacgaacctaaggttaaagaccaaacagttaacattggggaaacacctaaggcagaagattcaattgaaaacttgaaagatttaccagatggaactaaagtagagtttgaaacaccaattgataccacaacagcaggtgacaagccaggtaaagttgtcgtgacgtacccagatggttcaacagatactgttgatgtgactgttaaagtcgtagatccaagtacagacgctgataagaacgaaccc

SEQ ID NO: 13134 - protein, 254 aa, Streptococcus agalactiae
MTVKFVDPSTDADKNEPKVKDQTVNIGETPKAEDSIENLKDLPDGTKVEFETPIDTTTAGDKPGKVVVTYPDGSTDTVDVTVKVVDPSTDADKNEPKAKDQTVNIGETPKAEDSIENLKDLPDGTKVEFETPIDTTTAGDKPGKVVVTYPDGSTDTVDVTVKVVDPSTDADKNEPKVKDQTVNIGETPKAEDSIENLKDLPDGTKVEFETPIDTTTAGDKPGKVVVTYPDGSTDTVDVTVKVVDPSTDADKNEP

SEQ ID NO: 13135 - DNA, 588 bp, Streptococcus agalactiae
  misc_feature 583, 584, 585, 586, 587: n = A,T,C or G
atggattccagtattactttgtccaatggacagttcataaaggctagtcgtgaagctatttttaatgatttagtttctaagcagcaatctgtctcattggattattggttaaaaccttcttttgtgacttatgaagcaccttacacaaatggtgttagtgaagttaaaaataatttaaaaccttattccagagtgcatttagtagaacaagcagaaacagaacatggtatttattataaaacggacagtggtttttggatatcagtagaagatctatcggttgctgataatcgtatggctaaggttcaagaagtattattggaaaaatataataaagataaatatggtatatacatcaaacaattaaatacacagacagtagctggtattaatattgataggtcaatgtactctgcaagtattgcaaaattagcaacactttatgctagccaagagcaagtaaaattaggaaaactgtcattggacagcaaatttgaatacaaagataatgttaatcaatttcctaatagctatgatccaagtggtagtgggaaattagagaaaaaagctgatcataaattannnnnt

SEQ ID NO: 13136 - protein, 196 aa, Streptococcus agalactiae
  VARIANT 195, 196: Xaa = Any Amino Acid
MDSSITLSNGQFIKASREAIFNDLVSKQQSVSLDYWLKPSFVTYEAPYTNGVSEVKNNLKPYSRVHLVEQAETEHGIYYKTDSGFWISVEDLSVADNRMAKVQEVLLEKYNKDKYGIYIKQLNTQTVAGINIDRSMYSASIAKLATLYASQEQVKLGKLSLDSKFEYKDNVNQFPNSYDPSGSGKLEKKADHKLXX

SEQ ID NO: 13137 - DNA, 726 bp, Streptococcus agalactiae
ttgagaaatcgaataagaaacatctactttcctactttggaaagagaaaataatcaattgaaagattctctcataactctctctgaggaaacagagtgtttattcacggctttaacagacctaacaaggagcatcgaagtaacaaactgctatgattttttaaggcaaactcattccgtccaagaatttttattgcaagattacattagcaaatttccagatttacaagtgagtaaagaacagttcagagtaatattaaaattgattagaactaaagccaatattgactatactattaaatcgggctattttcttcataaggattacgagagttttcatattacaaaaatccatcctaagacggatagttttaaggttgaaaaaagattagaattgcataatatacaaatattctcacaatatttattttcctatggaaaattcatttctcaagcagacattactattcctatttatgatacttctccgattattttaagaagaagaaaagaaggggataggatatttttaggaaatcacactaaaaaaattcgccgtctatttattgatgagaaaataactctaaaagacagagaagaagctgttattggggagcaaaataaagagttgatatttgtgattgttgcaggtagaacatatttgagaaaaccttctgaacatgatataatgaagggcaaactttatattgaaaatttagaaaaaagg

SEQ ID NO: 13138 - protein, 242 aa, Streptococcus agalactiae
MRNRIRNIYFPTLERENNQLKDSLITLSEETECLFTALTDLTRSIEVTNCYDFLRQTHSVQEFLLQDYISKFPDLQVSKEQFRVILKLIRTKANIDYTIKSGYFLHKDYESFHITKIHPKTDSFKVEKRLELHNIQIFSQYLFSYGKFISQADITIPIYDTSPIILRRRKEGDRIFLGNHTKKIRRLFIDEKITLKDREEAVIGEQNKELIFVIVAGRTYLRKPSEHDIMKGKLYIENLEKR

SEQ ID NO: 13139 - DNA, 180 bp, Streptococcus agalactiae
atgcttgaaaatgatataaaaaaagttttatattcagaagaagatattattctgaaaacgaaagaattaggagctaaattaactgcagattatgcaggtaagaatccattattagtaggtgtattaaaggggtcagtgccttttatggctgaactattaaagcatattgatacacatggt

SEQ ID NO: 13140 - protein, 60 aa, Streptococcus agalactiae
MLENDIKKVLYSEEDIILKTKELGAKLTADYAGKNPLLVGVLKGSVPFMAELLKHIDTHG

SEQ ID NO: 13141 - protein, 102 aa, Streptococcus agalactiae
ATGGCTGAACTATTAAAGCATATTGATACCATGTTGAAATTGATTTTATGGTTGTTTCAAGCTATCATGGTGGTACAACTAGTAGTGGAGAAGTTAAAATTT

SEQ ID NO: 13142 - protein, 34 aa, Streptococcus agalactiae
MAELLKHIDTMLKLILWLFQAIMVVQLVVEKLKF

SEQ ID NO: 13143 - protein, 201 aa, Streptococcus agalactiae
ATGTTTAAGTATCGTCAAGCTAACTCTGTCAAAGTTGCAACCCTTTTTGATAAGCCAGAAGGGCGATTGGTAGATATTGATGCTGATTACGTTTGTTACGATATCCCAAATGAATTTATTGTGGGATTCGGTTTAGACTATGCTGAAAACTATCGTAACCTACCTTATGTCGGTGTGTTAAAAGAAGAAATTTACTCAAAA

SEQ ID NO: 13144 - protein, 67 aa, Streptococcus agalactiae
MFKYRQANSVKVATLFDKPEGRLVDIDADYVCYDIPNEFIVGFGLDYAENYRNLPYVGVLKEEIYSK

SEQ ID NO: 13145 - protein, 217 aa, Streptococcus agalactiae
ATGAAAAATAATAAAAATAATGGTTTTCTGAAAAATTCCTTTATTTACATATTATTGATTATTGCGGTTATTACAACCTTTCAATACTATTTAAAAGGAACTAGCTCTCAAAACCAGCAAATTTCTTATACAAAACTTGTTAAACAATTAAAAGCTGGAGAAATTAAGTCTATTTCATACCAGCCAAGTGGTGGTGTTGTTGAATAGTGGGACATAT

SEQ ID NO: 13146 - protein, 73 aa, Streptococcus agalactiae
MKNNKNNGFLKNSFIYILLIIAVITTFQYYLKGTSSQNQQISYTKLVKQLKAGEIKSISYQPSGGVVEVSGTY

SEQ ID NO: 13147 - protein, 174 aa, Streptococcus agalactiae
GTGTTAGATCCCGCATTACTGCGTCCAGGACGTTTTGATAGAAAAGTTCTAGTTGGACAACCTGATGTAAAAGGTCGTGAAGCAATTCTGAGAGTACATGCTAAAAATAAACCATTAGCAGATAATGTTGACTTAAAAGTAGTAGCTCAACAAACCCCCAGGATTTGTTGGTGC

SEQ ID NO: 13148 - protein, 58 aa, Streptococcus agalactiae
MLDPALLRPGRFDRKVLVGQPDVKGREAILRVHAKNKPLADNVDLKVVAQQTPRICWC

SEQ ID NO: 13149 - protein, 546 aa, Streptococcus agalactiae
TTGGAGAATGTTCTCAATGAAGCTGCTTTAGTTGCTGCGCGACGAAATAAAAAAGTTATTGATGCTTCAGATATTGATGAAGCAGAAGACCGTGTAATTGCTGGTCCTTCTAAAAAAGATCGTACTATTTCTGAAAGAGAAAGAGCTATGGTTGCTTACCATGAAGCTGGGCACACAATTGTCGGTTTGATTCTTTCAAATGCGCGAGTTGTTCATAAAGTTACTATCGTACCACGTGGTCGTGCAGGTGGATATATGATTGCTTTACCTAAAGAAGATCAAATGCTTCTTTCAAAAGATGATATGAAAGAGCAATTAGCAGGTCTTATGGGAGGACGTGTAGCGGAAGAAATTATTTTCAACGCTCAGACAACAGGTGCCTCAAATGACTTTGAACAAGCCACTGCCATGGCCCGCGCTATGGTAACTGAATATGGTATGAGTGAGAAACTTGGCCCAGTTCAATACGAAGGTAACCATGCAATGATGGCTGGCCAAATGTCACCTGAAAAAATCATTTCTGCTCAAACTGNNNNNTTAATTAAT

SEQ ID NO: 13150 - protein, 182 aa, Streptococcus agalactiae
  VARIANT 178, 179: Xaa = Any Amino Acid
MENVLNEAALVAARRNKKVIDASDIDEAEDRVIAGPSKKDRTISERERAMVAYHEAGHTIVGLILSNARVVHKVTIVPRGRAGGYMIALPKEDQMLLSKDDMKEQLAGLMGGRVAEEIIFNAQTTGASNDFEQATAMARAMVTEYGMSEKLGPVQYEGNHAMMAGQMSPEKIISAQTXXLIN

SEQ ID NO: 13151 - DNA, 687 bp, Streptococcus agalactiae
ttgaaagaaaatttaatcaaatcaaaaaagcgtgttcaaaagcatggagaggtttttacaccatcctggatggtacagaaaatgttagatactccaggtattaaagaggcttgtgaaaatatttctgcaacgtttttagaaccttctgcaggagatgggaattttttgcaagctattttagaaagaaaattatctgcggttatcatgcaatatgatgaaagaagttggaagacaaaatcattgattgcattatcgtctatatatgggatagaatttctcgaagataatttagaagtagcacgttcacgtatgtttctttattatttagattggtacgaacaaatttttagtactaagctaactagtaaaagtgatatctataaatctgcatattatcttattcataaaaatattgttagaggaaataccttaactcaacgtcatcctgttacagatgaacctatttggtttaatgaatggcaacttatcaaagggcattctagtttggtaagaaaagttccttttgctttatcagagcttttaggtaaaaaagttgaggataacacaatagtagaagggcaactaagtttttttgatattgatgataacttcaagatagaagaagcttttaaaaaaactacggaaatagaagagataaatattcagaaagtatatttgctaggggat

SEQ ID NO: 13152 - protein, 229 aa, Streptococcus agalactiae
MKENLIKSKKRVQKHGEVFTPSWMVQKMLDTPGIKEACENISATFLEPSAGDGNFLQAILERKLSAVIMQYDERSWKTKSLIALSSIYGIEFLEDNLEVARSRMFLYYLDWYEQIFSTKLTSKSDIYKSAYYLIHKNIVRGNTLTQRHPVTDEPIWFNEWQLIKGHSSLVRKVPFALSELLGKKVEDNTIVEGQLSFFDIDDNFKIEEAFKKTTEIEEINIQKVYLLGD

SEQ ID NO: 13153 - DNA, 4368 bp, Streptococcus agalactiae
atgatttcaaattttgaatttttggcaattgatatggatacagcagatctatttcagacaattaacaaggctgaagaaaattatacacatggggattatgaaggaacactgacaaaagcaagaaaagttgctgagaatacagcgagattgattgctgatagagagtatatagaagttcgtgaacgagcaacttttaacgatgtgctaggggaaatcagaggcttgatttcaaatcaaacaattattgactatttctatgacattaaaggtaaaggaaatagctctgcacatgttctcaataccgaagttgctactaaggaaaatgctttaagatcactaaaacaagtgtttgaaattctagcttgggttatgttgaactatattgaacctgatttaactgccagtgctattggtcagtttttagaacccagagcacaagagatgtacactacagctgagagaaaatttatctacattcaaacagtgaataatgagagcggactttttaatgcctttgaaggtactcaaaaaattggtgagggtagtgtttcttctgatgatctcgagacagactggtctcctaatagtgactttttacgaacagtcgctcccaaacgtattaaccaatatatgaaaacatctggcctgccctatactctcggttgggtagagcttgcttataagaaaactacaaaatcttggtttcatgactatgatgtccataacatattaaaacgctcagggattaagcaggctgagaatttggaaggaactgaatggttcaagacagacttagagacagcaaaggctgctattaaagctgttaaagaaggtaaaaattgtctcaatatggctatagatgaatcttgtgtagcagaacctataatcacccttcgtccagagcaagaagctgcagtcgaacagacacaaaaagttttcaagaaaaaagacaggatgctctggaatgctaaaatgcgttttggtaaaacgttgacagcgttacaattagttaagaatgaagcgttccaaagggttcttatcatgacacatagacctgttgtatcggattcatggtttgatgattttaaaaagatgaatatgagtgaggaaggttacgactttggttcagtacacagaggagagactcttgaagtgttgaaaaaaggtgagaatccttttgtttactttgcttcaattcaattacttcgttataatggcggtcaaacgaatcttaaaaacttttctgatattgattgggatttaatcattattgatgaggcacatgaaggaacgcagacagaactaagtgatagtgtgatgcgagtgcttatcaaagaacatacaaaagtacttgagttatctggaacgccgttcaatcttttagataagtttgatgacgaacaagtctatacttgggattacgtgatggagcaaactgccaagaaaagatgggaacttgaacgcccaaatgaacctaatccttacgaaaccttgccaaaagtatccatgtatacatttgagatgaagcataaggagcgtttttctgatgagagtaaatctttcaatttcagagaattctttcgtgtggatgagaatggaacgttggtttataaacaagaagtccgtcaatttttagacaatattacaaatcctgatggaagcacaaattatcctttttcaacaagcgcatatcgtgaagagttacgccatacactttggttgatgcctggtgtgaaggaggccaatgcttttgaggagttgctaagagaacatccaatttttggaaaagagtataagattgtcaatgttgttagaggatcgagtaccgatgatggaatcactaatgacgtagacattgaaaaggttcgttatgctattggtaaagatccatcacggacaaaaacaataactttaactgttcgtaagctaacaacaggagtcaatattccagagtggacagcggttttgtttttatcaaataccaatagtgctatgaattacttacaagctgcttttcgagctcagacaccattttcacatgaaaagcttgggatgaaaacgaattgttatgtttttgattttgcgcctgatagagcattgacagtaatggctgagagcgcacagattaactcaggtgtaggcaaaaagaatacagagaagcaaaagcaagctatggctcgactgctcaattttatgcctatattaggtgtttcagagaatggtatgaaaacctataatgtcgataaaatgctgacgcagcttaaaaaagtttatgctgaaaaagcggtgcgttcaggttttgaagatgatagtctttataatgataatttactgactttgacagctgatgatgcaactgtgtttaataaactaaatgctattgtgggtaagactcatagtcaaaggaactccaataaagttattatcaacgacaatggtttgacagatgaagagcatgaacaagctgaacgtgctaagaagaaacccaaagtaaaacgtactcaggaagatttagaagtaattgaaaaacaaaaagaagccaaaaagcaacgtaagaatatgatttctattttacgaggtgtttctattcgtattccgatgatgatttatggcatgaaagtcgatttagcaaaggatatttccattcaagattttgttaagcaagtggatgatgaatcttggaaggaattcatgcctaaaggtttctctaaaggcatgtttagcaacattactaagtattatgatgccgaggtgtttatcgaagcaggacgtatcattcgtcagcgtgctaaatcttttgatgatatggatttcatagagagggcagaacatatcgctgatctgtttagtacctttaagaatccagataaagagacggtattgactccatggcgtgttgtcaatctccaagttgcaaaatcagttggaggtttgaacttctatgatgataattttgaatcggctacagatggtgcaacgtctaatcttcattgggtggacgtggacaaagaggtaacctcatcagtttataaaacagatacgaaaattttagatatcaactctaaaacaggtctttatcctcttcatagtgcgatcagcctctattatcagaggattgcccagaatgatgatagtcattttgaggctaatcaagtttatcaagatattttggaaaataatatctatgctattgctaaaactccgatggctaagactatcactgaacgaactttgataggctacaagaactataaaactaatgtagcctatattgaaaacttttcagatacgttgaaatcaagtgttgaagaaggtaaaaaattagttgaggaggcgtttaaaaacgtgaaatttaatatagttattggcaatcctccttatcaaaatgaaggaataggagatgttgctcgtgatgagccaatttatcataaatttatggatttggcttatgaaattgcagataaagcagttttgattacaccagctcgttttctttttaatgcagggcaaactccaaaagcttggaataagaagatgttagaagatgagcatcttcaagtcatttatttcgctcaaaaatctgaagaagtatttccaaatacagatattaagggtggagtagccgttacttaccgagatgccaagaaaaactttggagccattgggaccttcacaccagtcgaatggctaaacgaattgttccatttggtacatcataaagtaaagagatcatttaatgaatacctatttggaaagagtagctacaaatttagcgctaatttatataatcgctatccagaattgagaggcagagtttcagttgcagaagaaaaatcgattggttctaatatttttgaaagattgccagagatattttcggacgaaaagcaatcggatagtcaagttggaatttatgggcgcttgaataatgagcgtgtgataaaatggattgatgctgacttaattgaacttcatcccaatttgaataaatacaaagtatttttacctgcttctaatggaagcggggcgataggcgaagtgctatcgaccccactcgtgggtaccccactcgtgggtcacacacaaacctttatttcttttggtgcatttgagactaaaaaggaagctgagaactgcttgaagtttataaagacagatctagctcgtgcaatgctagggacactcaaagtaacacaacataatcaatcaaaagaggtttggatcaatgttccttggttcgattttaatgattattctattattgattggtctaaatctgttaaagaaatagaggaagagctttatgattactttaatgtaccagactatattatcgctgagttgaaagctaatgttagaaggatggac

SEQ ID NO: 13154 - protein, 1456 aa, Streptococcus agalactiae
MISNFEFLAIDMDTADLFQTINKAEENYTHGDYEGTLTKARKVAENTARLIADREYIEVRERATFNDVLGEIRGLISNQTIIDYFYDIKGKGNSSAHVLNTEVATKENALRSLKQVFEILAWVMLNYIEPDLTASAIGQFLEPRAQEMYTTAERKFIYIQTVNNESGLFNAFEGTQKIGEGSVSSDDLETDWSPNSDFLRTVAPKRINQYMKTSGLPYTLGWVELAYKKTTKSWFHDYDVHNILKRSGIKQAENLEGTEWFKTDLETAKAAIKAVKEGKNCLNMAIDESCVAEPIITLRPEQEAAVEQTQKVFKKKDRMLWNAKMRFGKTLTALQLVKNEAFQRVLIMTHRPVVSDSWFDDFKKMNMSEEGYDFGSVHRGETLEVLKKGENPFVYFASIQLLRYNGGQTNLKNFSDIDWDLIIIDEAHEGTQTELSDSVMRVLIKEHTKVLELSGTPFNLLDKFDDEQVYTWDYVMEQTAKKRWELERPNEPNPYETLPKVSMYTFEMKHKERFSDESKSFNFREFFRVDENGTLVYKQEVRQFLDNITNPDGSTNYPFSTSAYREELRHTLWLMPGVKEANAFEELLREHPIFGKEYKIVNVVRGSSTDDGITNDVDIEKVRYAIGKDPSRTKTITLTVRKLTTGVNIPEWTAVLFLSNTNSAMNYLQAAFRAQTPFSHEKLGMKTNCYVFDFAPDRALTVMAESAQINSGVGKKNTEKQKQAMARLLNFMPILGVSENGMKTYNVDKMLTQLKKVYAEKAVRSGFEDDSLYNDNLLTLTADDATVFNKLNAIVGKTHSQRNSNKVIINDNGLTDEEHEQAERAKKKPKVKRTQEDLEVIEKQKEAKKQRKNMISILRGVSIRIPMMIYGMKVDLAKDISIQDFVKQVDDESWKEFMPKGFSKGMFSNITKYYDAEVFIEAGRIIRQRAKSFDDMDFIERAEHIADLFSTFKNPDKETVLTPWRVVNLQVAKSVGGLNFYDDNFESATDGATSNLHWVDVDKEVTSSVYKTDTKILDINSKTGLYPLHSAISLYYQRIAQNDDSHFEANQVYQDILENNIYAIAKTPMAKTITERTLIGYKNYKTNVAYIENFSDTLKSSVEEGKKLVEEAFKNVKFNIVIGNPPYQNEGIGDVARDEPIYHKFMDLAYEIADKAVLITPARFLFNAGQTPKAWNKKMLEDEHLQVIYFAQKSEEVFPNTDIKGGVAVTYRDAKKNFGAIGTFTPVEWLNELFHLVHHKVKRSFNEYLFGKSSYKFSANLYNRYPELRGRVSVAEEKSIGSNIFERLPEIFSDEKQSDSQVGIYGRLNNERVIKWIDADLIELHPNLNKYKVFLPASNGSGAIGEVLSTPLVGTPLVGHTQTFISFGAFETKKEAENCLKFIKTDLARAMLGTLKVTQHNQSKEVWINVPWFDFNDYSIIDWSKSVKEIEEELYDYFNVPDYIIAELKANVRRMD

SEQ ID NO: 13155 - DNA, 90 bp, Streptococcus agalactiae
atgtctgagttagacgtacaactctatcgaaaacatggcctcagtcaggaagaaattgcttttattgaaaataaagtgaaggagattagg

SEQ ID NO: 13156 - protein, 30 aa, Streptococcus agalactiae
MSELDVQLYRKHGLSQEEIAFIENKVKEIR

SEQ ID NO: 13157 - DNA, 1755 bp, Streptococcus agalactiae
atgacagaatttaaattcaataaattaacgccattaaatgatattgatattgattcgtcgtatatagaagcaatgaaatatgcgctagaagacgaagatatcaaaaatatagctatatcaggaaattatggttcgggtaaaagtagttttatagaaacttataagagtataaataaggactttaaaccattacatatttcgttagcacacttttcttcagttaataatattgaaaatggggataatagtcagattaatttagttaaaaataatgctgaaaacagtaatctaagggaccaaactaagatcattgaaggaaaaataattaatcaattattacatcagattgattcaaaatatatcccaatgactattttcaagtccaagaaaaatccaagattatctgaaattgttttcttgtccgcaacattactcctatttgtattgcctaccttacttttgttgaattatagtcaattagcaattttaagcagggaactattaccaacttttcctcacattgggaatattattcgtattttagcttatttaattttgaccggtaatcttatttctacagtatacagactatctaaattacagttaaatagacggttaataaaaatactttcttttcgtggaacaaatatatctggtgagattgaagtgtttcaaaatgaagagacttcatattttgataagtacttagatgatgttttatatctttttgataattgtcaaagtaatattattatttttgaagatattgatagatttcaaacaaatcttatttttgagaagttaagggaaataaatacgcttgtcaacaataagaagaaaaaggagcaaaaacttttatttatttatctagttaaagatgatatgtttatttcacaagatagaactaaattttttgattttataattccgattatcccagtagttacctcatcaaactcaggtgaaaagataggtgaaatattaaccaatttaggagaatcaaatagtgttagtaaggcattattaaaacaagtcgcgatttacattgatgatatgagattggcgtataatatttgtaatgaatttgttttatacaagaataatttatttagtcaggaggaaaatgataacaataagttaaatctatctgtagataagatttttgctattattgtatataaaaatatctttcctaaagatttttcattactccaaaaagatttaggctttttacatcaactatatattagagtaaatgatttaaaacaggatagcctagctaaaaaatcagaagaaattaaagaaatagagcgactaataatatcttccgaacaagaaatttctaagaataaactagaactctattcaacttttatgaaggttcctgatggcagagtagctattcgcgtaaatggcaaattagaaagcgagttcccaagtagggtggactttattcgtgaaattttgacagaagatgcgaagattacttctatagtgacagattattattataatcgagaggatagtagaaatgaaactattgatagtgttattgccatggctgatactaattttcaggaaaggatgaatgctttagaaaatagaagccatcttaaggagctaaactttaatttagaaaaattacgtgaggagtatgaaagtattaaatccaaaaagttatctgcgctcatcaaccgtaattttttcgatgctataatggaggaatatacttatttaaagaaagagaaaattctt

SEQ ID NO: 13158 - protein, 585 aa, Streptococcus agalactiae
MTEFKFNKLTPLNDIDIDSSYIEAMKYALEDEDIKNIAISGNYGSGKSSFIETYKSINKDFKPLHISLAHFSSVNNIENGDNSQINLVKNNAENSNLRDQTKIIEGKIINQLLHQIDSKYIPMTIFKSKKNPRLSEIVFLSATLLLFVLPTLLLLNYSQLAILSRELLPTFPHIGNIIRILAYLILTGNLISTVYRLSKLQLNRRLIKILSFRGTNISGEIEVFQNEETSYFDKYLDDVLYLFDNCQSNIIIFEDIDRFQTNLIFEKLREINTLVNNKKKKEQKLLFIYLVKDDMFISQDRTKFFDFIIPIIPVVTSSNSGEKIGEILTNLGESNSVSKALLKQVAIYIDDMRLAYNICNEFVLYKNNLFSQEENDNNKLNLSVDKIFAIIVYKNIFPKDFSLLQKDLGFLHQLYIRVNDLKQDSLAKKSEEIKEIERLIISSEQEISKNKLELYSTFMKVPDGRVAIRVNGKLESEFPSRVDFIREILTEDAKITSIVTDYYYNREDSRNETIDSVIAMADTNFQERMNALENRSHLKELNFNLEKLREEYESIKSKKLSALINRNFFDAIMEEYTYLKKEKIL

SEQ ID NO: 13159 - DNA, 1992 bp, Streptococcus agalactiae
atgtatttattgagaaacggctatatagatgagtcttatccagactacattacttatttttatcctaatagcttgaagaaacaagataaagaatttttaaatgcagtacaaggagaacttgaactctcttgggattatcagttagtggaggtggctgaagttaatgataggcttaatgactctgactttacaagaatttacgtcctaaattttgatttatttgaatatattttacatggaacaaatgaaaagagattgggtggttacttatcggatgtaaatgtcaaatttatcaataagtttttgcaacaaagtacacgacatcttgccgcaaaaattactgtattggaatatttaatcgaacgaaaccaaagaacattgaaattacttttaacttctgatgatatcctcaaaaaggaaagggtacagaacattattttattactatcattcttcgatttttctaatattagttggcaagaagaactacaagagactatttcctattttgtgagttctaactggctggctattaaagaaacaagtgataattttattgaatctctcaataatactaggattcaagataatttgaagtttatggatgttaaaataaaagattttagttttgaagagaacaaaaaagtaatgagtgattttgtttatgaacataatctttatgaaataaatactgataatttatctagtctactttcctatcttgataatagtttatcagtccagatgcttaaagacaaaccattttctatacttgagcaatttgataatcttaaacaatatattggcaaaaacagagagttgtatatgtcgcaaatactaccattaatgaataagtgtattcatgacgacttacaaattgtttacgatgtcgtaaatgatacgaaagtagctgaaaattatagagttgaatatttaaagaaaactaaaaattattttttagaaatatcaaacttatcatcgatgtctattttagatgctgctattgaatttaataaggcaacatatagcacaaaaaatattctcaattacttttataactatgatagttggaatgaacgattgattgaatttgtaaataatggagattgtttagattttttgcaatcagagttaagggaattttcagataaacttcaagaagagtttctggaagaaactgtcaaatgtaataagttaaataatgatatatacaaagaaattctttctaaagttgaattgcattgttcagaatttgaatttgaaaatatttcagatgaaaaaatgtctattttgattggaacaagatgtatttcagccaaattttcaataaacacattgaattttatcagagataattatcaaaatcatactattgaatatttgaaagagtatattgaagagtaccttttagaagatgaagataatgatatttatcaagaaactgaaatgttaaatcttttacaagcatcattatctcatgaatggaaatttaaaattgttgataaatttcctactaacgtatctatcgtcgataaagaatattctacaattttagtagattatattttacaaaataaatttgatgaatccgatttagaatatattttgtctaattatgactgtttagaggtaagtaccagaaagatagtagaacagatatttgtagattatttggatgaaattttagaagaaggctattctattaagaaggagctattgcaggctaccattaataactctactataactatcgataaacgtcgtttaatattagcaaactatattgatgtctttgcagatgaagaaattatggatttatttagaagtgtaaaaatgactgaaatgattttggcggtaactgatataaaaaatcctaaagttgatttcacagactataataaattaattcttgaatatctcaaaggaaaacgtaaaattgcatcatatcgtaaagaaggaaatggatatagaatatatagtaaaaaaataaag

SEQ ID NO: 13160 - protein, 664 aa, Streptococcus agalactiae
MYLLRNGYIDESYPDYITYFYPNSLKKQDKEFLNAVQGELELSWDYQLVEVAEVNDRLNDSDFTRIYVLNFDLFEYILHGTNEKRLGGYLSDVNVKFINKFLQQSTRHLAAKITVLEYLIERNQRTLKLLLTSDDILKKERVQNIILLLSFFDFSNISWQEELQETISYFVSSNWLAIKETSDNFIESLNNTRIQDNLKFMDVKIKDFSFEENKKVMSDFVYEHNLYEINTDNLSSLLSYLDNSLSVQMLKDKPFSILEQFDNLKQYIGKNRELYMSQILPLMNKCIHDDLQIVYDVVNDTKVAENYRVEYLKKTKNYFLEISNLSSMSILDAAIEFNKATYSTKNILNYFYNYDSWNERLIEFVNNGDCLDFLQSELREFSDKLQEEFLEETVKCNKLNNDIYKEILSKVELHCSEFEFENISDEKMSILIGTRCISAKFSINTLNFIRDNYQNHTIEYLKEYIEEYLLEDEDNDIYQETEMLNLLQASLSHEWKFKIVDKFPTNVSIVDKEYSTILVDYILQNKFDESDLEYILSNYDCLEVSTRKIVEQIFVDYLDEILEEGYSIKKELLQATINNSTITIDKRRLILANYIDVFADEEIMDLFRSVKMTEMILAVTDIKNPKVDFTDYNKLILEYLKGKRKIASYRKEGNGYRIYSKKIK

SEQ ID NO: 13161 - protein, 1431 aa, Streptococcus agalactiae
ATGAATCAAAATCTATCGCATTACCAATTTTCTCCCGAAAGTCAATATTTGGATAGGAAATCAGCGCGTAAGAAGCCACAAGAACTACTTAAGCATTTGATTGCCTTTGCTAATGCTGATGGCGGTCAGTTGATTATCGGGATTGAAGATGAAAAGCAGCATAATATTATCACTGGTTTTAAGGATGGGAAAGCCTATCCGATTGATGATTTCAAAAAGATAGACCGAGAGATGCGGGATACACCGTTGGACTTATCTTTTGAGGAAATACCTGTGGTTAATCATAAGGGAGAAGACGACCTGATTCTAGTTATCTCAGTTGAATTATCATCGAATCGAGTGATTGCCGCTCCAAATGATGAAGTTTATCTACGACAGGGAGACGAATCAGTCAAGTTGAGTTATGAGCAACGTATACAACTTAGTTACGATAAGGGACAGCGTTTCTTTGAAGATGAGATCATTGAAGATGCTACATTAGATGATATTGATGAACTATTGGTTCAGGATTTTAAGGACCATTTTGATATTTCAGAACGTTCAACTGAGGAGATATTAAAGGCAAGACGGTTTCTTATCAATGGTAAATTGACAAAGGCGGCTATTCTCATCTTTGGTAAGTATCCTTCAGCATTTTTCCCTCAAGCACGTGTTCGTTTTCAACGATTTGATGGGGTAGATGTAGGTACAGGAAGTGAATTTAATGTTATTAAGGAAGTAACATTTGATGATGCATTGCCTAAATTAATTGTTAAAGTTAGAGATTTTATTCGAACCCAGCTACGAGAGTTTCAGTATCTAGATAGTGATGGTAGATTTCAGATACTTCCAGAATATCCTGAATTTGCTTGGTTTGAAGGAATTGTAAATGCAGTAACCCACAGGAATTATTCAGTATACGGAGATCATATCAGGGTATTGATGTTTGATAATCGTCTAGAGATTCATAGCCCAGGAAAACTACCGAATATTGTAACTGTTGAGAATATAAGACATGAACGTTTTTCTAGAAATCCGCGTATAGCTCGTACCTTAACTGAATTTGGATGGGTCCGAGAAATGAATGAGGGAGTAAAACGAATCTATTCTGAAATGGAATCTGCTTTTCTCCATGAACCGTGTTACTCTGAACCAGGAAACAAGGTAGTTTTAACTTTAGAAAACAGTATTACAAGTAGAACATTGAGAACACGTGATTCTTTGGAAAGTAAACTTAGAGATTATAGTGATTTAAGTGTTGATGAAAAACTATTGATACAGTATATGTACAATACAGCAGAACCTATGACAACTAAAAAAGTAGCAGAGTTCTTAGGTAGGAGTGTTTCTTACTCGTCGAAATTATTGAAAACGTTGAGAGCAAAAGGCATTTTAACATGGTATGGGACAAGTACGAAAGATCGCAGTCAATACTATAAATTAGAAATGAAA

SEQ ID NO: 13162 - protein, 477 aa, Streptococcus agalactiae
MNQNLSHYQFSPESQYLDRKSARKKPQELLKHLIAFANADGGQLIIGIEDEKQHNIITGFKDGKAYPIDDFKKIDREMRDTPLDLSFEEIPVVNHKGEDDLILVISVELSSNRVIAAPNDEVYLRQGDESVKLSYEQRIQLSYDKGQRFFEDEIIEDATLDDIDELLVQDFKDHFDISERSTEEILKARRFLINGKLTKAAILIFGKYPSAFFPQARVRFQRFDGVDVGTGSEFNVIKEVTFDDALPKLIVKVRDFIRTQLREFQYLDSDGRFQILPEYPEFAWFEGIVNAVTHRNYSVYGDHIRVLMFDNRLEIHSPGKLPNIVTVENIRHERFSRNPRIARTLTEFGWVREMNEGVKRIYSEMESAFLHEPCYSEPGNKVVLTLENSITSRTLRTRDSLESKLRDYSDLSVDEKLLIQYMYNTAEPMTTKKVAEFLGRSVSYSSKLLKTLRAKGILTWYGTSTKDRSQYYKLEMK

SEQ ID NO: 13163 - protein, 102 aa, Streptococcus agalactiae; identical to SEQ ID NO: 4831

SEQ ID NO: 13164 - protein, 34 aa, Streptococcus agalactiae; identical to SEQ ID NO: 490

SEQ ID NO: 13165 - protein, 123 aa, Streptococcus agalactiae; identical to SEQ ID NO: 4833

SEQ ID NO: 13166 - protein, 41 aa, Streptococcus agalactiae; identical to SEQ ID NO: 4834

SEQ ID NO: 13167 - protein, 219 aa, Streptococcus agalactiae
ATGTTTATATATGGCCCTATTTTTAGGGAATTTCGACTTAATCGACAGTTTTCTCTTAAACAGGTTGCTTCAAATGAACTTTCTGTTTCTCAGTTATCACGATTTGAGAGGGGTGAATCAGATTTATCATTAACAAAATTTTTAGGGGCTTTAGAGGCAATTGATTTATCAATTAGCGAATTTATGGATAGAGTAAATAAATATCAAAAATCTGATCAG

SEQ ID NO: 13168 - protein, 73 aa, Streptococcus agalactiae
MFIYGPIFREFRLNRQFSLKQVASNELSVSQLSRFERGESDLSLTKFLGALEAIDLSISEFMDRVNKYQKSDQ

SEQ ID NO: 13169 - protein, 576 aa, Streptococcus agalactiae
ATGATTTCTGTGGAAGAAGGTAAACTAAAAAAGGATAGTTCAGATATACGTTGTCGTTTAAACATAGTTCTTTTTAGAGGAATGATATGTGAATATGACTCCTCAAGAAAAATGTCGGAAGAAGACCTTTGCTTTTTGTCGGATTACCTCTTTCAAAAGGATAGTTGGGAAATTAGTGACTATATTTTGATTGGAAATCTTTACCGGTATTACAACACAAGGCATATTTGCCAACTTGTTAAAGAGGTTATCAATCAAAAGGAATATTATCGAGATATTTATACAAACCGCAATGTTGTCGAAGCAACCCTCCTAAATGTGGTAGAGACACTAATAGAACGGCGCGCTCTAGAAGAAGCAACGTTTTTTCTAGAGAAAGTTGAAGCACTTTTAAATAATGAGCGGAATGCTTATCACCGTATTATTTTACTCTATGAAAAAGGATTTCTTGCCTATGCTAAAGGGGATAGTCGAGGAATACAAAGCATGAAGCAAGCTATTTTTTGCTTCCAAGCAATTGGTTCTAAACATCATGTTGAAAATTTTCAGGAACACTTTAATAGGGTAACAAGATTA

SEQ ID NO: 13170 - protein, 192 aa, Streptococcus agalactiae
MISVEEGKLKKDSSDIRCRLNIVLFRGMICEYDSSRKMSEEDLCFLSDYLFQKDSWEISDYILIGNLYRYYNTRHICQLVKEVINQKEYYRDIYTNRNVVEATLLNVVETLIERRALEEATFFLEKVEALLNNERNAYHRIILLYEKGFLAYAKGDSRGIQSMKQAIFCFQAIGSKHHVENFQEHFNRVTRL

SEQ ID NO: 13171 - DNA, 1179 bp, Streptococcus agalactiae
atgaatattaatggtataaaattactatctagtcgagcagtcagtaaacttggtgatgtgctttatgattatggaaatagtacttggattgcttcgataggtggtctaggacaaaagattttaggtatttatcagatagtagagttgttggtttctattgtcctcaacccttttggaggcgccttagctgatcgctttcaacgaagaaaaattttactaataacagatgctatctgtgctatcatgtgtttcttactttcttttattggagatgataaagtaatggtgtatggtctaatagttgctaatgctatcttagcggtttccaatgctttttcttctccggcttataaatcttatattcctgaaatagtagataaagctgatatcattacctataatgctaatctggaaaccattgtgcaaattattagtgtaagttcccctgttttaggtttccttatttttaataattttggtattaggattactttaattgttgatgcgattacttttttgatctctttcctgtttctttatgctattaaagtggaaagggtacagctttcaaaacaagaaaaggtagcgataaaaaatattttagctgatattgcagatggatttacttacatcaaaaaagaaaaagaaattatgttttttctaattattgctgctttattaaacactttcctagcaatgttcaattatcttttaccttttactaactccctattgaaaacttcaggtgcttatgcaacaatacttagtatatcagctatcggatcaattattggagcgcttattgctagaaaaattaaatctagtattaattctatgctatctatgctagtattcagtagtttgggagtcatagttatgggattcccatctctatttgaattaccgatatggatatcttacagtggtagttttctttttaatagtcttctgacaatgtttaatattcattttttcagtcaggtacaaatcagggtcgatgaagcgtatatggggcgtgtgatgtcgactatatttactattgctattatgtttatgcctataggaacactatttatgactatcttttcatttgccttatcaaatgttagctttattgttataggatgtgccattgctatattgggaggattaggatttagctatagtaaaaaacaattt

SEQ ID NO: 13172 - protein, 393 aa, Streptococcus agalactiae
MNINGIKLLSSRAVSKLGDVLYDYGNSTWIASIGGLGQKILGIYQIVELLVSIVLNPFGGALADRFQRRKILLITDAICAIMCFLLSFIGDDKVMVYGLIVANAILAVSNAFSSPAYKSYIPEIVDKADIITYNANLETIVQIISVSSPVLGFLIFNNFGIRITLIVDAITFLISFLFLYAIKVERVQLSKQEKVAIKNILADIADGFTYIKKEKEIMFFLIIAALLNTFLAMFNYLLPFTNSLLKTSGAYATILSISAIGSIIGALIARKIKSSINSMLSMLVFSSLGVIVMGFPSLFELPIWISYSGSFLFNSLLTMFNIHFFSQVQIRVDEAYMGRVMSTIFTIAIMFMPIGTLFMTIFSFALSNVSFIVIGCAIAILGGLGFSYSKKQF

SEQ ID NO: 13173 - DNA, 648 bp, Streptococcus agalactiae
atgaaacaaatgaatactttccaacaatttatctactacttccaacataatggtagttatatcttagaacaatttatccaccactttttaatttcaatttacggcgttattttagctgcaattgttggtatccctctaggtatcttcatcgctagacgtggtaaaattaaaacctttgttatgggaatcgcaaatgtcatccaaaccattccttctttagctatgatctctatcattatgttaggtctagggctaggtattaaaacagtagttgcaactgtctttctttattctcttctgccaatcatcacaaatacttacactggtattagaaatgttgactccgacttactagatgctgctaaaggaatgggcatgactaagcgtcaacgtttatttatggttgagttaccactatctatttctgttatcatggctggacttagaaatgcccttgttgtagcaattggtattacagccattggtgctttcgtcggtggaggcggacttggagatatcatcataagaggaactaatgcaacaaatggtggtgctattatcttagcaggatctcttccaacagcccttatggcaattttctctgatttaatcctaggcggtatccaacgcatgcttgaaccaagaaaa

SEQ ID NO: 13174 - protein, 216 aa, Streptococcus agalactiae; identical to SEQ ID NO: 4844

SEQ ID NO: 13175 - DNA, 924 bp, Streptococcus agalactiae
atgcttaaaaaatcgcactttttacagatatttacactttgcttagccctcttaacgatttctggttgtcaattaaccgatactaaaaaacctggtcataccacaattaaggttgctgcccaaagttctacagagtctagtatcatggcaaatattgtcaccgaattaattcatcacgaattaggatacaacacaactttaataagcaatcttggttcctctacggttactcaccaagctttgctccgtggtgatgctgacattgctgccacacgttatacaggaacagacatcacaggaactcttggcttaaaagctgttaaagaccctaaagaagcttctaagattgtaaaaactgaattccaaaaacgctacaatcaaacttggtatcctacttatggtttttctgatacttatgcattcatggttactaaagagtttgccagacagaataaaatcaccaagatctctgatctcaaaaagttatcaacaactatgaaggcaggggttgatagttcatggatgaatcgcgagggagatggatacactgatttcgctaaaacatacggttttgaattttcacatatttaccctatgcaaattggcttagtctatgatgcggttgaaagtaacaaaatgcaatctgtattaggctactccactgacggtcgtatttcgagctatgatttagaaattttaagggatgataaaaaattctttcctccttatgaagcctctatggttgtcaacaattctatcatcaaaaaagatcctaaactaaaaaaattactccatcgactcgatggtaaaatcaatttaaaaacgatgcaaaaccttaattatatggtagatgataaacttttagaaccttcagttgttgccaaacaatttttagaaaaaaaccattattttagaggagataaa

SEQ ID NO: 13176 - protein, 308 aa, Streptococcus agalactiae; identical to SEQ ID NO: 4846

SEQ ID NO: 13177 - DNA, 633 bp, Streptococcus agalactiae
atggtcaatttcttatcacagtatggcatgcaaatattagtaaaaacatgggaacaagtctatatctcattttttgctatagcacttgggattgcaattgctgttccattgggtgtggtcttaacacgttttcccaaagtagccaaaattatcattgctatagctagcatgctacaaactataccaagtttagccttattagctttaatgattccattgtttggaattggaaaagtcccagctatcgttgctttatttatttattccttgcttcctatactaaggaatacttatataggtatgaataatgtcaatccaacacttaaagattgtgctaaagggatgggaatgaaacctattcaatctatatttcaagttgagttacctttagctactccaattattatggctggtattcgcttgtctactatttatgttattgcttgggctacattagcttcttatataggtgcaggtggacttggtgatctcatttttagcgggttaaatctttttcagcccaaattaattctagggggcacaattcctgttattatcctgtcacttattatagattatcttttaggattactggaaacagctctaacgcccagaacaacaagaagggaggct

SEQ ID NO: 13178 - protein, 211 aa, Streptococcus agalactiae; identical to SEQ ID NO: 4848

SEQ ID NO: 13179 - DNA, 1143 bp, Streptococcus agalactiae
atgggccaagaacctatcatcgaatatcaaaatatcaataaagtgtatggggaaaatgttgcggttgaagatattaaccttaaaatttaccctggtgatttcgtttgtttcatcggtacgagtggatcaggtaaaacaacattaatgcgtatggttaaccatatgttaaaaccaacaaatggtactctattatttaagggaaaagatatctctactattaaccccattgaattaagacgcagaattggatatgttatccaaaacattggtttaatgcctcatatgaccatttacgaaaatatagttcttgtaccaaaattattgaaatggtcagaagaagctaaaagagctaaagcaagggaacttattaaattagttgaattacccgaagaatatttggatcgctaccctagtgagttgtctggcggtcagcaacaacgtatcggtgtcattcgcgctcttgcagcagaccaagatattattttaatggatgagccttttggagctctggatcctattactagagaaggtattcaagacttagtcaagtctcttcaggaagaaatggggaaaactatcatcttagttactcatgatatggatgaagccctcaagttagcaacaaaaattattgttatggacaatggtaaaatggtccaagaagggacacccaatgatctcttacatcatcctgctactagtttcgttgaacaaatgattggagaagagcgtctccttcatgcgcaggctgatattactcctgttaaacagataatgttaaataatcctgtttcaataactactgaaaaaacactaactgaagctattacactaatgcgccaaaaacgcgttgactcacttctagtaaccgataacggtaaattaattggttttattgacttagaatctctaagcagtaaatataagaaagatcgacttgtttctgatatcttaaaacatactgatttttatgttatggaagacgacttacttagaaatactgctgagcgtattttaaaacgtggtttaaaatacgctccagttgttgaccatgagaataacttaaagggcattgttactcgtgcatccctagttgatatgttatacgatattatttggggcgatactgaaacggaggatcaa

SEQ ID NO: 13180 - protein, 381 aa, Streptococcus agalactiae
MGQEPIIEYQNINKVYGENVAVEDINLKIYPGDFVCFIGTSGSGKTTLMRMVNHMLKPTNGTLLFKGKDISTINPIELRRRIGYVIQNIGLMPHMTIYENIVLVPKLLKWSEEAKRAKARELIKLVELPEEYLDRYPSELSGGQQQRIGVIRALAADQDIILMDEPFGALDPITREGIQDLVKSLQEEMGKTIILVTHDMDEALKLATKIIVMDNGKMVQEGTPNDLLHHPATSFVEQMIGEERLLHAQADITPVKQIMLNNPVSITTEKTLTEAITLMRQKRVDSLLVTDNGKLIGFIDLESLSSKYKKDRLVSDILKHTDFYVMEDDLLRNTAERILKRGLKYAPVVDHENNLKGIVTRASLVDMLYDIIWGDTETEDQ

SEQ ID NO: 13181 - protein, 1323 aa, Streptococcus agalactiae
ATGAAAAAAAGAATATTATCAGCAGTCCTTGTGAGTGGAGTAACTCTTGGAACTGCTGCCGTAACAGTAAACGCTGATGACTTTGACTCGAAAATTGCTGCTACTGATTCAGTAATCAATACTTTATCAGGGCAACAAGCAGCAGCACAAAACCAGGTGACTGCTATTAAAGGACAAGTTGGTGCTTTAGAGTCTCAACAATCAGAATTAGAAGCGCAAAATGCTCAACTTGAGGCAGTATCTCAGCAGTTAGGTCAAGAGATTCAAACTCTTTCTAATAAAATTGTTGCACGTAACGAATCTTTGAAAAAGCAAGTTCGTAGTGCTCAAAAGGGTAACTTGACTAACTATATTAATACTATTTTAAATTCGAAATCAGTATCTGATGCTGTTAATCGTGTTGTTGCTATTCGTGAGGTTGTTTCAGCTAATGAAAAGATGTTAGCACAACAAGAGGCTGACAAAGCAGCCTTAGAAGCTAAACAAATTGAAAATCAAAATGCTATAAATACTGTAGCAGCTAACAAGCAAGCTATCGAAAATAATAAAGCAGCCTTAGCAACACAAAGAGCACAATTAGAAGCAGCTCAATTAGAGTTATCTGCTCAATTGACTACAGTCCAAAATGAAAAAGCATCTTTAATTCAGGCAAAAGCACAAGCTGAGGAAGCTGCGCGTAAGGCAGCTGAAGCACAAGCAGTAGCTGAAGCGAAAGCACAAGCTGAGTCTGTAGCAAAAGCACAGGCAGCAGCACAAGTTGAGTCTGCCACAGCTCCTACTGAAACAGTTCAAACACAACCGAGAACTGAAATAAAGCCTTCTAATCTTACGGCTACTTCTTCGGCAACTACTGTTGCTAAAACTACAGCTACAGCTACTAATGAGCCAAAAGTTACTCAACCTTCTGTAGTAACTAAAGCAGTTGAAGCACCTAAAGCAGTTGTTTCTTCAACACCTAGAGCGGTATCAAAACCTGTTGTCAGAAGTTATGATTCAAGTAACACATACCCAATGGGACAATGTACTTGGGGAGCTAAGTCAATGGCTTCTTGGGTTGGTAACTATTGGGGAAATGCTAATCAGTGGGGTGCTAGTGCACGTGCAGCTGGTTATTCTGTAGGAACTACCCCTCGTGTTGGTGCAGTAGCTGTTTGGCCATATGATGGTGGTGGTTACGGGCACGTTGCAGTAGTAACGTCAGTGGCTAACAATTCATCTATCCAAGTTATGGAATCAAACTATGCTGGAAATATGAGCATTGGCAATTACCGTGGTTCATTTAACCCTAGTGCTTCTGGCTCTGTTTACTATATTTACCCAAAT

SEQ ID NO: 13182 - protein, 441 aa, Streptococcus agalactiae
MKKRILSAVLVSGVTLGTAAVTVNADDFDSKIAATDSVINTLSGQQAAAQNQVTAIKGQVGALESQQSELEAQNAQLEAVSQQLGQEIQTLSNKIVARNESLKKQVRSAQKGNLTNYINTILNSKSVSDAVNRVVAIREVVSANEKMLAQQEADKAALEAKQIENQNAINTVAANKQAIENNKAALATQRAQLEAAQLELSAQLTTVQNEKASLIQAKAQAEEAARKAAEAQAVAEAKAQAESVAKAQAAAQVESATAPTETVQTQPRTEIKPSNLTATSSATTVAKTTATATNEPKVTQPSVVTKAVEAPKAVVSSTPRAVSKPVVRSYDSSNTYPMGQCTWGAKSMASWVGNYWGNANQWGASARAAGYSVGTTPRVGAVAVWPYDGGGYGHVAVVTSVANNSSIQVMESNYAGNMSIGNYRGSFNPSASGSVYYIYPN

SEQ ID NO: 13183 - protein, 966 aa, Streptococcus agalactiae
ATGTCTTATTCTAATTTAAAATTGTTTGCACTGTCATCAAACAAAGAACTAGCGAAAAAAGTGTCTCAGACGATTGGAATTCCGCTAGGTCAATCGACAGTTCGCCAATTTTCTGATGGTGAGATTCAAGTTAATATTGAAGAGTCTATTCGTGGCCATCATGTTTTTATTTTACAATCAACAAGCTCACCAGTTAATGATAATTTGATGGAAATTTTAATTATGGTTGATGCTTTAAAGCGTGCTAGTGCGGAGTCTGTTAGTGTGGTAATGCCTTACTATGGGTATGCTCGTCAAGATCGCAAGGCACGTTCTCGTGAACCTATTACTTCGAAACTCGTTGCGAACATGCTAGAAGTTGCTGGTGTTGATCGTCTTTTAACAGTTGATTTACATGCAGCTCAAATTCAGGGATTCTTTGATATTCCCGTTGATCACCTTATGGGGGCTCCCCTTATTGCAGATTACTTTGATCGTCAGGGATTAGTTGGTGATGATGTTGTTGTCGTTAGTCCTGATCATGGTGGCGTAACACGTGCACGTAAGCTGGCACAGTGTTTAAAGACACCGATTGCTATCATTGATAAGCGCCGTAGTGTTACTAAAATGAATACATCTGAAGTAATGAATATTATTGGTAATATCAAAGGTAAAAAATGTATTTTAATTGATGATATGATTGATACTGCAGGTACTATTTGCCATGCTGCAGACGCTTTAGCTGAAGCAGGGGCAACAGCTGTTTATGCTTCATGTACTCACCCTGTTTTATCAGGGCCGGCTTTGGATAATATTCAAAATTCAGCTATTGAAAAATTAATTGTGTTAGATACGATTTACCTCCCTGAAGAACGTTTGATTGATAAGATTGAACAAATTTCAATTGCGGAATTGATTGGTGAAGCTATTATCCGTATTCACGAGAAACGTCCTTTATCACCATTATTTGAAATGAATAAACTAAAA

SEQ ID NO: 13184 - protein, 322 aa, Streptococcus agalactiae; identical to SEQ ID NO: 54

SEQ ID NO: 13185 - protein, 1172 aa, Streptococcus agalactiae
ATGACATTAGAGAAACGATTTAATAAGTACTTAGATAGAATAGAGGTCTCCTTAATTCGTCAGTTTGATCAATCTATTTCAGATATACCTGGAATGGTAAAATTAACTCTTGGAGAACCAGATTTTACCACTCCTGATCATGTTAAAGAAGCAGCTAAATCAGCTATTGATGCGAATCAATCGTATTATACTGGTATGAGCGGTTTATTAGCTCTAAGGCAAGCTGCTGCAGATTTTGCAAAGGATAAATATAATCTTACTTATAACCCTGATAGTGAGATCTTGGTTACGATAGGTGCCACAGAAGCTCTGTCTGCATCTCTTATAGCTATTTTAGAAGCTGGTGATGTTGTTCTATTACCTGCCCCCGCTTATCCAGGCTATGAGCCAATAGTTAACCTTGTAGGAGCTGATATCGTAGAAATTGATACTAGAGAAAATGACTTTAGACTAACCCCTGAAATGTTAGAAACGGCTATTATCCAACAAGGTGAAAAATTAAAGGCTGTTTTACTTAATTATCCTACTAATCCTACAGGTATTACCTATTCAAGGCAAGAAATTGCTGCATTAGCTGAAGTCCTTAAAAAATATGATATTTTTGTTATTAGTGATGAAGTTTACTCTGAGTTAACTTACACTGGTCAGCAACATGTTTCAATTGCAGAATATTTACCTAACCAAACTATCTTAATTAATGGCTTATCAAAATCACATGCTATGACTGGTTGGAGAGTTGGATTGGTGTATGCTCCTGAAGCATCTACTGCTCAAATCATTAAAAGTCATCAATACATGGTGACAGCTGCTAGTACTATTTCGCAATTTGCTGGGGTAGAAGCCTTATCTGTGGGTAAAAATGATACGTTACCTATGCGTCAAGGATATATTAAACGTAGAGATTATATCATTGATAAAATGTCTAAACTTGGTTTCAAATAATTAAACCGAGCGGCGCTTTTTATATCTTTGCTAAAATACCTGATAGTTATCCACAGGATTCTTTCAAGTTTTGTCAGGATTTTGCTTATCAACAAGCTGTAGCTATTATTCCAGGGGTGGCTTTTGGTAAATATGGTGAAGGGTATATACGTCTTTCTTATGCTGCTAGTATGGAAGTTATTGAAACAGCAATGGCTAGATTGAAAGTTTTTATGGAATCATATGAGGGT

SEQ ID NO: 13186 - protein, 391 aa, Streptococcus agalactiae
MTLEKRFNKYLDRIEVSLIRQFDQSISDIPGMVKLTLGEPDFTTPDHVKEAAKSAIDANQSYYTGMSGLLALRQAAADFAKDKYNLTYNPDSEILVTIGATEALSASLIAILEAGDVVLLPAPAYPGYEPIVNLVGADIVEIDTRENDFRLTPEMLETAIIQQGEKLKAVLLNYPTNPTGITYSRQEIAALAEVLKKYDIFVISDEVYSELTYTGQQHVSIAEYLPNQTILINGLSKSHAMTGWRVGLVYAPEASTAQIIKSHQYMVTAASTISQFAGVEALSVGKNDTLPMRQGYIKRRDYIIDKMSKLGFKIIKPSGAFYIFAKIPDSYPQDSFKFCQDFAYQQAVAIIPGVAFGKYGEGYIRLSYAASMEVIETAMARLKVFMESYEG

SEQ ID NO: 13187 - protein, 271 aa, Streptococcus agalactiae
ATGAGGGTTAGTCAAACATACGGTCTCGTTTTGTATAATCGTAATTATCGTGAAGACGATAAATTAGTTAAAATCTTTACGGAGACTGAGGGGAAAAGAATGTTTTTTGTAAAGCATGCTTCAAAGTCAAAATTCAATGCTGTGCTCCAACTTGACTATTGCTCATTTTATTTTAAAAATTAATGATAATGGTCTTTCTTATATTGATGATTATAAAGAAGTTTTAGCATTTCAAGAAACCAATTCAGACTTTTTAAGTGCNNNNNTTAAT

SEQ ID NO: 13188 - protein, 91 aa, Streptococcus agalactiae
  VARIANT 89, 90: Xaa = Any Amino Acid
MRVSQTYGLVLYNRNYREDDKLVKIFTETEGKRMFFVKHASKSKFNAVLQPLTIAHFILKINDNGLSYIDDYKEVLAFQETNSDFLSAXXN

SEQ ID NO: 13189 - protein, 553 aa, Streptococcus agalactiae
ATGATGATTATAAAAGAAGTTTTAGCATTTCAAGAAACCAATTCAGACTTGTTTAAGTTGTCATATGCGAGTTATATTACTTCTTTGGCTGATGTGGTTTAGTGATAATGTAGCGGATGCTCAATTATTTATTTTCCTAAAGAAAACGTTAGAATTGATTGAGGACGGTTTAGATTATGAGATTCTAACGAATATTTTTGAAGTACAACTACTAGAGAGGTTCGGTGTTGCTTTAAATTTTTATGATTGTGTTTTTTGTCATAGGGCAGGATTACCTTTTGATTTTTCACACAAATATTCTGGATTATTATGTCCAAACCATTATTATAAAGACGAGAGAAGAAACCACCTAGATCCTAATATGCTGTACTTAATCAATCGTTTTCAGTCAATTCAATTTGATGATTTACAAACAATTTCTGTGAAACCTGAGATGAAACTTAAAATTCGTCAATTTTTGGACATGATTTACGATGAATATGTAGGGATTCATCTTAAAAGTAAAAAATTTATTGATGATTTGTCTAGTTGGGGAAGTATTATGAAATCAGAT

SEQ ID NO: 13190 - protein, 185 aa, Streptococcus agalactiae
  VARIANT 33, 34: Xaa = Any Amino Acid
MMIIKEVLAFQETNSDLFKLSYASYITSLADVXXSDNVADAQLFIFLKKTLELIEDGLDYEILTNIFEVQLLERFGVALNFYDCVFCHRAGLPFDFSHKYSGLLCPNHYYKDERRNHLDPNMLYLINRFQSIQFDDLQTISVKPEMKLKIRQFLDMIYDEYVGIHLKSKKFIDDLSSWGSIMKSD

SEQ ID NO: 13191 - DNA, 849 bp, Streptococcus agalactiae
atgaaaaaaacattatacattaccaataaactcttttttgctaactggtttgtgccagttattggtgcagttctaattcaagttatcggcatcattgtaagtagacgccttgtagtaaaattgctacctgatgattataaattcaatttatacattgcgcttttactatttattcctattttggcaagtattttactatttttaatctattttcaaaaaagggattttacttccttgggatttactaaagataataatgttttaacaacgatctcaggatttattactggtagtttactgatgttttttatttatatttgccactggttatcaggttttgtggaaatttcttccagcaattccttttcttttggaccttttttctttttattacttgcatactttatccaaagcttgacagaggaaattttatttagaggatatgttatgacaacagttaccaaatttaaaggtagttttgcaggtgttttatgcaattctatgttgttttcctttatccactttagaaactatggtatcacagcaatagcactttttaatttatttttacttggtattattttttctattctttttaatakgaccaaaaatattctttttgttacaggagttcatactgcatggaattttactatgggatgtgtattaggtaataaggttagtggggggtattctcctgtttctctttttagaattactgaaaattctagctttgctatttggagtggtggggattttggttttgaagggggagtactatgttctttgatattagtaggttgtttagcatacttttctttggaaagagtgaaagtatctgttagatat

SEQ ID NO: 13192 - protein, 283 aa, Streptococcus agalactiae
  VARIANT 201: Xaa = Any Amino Acid
MKKTLYITNKLFFANWFVPVIGAVLIQVIGIIVSRRLVVKLLPDDYKFNLYIALLLFIPILASILLFLIYFQKRDFTSLGFTKDNNVLTTISGFITGSLLMFFIYICHWLSGFVEISSSNSFSFGPFFFLLLAYFIQSLTEEILFRGYVMTTVTKFKGSFAGVLCNSMLFSFIHFRNYGITAIALFNLFLLGIIFSILFNXTKNILFVTGVHTAWNFTMGCVLGNKVSGGYSPVSLFRITENSSFAIWSGGDFGFEGGVLCSLILVGCLAYFSLERVKVSVRY

SEQ ID NO: 13193 - DNA, 990 bp, Streptococcus agalactiae
atgaagaaaattgctgtagatgctatgggtggagattacgctcccaaagctattgtagagggtgttaatcaagctatttcagattttagtgatattgaagtacaactctatggcgatcagaaaaaaattgagaaatatttaacagtaacggagcgagttagtattattcatactgaagaaaaaattaattctgatgatgagcctgctaaagctgttcgtcgtaaaaaacagtcttcgatggtcttaggagctaaggcagtcaaagatggtgttgcacaggcctttatttctgcagggaatacaggagctttattagctgctggtttgtttgtagtaggacgtataaaaggtgttgatcgaccaggcttaatgtcaactatgcctacgttagatggtgtgggttttgatatgcttgatttaggagctaatgcagaaaacacagcttctcatcttcatcaatatgctattttagggtcgttttatgcaaaaaatgtccgtggtattgaagttcctcgtgtaggtctcttaaataacggaacggaagaaacaaaaggcgattctcttcataaagaagcctatgaactgttagcagcagagccttctattaattttattggaaatattgaagcacgtgatttgatgtctagtgtagcagatattgttgtcactgatggttttactggaaatgctgttctaaagacaatggaaggtacagctatgaatattatgggaagtctaaaatcttcaattaaatcaggtggcgtgaaagctaaattaggagcacttctattaaaagatagcctgtatcagctaaaagatagtatggactattcaagcgcgggaggtgcggttctttttggtttaaaagctccaatagtaaaatgccatggatcaagtgattctaaagctgtttattctactttgaagcaagttcgtacaatgttggaaactcaagtagttgatcaattagttgatgcctttacagatgaa

SEQ ID NO: 13194 - protein, 330 aa, Streptococcus agalactiae
MKKIAVDAMGGDYAPKAIVEGVNQAISDFSDIEVQLYGDQKKIEKYLTVTERVSIIHTEEKINSDDEPAKAVRRKKQSSMVLGAKAVKDGVAQAFISAGNTGALLAAGLFVVGRIKGVDRPGLMSTMPTLDGVGFDMLDLGANAENTASHLHQYAILGSFYAKNVRGIEVPRVGLLNNGTEETKGDSLHKEAYELLAAEPSINFIGNIEARDLMSSVADIVVTDGFTGNAVLKTMEGTAMNIMGSLKSSIKSGGVKAKLGALLLKDSLYQLKDSMDYSSAGGAVLFGLKAPIVKCHGSSDSKAVYSTLKQVRTMLETQVVDQLVDAFTDE

SEQ ID NO: 13195 - DNA, 237 bp, Streptococcus agalactiae
atgtcaagagatgaagtttttgaaaagatgctggaattattaaggcagcaacttggtgacccacagttagatatcacaccagagtcatcgttacatgatgatttagcaattgactctatcgctttaacagagtttattatcaatttggaagatgtgtttcatctagagattccagatgaggctgtcgaacacatgtcaagcgtccaacaactattagattatatcattgaacataag

SEQ ID NO: 13196 - protein, 79 aa, Streptococcus agalactiae; identical to SEQ ID NO: 64

SEQ ID NO: 13197 - DNA, 702 bp, Streptococcus agalactiae
gtgactaaccagcttatttataaaggaaaagcgaaagatatttatagtacaaaagatgaaaatgtgattagaacggtctataaagaccaagctactatgttgaatggagctcgtaaggagactattgatggcaagggagcactaaataatcagatttcatctcttatttttgagaaattaaatatggctggtgtggtgacacattatattgagcaaatttcaaaaaacgaacaattgaataaaaaagttgatattattccacttgaggtggtattacggaatgtgacagcaggctcattttcaaaacgttttggagtggaagaaggacgcgttcttgaaactccaattgtggaattttactacaaaaatgatgatctgaatgatccttttatcaatgatgagcatatgaagtttttgggtattgttaatgatgaagaaattgcttatctgaaaggagagactcgccgtattaatgaactcttgaaagattggtttgctcagattgggcttaacttgattgacttcaagttggagttcggatttgacaaggatggcaaaatcatcttggctgatgagttctcacctgacaactgccgtctatgggatgctgaaggaaatcatatggacaaggatgtttttcgtagagatcttggtagcttgaccgatgtctatcaagttgtacttgagaagttgatagcattg

SEQ ID NO: 13198 - protein, 234 aa, Streptococcus agalactiae
MTNQLIYKGKAKDIYSTKDENVIRTVYKDQATMLNGARKETIDGKGALNNQISSLIFEKLNMAGVVTHYIEQISKNEQLNKKVDIIPLEVVLRNVTAGSFSKRFGVEEGRVLETPIVEFYYKNDDLNDPFINDEHMKFLGIVNDEEIAYLKGETRRINELLKDWFAQIGLNLIDFKLEFGFDKDGKIILADEFSPDNCRLWDAEGNHMDKDVFRRDLGSLTDVYQVVLEKLIAL

SEQ ID NO: 13199 - DNA, 3798 bp, Streptococcus agalactiae
ttgggcttactgaaatctcaatttcagatatcctcctatttttcagtcgctcccttgtcggacttggtatcttatatgaataaacgtatttttgttgagaaaaaggctgactttgacattaaatcggctagtcttgtgaaagagttgacgcataatctacaactgacttctttgaaggatttgcgtattgtgcaggtctatgatgtcttcaatttggctgaggatttgctggcgcgtgctgagaagcatattttctctgagcaggtgacagactgtcttttgacggaaactgaaatcactgcggagcttgataaggttgccttctttgccattgaggcgcttcctggtcaatttgaccaacgtgctgctagttcgcaagaagctttgctattgcttggaagtgacagtcaggttaaggtcaatacagcccagctttacttggtcaataaggatattgcagaagcagagcttgaagccgttaagaactatcttttgaatcctgttgattcacgtttcaaggacattaccttgccgcttgaagagcaggctttctctgtgtctgataagacaatccctagtcttgatttctttgaaacttataaggctgacgattttgcggcctataaggcagagcagggcttggctatggaggtcgatgatcttctcttcatccaagattatttcaaatcaatcgggcgtgtgccaactgaaactgagttgaaagttttggatacttactggtcagaccactgccgtcacacaacctttgaaactgagttgaaaaacatcgacttttcagcttctaaattccaaaaacaattgcaggcgacttatgacaaatatatcgccatgcgtgatgaacttggtcgttctgaaaagccgcagacacttatggatatggcgactatctttggtcgttatgaacgtgccaatggacgactggatgatatggaagtctcagatgaaatcaatgcctgctcagttgaaattgaagtagatgttgatggtgtaaaagagccttggctcctcatgtttaagaatgagactcacaatcacccaacagaaattgagccatttggtggcgcagcaacttgtatcggtggtgccattcgtgacccgttgtcaggacgttcatacgtttatcaggctatgcgtatttcaggcgcaggcgatattacgactccgattgcggaaacacgtgctggtaaattgccgcaacaggttatttctaaaactgcggcgcacggctattcttcatatggtaaccagattgggcttgcgacaacttatgtgcgtgagtactttcaccctggctttgtagccaaacgcatggagcttggagctgtggttggtgctgcacctaaggaaaatgtggttcgtgaaaaaccagaagcaggcgatgtggtcatcttgctcggtggtaaaacaggtcgtgacggtgtcggcggtgcgacaggttcatctaaggttcaaacggttgaatctgtggaaacagctggcgcagaggtacaaaaagggaatgccatcgaagaacgtaagattcaacgccttttccgtgatggtaatgtcactcgcctaatcaagaaatcaaatgacttcggtgcaggtggtgtctgtgttgccatcggtgaattggctgacggtcttgaaatcgatttggacaaggtaccgcttaaataccaaggtcttaatggtactgaaattgcaatctcagaatcacaagagcgtatgtcagtcgttgttcgtcctagtgacgtggataccttcatcgcagcctgcaacaaggaaaatatcgatgccgttgtggttgctactattactgcaaaaccaaaccttgtcatgacttgggatggtgaaacaattgttgacttggaacgccgtttccttgataccaacggtgtccgtgtcgttgttgatgctaaagtcgttgacaaagacttgacagttccagaggtacgcacaacatcagcagagacacttgaagcggatacgcttaaggtcttgtctgacctcaaccacgctagtcaaaaaggtctccaaactatctttgactcatctgttggtcgctcaaccgttaaccacccaatcggtggccgttaccaaatcacaccaacagaaagctctgttcaaaaattgccagttcaacacggtgtcacaacaactgcatctgttatggctcaaggttacaatccttatattgcagaatggtcaccttaccacggtgctgcctatgctgtcattgaagcgacagctcgcttggtagcaacgggtgctgactggtctcgtgcacgtttctcttaccaagagtatttcgagcgtatggataaacaggcagagcgttttgatcagccagtatcagctcttcttggttctattgaggctcagattcaacttggattgccatcaatcggcggtaaggactctatgtctggtactttcgaagaattgacagtaccgccaaccttggtagctttcggtgtgacaacagcggacagccgcaaggttctctctcctgagtttaaagcggctggtgagaatatctactacattccaggtcaagctatttcagaagatattgattttgaccttatcaaggctaactttagccagttcgagactattcaagctcaacataagattactgctgcttcagctgttaaatacggtggtgtcctagaaagtcttgctctcatgacttttggtaaccgtatcggggcctctgttgaaattgcagagcttgacagtagcttgacagctcaactcggaggctttgtctttacatcagctgaggaaattgctgactcggtgaaaatcggtcaaactcaggcagcctttacacttactgtcaatggaaatgaccttgctggggcaagccttctatcagtcttcgaaggcaaattggaagaggtttacccaacagagtttgaacaggcagacgctcttgaagaagttcctgctgtggtatcagatactgttatcaaggctaaggaaacaattgaaaaaccagtggtttacattccagtcttccctggtaccaactcagaatatgattcagctaaggcctttgaacaggttggagctagtgtcaacttggtaccatttgtaaccttgaatgaggctgctattgctgactcagttgacacaatggtcgctaatattgctaaggcaaatatcatcttctttgctggaggattctcagcagcggatgaaccagatgggtctgctaagtttatcgtcaatatcttgcttaacaagaaggttcgcgcagctattgacagcttcatcgaaaaaggtggccttatcatcggtatctgtaatggtttccaagcccttgttaaatcaggtcttcttccatacggaaacttcgaggaagctggtgagacaagtccaaccctcttctataacgatgccaaccagcacgttgccaagatggtggagactcgtatcgcaaataccaactcaccttggttggtaggagttgaggtcggcgatattcatgccatcccagtttcacacggtgaaggtaaatttgttgtcagcgcttctgaatttgcagagctaagagacaatggtcaaatctggagccaatatgtggactttgacggacaaccatctatggattctaaatacaatccaaatggctctgtcaatgccatcgaagggattaccagcaagaatggtcaaatcatcggtaagatggggcactcagaacgctgggaagacggcctcttccaaaatatccctggtaacaaagaccaagccttgtttgctagtgcagtaaaatattttacaggaaaa

SEQ ID NO: 13200 - protein, 1266 aa, Streptococcus agalactiae
MGLLKSQFQISSYFSVAPLSDLVSYMNKRIFVEKKADFDIKSASLVKELTHNLQLTSLKDLRIVQVYDVFNLAEDLLARAEKHIFSEQVTDCLLTETEITAELDKVAFFAIEALPGQFDQRAASSQEALLLLGSDSQVKVNTAQLYLVNKDIAEAELEAVKNYLLNPVDSRFKDITLPLEEQAFSVSDKTIPSLDFFETYKADDFAAYKAEQGLAMEVDDLLFIQDYFKSIGRVPTETELKVLDTYWSDHCRHTTFETELKNIDFSASKFQKQLQATYDKYIAMRDELGRSEKPQTLMDMATIFGRYERANGRLDDMEVSDEINACSVEIEVDVDGVKEPWLLMFKNETHNHPTEIEPFGGAATCIGGAIRDPLSGRSYVYQAMRISGAGDITTPIAETRAGKLPQQVISKTAAHGYSSYGNQIGLATTYVREYFHPGFVAKRMELGAVVGAAPKENVVREKPEAGDVVILLGGKTGRDGVGGATGSSKVQTVESVETAGAEVQKGNAIEERKIQRLFRDGNVTRLIKKSNDFGAGGVCVAIGELADGLEIDLDKVPLKYQGLNGTEIAISESQERMSVVVRPSDVDTFIAACNKENIDAVVVATITAKPNLVMTWDGETIVDLERRFLDTNGVRVVVDAKVVDKDLTVPEVRTTSAETLEADTLKVLSDLNHASQKGLQTIFDSSVGRSTVNHPIGGRYQITPTESSVQKLPVQHGVTTTASVMAQGYNPYIAEWSPYHGAAYAVIEATARLVATGADWSRARFSYQEYFERMDKQAERFDQPVSALLGSIEAQIQLGLPSIGGKDSMSGTFEELTVPPTLVAFGVTTADSRKVLSPEFKAAGENIYYIPGQAISEDIDFDLIKANFSQFETIQAQHKITAASAVKYGGVLESLALMTFGNRIGASVEIAELDSSLTAQLGGFVFTSAEEIADSVKIGQTQAAFTLTVNGNDLAGASLLSVFEGKLEEVYPTEFEQADALEEVPAVVSDTVIKAKETIEKPVVYIPVFPGTNSEYDSAKAFEQVGASVNLVPFVTLNEAAIADSVDTMVANIAKANIIFFAGGFSAADEPDGSAKFIVNILLNKKVRAAIDSFIEKGGLIIGICNGFQALVKSGLLPYGNFEEAGETSPTLFYNDANQHVAKMVETRIANTNSPWLVGVEVGDIHAIPVSHGEGKFVVSASEFAELRDNGQIWSQYVDFDGQPSMDSKYNPNGSVNAIEGITSKNGQIIGKMGHSERWEDGLFQNIPGNKDQALFASAVKYFTGK

SEQ ID NO: 13201 - protein, 1452 aa, Streptococcus agalactiae
ATGACATACGAAGTAAAATCTCTAAATGAAGAATGTGGAGTCTTTGGTATCTGGGGGCATCCTCAGGCAGCTCAAGTCACTTACTTTGGGCTTCATAGCCTTCAACATCGCGGTCAAGAAGGTGCTGGTATTGTTTCGAATGATAATGGGAAACTCTATGGTTATCGAAATGTTGGGCTCCTTTCTGAAGTTTTTAAGAATCAATCTGAATTAGATAATTTAACTGGGAATGCGGCTATTGGACATGTTCGGTATGCTACTGCAGGTTCTGCAGATATTCGCAATATTCAGCCTTTTCTTTATAAATTTCATGACGGGCAATTTGCTTTATGCCATAATGGTAATTTGACAAATGCTATTTCTTTAAGGAAAGAATTAGAAAAGCAAGGTGCAATTTTCAATGCCTCCTCAGATACTGAAATTTTGATGCACTTGATTCGTCGAAGCCATAACCCAAGTTTTATGGGGAAGGTAAAAGAAGCTTTAAGCACTGTAAAGGGAGGCTTCGCCTATCTACTGATGACAGAAGATAAATTAATTGCTGCTCTTGACCCTAATGCCTTTCGTCCTTTGTCAATTGGACAAATGCAAAATGGTGCTTGGGTTATTTCCAGTGAGACCTGTGCTTTTGAGGTGGTAGGCGCAAAATGGGTTAGAGATGTTGAACCTGGCGAAGTTATCCTTATAGACGATAGTGGTATTCAATGTGATCGTTATACTGATGAAACGCAACTGGCAATTTGTTCGATGGAATATGTCTATTTTGCAAGGCCGGATTCAACTATACATGGTGTTAATGTTCATACGGCTCGAAAAAATATGGGAAAGCGTCTTGCACAAGAATTTAAACAGGATGCTGATATTGTAATTGGTGTCCCAAATTCGTCCTTATCGGCTGCTATGGGCTTTGCTGAAGAATCCGGATTACCAAATGAGATGGTTCTTGTAAAAAATCAGTATACGCAGCGAACCTTTATTCAACCGACACAAGAATTAAGGGAACAAGGTGTTCGAATGAAACTATCAGCGGTATCTGGTGTTGTCAAAGGAAAGCGCGTTGTTATGATTGATGACTCAATTGTAAGAGGAACGACTTCTAGAAGGATTGTCGGATTATTAAGAGAAGCAGGAGCTAGTGAAGTACATGTTGCTATAGCTAGTCCAGAATTAAAGTATCCTTGTTTTTATGGTATTGATATTCAAACAAGACGAGAATTAATTTCAGCAAATCACGCTGCTGACGAAGTGTGTGATATTATTGGCGCAGATAGTCTGACCTATCTCTCACTAGATGGGTTGATTGAATCAATTGGACTCGAAACAAAAGCACCAAATGGTGGTTTATGCGTAGCTTACTTTGATGGACATTATCCAACACCGCTTTATGATTATGAAGAAGAATACCTCAGAAGTTTAGAAGAAGAAACAAGTTTTTATATTCAAAAAGTGAAA

SEQ ID NO: 13202 - protein, 484 aa, Streptococcus agalactiae
MTYEVKSLNEECGVFGIWGHPQAAQVTYFGLHSLQHRGQEGAGIVSNDNGKLYGYRNVGLLSEVFKNQSELDNLTGNAAIGHVRYATAGSADIRNIQPFLYKFHDGQFALCHNGNLTNAISLRKELEKQGAIFNASSDTEILMHLIRRSHNPSFMGKVKEALSTVKGGFAYLLMTEDKLIAALDPNAFRPLSIGQMQNGAWVISSETCAFEVVGAKWVRDVEPGEVILIDDSGIQCDRYTDETQLAICSMEYVYFARPDSTIHGVNVHTARKNMGKRLAQEFKQDADIVIGVPNSSLSAAMGFAEESGLPNEMVLVKNQYTQRTFIQPTQELREQGVRMKLSAVSGVVKGKRVVMIDDSIVRGTTSRRIVGLLREAGASEVHVAIASPELKYPCFYGIDIQTRRELISANHAADEVCDIIGADSLTYLSLDGLIESIGLETKAPNGGLCVAYFDGHYPTPLYDYEEEYLRSLEEETSFYIQKVK

SEQ ID NO: 13203 - protein, 1020 aa, Streptococcus agalactiae
ATGTCTGAAAAAAATGCTTATGCAAAATCTGGTGTTGATGTTGAAGCTGGTTATGAAGTGGTTGAAAGAATAAAAAAACACGTTTCTCGTACAGAACGTGCGGGAGTCATGGGAGCTCTAGGTGGCTTTGGTGGGGTGTTTGACTTGAGTAAAACAGGAGTTAGAGAGCCTATTTTGGTTTCAGGAACAGACGGTGTTGGCACAAAACTCATGCTTGCGATTAAATATCAACAGCATGACACCATAGGCCAAGATTGTGTTGCCATGTGTGTCAATGATATTATTGCAGCAGGTGCTGAGCCATTATATTTTTTAGATTATATTGCGACAGGAAAAAATAACCCAGTCAAACTTGAAGAAGTTGTTTCTGGCGTTGCAGAAGGTTGTGTTCAAGCAGGAGCAGCACTCATTGGAGGTGAGACCGCTGAAATGCCTGGGATGTATGGCGAAGATGATTATGACCTTGCTGGCTTTGCTGTTGGTGTGGCTGAAAAATCTCAGCTCATTGATGGTTCCAAAGTAAAGGAAGGCGATATTCTTTTGGGACTTGCTTCAAGTGGTATCCACTCAAACGGTTATTCGCTGGTGCGTCGTGTCTTTGCTGACTATACTGGTAAAGAGCTGCTTCCAGAGCTTGAAGGTAAACAACTCAAGGATGTCCTTCTTGAGCCAACTCGTATCTATGTTCAAGCAGCTCTGCCATTAATCAAGGAAGAACTAGTCAACGGTATCGGCCACATCACGGGTGGTGGCTTTATCGAGAATGTTCCTCGTATGTTTGCGGATGATTTGGCTGCGGAAATCGATGAGGATAAGGTGCCAGTACTTCCGATTTTCAAGGCGCTTGAAAAATATGGTGACATCAAGCACGAAGAAATGTTTGAAATCTTCAATATGGGTGTCGGTCTTATGCTAGCTGTTAGTCCTGAAAATGTTAACCGCGTCAAAGAGCTCTTGGACGAACCAGTTTATGAAATCGGTCGTATCATCAAGAAAGCAGACGATAGTGTGGTGATTAAA

SEQ ID NO: 13204 - protein, 340 aa, Streptococcus agalactiae
MSEKNAYAKSGVDVEAGYEVVERIKKHVSRTERAGVMGALGGFGGVFDLSKTGVREPILVSGTDGVGTKLMLAIKYQQHDTIGQDCVAMCVNDIIAAGAEPLYFLDYIATGKNNPVKLEEVVSGVAEGCVQAGAALIGGETAEMPGMYGEDDYDLAGFAVGVAEKSQLIDGSKVKEGDILLGLASSGIHSNGYSLVRRVFADYTGKELLPELEGKQLKDVLLEPTRIYVQAALPLIKEELVNGIGHITGGGFIENVPRMFADDLAAEIDEDKVPVLPIFKALEKYGDIKHEEMFEIFNMGVGLMLAVSPENVNRVKELLDEPVYEIGRIIKKADDSVVIK

SEQ ID NO: 13205 - protein, 546 aa, Streptococcus agalactiae
ATGAAAATCGCTGTTTTTGCTTCTGCTAATGGTTCCAACTTTCAGGTCATAGCAGAGCAGTTTCCAGTTAGTTTTGTCTTTTCAGATCATCGTGATGCCTATGTTTTAGAGCGTGCTCAGAACTTAGCCATTCCAAGCTTCGCTTTTGAACTCAAAGAGTTTGAGAATAAGGCGGCTTACGAGCAAGCCGTCGTTGATTTGTTGGACAAACACGAGATTGACTTGGTCTGTCTGGCGGGCTACATGAAGATTGTCGGAGAAACCTTGCTCTCAGCCTATGAAGGGCGTATCATCAATATTCACCCAGCCTATCTGCCTGAATTTCCAGGTGCTCACGGTATCAAGGATGCTTGGGAGGCAGGTGTTGACCAGTCTGGTGTGACCATCCATTGGGTGGACTCTGGTGTGGATACCGGTCAGGTCATCCAACAAGTGCGCGTGCCACGCCTAGCAGACGATAGCCTAGAAAGCTTTGAAACCCGCATCCATGAAACCGAATATCAACTCTATCCAGATGTTTTGGATAGTTTGGGCATAAAGAGAAAA

SEQ ID NO: 13206 - protein, 182 aa, Streptococcus agalactiae
MKIAVFASANGSNFQVIAEQFPVSFVFSDHRDAYVLERAQNLAIPSFAFELKEFENKAAYEQAVVDLLDKHEIDLVCLAGYMKIVGETLLSAYEGRIINIHPAYLPEFPGAHGIKDAWEAGVDQSGVTIHWVDSGVDTGQVIQQVRVPRLADDSLESFETRIHETEYQLYPDVLDSLGIKRK

SEQ ID NO: 13207 - protein, 750 aa, Streptococcus agalactiae
ATGAAACTAGTGAAAAATTTAGAGATAGTAGAGTCTATTTTTGGTGATTGGGACGAGACCATAATCTGGTCGTGTGTCCAAGGTATTATGGGAGAAGTTTTTGTAGATAGTTTAGACCAACCAAAATCTTCTTTGGCAAAATTGGGAAGGAAATCATCTTTTGGCTTTCTAGCAGGTCAGCCTACTTTATTTCTACTAGAAGTTTGCTCTGGGGAGGATATTATCCTTGTTCCTCAGCATAAAGGATGGTCAGATTTGATTGAATCAACTTATGGCCAGAATGCCCATTCTTTTAAGCGTTATGCGACGAAAAAAGATACTTTGTTTGAGCGAAGTAGGTTAGAGAAGTTTGTTACTCAGTTGCCAAATGGTTTTGAATTACGTGTTATTGATGAGAAAGTTTACAACTCTTGCTTAGAAAAGGAATGGTCACAGGATTTAGTAGCAAATTACGCTACTTATCAGTACTATAAAAAACAAGGTATAGGTTATGTTATATATTATCAGGGGAATATCATTGCAGGAGCTTCATCTTATTCAACCTATAAAAATGGGATCGAGATAGAAGTAGATACGCATCCAGATTTTCGTCGGCGTGGTTTAGCAACAATAGTTGCAGCTCAGTTGATACTAACTTGTTTAGATAAGGGAATTTATCCTAGCTGGGATGCTCATACAAGGACTTCATTGAATTTATCTGAAAAACTCGGTTATGAATTTTCTCATGAATACATAGCCTATGAAATAGAT

SEQ ID NO: 13208 - protein, 250 aa, Streptococcus agalactiae
MKLVKNLEIVESIFGDWDETIIWSCVQGIMGEVFVDSLDQPKSSLAKLGRKSSFGFLAGQPTLFLLEVCSGEDIILVPQHKGWSDLIESTYGQNAHSFKRYATKKDTLFERSRLEKFVTQLPNGFELRVIDEKVYNSCLEKEWSQDLVANYATYQYYKKQGIGYVIYYQGNIIAGASSYSTYKNGIEIEVDTHPDFRRRGLATIVAAQLILTCLDKGIYPSWDAHTRTSLNLSEKLGYEFSHEYIAYEID

SEQ ID NO: 13209 - protein, 1545 aa, Streptococcus agalactiae
ATGACTAAACGTGCTTTAATCTCAGTTTCTGACAAATCAGGAATTATTGACTTTGCAAAAGAATTGAAAAACTTGGGTTGGGATATTATCTCAACTGGTGGGACTAAGGTTGCCCTTGACGATGCTGGTGTTGAGACCATTGCTATTGACGATGTAACTGGCTCCCCAGAAATGATGGATGGTCGTGTTAAGACCCTCCACTCAAACATTCACGGTGGGATTTTGGCTCGTCGCGACGCTGACAGCCACCTTCAGGCTGCTAAGGACAACAACATCGAGTTGATTGACCTCGTGGTTGTCAACCTCTATCCCTTCAAGGAGACTATCCTTCGCCCAGACGTGACCAACGATTTGGCGGTGGAAAACATCGACATCGGCGGTCCATCAATGCTTCGCTCAGCTGCTAAAAACCACGCTAGCGTAACCGTTGTGGTTGATCCAGCTGACTATGCCACTGTTTTGGGAGAATTGGCTGACGCTAGTCAGACGACATTTAAAACTCGTCAACGCTTGGCAGCTAAGGCCTTCCGTCATACGGCAGCCTACGACGCTTTGATTGCTGAGTACTTCACAGCTCAAGTGGGAGAGGCTAAGCCTGAAAAATTGACCATCACTTATGATCTTAAACAGGCTATGCGTTACGGAGAAAATCCACAGCAAGACGCTGATTTCTACCAAAAAGCCTTACCAACAGACTACTCAATCGCTTCAGCTAAACAGCTCAATGGAAAAGAATTGTCCTTCAATAATATCCGTGATGCTGATGCAGCAATCCGTATTATCCGCGATTTCAAAGACAGTCCAACGGTTGTTGCCCTCAAACACATGAACCCATGTGGTATCGGACAGGCTGATGATATTGAGACAGCTTGGGATTACGCTTATGAAGCTGATCCAGTTTCAATCTTTGGTGGAATTGTTGTCCTTAACCGTGAAGTTGACGCAGCGACAGCTGAGAAGATGCACCCTATCTTCTTGGAAATCATCATCGCACCATCATACTCAGAAGAAGCGCTAGCTATTCTCACAAATAAAAAGAAAAACTTGCGTATCCTTGAGTTGCCGTTTGATGCCCAAGCTGCCAGCGAAGTGGAAGCTGAGTACACTGGCGTAGTTGGTGGACTTTTGGTGCAAAACCAAGACGTTGTGGCTGAAAATCCATCTGACTGGCAAGTGGTGACAGACCGCCAGCCAACAGAACAAGAGGTGACTGCCCTTGAGTTTGCCTGGAAGGCTATCAAGTATGTTAAGTCTAACGGGATTATTATTACTAACGATCACATGACGCTTGGACTGGGTGTAGGTCAAACCAACCGTGTCGGCTCAGTCAAGATTGCTATCGAGCAGGCTAAGGACCACCTTGACGGTGCCGTTCTAGCATCAGATGCCTTCTTCCCATTTGCGGACAACATTGAAGAAATAGCTGCCGCAGGCATCAAAGCAATCATCCAGCCAGGTGGTTCAGTTCGTGATCAAGAATCTATTGACGCCGCAAACAAACATGGCTTGACCATGATCTTCACAGGCGTGAGACATTTTAGACAT

SEQ ID NO: 13210 - protein, 515 aa, Streptococcus agalactiae
MTKRALISVSDKSGIIDFAKELKNLGWDIISTGGTKVALDDAGVETIAIDDVTGSPEMMDGRVKTLHSNIHGGILARRDADSHLQAAKDNNIELIDLVVVNLYPFKETILRPDVTNDLAVENIDIGGPSMLRSAAKNHASVTVVVDPADYATVLGELADASQTTFKTRQRLAAKAFRHTAAYDALIAEYFTAQVGEAKPEKLTITYDLKQAMRYGENPQQDADFYQKALPTDYSIASAKQLNGKELSFNNIRDADAAIRIIRDFKDSPTVVALKHMNPCGIGQADDIETAWDYAYEADPVSIFGGIVVLNREVDAATAEKMHPIFLEIIIAPSYSEEALAILTNKKKNLRILELPFDAQAASEVEAEYTGVVGGLLVQNQDVVAENPSDWQVVTDRQPTEQEVTALEFAWKAIKYVKSNGIIITNDHMTLGLGVGQTNRVGSVKIAIEQAKDHLDGAVLASDAFFPFADNIEEIAAAGIKAIIQPGGSVRDQESIDAANKHGLTMIFTGVRHFRH

SEQ ID NO: 13211 - protein, 897 aa, Streptococcus agalactiae; identical to SEQ ID NO: 4371

SEQ ID NO: 13212 - protein, 299 aa, Streptococcus agalactiae; identical to SEQ ID NO: 4372

SEQ ID NO: 13213 - protein, 1302 aa, Streptococcus agalactiae
ATGAAAATGAATAAAAAGGTACTATTGACATCGACAATGGCAGCTTCGCTATTATCAGTCGCAAGTGTTCAAGCACAAGAAACAGATACGACGTGGACAGCACGTACTGTTTCAGAGGTAAAGGCTGATTTGGTAAAGCAAGACAATAAATCATCATATACTGTGAAATATGGTGATACACTAAGCGTTATTTCAGAAGCAATGTCAATTGATATGAATGTCTTAGCAAAAATTAATAACATTGCAGATATCAATCTTATTTATCCTGAGACAACACTGACAGTAACTTACGATCAGAAGAGTCATACTGCCACTTCAATGAAAATAGAAACACCAGCAACAAATGCTGCTGGTCAAACAACAGCTACTGTCGATTTGAAAACCAATCAAGTTTTTGTTGCAGACCAAAAAGTTTCTCTCAATACAATTTCGGAAGGTATGACACCAGAAGCAGCAACAACGATTGTTTCGCCAATGAAGACATATTCTTCTGCGCCAGCTTTGAAATCAAAAGAAGTATTAGCACAAGAGCAAGCTGTTAGTCAAGTAGCAGCTAATGAACAGGTATCACCAGCTCCTGTGAAGTCGATTACTTCAGAAGTTCCAGCAGCTAAAGAGGAAGTTAAACCAACTCAGACGTCAGTCAGTCAGTTAACAACAGTATCACCAGCTTCTGTTGCCGCTGAAACACCAGCTCCAGTAGCTAAAGTAGCACCGGTAAGAACTGTAGCAGCCCCTAGAGTGGCAAGTGCTAAAGTAGTCACTCCTAAAGTAGAAACTGGTGCATCACCAGAGCATGTATCAGCTCCAGCAGTTCCTGTGACTACGACTTCACCAGCTACAGACAGTAAGTTACAAGCGACTGAAGTTAAGAGCGTTCCGGTAGCACAAAAAGCTCCAACAGCAACACCGGTAGCACAACCAGCTTCAACAACAAATGCAGTAGCTGCACATCCTGAAAATGCAGGGCTCCAACCTCATGTTGCAGCTTATAAAGAAAAAGTAGCGTCAACTTATGGAGTTAATGAATTCAGTACATACCGTGCGGGAGATCCAGGTGATCATGGTAAAGGTTTAGCAGTTGACTTTATTGTAGGTAAAAACCAAGCACTTGGTAATGAAGTTGCACAGTACTCTACACAAAATATGGCAGCAAATAACATTTCATATGTTATCTGGCAACAAAAGTTTTATTCAAATACAAATAGTATTTATGGACCTGCTAATACTTGGAATGCAATGCCAGATCGTGGTGGCGTTACTGCCAACCACTATGACCACGTTCACGTATCATTTAACAAA

SEQ ID NO: 13214 - protein, 434 aa, Streptococcus agalactiae
MKMNKKVLLTSTMAASLLSVASVQAQETDTTWTARTVSEVKADLVKQDNKSSYTVKYGDTLSVISEAMSIDMNVLAKINNIADINLIYPETTLTVTYDQKSHTATSMKIETPATNAAGQTTATVDLKTNQVFVADQKVSLNTISEGMTPEAATTIVSPMKTYSSAPALKSKEVLAQEQAVSQVAANEQVSPAPVKSITSEVPAAKEEVKPTQTSVSQLTTVSPASVAAETPAPVAKVAPVRTVAAPRVASAKVVTPKVETGASPEHVSAPAVPVTTTSPATDSKLQATEVKSVPVAQKAPTATPVAQPASTTNAVAAHPENAGLQPHVAAYKEKVASTYGVNEFSTYRAGDPGDHGKGLAVDFIVGKNQALGNEVAQYSTQNMAANNISYVIWQQKFYSNTNSIYGPANTWNAMPDRGGVTANHYDHVHVSFNK

SEQ ID NO: 13215 - protein, 588 aa, Streptococcus agalactiae
ATGCCTCTTTTAGCTTTGGCAGCTCAAGAAGCAGGAGCGGTTGGTATAAGAGCCAATAGTGTCCGCGACATTAAGGAAATTCAAGAAGTTACTAATTTACCTATCATCGGCATTATTAAACGTGAATATCCTCCACAAGAACCATTTATCACTGCTACGATGACAGAGGTGGATCAATTAGCTACTTTAGATATTGCAGTAATAGCCTTAGATTGTACACTTAGAGAGCGTCATGATGGTTTGAGTGTAGCTGAGTTTATTCAAAAGATAAAAAGGAAATATCCTAAACAGTTGTTAATGGCTGATATAAGTACTTTTGAAGAAGGCAAAAATGCTTTTGAAGCAGGAGTTGATTTTGTGGGTACAACTCTATCGGGATACACAGATTACAGCCGCCAAGAAGAAGGACCGGATATAGAACTCCTTAATAAGCTTTGTCAAGCCGGTATAGATGTGATTGCGGAAGGTAAAATTCATACTCCTAAGCAGGCTAATGAAATTAATCATATAGGTGTTGCAGGAATTGTAGTTGGGGGTGCTATCACTAGACCAAAAGAAATAGCGGAGCGTTTCATCTCAGGACTTAGT

SEQ ID NO: 13216 - protein, 196 aa, Streptococcus agalactiae
MPLLALAAQEAGAVGIRANSVRDIKEIQEVTNLPIIGIIKREYPPQEPFITATMTEVDQLATLDIAVIALDCTLRERHDGLSVAEFIQKIKRKYPKQLLMADISTFEEGKNAFEAGVDFVGTTLSGYTDYSRQEEGPDIELLNKLCQAGIDVIAEGKIHTPKQANEINHIGVAGIVVGGAITRPKEIAERFISGLS

SEQ ID NO: 13217 - protein, 1314 aa, Streptococcus agalactiae
ATGAGTATCAAAAAAAGTGTGATTGGTTTTTGCCTCGGAGCTGCAGCATTATCAATGTTTGCTTGTGTAGACAGTAGTCAATCTGTTATGGCTGCCGAGAAGGATAAAGTCGAAATTACGTGGTGGGCTTTTCCAACCTTTACTCAAGAAAAGGCTAAGGATGGAGTAGGTACTTATGAGAAAAAAGTCATCAAGGCTTTTGAAAAGAAAAATCCTAATATAAAAGTAAAACTAGAGACAATTGATTTCACATCTGGACCTGAAAAAATCACTACAGCAATTGAAGCAGGGACAGCACCTGATGTGCTTTTTGATGCACCAGGGCGAATTATTCAATATGGTAAAAATGGTAAATTAGCAGATTTGAATGATTTATTTACAGACCAATTTATTAAGGATGTCAATAATAAGAACATCATTCAAGCTTCTAAGTCTGGCGATAAAGCCTACATGTATCCAATAAGTTCTGCCCCATTTTATATGGCGTTCAATAAAAAAATGCTTAAAGATGCAGGAGTTTTGAAACTTGTAAAAGAAGGTTGGACTACTAGTGATTTTGAAAAAGTACTAAAAGCACTAAAAAATAAAGGCTATACACCAGGTTCATTCTTTGCAAACGGGCAAGGAGGAGATCAAGGACCACGTGCATTTTTTGCTAATCTTTATAGTGCTCCAATAACAGATAAAGAAGTAACAAAATATACCACTGACACTAAAAATTCTGTAAAATCAATGAAAAAAATAGTTGAATGGATTAAGAAAGGCTACTTGATGAATGGGTCTCAGTATGATGGCTCAGCTGACATTCAAAACTTCGCCAATGGACAAACTGCTTTCACTATCCTATGGGCTCCAGCTCAACCAAAAACTCAAGCAAAATTATTAGAGTCAAGTAAAGTGGATTACCTTGAAGTGCCATTCCCATCAGAAGATGGAAAACCAGATTTAGAATACCTTGTTAATGGTTTTGCGGTCTTTAATAATAAAGATGAAAACAAAGTAAAAGCCTCTAAGAAATTTATCACTTTTATTGCTGATGATAAAAAATGGGGACCAAAAGATGTTATACGTACAGGTGCTTTCCCAGTTAGAACATCATTTGGGGATCTTTATAAAGGTGATAAACGTATGATGAAGATTTCAAAATGGACTCAATATTATTCACCATATTACAACACTATCGATGGATTTTCTGAAATGAGAACCTTATGGTTCCCAATGGTTCAATCTGTATCCAATGGTGATGAAAAACCAGCAGATGCTTTGAAAGACTTTACTCAAAAAGCAAATGATACCATTAAAAAAGCAGCTAAA

SEQ ID NO: 13218 - protein, 438 aa, Streptococcus agalactiae; identical to SEQ ID NO: 4378

SEQ ID NO: 13219 - protein, 885 aa, Streptococcus agalactiae
ATGCGTACTAATAAGTTAAAGATGAGGGAAACGATGATAGCTTATGCTTTTCTAGCGCCTATTCTCTTATTTTTCTTAATTTTTGTTTTTGCACCGATGGTTATGGGCTTTGTCACTAGTTTTTTTAATTATTCTATGACACAGTTCACTTTTATTGGGTTAGCTAATTACAATCGTATGTTTCATGATTCTATTTTCATGAAATCCTTGATAAATACAGTAATCATTGTGATTGGCTCTGTGCCAGTAGTGGTTTTCTTCTCACTTTTTGTTGCTGCCAATACTTATGAAAAAAATGTTTTTTCACGCTCTTTCTACCGTTGTGTCTTCTTCTTGCCAGTAGTAACTGGTAGTGTTGCAGTCACAGTTGTTTGGAAATGGATTTATGACCCTATGTCCGGAATTTTAAATTACATCTTGAAATCAGGTCATGTCATTGAACAGAATATTAGCTGGCTTGGTGATAAGCACTGGGCATTACTTGCTATTATTATTATTTTGCTAACGACCTCAGTTGGTCAACCTATTATTCTATATATTGCGGCGATGGGAAATATTGATAATTCTCTTTGCGAAGCTGCGCGTGTTGATGGAGCCAATGAAATGCAAGTTTTTTGGCAAATTAAATGGCCGAGTCTCTTACCAACTACACTCTATATTGCAGTTATAACAACAATTAATTCATTTCAATGTTTTGCCTTAATCCAGCTCCTAACATCTGGTGGACCAAATTATTCAACAAGCACTTTGATGTATTATCTTTATGAAAAAGCCTTTAAACTATCAGAATATGGCTATGCTAATACTATGGGAGTATTCCTAGCAGTAATGATTGCTTTAATAAGTTTTGCTCAATTTAAGATCTTAGGAAATGATGTGGAATAT

SEQ ID NO: 13220 - protein, 295 aa, Streptococcus agalactiae; identical to SEQ ID NO: 94

SEQ ID NO: 13221 - protein, 828 aa, Streptococcus agalactiae; identical to SEQ ID NO: 4381

SEQ ID NO: 13222 - protein, 276 aa, Streptococcus agalactiae; identical to SEQ ID NO: 96

SEQ ID NO: 13223 - protein, 441 aa, Streptococcus agalactiae
ATGATTTACGATCATTTATTGAATTTAACGCATTATAAAGATATTAATCCTAATTTAGATTTAGCGATTGATTATCTACTAAGTCATGATTTAAGGAATTTAGATATAGGCACCTATCATATTAGCCCAGAAGTGATACTCATGGTCCAATCAAATCAACTTAGTGAGTCATTTGATCATATTTTTGAATACCATAAAAAATACCTTGATATACATTATGTCATTGAAGGATATGAAGTTATCAAATTGGGAAAAGGTGATAAGGTAGAGGTAGAGGAATACTTAGGCGATATAGGATTTGTCAAGTGCTCAGAAGAGACTTCTTTTGATTTGAGAGATAATTATATAGCCTTCTTTTTCCCAGAAGAAGCTCATCAGCCAAATGGTATGGGAAGTCTAGGTAATTATGTCAAAAAAGGGGTATTGAAAGTGTTAATGGCG

SEQ ID NO: 13224 - protein, 147 aa, Streptococcus agalactiae
MIYDHLLNLTHYKDINPNLDLAIDYLLSHDLRNLDIGTYHISPEVILMVQSNQLSESFDHIFEYHKKYLDIHYVIEGYEVIKLGKGDKVEVEEYLGDIGFVKCSEETSFDLRDNYIAFFFPEEAHQPNGMGSLGNYVKKGVLKVLMA

SEQ ID NO: 13225 - protein, 660 aa, Streptococcus agalactiae
GTGAAAAAAGCAAATCAATTAATAGCAGCGATTTTTGATCTTAACAACCCCTTTATGCAAGGTTGCAATGTTGTTTTTGATCTGGCATTGCTAAACCTTCTCTTTATGATAACTTGCCTACCATTGGTAACTATTGGTGCTGCTAAAATTAGTTTGTATCGAACGTTGTGGCAAAAATTAGAAGGTGATCAGACAAATCTTTTAATATTGTATATAAAACACCTAAAAAAAGAGTGGTTCCAAGGTATGCTTTTAGGTTTGGTTGAACTAAGTATTTTGGTTGTGATCATATTTGATTTAACAATTCTTCATTATCAAATAGGTTTCATTGTGCCTTTCTTGAAGATAATTTGTTACGCCTTTTTGTTATTGACTGTGATGACGAGCATATACCTATTTCCTATGGCTGCCCGCTATGAAATGTCTCTTTTAGATACCGTGAAAAAGAGCTTTATAATGGCATGTTTAAACTTGAAATGGACTGGTGTATTGATGTTTTTATTAATCATGACTTGGTTTATTATGGTGCAGTCTAGTCTCTTATTTATGCTTACAGTGTCAGCTATATTTATTTTTGCTTATACCGCCTTTGCTTACTTTAAAATTATTATTTTACAAAAACAATTTGCCTATTTCAGCAAACAACAAGGGGATTATCAA

SEQ ID NO: 13226 - protein, 220 aa, Streptococcus agalactiae
MKKANQLIAAIFDLNNPFMQGCNVVFDLALLNLLFMITCLPLVTIGAAKISLYRTLWQKLEGDQTNLLILYIKHLKKEWFQGMLLGLVELSILVVIIFDLTILHYQIGFIVPFLKIICYAFLLLTVMTSIYLFPMAARYEMSLLDTVKKSFIMACLNLKWTGVLMFLLIMTWFIMVQSSLLFMLTVSAIFIFAYTAFAYFKIIILQKQFAYFSKQQGDYQ

SEQ ID NO: 13227 - protein, 915 aa, Streptococcus agalactiae
ATGAAAGATTTACAAAAATATCAAGGAATTATTCCTGCATTTTATGCTTGCTATGATGATAAGGGTGATATTTGTCCCGAACGAGTAAAAGCCCTGACCAATTATTTTATTGATAAAGGTGTTCAAGGACTTTATGTTAATGGTTCATCAGGAGAATGTATTTACCAAAGTGTAGCAGATCGTAAACTTGTACTGGAAAATGTTATGTCCGTTGCTAAGGGTAAACTAACAGTGATAGCGCATGTAGCATGTAATAATACTAAGGATAGCGTCGAGTTGGCTATGCATGCTGAAGCTATGGGTGTTGATGCTATTGCAGCAATTCCACCAATTTATTTTCGATTACCAGAGTATGCCATAGCAGATTATTGGAATACTATTAGTCAAGCAGCACCACAAACTGATTTTATTATTTACAATATTCCTCAATTGGCAGGGGTTGCTTTGACATCGGATTTATATCGAAAAATGTTACAAAATCCGCAAGTAATTGGTGTTAAAAATTCTTCCATGCCAGTTCAAGACATTCAGAATTTTGTGGCTATTGGAGGAGAAAATCATATTGTTTTTAATGGTCCAGATGAACAATTTTTGGGTGGTCGTCTCATGGGAGCAGCTGCAGGTATTGGTGGTACCTATGGCGTAATGCCAGAATTATACTTGACTTTAAATCAGTTAATTGTTGATAAAGATTTAGAAAAAGCGCGTGAACTTCAATTTACAATTAACGATATTATCACAAAGCTTTGTTCGGGTCATGGTAATATGTATGCTGTGATCAAAGCTGTATTGGAAATCAATGAGCAACTAACTATAGGTTCCGTTCGGTTACCTTTAGCATCTGTAACAGAAGAAGATAAACCTATTATTAAAGAGGCAGCAGAAATGATTAGACATGCTAAAAAACAGTTTTGT

SEQ ID NO: 13228 - protein, 305 aa, Streptococcus agalactiae
MKDLQKYQGIIPAFYACYDDKGDICPERVKALTNYFIDKGVQGLYVNGSSGECIYQSVADRKLVLENVMSVAKGKLTVIAHVACNNTKDSVELAMHAEAMGVDAIAAIPPIYFRLPEYAIADYWNTISQAAPQTDFIIYNIPQLAGVALTSDLYRKMLQNPQVIGVKNSSMPVQDIQNFVAIGGENHIVFNGPDEQFLGGRLMGAAAGIGGTYGVMPELYLTLNQLIVDKDLEKARELQFTINDIITKLCSGHGNMYAVIKAVLEINEQLTIGSVRLPLASVTEEDKPIIKEAAEMIRHAKKQFC

SEQ ID NO: 13229 - protein, 879 aa, Streptococcus agalactiae
ATGACCAGAACAGTAGCAATTGATATTGGCGGTACAATGATTAAGCATGGCATTGTGGATAATTTAGGTTGTATTGTTGAGGCAAGTGAGCTTGCCACAGAAGCCTACAAAGGTGGTCCAGGCATTTTACAAAAAGTTTGTCAAATTATCGATAACTATCTAACAGAAGGGAGCATTGATGGAATTGCTATCTCATCTGCTGGCATGGTAGATCCAGATGAAGGATGCATATTTTACTCTGGTCCTCAAATTCCAAACTATGCTGGGACACAATTTAAGAAAGTTTTAGAAGACACTTATCAAGTACGCACAGAAATTGAAAATGATGTTAATTGTGCAGGATTAGCGGAAGCTGTCTCAGGTAGTGCCAAAGATAGTTCAATAGCGCTTTGTCTTACTATTGGAACAGGTATTGGTGGTTGTCTGATTATTGATAAAACAGTTTTTCATGGCTTTAGTAATTCTGCTTGTGAAGTTGGCTATATGCACCTTTCAGATGGTGATTTTCAAGATTTAGCCTCTACAACTGCACTGATTGCTGATGTTGCCAAAGCGCATGGAGATGAAATTAACCGATGGGATGGACGTCGTATTTTTCAGGAGGCTAAAGAAGGCAATGAGAAATGTATTGCAAGTATAGACCGTATGATAAACTACCTTGGTCAAGGAATCGCTAATATGGTTTATGTGGTAAATCCTGAAAAAGTTGTTTTAGGTGGTGGAATCATGGCTCAAAAAGATTATTTACAAGATAAACTTAGTGAATCTTTGAAACGAAATCTTGTGACAAGTCTTGCTGAAAAAACAATAATAGTTTTTGCACAACACGAAAACCAAGCTGGTATGCTAGGAGCTTACTACCATTTTAAAAACAGGGGG

SEQ ID NO: 13230 - protein, 293 aa, Streptococcus agalactiae
MTRTVAIDIGGTMIKHGIVDNLGCIVEASELATEAYKGGPGILQKVCQIIDNYLTEGSIDGIAISSAGMVDPDEGCIFYSGPQIPNYAGTQFKKVLEDTYQVRTEIENDVNCAGLAEAVSGSAKDSSIALCLTIGTGIGGCLIIDKTVFHGFSNSACEVGYMHLSDGDFQDLASTTALIADVAKAHGDEINRWDGRRIFQEAKEGNEKCIASIDRMINYLGQGIANMVYVVNPEKVVLGGGIMAQKDYLQDKLSESLKRNLVTSLAEKTIIVFAQHENQAGMLGAYYHFKNRG

SEQ ID NO: 13231 - protein, 975 aa, Streptococcus agalactiae
ATGATTGAAACAATGTCGCTAGATGACATGAGAGAATACCTAGGTCAAGACCAAATTCCCGAGGATTTTGATGACTTCTGGAAAAAACAAACAATGAAATATCAAGGGAATATTGAGTATCGTCTAGACAAAAAAGATTTCAATATTACTTTTGCACAAGCTTATGATCTTCATTTTAAAGGCAGCAATAACTCTATTGTCTATGCCAAATGTTTATTCCCTAAAACAAATAAACCCTATCCTGTAGTTTTTTATTTTCATGGTTACCAAAACCAAAGTCCTGACTGGAGTGACCAACTTAATTATGTAGCAGCAGGTTACGGCGTTGTTTCAATGGATGTTCGAGGTCAAGCTGGACAGTCTCAAGACAAGGGGCATTTTGATGGCATTACAGTTAAGGGCCAGATTGTGCGAGGAATGATCTCAGGACCAAATCATCTTTTTTATAAAGACATTTATCTTGATGTTTTCCAATTGATTGATATCATTGCTACATTAGAGAGTGTTGATAGTAATCAACTTTATAGTTATGGCTGGTCTCAAGGTGGAGCACTTGCTTTGATAGCTGCAGCTCTTAATCCCAAAATCGTCAAGACCGTTGCTGTTTACCCATTTTTGTCAGACTTTAGACGAGTATTAGATTTAGGGAATGTCAGTGAGCCTTATGACGAACTCTTCCGCTATTTTAAATATAGTGATCCTTTTCATAAAACAGAAAATAATGTGTTAAAAACTTTGGCTTATATTGATGTTAAAAATTTTGCACATAGGATTTCTTGCCCCGTTGTTTTACTAACAGCCTTGAAAGATGATATTTGTCCTCCATCAAGTCAATTTGCCATTTTTAACCGTTTGACATCAACTAAAAAGCATCTTTTATTACCAGACTATGGACATGATCCAATGACAGTACAAGTAAAAGACTATATTTTTGATCAACTGACAGGAAGTCAATTTACAAAGCAAAAAATCGAG

SEQ ID NO: 13232 - protein, 325 aa, Streptococcus agalactiae
MIETMSLDDMREYLGQDQIPEDFDDFWKKQTMKYQGNIEYRLDKKDFNITFAQAYDLHFKGSNNSIVYAKCLFPKTNKPYPVVFYFHGYQNQSPDWSDQLNYVAAGYGVVSMDVRGQAGQSQDKGHFDGITVKGQIVRGMISGPNHLFYKDIYLDVFQLIDIIATLESVDSNQLYSYGWSQGGALALIAAALNPKIVKTVAVYPFLSDFRRVLDLGNVSEPYDELFRYFKYSDPFHKTENNVLKTLAYIDVKNFAHRISCPVVLLTALKDDICPPSSQFAIFNRLTSTKKHLLLPDYGHDPMTVQVKDYIFDQLTGSQFTKQKIE

SEQ ID NO: 13233 - protein, 801 aa, Streptococcus agalactiae
ATGACTATTTATGACCAAATTGAGTCTGCTCTTGATTTAATGACTGATTTAGAACATGAAATTGCTTGTTATTTTATGGGGCAGCCCATTTCAAAAGACGCTCTTGCTTCTTCCATTGTCACTAAGCAACTACACATTTCACAAGCAGCCTTAACGCGTTTTGCTAAAAAATGTGGGTTTAAAGGCTATCGTGAATTTGTTTTTGAATATTTAAAAAGCCATGAGACCATCAGTCAACAATTATACGGTCTTCAAAATGACAACACTAAGAAAGTATTTATGAATTATCAAGAGATGGTTTCTAAATCCGCTGATATTATTGATGAAGAACAGCTTCTAGAAGTATCACATATGATTGAGCAAGCTGATCGTGTTTATTTTTATGGCAAAGGGAGCTCATCGCTAGTAGCTAAAGAATTTAAAATACGCCTTATGAGGCTGGGAGTGATTTGTGAGGCTCTGGATGATACAGATAGTTTCTCATGGACTAATAGTATTGTTAATGATAGATGCCTCGTCATTGCCTTCTCACTTTCTGGGAACACCAACTCTGTTATCGGTGCCTTAAAAATCGCAAGTTGTCACGGAGCTAAAACCGTTCTATTTACAAAACAACCTCACACAATTGACTATGCTTTTGACAAGATTATTCAGGTGGCCTCTGCTAGGCATTTAGACTACGGCAATAGAATTTCGCCTCAGATCCCAATGTTAATCATGGTAGATATTATCTATGCACAATTTTTAGATATTAATAAAATAGAAAAAGAGCGAATTTTTAGAGAAACCATTATTCAACGC

SEQ ID NO: 13234 - protein, 267 aa, Streptococcus agalactiae
MTIYDQIESALDLMTDLEHEIACYFMGQPISKDALASSIVTKQLHISQAALTRFAKKCGFKGYREFVFEYLKSHETISQQLYGLQNDNTKKVFMNYQEMVSKSADIIDEEQLLEVSHMIEQADRVYFYGKGSSSLVAKEFKIRLMRLGVICEALDDTDSFSWTNSIVNDRCLVIAFSLSGNTNSVIGALKIASCHGAKTVLFTKQPHTIDYAFDKIIQVASARHLDYGNRISPQIPMLIMVDIIYAQFLDINKIEKERIFRETIIQR

SEQ ID NO: 13235 - protein, 1260 aa, Streptococcus agalactiae
ATGAAATTGCTTGTTGTTGGTTCTGGTGGTCGTGAGCATGCGATTGCTAAGAAGTTGTTAGTGTCTAAGGGTGTAGATCAGGTTTTTGTGGCACCTGGTAATGATGGTATGACCTTGGATGGTCTAGGCTTGGTAAATATCGTAATTTCCGAACATTCTAGGCTGATTGACTTTGCTAAGGAGAATGAGATTGCTTGGACTTTTATTGGTCCTGATGATGCGCTAGCGGCTGGTATCGTTGATGATTTCAACAGTGCTGGACTTAGAGCTTTTGGGCCAACAAAGGCAGCAGCGGAGCTAGAGTGGTCAAAAGACTTTGCTAAGGAAATCATGGTTAAATACAACGTTCCAACAGCAGCCTATGGCACATATTCAGATTTTGAAAAAGCTAAAGCCTACATCGAAGAGCAGGGTGCACCAATCGTGGTCAAGGCTGATGGCTTGGCGTTAGGCAAGGGCGTGGTCGTGGCTGAAACCGTTGAGCAGGCGGTAGAGGCGGCGCAAGAGATGCTTTTGGACAACAAGTTTGGCGACTCAGGAGCGCGTGTGGTTATCGAGGAATTTTTGGATGGTGAAGAGTTCTCCCTCTTTGCCTTCGCTAATGGCGACAAGTTTTACATCATGCCGACAGCTCAGGATCACAAGTGTGCCTATGACGGTGATATGGGACCAAACACTGGCGGTATGGGTGCCTATGCGCCAGTTCCCCACCTGCCTCAGAGCGTAGTGGATACGGCGGTTGAAACCATCGTTAAGCCTATCCTTGAGGGTATGATTACTGAAGGGCGTCCTTATCTAGGCGTCCTCTATGCGGGGCTTATCCTGACGGCTGATGGTCCGAAGGTTATCGAGTTCAACTCACGTTTCGGTGACCCAGAAACTCAGATTATCCTCCCTCGCCTGACTTCTGATTTTGCTCAGAACATCGACGACATCATGATGGGCATCGAGCCTTACATCACTTGGCAGAAGGACGGCGTGACTTTGGGCGTTGTCGTTGCCTCAGAAGGCTATCCGCTCGATTACGAGAAAGGTGTGCCACTGCCTGAAAAGACCGACGGCGACATCATCACCTACTATGCCGGAGCTAAGTTTGCGGAAAATGGCAAAGCACTGCTCTCAAACGGTGGACGAGTCTATATGCTTGTCACCACAGAAGACAGCGTCAAAGCAGGGCAGGACAAAATCTATACCCAACTAGCCCAACAAGACACCACAGGCCTCTTCTACCGAAACGACATCGGAAGCAAAGCTATTAAG

SEQ ID NO: 13236 - protein, 420 aa, Streptococcus agalactiae
MKLLVVGSGGREHAIAKKLLVSKGVDQVFVAPGNDGMTLDGLGLVNIVISEHSRLIDFAKENEIAWTFIGPDDALAAGIVDDFNSAGLRAFGPTKAAAELEWSKDFAKEIMVKYNVPTAAYGTYSDFEKAKAYIEEQGAPIVVKADGLALGKGVVVAETVEQAVEAAQEMLLDNKFGDSGARVVIEEFLDGEEFSLFAFANGDKFYIMPTAQDHKCAYDGDMGPNTGGMGAYAPVPHLPQSVVDTAVETIVKPILEGMITEGRPYLGVLYAGLILTADGPKVIEFNSRFGDPETQIILPRLTSDFAQNIDDIMMGIEPYITWQKDGVTLGVVVASEGYPLDYEKGVPLPEKTDGDIITYYAGAKFAENGKALLSNGGRVYMLVTTEDSVKAGQDKIYTQLAQQDTTGLFYRNDIGSKAIK

SEQ ID NO: 13237 - protein, 582 aa, Streptococcus agalactiae
GTGGGTGCGTCTTCGAAATCAAAGATTTCGGACTTACCGCATATTTTTCTACGAAAATTTTCGACAAGTCGAAACGTCCCTTTGTATCTTAATATTATGCAACCAATTATTTCTATTATCATGGGTTCCAAATCCGACTGGACAACCATGCAAAAAACGGCTGAAGTTCTAGATAACTTTGGCATTGCTTACGAGAAGAAAGTCGTCTCTGCCCACCGTACGCCAGACCTCATGTTCAAGCATGCTGAGGAGGCGCGTGGTCGTGGTATCAAAATCATCATTGCTGGAGCAGGTGGGGCAGCCCACTTGCCTGGTATGGTAGCAGCTAAAACAACCCTGCCTGTTATCGGTGTGCCTGTCAAATCACGTGCCCTTTCAGGCTTGGATTCGCTCTATTCCATTGTGCAGATGCCTGGCGGTGTGCCTGTGGCAACCATGGCTATCGGAGAAGCGGGAGCGACTAACGCTGCCCTAACAGCCCTCCGTATTCTCTCTATCGAGGACCAAAATCTGGCTGATGCGCTAGCTCATTTCCATGAGGAACAAGGAAAAATCGCAGAGGAGTCAAGCAATGAACTCATT

SEQ ID NO: 13238 - protein, 194 aa, Streptococcus agalactiae
MGASSKSKISDLPHIFLRKFSTSRNVPLYLNIMQPIISIIMGSKSDWTTMQKTAEVLDNFGIAYEKKVVSAHRTPDLMFKHAEEARGRGIKIIIAGAGGAAHLPGMVAAKTTLPVIGVPVKSRALSGLDSLYSIVQMPGGVPVATMAIGEAGATNAALTALRILSIEDQNLADALAHFHEEQGKIAEESSNELI

SEQ ID NO: 13239 - protein, 1071 aa, Streptococcus agalactiae
ATGAACTCATTTAAGACCATTGGGATTATCGGTGGTGGTCAGCTGGGGCAGATGATGGCGATTGCGGCTATCTACATGGGCCACAAGGTCATTACGCTGGATCCTGCTAGCGACTGCCCTGCCTCCCGCGTTAGCGAGGTGATTGTGGCGCCTTACGATGACGTTGAGGCTTTGGGACAATTAGCTGCGCGTTGTGATGTTTTGACCTATGAGTTTGAAAATGTTGATGCCGATGGTCTGGATGCCGTTGTGTCAGCTGGTCAGCTACCGCAGGGGACTGATCTGCTCCGCATTTCTCAAAACCGTATCTTTGAAAAAGACTTTCTGGCAAATAAGGCTGGAGTGACTGTCGCTCCCTATAAGGTGGTGACGTCTAGCCTTGACCTAGAGGGGCTTGACTTGACCAAGACCTATGTCCTCAAGACAGCGACAGGTGGTTATGACGGTCATGGGCAAAAGGTTATCCGCTCAGCAGAAGACCTGCCAGAGGCGCAACAATTAGCCAACTCAGCTGAGTGTGTCTTGGAAGAGTTTGTCGACTTTGACCTTGAAATCTCAGTCATCGTGTCTGGAAATGGCAAGGATGTGACGGTCTTTCCCGTTCAGGAAAATATCCACCGCAACAATATCCTATCAAAAACTATCGTACCAGCTCGCATCTCAGACCAACTAGCTGACAAGGCTAAGAAAATGGCGGTACAGATTGCCAAGGAACTCCAGCTATCAGGAACCCTCTGTGTGGAAATGTTTGTGACCGCAGATGATATCATCGTCAATGAAATCGCCCCACGCCCCCACAACTCAGGGCACTATTCTATCGAAGCCTGTGACTTTTCACAGTTTGACACCCACATCTTGGGTGTACTGGGGCAACCTCTCCCACCAATCAAGCTCCATGACCCAGCCGTTATGCTTAATGTCCTTGGACAACATGTCCAGCAGGCGATTGACTATGTTGCCCAAAACCCTAGCGCTCACCTCCACATGTATGGTAAACTAGAAGCGAAACATAACCGCAAAATGGGACATGTAACGGTGTTTGTGGAAGATGCGGATGAGGTGGAGGAGTTT

SEQ ID NO: 13240 - protein, 357 aa, Streptococcus agalactiae
MNSFKTIGIIGGGQLGQMMAIAAIYMGHKVITLDPASDCPASRVSEVIVAPYDDVEALGQLAARCDVLTYEFENVDADGLDAVVSAGQLPQGTDLLRISQNRIFEKDFLANKAGVTVAPYKVVTSSLDLEGLDLTKTYVLKTATGGYDGHGQKVIRSAEDLPEAQQLANSAECVLEEFVDFDLEISVIVSGNGKDVTVFPVQENIHRNNILSKTIVPARISDQLADKAKKMAVQIAKELQLSGTLCVEMFVTADDIIVNEIAPRPHNSGHYSIEACDFSQFDTHILGVLGQPLPPIKLHDPAVMLNVLGQHVQQAIDYVAQNPSAHLHMYGKLEAKHNRKMGHVTVFVEDADEVEEF

SEQ ID NO: 13241 - protein, 804 aa, Streptococcus agalactiae
ATGGGTCTATTTGGATTCGGAAAGCCTAAAGATGAGGCTTTGGAAGCTAAAATCAGTAGTTTAGAAAGTAAGTTAAAAGATAAACAATCTATTTTGGATGATTTAACAAGGCAGATAAAGGTTGCTAAAGATATTTTAAAACTTGATGATGAACTTAAGAAACGCCAATCAGAACTTAAAGCTTTACAAAAAGAGGTAATAGTTCTTAATGATGATTTAGATCTTCAAGAGTACGGATTTTTTGAGAGAAAATATAAGTTCTCAGATAGTACTAAGTATAAAGAAGAATTGGAAACTCTGAGAAAGAGGCAAAAACAGTTAGTAAAAGATAAAAAAGCGGGTGTTATTGTAAGACCTATGTTGCTGGATAACAGTAAATCAAAAGGACGAGCAATGCAAAATCAACTTATTAAAGCGATGATAAGAGGTTTTAATGGAGAAGTTGATGCTCACCTGGTAAAGGTAACGGCTACTAATCTAAGTAAAAAAGTAGATGCAGTTGTTAAATCATTTAATCAGCTTAATAAGATGTATTCAAGAAATTTGGTATGTCTATCTAATGACTATCTTGAGCTAAAAATTTCAGAGTTACAATTAGCAGTAGAATATGAACTTCAGAAATTAGAAGAAAAAGAACTTCTTCGTGAACAACGTGCGAAGGAAAGAGAAGATAAGAAACTTCAAGCAGAATTAGCTGCTAAGAGAAAACAATTGAAAAAGATAGAAAACACTTTAAACAGATGTTAGATAACGTTGAAGAATTACTTAAAACAGCTAATGAGGAAGAAAAGGAAATTAATCTAT

SEQ ID NO: 13242 - protein, 270 aa, Streptococcus agalactiae
  VARIANT 237, 265: Xaa = Any Amino Acid
MGLFGFGKPKDEALEAKISSLESKLKDKQSILDDLTRQIKVAKDILKLDDELKKRQSELKALQKEVIVLNDDLDLQEYGFFERKYKFSDSTKYKEELETLRKRQKQLVKDKKAGVIVRPMLLDNSKSKGRAMQNQLIKAMIRGFNGEVDAHLVKVTATNLSKKVDAVVKSFNQLNKMYSRNLVCLSNDYLELKISELQLAVEYELQKLEEKELLREQRAKEREDKKLQAELAAKRKXIEKDRKHFKQMLDNVEELLKTANEEEKXKLNLH

SEQ ID NO: 13243 - protein, 593 aa, Streptococcus agalactiae
TTGATTCAAGATATTCTAAAAAGTGTAAGTAGAGAAGATTCTAATACATTAGAGACAGATACATTAGCAATCAAAGATAATGCAATAATAGTAAAAAATAGCAGTATTCAGATAACGTCTATCTCAATGGTAAGTAGAAGTAATTTTTCATCTCCAATAACGTTGCTAGATTATGTGATTTTATTTGTATTATTTATTATAGGACTGATTCCTCCTTTTATAGGACTTATATTTTTGGTAGGCTATGCTTACCTAGTTTATAAAAAGCATAAGCAACATTTAAATTCAAAATATTATATTATTTTTAACTTGGGCTCTAGCAGGGACTATTTTCTTTATTTTAAAGATTCGATTTTAGAGATAAAGTTTTCGATGTAATTACAAAATCGTTCAATAACAAAAATCAAAATATAAAAATTGATATAAAAAACCAAAATATAAAGGGCGATAATTATGAATCTGGATCTAGTCGAAATGATGTCTCAGGTAGTGGTAATATAGTTGGAACAAATATTGATAACGGTAGTCAAGTTAGTTTATCTGGGGATATATCAAATGGTTCTACTATCATAAAAGATTNNNNNTTAATTAAT

SEQ ID NO: 13244 - protein, 198 aa, Streptococcus agalactiae
  VARIANT 194, 195: Xaa = Any Amino Acid
MIQDILKSVSREDSNTLETDTLAIKDNAIIVKNSSIQITSISMVSRSNFSSPITLLDYVILFVLFIIGLIPPFIGLIFLVGYAYLVYKKHKQHLNSKYYIIFNLGSSRDYFLYFKDSNFRDKVFDVITKSFNNKNQNIKIDIKNQNIKGDNYESGSSRNDVSGSGNIVGTNIDNGSQVSLSGDISNGSTIIKDXXLIN

SEQ ID NO: 13245 - protein, 1005 aa, Streptococcus agalactiae
TTGCCGCAACAGGTTATTTCTAAAACTGCGGCGCACGGCTATTCTTCATATGGTAACCAGATTGGGCTTGCGACAACTTATGTGCGTGAGTACTTTCACCCTGGCTTTGTAGCCAAACGCATGGAGCTTGGAGCTGTGGTTGGTGCTGCACCTAAGGAAAATGTGGTTCGTGAAAAACCAGAAGCAGGCGATGTGGTCATCTTGCTCGGTGGTAAAACAGGTCGTGACGGTGTCGGCGGTGCGACAGGTTCATCTAAGGTTCAAACGGTTGAATCTGTGGAAACAGCTGGCGCAGAGGTACAAAAAGGGAATGCCATCGAAGAACGTAAGATTCAACGCCTTTTCCGTGATGGTAATGTCACTCGCCTAATCAAGAAATCAAATGACTTCGGTGCAGGTGGTGTCTGTGTTGCCATCGGTGAATTGGCTGACGGTCTTGAAATCGATTTGGACAAGGTACCGCTTAAATACCAAGGTCTTAATGGTACTGAAATTGCAATCTCAGAATCACAAGAGCGTATGTCAGTCGTTGTTCGTCCTAGTGACGTGGATACCTTCATCGCAGCCTGCAACAAGGAAAATATCGATGCCGTTGTGGTTGCTACTATTACTGCAAAACCAAACCTTGTCATGACTTGGGATGGTGAAACAATTGTTGACTTGGAACGCCGTTTCCTTGATACCAACGGTGTCCGTGTCGTTGTTGATGCTAAAGTCGTTGACAAAGACTTGACAGTTCCAGAGGTACGCACAACATCAGCAGAGACACTTGAAGCGGATACGCTTAAGGTCTTGTCTGACCTCAACCACGCTAGTCAAAAGGTCTCCAACTATCTTGACTCATCTGTTGGTCGCTCAACGTTAACCACCATCGGTGGCCGTACAAATCACACCACAGAAGCTCTGTCAAAATTGCCAGTCACACGTGTCACACACTGCATCTGTATGCTCAGGTACATCCTATATGCAGATGTCACCTACACGTGCTGCTNNNNNTTAATTAAT

SEQ ID NO: 13246 - protein, 335 aa, Streptococcus agalactiae
  VARIANT 331, 332: Xaa = Any Amino Acid
MPQQVISKTAAHGYSSYGNQIGLATTYVREYFHPGFVAKRMELGAVVGAAPKENVVREKPEAGDVVILLGGKTGRDGVGGATGSSKVQTVESVETAGAEVQKGNAIEERKIQRLFRDGNVTRLIKKSNDFGAGGVCVAIGELADGLEIDLDKVPLKYQGLNGTEIAISESQERMSVVVRPSDVDTFIAACNKENIDAVVVATITAKPNLVMTWDGETIVDLERRFLDTNGVRVVVDAKVVDKDLTVPEVRTTSAETLEADTLKVLSDLNHASQKVSNYLDSSVGRSTLTTIGGRTNHTTEALSKLPVTRVTHCICMLRYILYADVTYTCCXXLIN

SEQ ID NO: 13247 - protein, 186 aa, Streptococcus agalactiae
TTGCTTAACAAGAAGGTTCGCGCAGCTATTGACAGCTTCATCGAAGAAGGTGGCCTTATCATCGGAATCTGTAATGGTTTCCAAGCCCTTGATAAATCAGGTCTTCTTCCATACGGAAACTTCGAGGAAGCTGGTGAGACAAGTCCAACCCTCTTCTATAACGATGCCAACGCAGCACGTNNNNNT

SEQ ID NO: 13248 - protein, 62 aa, Streptococcus agalactiae
  VARIANT 61, 62: Xaa = Any Amino Acid
MLNKKVRAAIDSFIEEGGLIIGICNGFQALDKSGLLPYGNFEEAGETSPTLFYNDANAARXX

SEQ ID NO: 13249 - protein, 158 aa, Streptococcus agalactiae
TTGAATAAATGGTTAGTTAAGGCAAGTTCCTTAGTTGTTTTAGGTGGTATGGTTTATCTGCGGGTTCCCGAGTTTTAGCGGATACTTATGTCCGTCCAATTGATAATGGTAGAATTACAACAGGTTTCAATGGTTATCCTGGACATTGTGGGGTGGAT

SEQ ID NO: 13250 - protein, 53 aa, Streptococcus agalactiae
MNKWLVKASSLVVLGGMVLSAGSRVLADTYVRPIDNGRITTGFNGYPGHCGVD

SEQ ID NO: 13251 - protein, 548 aa, Streptococcus agalactiae
ATGACAGACTTATCAGGAAATTGTGTCATGATTCAACATGCGGATGGAATGCATAGTGGTTACGCTCATATGTCACGTGTGGTGGCTAGGACTGGGAAAAAGTCAACAAGGAGATATCATCGGTTACGTAGGAGCAACTGGTATGGCGACGGGACCTCACCTTCATTTTGATTTTTACCAGCTAACCCTAATTTTCAAAATGTTTCCATGGACGTATCAATCCAACGTCACTAATTGCTAACGTTGCGACCTTTAGTGGAAAAACGCAAGCATCAGCTCCAAGCATTAAGCCATTACAATCAGCTCCTGTACAGAATCAATCTAGTAAATTAAAAGTGTATCGAGTAGATGAATTACAAAAGGTTAATGGTGTTTGGTTAGTCAAAAATAACACCCTAACGCCGACTGGGTTTGATTGGAACGATAATGGTATACCAGCATCAGAAATTGATGAGGTTGATGCTAATGGTAATTTGACAGCTGACCAGGTTCTTCAAAAAGGTGGTTACTTTATCTTTAATCCACCCCACAATGTCCAGGATAACCAT

SEQ ID NO: 13252 - protein, 184 aa, Streptococcus agalactiae
  VARIANT 33, 36, 69: Xaa = Any Amino Acid
MTDLSGNCVMIQHADGMHSGYAHMSRVVARTGXKVXQGDIIGYVGATGMATGPHLHFEFLPANPNFQNXFHGRINPTSLIANVATFSGKTQASAPSIKPLQSAPVQNQSSKLKVYRVDELQKVNGVWLVKNNTLTPTGFDWNDNGIPASEIDEVDANGNLTADQVLQKGGYFIFNPPHNVQDNH

SEQ ID NO: 13253 - protein, 543 aa, Streptococcus agalactiae
ATGACAGACTTAGCAGGAAATTGTGTCATGATTCAACATGCGGATGGAATGCATAGTGGTTACGCTCATATGTCACGTGTGGTGGCTAGGACTGGGGAAAAAGTCAAACAAGGAGATATCATCGGTTACGTAGGAGCAACTGGTATGGCGACGGGACCTCACCTTCATTTTGAATTTTTACCAGCTAACCCTAATTTTCAAAATGGTTTCCATGGACGTATCAATCCAACGTCACTAATTGCTAACGTTGCGACCTTTAGTGGAAAAACGCAAGCATCAGCTCCAAGCATTAAGCCATTACAATCAGCTCCTGTACAGAATCAATCTAGTAAATTAAAAGTGTATCGAGTAGATGAATTACAAAAGGTTAATGGTGTTTGGTTAGTCAAAAATAACACCCTAACGCCGACTGGGTTTGATTGGAACGATAATGGTATACCAGCATCAGAAATTGATGAGGTTGATGCTAATGGTAATTTGACAGCTGACCAGGTTTCTCAAAAAGGTGGGTACTTTTATTCTTATCCTAAACTCTTAAGACTG

SEQ ID NO: 13254 - protein, 181 aa, Streptococcus agalactiae
MTDLAGNCVMIQHADGMHSGYAHMSRVVARTGEKVKQGDIIGYVGATGMATGPHLHFEFLPANPNFQNGFHGRINPTSLIANVATFSGKTQASAPSIKPLQSAPVQNQSSKLKVYRVDELQKVNGVWLVKNNTLTPTGFDWNDNGIPASEIDEVDANGNLTADQVSQKGGYFYSYPKLLRL

SEQ ID NO: 13255 - protein, 657 aa, Streptococcus agalactiae
TTGGATTTCACATTCTGGGGACCTGAAAAAATCACTACAGCAATTGAAGCAGGGACAGCACCTGATGTGCTTTTTGATGCACCAGGGCGAATTATTCAATATGGTAAAAATGGTAAATTAGCAGATTTGAATGATTTATTTACAGACCAATTTATTAAGGATGTCAATAATAAGAACATCATTCAAGCTTCTAAGTCTGGCGATAAAGCCTACATGTATCCAATAAGTTCTGCCCCATTTTATATGGCGTTCAATAAAAAAATGCTTAAAGATGCAGGAGTTTTGAAACTTGTAAAAGAAGGTTGGACTACTAGTGATTTTGAAAAAGTACTAAAAGCACTAAAAAATAAAGGCTATACACCAGGTTCATTCTTTGCAAACGGGCAAGGAGGAGATCAAGGACCACGTGCATTTTTTGCTAATCTTTATAGTGCTCCAATAACAGATAAAGAAGTAACAAAATATACCACTGACACTAAAAATTCTGTAAAATCAATGAAAAAAAAAGTTGAATGGATTAAGAAAGGCTACTTGATGAATGGGTCTCAGTATGATGGCTCAGCTGACATTCAAAACTTCGCCAATGGACAAACTGCTTTCACTATCCTATGGGCTCCAGCTCAACCAAAAACTCAAGCAAAATTATTTAAAGTCAAG

SEQ ID NO: 13256 - protein, 219 aa, Streptococcus agalactiae
MDFTFWGPEKITTAIEAGTAPDVLFDAPGRIIQYGKNGKLADLNDLFTDQFIKDVNNKNIIQASKSGDKAYMYPISSAPFYMAFNKKMLKDAGVLKLVKEGWTTSDFEKVLKALKNKGYTPGSFFANGQGGDQGPRAFFANLYSAPITDKEVTKYTTDTKNSVKSMKKKVEWIKKGYLMNGSQYDGSADIQNFANGQTAFTILWAPAQPKTQAKLFKVK

SEQ ID NO: 13257 - protein, 387 aa, Streptococcus agalactiae
TTGCTAACGACCTCAGTTGGTCAACCTATTATTCTATATATGCGGGCGATGGGAAATATTGATAATTCTCTTTGCGAAGCTGCGCGTGTGATGGGAGCCAATGAAATGCAAGTTTTTTGGCAAATTAAATGGCCGAGTCTCTTACCAACTACACTCTATATTGCAGTTATAACAACAATTAATTCATTTCAATGTTTTGCCTTAATCCAGCTCCTAACATCTGGTGGACCAAATTATTCAACAAGCACTTTGATGTATTATCTTTATGAAAAAGCCTTTAAACTATCAGAATATGGCTATGCTAATACTATGGGAGTATTCCTAGCAGTAATGATTGCTTTAATAAGTTTTGCTCAATTTAAGATCTTAGGAAATGATGTGGAATAT

SEQ ID NO: 13258 - protein, 129 aa, Streptococcus agalactiae
MLTTSVGQPIILYMRAMGNIDNSLCEAARVMGANEMQVFWQIKWPSLLPTTLYIAVITTINSFQCFALIQLLTSGGPNYSTSTLMYYLYEKAFKLSEYGYANTMGVFLAVMIALISFAQFKILGNDVEY

SEQ ID NO: 13259 - protein, 369 aa, Streptococcus agalactiae
ATGAAAAAGAAAACATTCAGTGCTTATAACTTTTTAACGGCTCTTATCCTTTGTCTTTTGACAGTGCTTTTTATCTTTCCATTTTATTGGATTATGACAGGAGCTTTTAAATCTCAACCTGATACTATTATCATCCCCCCACAATGGTGGCCCAAAGCACCGACCTTAGAAAATTTTAAAGCTTTAACTGTACAAAACCCAGCTTTGAGATGGCTTTGGAATAGTGTCTTTATCTCAATTATGACAATGTTCCTAGTTTGCTGTACATCGTCAATGGCAGGCTATGTTTTAGCTAAGAAACGATTTTACGGTCAAAAAATATTGTTCTCCCTTTTTATTGCTGCTATGGCTTTACCTAAACAAGTTGTT

SEQ ID NO: 13260 - protein, 123 aa, Streptococcus agalactiae
MKKKTFSAYNFLTALILCLLTVLFIFPFYWIMTGAFKSQPDTIIIPPQWWPKAPTLENFKALTVQNPALRWLWNSVFISIMTMFLVCCTSSMAGYVLAKKRFYGQKILFSLFIAAMALPKQVV

SEQ ID NO: 13261 - protein, 300 aa, Streptococcus agalactiae
ATGGTCCAATCAAATCAACTTAGTGAGTCATTTGATCATATTTTTGAATACCATAAAAAATACCTTGATATACATTATGTCATTGAAGGATATGAAGTTATCAAATTGGGAAAAGGTGATAAGGTAGAGGTAGAGGAATACTTAGGCGATATAGGATTTGTCAAGTGCTCAGAAGAGACTTCTTTTGATTTGAGAGATAATTATATAGCCTTCTTTTTCCCAGAAGAAGCTCATCAGCCAAATGGTATGGGAAGTCTAGGTAATTATGTCAAAAAAGGGGTATTGAAAGTGTTAATGGCG

SEQ ID NO: 13262 - protein, 100 aa, Streptococcus agalactiae
MVQSNQLSESFDHIFEYHKKYLDIHYVIEGYEVIKLGKGDKVEVEEYLGDIGFVKCSEETSFDLRDNYIAFFFPEEAHQPNGMGSLGNYVKKGVLKVLMA

SEQ ID NO: 13263 - protein, 607 aa, Streptococcus agalactiae
TTGGTAGGCTATGCTTACCTAGTTTATAAAAAGCATAAGCACATTTTAATTCAAAAATATTATATTATTTTTAACTTGGGTCTAGCAGGGACTATTTTCTTTATTTAAAAGATTCGAATTTTAGAGATAAAGTTTTCGATGTAATTACAAAATCGTCAATAACAAAAATCAAAATATAAAAATTGATATAAAAAACCAAAATATAAAGGGCGATAATTATGAATCTGGATCTAGTCGAAATGATGTCTCAGGTAGTGGTAATATAGTTGGAACAAATATTGATAACGGTAGTCAAGTTAGTTTATCTGGGGATATATCAAATGGTTCTACTATCATAAAAGATTCTAATATTAATAATGCCGATATACATAAAAGTGTGGAAATTCCATGGACTGATATGGTTGAGCAGTTAAATTTAATTATTAACACTCAGCTATCTACTGCGGATAAAGCGATATATTCAGAATTGTTGGAAATTAGTGAGGCAGAGGATGAAAGAAAATTGAAAAATTTTGTCAATAAAATGTCTAGTTTCTTCAAAAATGATTATGTTCAGAATACCATAACTGGGGTGTTAGGCAATGTCATTTCTAGTATTTTAATGAAA

SEQ ID NO: 13264 - protein, 203 aa, Streptococcus agalactiae
  VARIANT 53: Xaa = Any Amino Acid
MVGYAYLVYKKHKHILIQKYYIIFNLGSSRDYFLYLKDSNFRDKVFDVITKSXNNKNQNIKIDIKNQNIKGDNYESGSSRNDVSGSGNIVGTNIDNGSQVSLSGDISNGSTIIKDSNINNADIHKSVEIPWTDMVEQLNLIINTQLSTADKAIYSELLEISEAEDERKLKNFVNKMSSFFKNDYVQNTITGVLGNVISSILMK

SEQ ID NO: 13265 - protein, 1293 aa, Streptococcus agalactiae
ATGATTTCACGTTATTCACGCCCTGAGATGGCGGCAATTTGGACAGAGGAAAATAAATACCGTGCTTGGTTGGAGGTCGAGATTTTGGCTGACGAGGCATGGGCTGAGTTGGGTGAGATTCCTAAAGAGGATGTGGCTAAGATTCGCGAGAAGGCGGATTTTGACATTGACCGCATTCTTGAGATTGAGCAGGACACGCGTCACGATGTGGTGGCTTTCACTCGTGCGGTTTCTGAGACGCTTGGTGAGGAGCGCAAGTGGGTGCACTACGGTTGACGTCGACTGACGTGGTGACACTGCTACGGTTACCTCTACAAGCAGGCTAACGACATTATCCGTCGTGATCTTGAGAATTTCACAAACATCGTAGCTGACAAGGCTAAGGAGCACAAGTTCACCATCATGATGGGTCGTACCCACGGTGTTCACGCCGAGCCAACGACTTTCGGTCTCAAGTTGGCGACTTGGTACAGCGAGATGAAACGTAATATTGAGCGTTTTGAACATGCTGCTGCAGGTGTGGAAGCTGGTAAGATTTCAGGTGCCGTTGGTAACTTTGCCAACATTCCTCCATTTGTGGAAAAATATGTCTGTGACAAATTGGGCATCCGTCCGCAAGAAATTTCAACACAGGTTCTTCCACGTGACCTCCACGCAGAATATTTTGCAGTACTTGCAAGCATCGCAACATCTATCGAACGTATGGCGACAGAGATTCGTGGTCTGCAAAAATCAGAACAACGTGAAGTTGAAGAATTCTTTGCCAAAGGTCAGAAAGGTAGCTCTGCTATGCCTCACAAACGCAACCCAATCGGTTCAGAGAACATGACAGGGCTAGCGCGCGTGATTCGTGGTCACATGGTGACAGCTTATGAGAACGTGTCACTTTGGCATGAGCGTGACATTTCGCACTCATCAGCTGAGCGTATCATCACACCAGACACAACTATCTTGATTGACTACATGCTCAACCGTTTTGGCAATATCGTTAAGAACTTGACTGTCTTCCCGGAAAATATGATGCGCAATATGGAATCAACTTTTGGTTTGATTTATAGTCAACGTGTTATGCTCAAATTGATTGAAAAAGGAATGACACGAGAAGAAGCTTATGACTTAGTTCAACCTAAGACAGCTTATTCCTGGGACAATCAAGTGGATTTCAAACCACTTTTAGAAGAAGACACCAAAGTTACCTCTTGTCTTACACAGGAAGAAATTGATGAACTATTTAATCCGATTTATTACACAAAACGTGTTGATGATATTTTTGAAAGACTAGGATTAGAAAAA

SEQ ID NO: 13266 - protein, 432 aa, Streptococcus agalactiae
MISRYSRPEMAAIWTEENKYRAWLEVEILADEAWAELGEIPKEDVAKIREKADFDIDRILEIEQDTRHDVVAFTRAVSETLGEERKWVHYGLTSTDVVDTAYGYLYKQANDIIRRDLENFTNIVADKAKEHKFTIMMGRTHGVHAEPTTFGLKLATWYSEMKRNIERFEHAAAGVEAGKISGAVGNFANIPPFVEKYVCDKLGIRPQEISTQVLPRDLHAEYFAVLASIATSIERMATEIRGLQKSEQREVEEFFAKGQKGSSAMPHKRNPIGSENMTGLARVIRGHMVTAYENVSLWHERDISHSSAERIITPDTTILIDYMLNRFGNIVKNLTVFPENMMRNMESTFGLIYSQRVMLKLIEKGMTREEAYDLVQPKTAYSWDNQVDFKPLLEEDTKVTSCLTQEEIDELFNPIYYTKRVDDIFERLGLEK

SEQ ID NO: 13267 - protein, 909 aa, Streptococcus agalactiae
ATGTTAAAACATTTTGGTAGTAAAGTAAGAAATTTGAGAGTAACTAGAAATATTACTCGCGAAGATTTTTGTGGTGATGAAACTGAGTTATCTGTAAGACAATTAGCTAGGATTGAAAGTGGACAGTCAATCCCAAACTTGACTAAAGCTCACTACATAGCTAAACAATTGAATGTAAAATTAGATATTTTAACAGGAGGAGAGAGCTTAGAATTACCTAAACGGTATAAAGAGTTGAAGTATTTGATTTTAAGAATTCCAACTTATGCAGATGCTGAACGATTAAAATTAAGAGAATGTCAGTTTGATCATATTTTCGAAGAATTCTATGATAATCTTCCAGAAGACGAGTGCTTAGCAATTGACAGTTTACAAGCTAAATTTGAAGTCTATCAAACAGGAGACATTAATTTTGGTGTGGAGGTTTTATGCGAATGCTTTGATAAAGTAAAATATAAAGAAAAATATACTCTTAATGATTTGATTATCATAGATTTGTTTTTAACTTGTGCAGTTGTATCTAAATTTAACAATAGAGCATTTACTAAAGAAGTATTTCAAACTATATGTAAAACTTTGATAAGTCAGAACCACAAACTTACAGCAGAAGATTTGTTTTGGTTTAATCATGTACTCCTGAATTGTGTATTTGTTGGACTTTGTTTAAATAGTGAAGAGTGTCTTGCAGAAATGTTAGAAGTTAGCCGACAAACGATGGTGTCAACACATGATTTTCATAAAATGCCTTTATATTTTATGTACCAATGGAAATACTTCATTACAATTGACAATGATATAAAGTCTGCAGAAAATGCTTACCAACAATCAATTATGTTTTCAAAAATGATTGATGACAAGCATCTAATTAAAAAATTAGAATTGGAGTGGCAAGAAGATATAACAGGACAT

SEQ ID NO: 13268 - protein, 303 aa, Streptococcus agalactiae; identical to SEQ ID NO: 124

SEQ ID NO: 13269 - protein, 954 aa, Streptococcus agalactiae
TTGGTAGAACGTACACTTCGTCCGCAGTATTTAAGAGAGTATATTGGACAAGATAAGGTTAAAGATCAGCTAAAAATATTTATTGAAGCTGCTAAATTGCGTGATGAGTCATTGGATCATGTGTTATTATTTGGCCCTCCTGGTTTAGGGAAAACAACCATGGCATTTGTAATTGCTAATGAGTTGGGTGTCAATCTCAAACAAACATCAGGTCCCGCAATTGAAAAATCAGGGGATTTAGTAGCCATTTTAAATGATTTAGAACCAGGTGATGTTCTTTTTATTGATGAAATTCATCGTATGCCGATGGCGGTTGAAGAGGTACTTTATAGTGCAATGGAAGACTTCTATATTGACATTATGATCGGTGCAGGAGAAACTAGTAGAAGTGTTCATTTAGATTTGCCGCCCTTTACCTTAATTGGTGCAACGACACGTGCAGGTATGTTATCTAATCCCTTACGTGCTCGCTTTGGTATTACAGGGCATATGGAGTATTATGAAGAAAACGATTTGACAGAAATTATTGAGCGTACAGCAGATATTTTTGAAATGAAAATTACTTATGAAGCTGCTTCTGAATTAGCGCGTCGCAGTCGTGGAACGCCACGTATCGCTAACCGTTTATTGAAACGTGTTCGAGATTATGCTCAAATCATGGGAGATGGTTTGATAGATGACAATATTACAGATAAAGCATTAACGATGTTAGATGTTGATCACGAGGGGCTTGATTACGTCGATCAAAAAATCTTAAGAACCATGATTGAAATGTATAATGGAGGTCCTGTTGGTTTAGGAACTCTATCCGTTAATATTACTGAAGAACGAGATACTGTTGAAGACATGTACGAACCTTATTTAATTCAAAAAGGTTTTATTATGCGTACCCGTACCGGTCGTGTAGCTACGGATAAGGCATACGAACATTTAGGTTATCAGCGATTTGATAAA

SEQ ID NO: 13270 - protein, 318 aa, Streptococcus agalactiae
MVERTLRPQYLREYIGQDKVKDQLKIFIEAAKLRDESLDHVLLFGPPGLGKTTMAFVIANELGVNLKQTSGPAIEKSGDLVAILNDLEPGDVLFIDEIHRMPMAVEEVLYSAMEDFYIDIMIGAGETSRSVHLDLPPFTLIGATTRAGMLSNPLRARFGITGHMEYYEENDLTEIIERTADIFEMKITYEAASELARRSRGTPRIANRLLKRVRDYAQIMGDGLIDDNITDKALTMLDVDHEGLDYVDQKILRTMIEMYNGGPVGLGTLSVNITEERDTVEDMYEPYLIQKGFIMRTRTGRVATDKAYEHLGYQRFDK

SEQ ID NO: 13271 - protein, 435 aa, Streptococcus agalactiae
ATGAAGAAAGTCTGTTTTGTTTGTCTTGGAAATATCTGCCGTAGCCCTATGGCTGAGTTTGTTATGGCGAATTTAGATAAGGAGGATAGCCTCTCGGTTGAGAGTCGCGCGACTTCAACATGGGAGCATGGAAATCCTATACATAGGGGAACGCAAGCGATTTTGCAGCGTTATCAAATTCCTTACACTAACGATAAAGGGTCACAACCTATTTCTAAAGACGATTTAGCATATTTTGATTATATCATCGGTATGGATGAGCAAAATGTCAAGGATTTAAAAGCTCTATCACAAGGAACCTATGATGATAAGATTAGCCTTTTTTGTGATGGTGGTGTTCCTGATCCATGGTATACTGGTGATTTTGAGGAAACCTATCGTCTAGTCAGTGATGGCTGTAAACAGTGGTTAACGCTAATAAATAATAGTAGAGAT

SEQ ID NO: 13272 - protein, 145 aa, Streptococcus agalactiae
MKKVCFVCLGNICRSPMAEFVMANLDKEDSLSVESRATSTWEHGNPIHRGTQAILQRYQIPYTNDKGSQPISKDDLAYFDYIIGMDEQNVKDLKALSQGTYDDKISLFCDGGVPDPWYTGDFEETYRLVSDGCKQWLTLINNSRD

SEQ ID NO: 13273 - protein, 376 aa, Streptococcus agalactiae
ATGAAGAATTTTAAAATAACACGAACTCATCTAGAAATATTATCTTTGATAATTATTGTTGTTTTTGGTTTATCAGTATTTACCTTAACGACTTCTAGTCAAGGAGTCCTTAGCTATGATGGCGGTAAGATAAAATATGTGGGCTCTATTGTTAATCACCATATGACTGGTAAAGGTAAATTAACCTATGAGAATGGGGATTACTATAAGGGCGATTTTGTAAATGGGGTCTTTGAAGGGAAAGGAACATTTGTTTCAGTTCATGGCTGGTCTTATACAGGTGACTTTAAAAAAGGAACCTGATGGACAAGGTCGCCTCAATGCTAAAAATAAGAAAGTCTATAAGGGGACATTTAAACAGGGGATTTATCAAAAA

SEQ ID NO: 13274 - protein, 126 aa, Streptococcus agalactiae
  VARIANT 100: Xaa = Any Amino Acid
MKNFKITRTHLEILSLIIIVVFGLSVFTLTTSSQGVLSYDGGKIKYVGSIVNHHMTGKGKLTYENGDYYKGDFVNGVFEGKGTFVSVHGWSYTGDFKKGXPDGQGRLNAKNKKVYKGTFKQGIYQK

SEQ ID NO: 13275 - protein, 1773 aa, Streptococcus agalactiae
ATGAGAATAAAATGGTTTTCTTTGGTACGTATAACAGGACTACTACTTGTTTTACTTTACCATTTCTTTAAGAATAGTTTTCCAGGAGGATTTGTTGGTGTTGACATCTTCTTTACATTTTCTGGTTTTCTGATTACGGCCTTGTTGATTGATGAATTTTCTAAAACGAAAAAAATTGATTTTGTTAGTTTTTGTCGTAGACGTTTTTACCGTATTTTCCCACCATTAGTATTGATGGTTTTGGTGACAATACCTTTTGTATTTCTGGTTAAAAGCGATTTTAGAGCAAGTATTGGCTCTCAAATTATGACTGCTTTAGGTTTTACCAGCAACTTTTACGAAATCTTGACTGGTGGTAACTACGAAAGTCAATTTATCCCTCACTTATTTGTGCATACTTGGAGTCTTTCTATTGAAGTCCATTTTTATGTTTTATGGGGCTTAACGGTATGGCTCTTATCGAAAAGATCAAAAGATCAAAAGCAATTGAGGGGGACTTTGTTCCTTGTTTCCATGGGAGTTTTTGGAGTCAGCTTCCTTACCATGTTTGTTAGAGCCTTTTTCGTTGATAATTTTTCAACGATATATTTCTCTACATTATCACATATATTTCCGTTCTTTTTAGGAGCGATGGTGGCTACAATATCTGGTATTCGAGAGATTACCGGACGATTCAAGAAAAATATCAAAAATCTGACTTTGAAGCATAATTTAATCATGATGGGTAGTGCTTTTGCTGGTCTAATGATTTTAACTTTTGCACTTGATTTTGATAATCGGCTAACATATCTTTTTGGTGTTTTGTCTAGCATTTTTGCTAGTGTAATGATTTACAATGCACGTATTTTACACGAGCATACACCAGATATTTCAGAACCTTTCGTGATTACTTATCTTGCTGATATCAGTTACGGTATGTACCTTTTTCATTGGCCATTTTATATTATTTTTAGTCGTTTATCCCCAAACTGGATAGCTGTTATTTTGACAGTAGTATTATCAGCAGTCTTCTCAACATTATCATTTTATATCATTGAACCTTTTATTTTAGGTAGAAAACCTAAATTCCTTGATTATGAATTTGACTTGTTGCCTTACAAAAAGTGGTTATTTAGTATCGGAGGGGTACTAACTCTTATTACTGTAGTGACAATGTTGACAGCTCCAAGTATAGGAAGTTTTGAGACAGAATTATTGCAGAATTCGTTACAACAAGCTAGAACAAATACTAACCGAACACATACACTAGCCGCAGGGGATGCAGGTGCTCTTAGTGATGTGACGGTAATCGGAGATTCAGTTGCCTTAAGGTCAAGTGCTGCTTTTAATAAATTGTTACCAGAAGTACAATTAGATGCTGCGGTGAGTCGTAATTTTAGTAAATCATTTGATATTTTTGAAAACCGTATTCAAAATAAAGCCTTGTCCAAAATTGTTGTTTTGGCAGTTGGTGTGAATTCATTAGATAACTACAAGACAGACTTGAGCCAATTTATTAAATCTTTGCCTAAGGGACACCGTTTGATTATAGTAACGCCTTATAATGCTAAAAATATGAGTCAAGTTACGACAGTGCGTGATTATGAACTCTCGCTAATGAAAAAATATAATTACATAACGGTTGCTGACTGGTATAAGGTTGCGACAGAACATCCAGAAATCTGGGGAAATACAGATGGTGTGCATTATAGTGATAGCGATACTACAGGGGCTGATTTATATGTTAGTAACGTCAAAAAAGCTATTCAAAAATCAGCTCAACGAGCTGCAAAA

SEQ ID NO: 13276 - protein, 592 aa, Streptococcus agalactiae
MRIKWFSLVRITGLLLVLLYHFFKNSFPGGFVGVDIFFTFSGFLITALLIDEFSKTKKIDFVSFCRRRFYRIFPPLVLMVLVTIPFVFLVKSDFRASIGSQIMTALGFTSNFYEILTGGNYESQFIPHLFVHTWSLSIEVHFYVLWGLTVWLLSKRSKDQKQLRGTLFLVSMGVFGVSFLTMFVRAFFVDNFSTIYFSTLSHIFPFFLGAMVATISGIREITGRFKKNIKNLTLKHNLIMMGSAFAGLMILTFALDFDNRLTYLFGFVLSSIFASVMIYNARILHEHTPDISEPFVITYLADISYGMYLFHWPFYIIFSRLSPNWIAVILTVVLSAVFSTLSFYIIEPFILGRKPKFLDYEFDLLPYKKWLFSIGGVLTLITVVTMLTAPSIGSFETELLQNSLQQARTNTNRTHTLAAGDAGALSDVTVIGDSVALRSSAAFNKLLPEVQLDAAVSRNFSKSFDIFENRIQNKALSKIVVLAVGVNSLDNYKTDLSQFIKSLPKGHRLIIVTPYNAKNMSQVTTVRDYELSLMKKYNYITVADWYKVATEHPEIWGNTDGVHYSDSDTTGADLYVSNVKKAIQKSAQRAAK

SEQ ID NO: 13277 - protein, 1214 aa, Streptococcus agalactiae
ATGACTGAAAAAACTAAAGCGGTAGAAACTACAGATGTTGCTCTTGCAATTGATACATTAGTTCAAAACGGTTAAAAGCACTTGATGAGATGCGTCAACTTAATCAAGAACAAGTTGATTATATTGTAGCTAAAGCTTCTGTTGCAGCCTTGGATGCCCATGGAGAACTTGCTCTTCATGCAGTAGAAGAAACTGGTCGTGGTGTCTTTGAAGATAAAGCGACAAAAAATTTATTTGCATGTGAACACGTCGTTAACAACATGCGTCATACAAAGACAGTGGGAGTTATTGAAGAAGACGATGTCACAGGCTTGACATTAATTGCTGAACCAGTGGGAGTTGTCTGTGGTATTACGCCAACAACCAACCCGACTTCAACTGCTATTTTCAAGTCATTAATCTCTCTTAAAACACGTAATCCAATTATTTTTGCCTTCCACCCATCAGCACAAGAATCATCAGCACATGCAGCACGTATTGTTCGTGATGCTGCTATCGCTGCTGGAGCTCCTGAAAATTGTGTCCAATGGATTGAACAACCATCGATTGATGCAACTAATGCTTTGATGAAACATGATGGTATTGCCACTATCCTTGCGACAGGTGGTAATGCGATGGTTAAAGCTGCCTACTCATGTGGGAAACCTGCCCTTGGTGTAGGTGCTGGGAATGTTCCAGCTTATGTTGAAAAATCAGCTAATATCCGTCAAGCTGCTCACGATATTGTTATGTCTAAATCATTTGATAACGGTATGGTATGTGCGTCAGAACAGGCTGTTATTATTGATAAAGAAATTTATAAAGAATTTGTTGAAGAATTTAAATCTTATCATACCTATTTCGTTAATAAGAAAGAAAAAGCTCTTCTTGAAGAATTCTGTTTTGGTGCAAAAGCAAATAGCAAAAACTGTGCTGGTGCAAAATTAAATCCAAATATTGTTGGAAAATCAGCAGTTTGGATTGCTGAACAAGCTGGATTTACTGTTCCAGAAGGAACAAATATTCTTGCCGCAGAATGTACTGAAGTTAGTGAAAAAGAACCTTTGACACGTGAAAAACTATCACCTGTTATTGCAGTATTGAAAGCTGAATCTACAGAAGATGGTGTTGAAAAAGCTCGTCAAATGGTTGAGTTTAATGGTCTAGGGCACTCAGCTGCTATTCATACAAAAGATGCAGACTTAGCTCGTGAATTGGAACTAGAATTCNNNNNT

SEQ ID NO: 13278 - protein, 405 aa, Streptococcus agalactiae
  VARIANT 404, 405: Xaa = Any Amino Acid
MTEKTKAVETTDVALAIDTLVQNGLKALDEMRQLNQEQVDYIVAKASVAALDAHGELALHAVEETGRGVFEDKATKNLFACEHVVNNMRHTKTVGVIEEDDVTGLTLIAEPVGVVCGITPTTNPTSTAIFKSLISLKTRNPIIFAFHPSAQESSAHAARIVRDAAIAAGAPENCVQWIEQPSIDATNALMKHDGIATILATGGNAMVKAAYSCGKPALGVGAGNVPAYVEKSANIRQAAHDIVMSKSFDNGMVCASEQAVIIDKEIYKEFVEEFKSYHTYFVNKKEKALLEEFCFGAKANSKNCAGAKLNPNIVGKSAVWIAEQAGFTVPEGTNILAAECTEVSEKEPLTREKLSPVIAVLKAESTEDGVEKARQMVEFNGLGHSAAIHTKDADLARELELEFXX

SEQ ID NO: 13279 - protein, 1015 aa, Streptococcus agalactiae
ATGGTTACAGATCACGCCATGGTGGAGCTTGGTTTCTGGGATCGTATCATTGAACAACTGATTCTTCGTCGCAATAAAGTTGTTTATCAGATTTTGCTGAAAGTAGACCCAGATCCAGACATTACAACAGTAATGAAAGGGACTGATGTAATGCGTACCTTCAAACCAGACACTATTATTGCATTAGGTGGTGGTTCTCCTATGGATGCTGCGAAAGTTATGTGGCTCTTCTATGAACAACCAGAAGTTGATCTCCATGACCTCGTTCAAAAATTCATGGATATCCGTAAACGTGCGTTCAAATTCCCAGAACTTGGTAAGAAAACAAAATTTGTTGCTATTCCAACAACTTCTGGAACAGGTTCTGAAGTGACACCATTGCGTTATCTCTGACAAAGCAAATAATCGTAAATATCCAATCGCTGATTATTCATTAACACCAACTGTAGCTATCGTTGATCCGGCCCTTGTTATGACTGTTCCTGGTTTTATTGCGGCTGATACGGGTATGGATGTATTGACACATGCAACAGAGGCTTATGTTTCACAGATGGCAAATGATTATACAGACGGACTTGCTCTTCAAGCAATTAAAATTGTATTTGACTACTTAGAACGCTCAGTAAAAGATGCTGATTTTGAAGCACGTGAAAAGATGCACAATGCGTCAACTATGGCAGGTATGGCTTTCGCCAATGCATTCTTAGGTATTTCTCACTCAATGGCGCATAAAATTGGCGCACAATTCCATACCGTACACGGACGTACAAATGCAATTCTTTTGCCGTATGTTATCCGCTATAATGGAACTCGTCCAGCTAAAACAGCAACATGGCCTAAGTACAATTACTATCGTGCTGATGAAAAGTATCAAGATATCGCTAAATTACTCGGCTTACCAGCAGCAACACCAGAAGAAGCTGTCGAATCATATGCAAAAGCTGTGTATGACCTTGGAACACGTTTAGGTATTAAGATGAATTTCCGTGACCAAGGCATGAGAAAAAGANNNNNT

SEQ ID NO: 13280 - protein, 339 aa, Streptococcus agalactiae
  VARIANT 338, 339: Xaa = Any Amino Acid
MVTDHAMVELGFWDRIIEQLILRRNKVVYQILLKVDPDPDITTVMKGTDVMRTFKPDTIIALGGGSPMDAAKVMWLFYEQPEVDLHDLVQKFMDIRKRAFKFPELGKKTKFVAIPTTSGTGSEVTPFAVISDKANNRKYPIADYSLTPTVAIVDPALVMTVPGFIAADTGMDVLTHATEAYVSQMANDYTDGLALQAIKIVFDYLERSVKDADFEAREKMHNASTMAGMAFANAFLGISHSMAHKIGAQFHTVHGRTNAILLPYVIRYNGTRPAKTATWPKYNYYRADEKYQDIAKLLGLPAATPEEAVESYAKAVYDLGTRLGIKMNFRDQGMRKRXX

SEQ ID NO: 13281 - protein, 901 aa, Streptococcus agalactiae
GTGTGCCATACTGATTTACACGTTGCACATGGAGATTTCGGCCAGGTACCACCATTTTGGGTCACGAAGGCATTGGTATAGTAGAAGAAATTGGAGAAGGCGTAACGTCTTTGAGGGTTGGTGATCGTGTCTCTATTGCATGGTTCTTTGAAGGGTGCGGTCATTGCGAATACTGTACTACAGGACGTGAGACGCTTTGTCGTAGTGTTAAAAATGCTGGATACAGTGTTGATGGTGGTATGAGTGAATACGCTATCGTTACCGCGGACTATGCGGTTAAGGTTCCTGAGGGATTAGATCCAGCTCAAGCATCATCAATCACTTGTGCTGGAGTAACAACATACAAGGCTATCAAAGAAGCTGGAGCTGCTCCTGGTCAGTGGATTGCAGTGTATGGTGCAGGTGGTCTTGGAAACTTAGCAGTCCAATATGCAAAAAAAGTATTCAATGCTCATGTTGTAGCTGTTGATATTAACGCAGATAAACTTCAATTAGCTAAAGAGGTTGGAGCAGATTTGACAGTTAATGGCAAAGAAATAAAAGATGTTGCGGCCTATATTCAAGAAAAGACAGGCGGTTGTCATGAGTGGTTGTGACTGCTGTTTCTAAAGTTGCGTTTAATCAGGCGATTGACAGCGTTCGTGCTGGAGGTACAGTGGTAGCTGTTGGTCTTCCATCAGAATATATGGAATTGAGTATTGTAAAAACAGTACTTGATGGGATTCGTGTGGTTGGTTCCTTAGTTGGAACTCGTAAAGATTTAGAAGAAGCCTTCGCATTTGGAGCAGAAGGTTTGGTAGTACCAGTGGTTGAAAAAGTGCCTGTGGATACAGCTCCTCAAGTATTCGATGAAATGGAAAGAGGATTGATTCAAGGACGTAAAGTTCTCGACTTTACAAAG

SEQ ID NO: 13282 - protein, 302 aa, Streptococcus agalactiae
  VARIANT 18: Xaa = Any Amino Acid
MCHTDLHVAHGDFGQVPXRILGHEGIGIVEEIGEGVTSLRVGDRVSIAWFFEGCGHCEYCTTGRETLCRSVKNAGYSVDGGMSEYAIVTADYAVKVPEGLDPAQASSITCAGVTTYKAIKEAGAAPGQWIAVYGAGGLGNLAVQYAKKVFNAHVVAVDINADKLQLAKEVGADLTVNGKEIKDVAAYIQEKTGGCHGVVVTAVSKVAFNQAIDSVRAGGTVVAVGLPSEYMELSIVKTVLDGIRVVGSLVGTRKDLEEAFAFGAEGLVVPVVEKVPVDTAPQVFDEMERGLIQGRKVLDFTK

SEQ ID NO: 13283 - protein, 964 aa, Streptococcus agalactiae
TTGGCACAAACTTTCTTTAAACTTTTAGGGACAACAAAAAGTGTCGCACAAGTTGGTGGTTTATATTTAGCAATTGTGGGTGGAGGTGTTGTTACTTTAGGAATATTAACCACCCTGGCTCATTTTTACGTGTGCAAGGGCAACCTCGTTTACCAATGTATGTCAGTATTTTTGTCAATTTCCTCAATGCAGTCTTATCAGGTTTTGCTATTTTTGAGTGGCGCTATGGTTTGGTCGGAGTGGCAGTATCAACTCTTATCGCAAGATTAATTGGTATTTGTATCCTTGCGAAGTATCTTCCTATTAAAAAAATAATAAAAAGAATGACTTGGAAAATCAGTGCACAAATTTGGAATCTTGCCTTACCATCAGCAGGAGAACGTCTGATGATGCGAGCTGGAGATGTTGTTATAGTTGCTATTGTTGTTCAGTTAGGTACAAATGTTGTAGCGGGAAATGCTATTGGAGAAACCTTGACACAATTTAATTATATGCCAGGACTTGGCATCGCAACTGCTACAATTATCCTAACTGCAAAATATGTAGGACAAAAAAATAGAGAATCTATAGAAGAAACTATTCAAAGTTCGTATTATATTGGCTTAGTTCTAATGATCCTTATATCAAGTTTTATGCTTCTTGCCGGCAAACCATTGACACAGTTATTTACAAATAATCCTTCTGCCATTAAAGGAAGTTTGATTGTTATTTTGCTATCTTTCGTAGGAGTACCTGCTACTATTGGGACCTTGGTTATACAGCAGCTTGGCAAGGATTAGGAAATGCTAAACTCCCATTTTACACAACGACTATAGGCATGTGGTTAATCAGAGTAGTTCTTGGTTATTTATTAGGAATAGTTTTTGAATTAGGTTTGCTTGGGGTTTGGATGGCTACGATAGCAGATAATATCTTTAGGTGGCTGTTTTTGAAAGTTCGCTATCATCGATATATTCAAAAAATG

SEQ ID NO: 13284 - protein, 322 aa, Streptococcus agalactiae
MAQTFFKLLGTTKSVAQVGGLYLAIVGGGVVTLGILTTLGSFLRVQGQPRLPMYVSIFVNFLNAVLSGFAIFEWRYGLVGVAVSTLIARLIGICILAKYLPIKKIIKRMTWKISAQIWNLALPSAGERLMMRAGDVVIVAIVVQLGTNVVAGNAIGETLTQFNYMPGLGIATATIILTAKYVGQKNRESIEETIQSSYYIGLVLMILISSFMLLAGKPLTQLFTNNPSAIKGSLIVILLSFVGVPATIGTLVYTAAWQGLGNAKLPFYTTTIGMWLIRVVLGYLLGIVFELGLLGVWMATIADNIFRWLFLKVRYHRYIQKM

SEQ ID NO: 13285 - protein, 623 aa, Streptococcus agalactiae
ATGACAAAAGGAATCTTTGGGAAAAAAGTGGGAATGACTCAAATCTTCACTGAATCAGGCGAATTCATCCCTGTTACTGTCATTGAAGCAACTCCAAACGTTGTGCTTCAAGTTAAAACTGTTGAAACGACGGTTACGAAGCAGTTCAGGTTGGTTTTGATGACAAACGTGAAGTATTGAGTAACAAACCTGCCAAAGGCCATGTTGCAAAAGCAAACACAGCTCCTAAGCGCTTCATTCGTGAATTCAAAAACATTGAAGGCTTAGAAGTTGGTGCAGAATTATCTGTAGAACAATTTGAAGCTGGTGATGTTGTTGACGTCACAGGGACATCAAAAGGTAAAGGTTTCCAAGGTGTTATCAAACGCCATGGTCAATCACGTGGTCCTATGGCTCACGGTTCTCGTTACCATCGCCGTCCAGGTTCTATGGGACCTGTTGCGCCTAACCGCGTTTTCAAAAACAAACGCTTGGCAGGACGTATGGGTGGTAACCGTGTAACAGTTCAAAACCTTGAAATTGTACAAGTTATCCCAGAGAAAAACGTTGTCCTCATCAAAGGTAACGTACCAGGTGCTAAGAAATCTCTTATCACTATCAAATCAGCAGTTAAAGCTGCTAAA

SEQ ID NO: 13286 - protein, 208 aa, Streptococcus agalactiae
MTKGIFGKKVGMTQIFTESGEFIPVTVIEATPNVVLQVKTVETDGYEAVQVGFDDKREVLSNKPAKGHVAKANTAPKRFIREFKNIEGLEVGAELSVEQFEAGDVVDVTGTSKGKGFQGVIKRHGQSRGPMAHGSRYHRRPGSMGPVAPNRVFKNKRLAGRMGGNRVTVQNLEIVQVIPEKNVVLIKGNVPGAKKSLITIKSAVKAAK

SEQ ID NO: 13287 - protein, 322 aa, Streptococcus agalactiae
ATGGCAAACGTTAAACTATTTGACCAAACTGGTAAAGAAGTTAGCTCAGTTGAGCTTAACGAAGCTATCTTCGGTATCGAACCAAACGAATCAGTTGTTTTTGATGTTGTAATCAGCCAACGCGCTAGCCTTCGCCAAGGTACTCACGCGGTTAAAAACCGTTCAGCAGTATCTGGTGGTGGACGTAAACCATGGCGTCAAAAAGGAACTGGACGCGCTCGTCAAGGTTCTATCCGCTCACCACAATGGCGTGGGGTGGTGTTGTCTTTGGAACAACTCCACGTTCATACGGCTACAAACTCCAAAAGTCGTCGCCTTGCGT

SEQ ID NO: 13288 - protein, 109 aa, Streptococcus agalactiae
  VARIANT 102, 103: Xaa = Any Amino Acid
MANVKLFDQTGKEVSSVELNEAIFGIEPNESVVFDVVISQRASLRQGTHAVKNRSAVSGGGRKPWRQKGTGRARQGSIRSPQWRGGGVVFGTTPRSYGYKLXXKVVALR

SEQ ID NO: 13289 - protein, 293 aa, Streptococcus agalactiae
TTGAAATCAGTTTATTCAGCAAAAGTTGCTGAAGATAAATTTGTAGCTGTAGAAAACCTTTCATTTGCAGCTCCAAAACTGCTGAATTTGCGTCAGTTCTTTCAGCACTTAGCATTGATTCAAAAGTACTTGTAATCCTTGAAGAAGGTAACGAATTTGCTGCACTTTCAGCGCGTAACCTTCCAAACGTTACAGTTGCTACTGCAACTACTGCAAGTGTTCTTGATATCGTTAACGCAGACAAACTTCTTGTTACTAAAGAAGCAATCTCTACAATCGAGGGGGTTCTTGCA

SEQ ID NO: 13290 - protein, 98 aa, Streptococcus agalactiae
MKSVYSAKVAEDKFVAVENLSFAAPKTAEFASVLSALSIDSKVLVILEEGNEFAALSARNLPNVTVATATTASVLDIVNADKLLVTKEAISTIEGVLA

SEQ ID NO: 13291 - protein, 294 aa, Streptococcus agalactiae
ATGAATTTGTATGACGTAATCAAAAAACCTGTTATCACTGAGAAATCAATGGTTGCTCTTGAAGCAGGGAAATATACATTTGAAGTTGACACACGTGCACACAAACTTTTGATCAAACAAGCTGTTGAAGCTGCATTTGACGGAGTAAAAGTTGCAAGTGTAAACACTGTGACAGTTAAACCCAAAGCAAAACGTGTTGGTCGTTACACAGGTTTTACTTCAAAAACTAAAAAAGCTATTATCACTCTTACAGCTGATTCAAAAGCAATCGAGTTGTTTGCTGCTGAAGCTGAA

SEQ ID NO: 13292 - protein, 98 aa, Streptococcus agalactiae; identical to SEQ ID NO: 148

SEQ ID NO: 13293 - protein, 831 aa, Streptococcus agalactiae
GTGGGTATTAAAGTTTATAAACCAACGACAAATGGCCGTCGTAATATGACTTCTTTGGATTTTGCAGAAATCACTACAAACACTCCTGAGAAATCATTGCTTGTTTCACTAAAGAATAAAGCAGGACGTAACAACAACGGACGTATTACTGTTCGTCACCAAGGTGGTGGACACAAACGTCATTACCGTTTGATTGACTTCAAACGTAATAAAGATGGTGTTGAAGCAGTTGTTAAAACAATTGAATACGATCCAAATCGTACTGCAAATATTGCTCTTGTACACTATACTGATGGTGTTAAAGCTTACATCCTTGCGCCTAAAGGCCTTGAAGTAGGTCAACGCATTATTTCTGGTCCAGAAGCAGACATCAAAGTTGGTAACGCACTTCCGCTTGCTAACATTCCAGTCGGTACAGTTATCCATAATATTGAATTGCAACCAGGTAAAGGTGCTGAATTGATTCGTGCCGCTGGTGCTTCTGCTCAAGTACTTGGTCAAGAAGGTAAATATGTTCTTGTTCGCCTTCAATCAGGTGAAGTACGTATGATCCTTGGTACTTGCAGTGCAACAATTGGTACTGTTGGTAATGAACAGCAATCACTTGTTAACATTGGTAAAGCAGGACGTAATCGTTGGAAAGGTGTTCGCCCTACAGTTCGTGGTTCTGTAATGAACCCTAACGATCACCCACACGGTGGTGGTGAAGGTAAAGCACCAGTTGGTCGTAAAGCACCATCTACTCCATGGGGTAAACCTGCGCTTGGACTTAAAACTCGTAATAAGAAAGCTAAATCAGACAAACTTATTGTTCGTCGTCGTAACCAAAAA

SEQ ID NO: 13294 - protein, 277 aa, Streptococcus agalactiae
MGIKVYKPTTNGRRNMTSLDFAEITTNTPEKSLLVSLKNKAGRNNNGRITVRHQGGGHKRHYRLIDFKRNKDGVEAVVKTIEYDPNRTANIALVHYTDGVKAYILAPKGLEVGQRIISGPEADIKVGNALPLANIPVGTVIHNIELQPGKGAELIRAAGASAQVLGQEGKYVLVRLQSGEVRMILGTCSATIGTVGNEQQSLVNIGKAGRNRWKGVRPTVRGSVMNPNDHPHGGGEGKAPVGRKAPSTPWGKPALGLKTRNKKAKSDKLIVRRRNQK

SEQ ID NO: 13295 - protein, 276 aa, Streptococcus agalactiae; identical to SEQ ID NO: 4451

SEQ ID NO: 13296 - protein, 92 aa, Streptococcus agalactiae; identical to SEQ ID NO: 152

SEQ ID NO: 13297 - protein, 342 aa, Streptococcus agalactiae
ATGGCAGAAATTACTTCAGCTAAAGCAATGGCTCGTACAGTGCGTGTTTCACCTCGTAAAACACGTTTAGTACTTGATCTTATCCGTGGTAAGAATGTTGCTGACGCAATCGCAATCTTAAAATTCACTCCAAACAAAGCAGCTCGTGTTATTGAGAAAACTCTTAACTCAGCAATTGCAAATGCAGAAAACAACTTTGGTTTGGAAAAAGCAAACTTGGTAGTATCTGAAACTTTCGCTAACGAAGGACCAACAATGAAACGTTTCCGTCCACGTGCGAAAGGTTCAGCTTCACCAATCAACAAACGTACAACTCACGTAACTGTAGTTGTATCAGAAAAA

SEQ ID NO: 13298 - protein, 114 aa, Streptococcus agalactiae; identical to SEQ ID NO: 154

SEQ ID NO: 13299 - protein, 624 aa, Streptococcus agalactiae
ATGCGTGTCGGAATCATCCGTGACTGGGATGCGAAATGGTATGCTGAAAAAGAATACGCGGATTACCTTCATGAAGATCTTGCAATCCGTAAATTCATTAATAAAGAATTAGCTGACGCATCAGTTTCAACTATTGAAATTGAACGTGCAGTAAATAAAGTTATTGTTTCACTTCACACTGCTAAACCAGGTATGGTTATCGGTAAAGGTGGAGCAAACGTTGACGCTCTTCGTGGTCAACTTAACAAATTAACTGGAAAACAAGTACACATCAACATCATTGAAATCAAACAACCTGATTTAGATGCTCACCTTGTTGGTGAAAATATTGCTCGTCAATTAGAGCAACGTGTTGCTTTCCGTCGTGCTCAAAAACAAGCAATCCAACGTACAATGCGTGCAGGAGCTAAAGGTATTAAAACTCAAGTTTCTGGTCGTTTGAACGGTGCTGATATCGCTCGTGCTGAAGGTTATTCAGAAGGAACTGTTCCACTTCACACGCTTCGTGCTGATATCGACTATGCTTGGGAAGAAGCTGACACAACTTATGGTAAACTTGGCGTTAAAGTTTGGATTTACCGTGGAGAAGTTCTTCCAGCTCGTAAAAACACTAAAGGAGGCAAA

SEQ ID NO: 13300 - protein, 208 aa, Streptococcus agalactiae; identical to SEQ ID NO: 156

SEQ ID NO: 13301 - protein, 411 aa, Streptococcus agalactiae
ATGTTAGTACCTAAACGTGTTAAACACCGTCGCGAATTCCGTGGAAAAATGCGCGGTGAGGCTAAAGGTGGTAAAGAAGTTTCATTCGGTGAATATGGACTTCAAGCTACAACTAGCCACTGGATTACAAACCGTCAAATCGAAGCTGCCCGTATTGCGATGACTCGTTACATGAAACGTGGTGGTAAAGTTTGGATTAAAATCTTCCCACACAAATCATACACTGCAAAAGCTATCGGTGTACGTATGGGTTCTGGTAAAGGGACACCTGAAGGTTGGGTAGCACCAGTTAAACGTGGTAAAGTGATGTTTGAAATTGCTGGTGTTTCTGAAGAAGTTGCACGTGAAGCATTACGTCTTGCTAGCCACAAATTACCAGTTAAATGCAAATTCGTAAAACGTGAAGCAGAA

SEQ ID NO: 13302 - protein, 137 aa, Streptococcus agalactiae
MLVPKRVKHRREFRGKMRGEAKGGKEVSFGEYGLQATTSHWITNRQIEAARIAMTRYMKRGGKVWIKIFPHKSYTAKAIGVRMGSGKGTPEGWVAPVKRGKVMFEIAGVSEEVAREALRLASHKLPVKCKFVKREAE

SEQ ID NO: 13303 - protein, 255 aa, Streptococcus agalactiae
ATGTCTTCTCCTTATTCTGCTTCACGTTTTACGAATTTGCATTTAACTGGTAATTTGTGGCTAGCAAGACGTAATGCTTCACGTGCAACTTCTTCAGAAACACCAGCAATTTCAAACATCACTTTACCACGTTTAACTGGTGCTACCCAACCTTCAGGTGTCCCTTTACCAGAACCCATACGTACACCGATAGCTTTTGCAGTGTATGATTTGTGTGGGAAGATTTTAATCCAAACTTTACCACCACGTTTCATG

SEQ ID NO: 13304 - protein, 85 aa, Streptococcus agalactiae
MSSPYSASRFTNLHLTGNLWLARRNASRATSSETPAISNITLPRLTGATQPSGVPLPEPIRTPIAFAVYDLCGKILIQTLPPRFM

SEQ ID NO: 13305 - protein, 204 aa, Streptococcus agalactiae
ATGAAACTTCAAGAAATTAAAGATTTTGTTAAAGAGCTTCGTGGATTGTCTCAAGAAGAACTTGCTAAGAAAGAAAACGAACTCAAAAAAGAATTGTTTGATCTTCGTTTCCAAGCTGCAGCAGGTCAACTTGAAAAGACTGCTCGCCTTGACGAAGTTAAGAAACAAATTGCACGTGTTAAGACTGTGCAATCAGAAATGAAA

SEQ ID NO: 13306 - protein, 68 aa, Streptococcus agalactiae; identical to SEQ ID NO: 160

SEQ ID NO: 13307 - protein, 258 aa, Streptococcus agalactiae; identical to SEQ ID NO: 4463

SEQ ID NO: 13308 - protein, 86 aa, Streptococcus agalactiae; identical to SEQ ID NO: 162

SEQ ID NO: 13309 - protein, 366 aa, Streptococcus agalactiae; identical to SEQ ID NO: 4465

SEQ ID NO: 13310 - protein, 122 aa, Streptococcus agalactiae; identical to SEQ ID NO: 164

SEQ ID NO: 13311 - DNA, 111 bp, Streptococcus agalactiae
gtgtcaaacgttcaagttcttgataaaaatggtgtagcaggacgtgttggttacaaagttgttgacggcaaaaaagttcgttacaacaaaaaatcaggcgaagtgcttgat

SEQ ID NO: 13312 - protein, 37 aa, Streptococcus agalactiae
MSNVQVLDKNGVAGRVGYKVVDGKKVRYNKKSGEVLD

SEQ ID NO: 13313 - DNA, 540 bp, Streptococcus agalactiae
atggcaaatcgcttaaaagaaaaatatactaatgaagttgttcctgcgttgacagaaaaatttaactattcatctgttatggctgtgccaaaagttgagaaaatcgttcttaacatgggtgttggtgatgctgtatcaaacgctaaaaatcttgagaaagctgctgctgagttagcacttatttcaggtcaaaaaccacttattactaaagctaagaaatcaatcgctggcttccgtcttcgtgaaggtgtagcgatcggtgcaaaagttaccctccgtggtgaacgtatgtacgaattcttggataaattagtttctgtttcacttccacgtgtacgtgacttccatggtgttccaacgaaatcatttgatggacgtggaaactacactcttggagttaaagaacaattgatcttcccagaaatcaactttgatgacgttgataaagtacgtggtcttgatatcgttatcgttactactgctaacactgatgaagagtcacgtgaattgctaaaaggccttggaatgccttttgcaaag

SEQ ID NO: 13314 - protein, 180 aa, Streptococcus agalactiae; identical to SEQ ID NO: 168

SEQ ID NO: 13315 - DNA, 411 bp, Streptococcus agalactiae
  misc_feature 402, 403, 404, 405, 406: n = A,T,C or G
atggttatgactgacccaattgcagactttttaactcgtattcgtaatgctaaccaagcaaaacatgaagtgttagaagtacctgcatcaaacattaaaaaagggattgctgatatccttaaacgtgaaggttttgtaaaaaacgttgaagttattgaagatgacaaacaaggcatcatccgtgtgttccttaaatatggacaaaatggtgaacgtgttatcactaacttgaaacgtatttcaaaaccaggtcttcgtgtttatactaaacatgaagatatgcctaaagttcttaacggacttggtattgcaattgtatcaacttctgaaggtcttttgactgacaaagaagctcgcccaaaaaatgttggtggagaagtacttgcatatatttgggaaaannnnnttaat

SEQ ID NO: 13316 - protein, 137 aa, Streptococcus agalactiae
  VARIANT 134, 135, 136: Xaa = Any Amino Acid
MVMTDPIADFLTRIRNANQAKHEVLEVPASNIKKGIADILKREGFVKNVEVIEDDKQGIIRVFLKYGQNGERVITNLKRISKPGLRVYTKHEDMPKVLNGLGIAIVSTSEGLLTDKEARPKNVGGEVLAYIWEXXXN

SEQ ID NO: 13317 - DNA, 534 bp, Streptococcus agalactiae
atgtcacgtattggtaawaaagtaattacattgcctgcaggtgttgaaatcattaacaaggataatgttgttactgtaaaaggacctaaaggcgaactcactcgtgagtttaataaaaatattggaatcactgttgaagggactgaagtaacagttactcgtcctaacgactcaaaagaaatgaaaacaattcatggtacaactcgtgcgaacttgaacaacatggtcgttggtgtttctgaaggtttcaaaaaagctcttgaaatgcgcggtgttggttaccgtgcacaacttcaaggatcaaaacttgttctttctgttggtaagtctcaccaagacgaagttgaagctccagaaggtgttacttttgaagtgccaactccaacaacaatcaacgtaatcggtatcaacaaagaaagcgttggacaaactgctgcttacgttcgtagcttacgttcaccagaaccatataaaggtaaaggtattcgttacgttggtgaattcgtacgccgtaaagaaggtaaaacaggtaaa

SEQ ID NO: 13318 - protein, 178 aa, Streptococcus agalactiae
  VARIANT 6: Xaa = Any Amino Acid
MSRIGXKVITLPAGVEIINKDNVVTVKGPKGELTREFNKNIGITVEGTEVTVTRPNDSKEMKTIHGTTRANLNNMVVGVSEGFKKALEMRGVGYRAQLQGSKLVLSVGKSHQDEVEAPEGVTFEVPTPTTINVIGINKESVGQTAAYVRSLRSPEPYKGKGIRYVGEFVRRKEGKTGK

SEQ ID NO: 13319 - DNA, 354 bp, Streptococcus agalactiae
gtgatttcgaaaccagataaaaataaaatccgccaaaaacgccaccgtcgcgttcgcggtaaactctctggaactgctgatcgcccacgtttgaacattttccgttctaatacaggcatctacgctcaagtaattgatgacgtagcgggtgtaacgctcgcaagtgcatcaactcttgataaagaagtttctaacggaacaaaaacagaacaagccgttgttgtcggtaaacttgttgctgaacgcgcagtagctaaaggtatttctgaagtggtgtttgaccgcggtggatatctctatcacggacgtgtaaaagctttggctgactcagctcgtgaaaacggattgaaattc

SEQ ID NO: 13320 - protein, 118 aa, Streptococcus agalactiae; identical to SEQ ID NO: 176

SEQ ID NO: 13321 - protein, 492 aa, Streptococcus agalactiae
ATGGCATTTAAAGATAATGCAGTAGAACTTGAAGAGCGCGTTGTTGCGATTAACCGCGTTACAAAAGTTGTTAAAGGTGGACGTCGTCTACGTTTTGCAGCTCTTGTAGTTGTTGGTGACCGTAATGGTCGTGTTGGTTTTGGTACAGGTAAAGCTCAAGAAGTACCAGAAGCTATTCGCAAAGCTGTTGAAGCTGCTAAGAAAAACATGGTTGAAGTTCCTATGGTCGGTACAACAATTCCTCACGAAGTTCGTTCAGAATTTGGTGGAGCGAAAGTATTGTTGAAACCAGCTGTTGAGGGTGCTGGGGTTGCCGCTGGTGGTGCTGTTCGTGCCGTCATCGAATTAGCAGGTGTTGCAGATATTACATCTAAATCACTTGGTTCAAACACTCCAATCAACATTGTTCGCGCAACTGTTGAGGGCTTGAAACAATTAAAACGTGCAGAAGAAGTTGCTGCTTTACGTGGCATTTCTGTTTCTGACTTAGCA

SEQ ID NO: 13322 - protein, 164 aa, Streptococcus agalactiae; identical to SEQ ID NO: 178

SEQ ID NO: 13323 - protein, 321 aa, Streptococcus agalactiae
TTGTTCTGGTTTGCGACCGATTGGAGACTTAGTCAAAGTAATTTTAATTTGAGCCATTATAATCCCCTTTCTTATGCTAAGTCAGAAACAGAAATGCCACGTAAAGCAGCAACTTCTTCTGCACGTTTTAATTGTTTCAAGCCCTCAACAGTTGCGCGAACAATGTTGATTGGAGTGTTTGAACCAAGTGATTTAGATGTAATATCTGCAACACCTGCTAATTCGATGACGGCACGAACAGCACCACCAGCGGCAACCCCAGCACCCTCAACAGCTGGTTTCAACAATACTTTCGCTCCACCAAATTCTGAACGAACTTCG

SEQ ID NO: 13324 - protein, 107 aa, Streptococcus agalactiae; identical to SEQ ID NO: 4480

SEQ ID NO: 13325 - protein, 177 aa, Streptococcus agalactiae; identical to SEQ ID NO: 8923

SEQ ID NO: 13326 - protein, 59 aa, Streptococcus agalactiae; identical to SEQ ID NO: 180

SEQ ID NO: 13327 - protein, 438 aa, Streptococcus agalactiae
ATGAAACTTCATGAATTAAAACCTGCAGAAGGATCACGTAAAGTCCGCAATCGTGTGGGTCGCGGTACATCTTCAGGTAATGGTAAAACTTCTGGACGTGGTCAAAAAGGACAAAAAGCGCGTAGTGGTGGTGGAGTACGCCTTGGTTTTGAAGGTGGACAAACTCCATTGTTCCGTCGTATGCCAAAACGTGGGTTCTCAAACATCAATGCAAAAGAATATGCTCTTGTGAACCTTGACCAATTAAATGTCTTTGAAGATGGTACTGAAGTAACTCCAGTTGTTCTTAAAGAAGCTGGAATCGTGCGTGCTGAAAAATCAGGCGTTAAAATTCTTGGTAATGGTGAATTAACCAAGAAATTGTCTGTTAAAGCAGCTAAATTTTCTAAATCTGCTGAAGCAGCTATCACTGCTAAAGGTGGTTCAATCGAAGTCATC

SEQ ID NO: 13328 - protein, 146 aa, Streptococcus agalactiae; identical to SEQ ID NO: 182

SEQ ID NO: 13329 - protein, 1301 aa, Streptococcus agalactiae
ATGTTTTTAAAATTACTTAGAGATGCACTCAAAGTAAAGATGGTAAGAAATAAAATTTTATTTACTATCTTTATCCTTCTTGTATTTCGTATCGGAACGCATATCACAGTACCGGGCATCAATGTTAAGAGTTTAGAACAAATGGGTGAACTTCCATTTCTAAATATGCTTAACTTAGTTAGTGGTAATGCAATGAGAAACTTTTCGGTATTCTCTATGGGAGTTAGCCCATACATTACTGCGTCTATTGTTGTTCAGCTACTTCAAATGGATATTCTTCCGAAGTTTGTTGAATGGGGAAACAAGGAGAGGTAGGTCGTCGTAAGCTTAACCAAGCTACACGTTATATTTCTTTGTTCCTTGCATTCGTACAATCAATTGGTATTACTGCTGGTTTTAACACTCTATCAAGTGTTGCTTTAGTTAAAACTCCGAATGTACAAACATATTTGCTTATTGGTGCAATCCTTACAACAGGTAGTATGGTGGTTACTTGGCTAGGTGAACAAATTACTGATAAGGGATTCGGAAATGGAGTGTCTATGATTATCTTTGCGGGGATCATTTCTTCCATTCCAAGTGCAATTACAACTATCTACGAAGATTTCTTTGTAAATGTACGCTCTTCAGCAATTACAAATTCTTACATCTTTGTCGGGATTCTTATTGTAGCAGTATTAGCAATTGTATTTTTTACAACATTTATTCAACAAGCTGAATACAAAATTCCAATCCAATATACAAAACTTGTTCAAGGAGCTCCTACAAGTTCATATCTTCCTCTAAAAGTAAATCCAGCTGGTGTTATTCCCGTTATCTTTGCTAGCTCGATTACAACAATTCCAAGTACGATTATTCCTTTCTTTCAAAATGGTAAAGAAATTCCTTGGCTTACTAAACTCCAAGAATTACTTAATTATCAAACCCCAGTCGGTATGATTATCTATGCTATCTTGATTATTCTGTTCTCTTTCTTCTATACTTTTGTACAAGTAAACCCTGAAAAGACAGCAGAGAATCTTCAAAAAAATTCGTCCTACATTCCAAGTATTCGACCAGGACGAGAAACAGAAGAGTATATGTCATCGCTATTGAAAAAATTAGCAACAATTGGTTCAGTATTTCTAGCATTTATTTCCTTGTTACCAATTATTGCTCAACAAGCGTTGCATTTGTCATCAAGTATTGCGTTAGGTGGTACAAGCTTACTCATTTTGATTGCAACAGGTATTGAAGGTATGAAACAACTTGAGGGCTATCTTTTGAAGAGACGCTATGTTGGATTCATGAATACAACAGAA

SEQ ID NO: 13330 - protein, 434 aa, Streptococcus agalactiae
  VARIANT 101: Xaa = Any Amino Acid
MFLKLLRDALKVKMVRNKILFTIFILLVFRIGTHITVPGINVKSLEQMGELPFLNMLNLVSGNAMRNFSVFSMGVSPYITASIVVQLLQMDILPKFVEWGXQGEVGRRKLNQATRYISLFLAFVQSIGITAGFNTLSSVALVKTPNVQTYLLIGAILTTGSMVVTWLGEQITDKGFGNGVSMIIFAGIISSIPSAITTIYEDFFVNVRSSAITNSYIFVGILIVAVLAIVFFTTFIQQAEYKIPIQYTKLVQGAPTSSYLPLKVNPAGVIPVIFASSITTIPSTIIPFFQNGKEIPWLTKLQELLNYQTPVGMIIYAILIILFSFFYTFVQVNPEKTAENLQKNSSYIPSIRPGRETEEYMSSLLKKLATIGSVFLAFISLLPIIAQQALHLSSSIALGGTSLLILIATGIEGMKQLEGYLLKRRYVGFMNTTE

SEQ ID NO: 13331 - DNA, 636 bp, Streptococcus agalactiae
atgaatcttttaattatgggtttgcctggtgctggtaaaggtactcaagcagctaagattgttgaagaatttggtgttgctcacatctcaacaggggatatgttccgcgccgcaatggctaatcaaacccaaatgggacgtttagctaaaagttatattgataaaggtgaattggttcctgatgaagtaacaaacgggattgtaaaagagcgcttagctgaggatgatatcgcagaaaaaggttttttacttgatggatatccacgtactattgagcaagcacacgccttagatgctacgcttgaagaactaggactacgcttagatggtgttattaatattaaagtggatccaacatgccttatagagcgtttgagtggccgtattatcaatcgtaaaactggtgaaactttccacaaagtgttcaacccaccagtagattataaagaagaagattactatcaacgtgaagatgataagcctgaaactgtcaaacgtcgcttggacgttaatattgctcaaggagaacctattcttgaacactatcgtaagcttggtcttgttacagatattgaaggtaatcaagaaataacagaagtttttgcagatgttgaaaaagcgttgctagaactcaaa

SEQ ID NO: 13332 - protein, 212 aa, Streptococcus agalactiae
MNLLIMGLPGAGKGTQAAKIVEEFGVAHISTGDMFRAAMANQTQMGRLAKSYIDKGELVPDEVTNGIVKERLAEDDIAEKGFLLDGYPRTIEQAHALDATLEELGLRLDGVINIKVDPTCLIERLSGRIINRKTGETFHKVFNPPVDYKEEDYYQREDDKPETVKRRLDVNIAQGEPILEHYRKLGLVTDIEGNQEITEVFADVEKALLELK

SEQ ID NO: 13333 - DNA, 96 bp, Streptococcus agalactiae
  misc_feature 91, 92, 93, 94, 95: n = A,T,C or G
atgattgagtttgaaaaaccaataataacaaaaattgatgaaaataaagattacggcagatttgtcatcgaaccactagaacgtggctacnnnnnt

SEQ ID NO: 13334 - protein, 32 aa, Streptococcus agalactiae
  VARIANT 31, 32: Xaa = Any Amino Acid
MIEFEKPIITKIDENKDYGRFVIEPLERGYXX

SEQ ID NO: 13335 - DNA, 453 bp, Streptococcus agalactiae
ttggctgtagattcaatctatacaccagtgaaaaaagttaattatcaagttgaacctgctcgtgtaggtagtaatgatggctttgataaattaactattgaaatcatgacaaatggcacaatcattcctgaggatgctcttggtctttcagctcgcgtcttaattgaacacttaaacttgtttactgatttaacagaggttgctaaagcaactgaagtaatgaaggaaacagagaaagtgaacgatgagaaagtgcttgaccgcacaattgaggaacttgatttgtcagtgcgctcatataactgtttaaaacgtgctggaattaatacagtattkgatttaacagaaaaaactgagcctgaaatgatgaaagtccgaaacttaggacgtaagagtcttgaagaagttaaaatcaaacttgccgatctaggtcttggattaaaaaacgataaa

SEQ ID NO: 13336 - protein, 151 aa, Streptococcus agalactiae
  VARIANT 112: Xaa = Any Amino Acid
MAVDSIYTPVKKVNYQVEPARVGSNDGFDKLTIEIMTNGTIIPEDALGLSARVLIEHLNLFTDLTEVAKATEVMKETEKVNDEKVLDRTIEELDLSVRSYNCLKRAGINTVXDLTEKTEPEMMKVRNLGRKSLEEVKIKLADLGLGLKNDK

SEQ ID NO: 13337 - DNA, 384 bp, Streptococcus agalactiae
atggcttaccgtaaactaggacgcactagctcacaacgtaaggcaatgcttcgtgatttgacaaccgatcttcttatcaacgaatcaattgtaactactgaagcacgtgctaaagaaatccgtaaaacagttgaaaaaatgattactctaggtaaacgtggtgatttacatgctcgtcgtcaagctgctgcttatgtacgtaatgaaattgcatcagaaaactatgatgaagcttctgataaatatacatcaacaacagctcttcaaaaactttttgacgacatcgcacctcgttatgctgaacgtaacggaggatacactcgtattcttaaaacagaaccacgccgtggcgatgctgccccaatggcaattattgaattagta

SEQ ID NO: 13338 - protein, 128 aa, Streptococcus agalactiae; identical to SEQ ID NO: 196

SEQ ID NO: 13339 - DNA, 132 bp, Streptococcus agalactiae
ttggcgatgaaaactattcatatgagtataaaaaacgaacgtcaattaagtcagaaatgtaagaaaaatgagttaagaaagcatcggtaccaattaaaacaagaaaaacgttaccaaaagaaaaaagggcat

SEQ ID NO: 13340 - protein, 44 aa, Streptococcus agalactiae
MAMKTIHMSIKNERQLSQKCKKNELRKHRYQLKQEKRYQKKKGH

SEQ ID NO: 13341 - protein, 429 aa, Streptococcus agalactiae
ATGAAAAAATATGTAAAATGGTTAATTCCCATATCTATTATTGGGATGTTACTAGCAGGTTGTCAAATGAATAGTGAATCTAAAAGTCAGTCAAACGAAGTAAAAAATAGCAAACAGTCAGCAGTAAAGAAAGGTAAAAAAGTAATAAAAAAAGAACAAGTAGCTTATCTCAAAAAGTATGAAAAAGAATTAACTGAATATGTCAAAACCCAAAATCCAGATATTAGCGAAATTAAGTATGATTGGAATAGTGTGCGTATAGTGGAAGCTAGTAATGGAACCCCTCAAGGCGGAGAGCAGCTATTATTAATTTGGGGTTATGCAAATGGCAGTGAATTAACCAATTTTACTCTAAATTTCACATTGGGTGATAATCAAATGCCTAATATTGACTCAGTTGGCTCAGATAATTTATCAACTATTGAAGAT

SEQ ID NO: 13342 - protein, 143 aa, Streptococcus agalactiae
MKKYVKWLIPISIIGMLLAGCQMNSESKSQSNEVKNSKQSAVKKGKKVIKKEQVAYLKKYEKELTEYVKTQNPDISEIKYDWNSVRIVEASNGTPQGGEQLLLIWGYANGSELTNFTLNFTLGDNQMPNIDSVGSDNLSTIED

SEQ ID NO: 13343 - protein, 201 aa, Streptococcus agalactiae
ATGGCAGAAAGTGCTAATACAGTTCGATCGAATTCTTTTGTTTTAGAAGAATTAACTGAATTTCAAAGAGAAAAGTTAAAAAATGGGGAGTCAGTTAAGTTTAATTTTTCTAAAGATGTTAAGAAAGGAAATCAAATCACCCAAGGTGGCTCAAATCTCCCAAATGATGGGAGTGTCTATCTTCAGCCTAATAAGTCCTTA

SEQ ID NO: 13344 - protein, 67 aa, Streptococcus agalactiae
MAESANTVRSNSFVLEELTEFQREKLKNGESVKFNFSKDVKKGNQITQGGSNLPNDGSVYLQPNKSL

SEQ ID NO: 13345 - protein, 372 aa, Streptococcus agalactiae
ATGAATAGTGAACATAAAAGTCAGTATAATGAAACAAAAAGTAGCAAGCAATCAGAAGTGAAGAAAGATAAAAAAATGACAAAAAAAGAACAATTAGCTTATCTCAAAGAGCATGAACAAGAAATAATTGATTTTGTAAAATCTCAGAATAAAAAGATAGAATCTGTACAAATTGATTGGAATGATGTTCGATGGAGTAAAGGGGGAAATGGTACACCTCAAGGAGGAGGAGAGGGGATTTTACTTTTTGGGGAGATTAATAATGATTCTGAATCAAGTTGGAGAGTTGATATTGATATAGAAAAAGGACGGCTAGACCTAAAAAATATGTATTTAGGACAACCTATACGAATTGGAGGTAAATTATTTGAG

SEQ ID NO: 13346 - protein, 124 aa, Streptococcus agalactiae
MNSEHKSQYNETKSSKQSEVKKDKKMTKKEQLAYLKEHEQEIIDFVKSQNKKIESVQIDWNDVRWSKGGNGTPQGGGEGILLFGEINNDSESSWRVDIDIEKGRLDLKNMYLGQPIRIGGKLFE

SEQ ID NO: 13347 - protein, 342 aa, Streptococcus agalactiae
TTGAGTAATTGGAACTTAGAAAGTTTTGATAACCTATTTGCTACTTTAGCAGAATCAACATACACAAAAAGACCAAGTAACTTTACATATAATGAATTGAATCCTAAGTTGCTACGACAACTGAACTCAGGTAGTTCTGTTGAATTGGATTTCTCAAAATCTGTTAAGAAAGGAAAAAAAGTTATCGAAGGCGGTCAGAACCTCCCCAATGATGGTATTGTCTACCTGCAACCAGATAAGTCCTTAAAATCTATTGATGAAAAAGTAGAGGTTCGCGTTCCTGATGTCAATGGCGGTTATCACTCTGAGCATTGTGTTACTAATTCCTATCAGAAAGGTTAC

SEQ ID NO: 13348 - protein, 114 aa, Streptococcus agalactiae
MSNWNLESFDNLFATLAESTYTKRPSNFTYNELNPKLLRQLNSGSSVELDFSKSVKKGKKVIEGGQNLPNDGIVYLQPDKSLKSIDEKVEVRVPDVNGGYHSEHCVTNSYQKGY

SEQ ID NO: 13349 - protein, 549 aa, Streptococcus agalactiae
ATGACTAAAATTTATCATATGATTTTATGTAATTCTGATATAATGAAGATTTTAGCTATAATAAAATCTCTTCCACTGAATGATTGTTGGCTGTGTGCTGGCACATTGAGAAACTTTATATGGAATAAACTTTCTGGAATAAATGAGACATTGACATCAGACATTGATGTTGTATTTTTTGATAAAAATATTTCTTATGAAGAAACGGTGGTATTAGAACAACAATTAAAGGATAACTATCCACAGTACGATTGGGAACTTAAAAATGAATTTTACATGAACACTCATTCTCCTAATACCCCAAAGTATACTAGCTCTAAAGATGCTATTTCGAAATTTCCTGAAAAGTGTACTGCAGTGGGAGAAAGGTTAGATGATAGAAATCAACTCGAACTTTACCTCCCTTATGGTGAAGAGGAAATATTAAATTTCATTGTTAGTCCTACGCCATATTTTGAAGAGGATCTATTACGTTATAATGTTTATTTGAAGCGAGTGGATAAGAAGAAATGGAATAATATTTGGCCTCGTTTAACAATCATAAAAAAA

SEQ ID NO: 13350 - protein, 183 aa, Streptococcus agalactiae
MTKIYHMILCNSDIMKILAIIKSLPLNDCWLCAGTLRNFIWNKLSGINETLTSDIDVVFFDKNISYEETVVLEQQLKDNYPQYDWELKNEFYMNTHSPNTPKYTSSKDAISKFPEKCTAVGERLDDRNQLELYLPYGEEEILNFIVSPTPYFEEDLLRYNVYLKRVDKKKWNNIWPRLTIIKK

SEQ ID NO: 13351 - DNA, 417 bp, Streptococcus agalactiae
atgaaaatgacagtctattttgatggtaatttttggttgggtttgattgagtacgatgatgatggtgattacaaagtttttcggtatttttttggaaaagaacctaaagatgatgatgtttttaattttataaatcataaacttaatgatttgataaaaaaatacgagtttgttaaaacggatatttctctaaagcgtacgaatgaacacaaaaaaagtcctaaaagaatgcaaagagaaattaatagagaaaaacgtaagccagtagtatctacaaaagcgcaattggcgatgaaaactattcatatgagtataaaaaacgaacgtcaattaagtcagaaatgtaagaaaaatgagttaagaaagcatcggtaccaattaaaacaagaaaaacgttaccaaaagaaaaaagggcat

SEQ ID NO: 13352 - protein, 139 aa, Streptococcus agalactiae; identical to SEQ ID NO: 208

SEQ ID NO: 13353 - DNA, 432 bp, Streptococcus agalactiae
atgaagctgagaagaaattattttgttcaactttgggaatatgatgattggattcaagaaggacgtattgtactttttaggttgcttgaagagcatccgtatttattggataatgaaagcaaactattcatttactttaaaacaaaattttcaaattatttaaacgatgtattaagacaccaagattgtcaaaagcgacaatttaataaaatgccttatgaagaaatcagtgaagttagtcattatgttaagagtaaaggactagttttagatgactatattgcttatcgtgatactttaacaaaagtggaagaaactttgtcagatattgataaagaaaaatttgaaaaactgattaatggtgaacgttttgcggggaagaaaaaattcatacgaaatattcaaccttttttcaatgcttttaaagcggat

SEQ ID NO: 13354 - protein, 144 aa, Streptococcus agalactiae
MKLRRNYFVQLWEYDDWIQEGRIVLFRLLEEHPYLLDNESKLFIYFKTKFSNYLNDVLRHQDCQKRQFNKMPYEEISEVSHYVKSKGLVLDDYIAYRDTLTKVEETLSDIDKEKFEKLINGERFAGKKKFIRNIQPFFNAFKAD

SEQ ID NO: 13355 - DNA, 714 bp, Streptococcus agalactiae
atgagtaaagttcgtttatatatcgctcgtcatggtaaaacaatgtttaatacaattggtcgtgctcaggggtggagtgatactcctttaactacttttggagaactcgggattaaagagcttggttggggactaaaggcttcaaatattagttttaaagaggctttttctagtgatagtggacgtactttacaaactatggaaattattctcagggaagtgcaacaagaaaatattccctatacgagagataaacgaatccgcgagtggtgctttggtagtttggatggaggatatgatggcgacctttttaatggcgttctgcctcgagtttcaaacggagatatgagccatttgacacacgaagaaattgctaatttgatttgtcaagttgatacggctggctgggcagaaccgtgggcaatattgagtaaccgtattctgtcaggcttcactgctatagctaaaaaaatagaggatattgggggaggtaatgcgattgttgtcagtcatgggatgactattgcgacttttttatggttaatcgaccatagtacccctcgtagtttaggcttagataatggtagtgtctcagtcgttgattttgaagatggaacattttctattcaatctattggggatatgtcctatcgagaaaaaggaagagaaattttagaaaaacattgcatgaaaaaaataaaatatccgatcagt

SEQ ID NO: 13356 - protein, 238 aa, Streptococcus agalactiae
MSKVRLYIARHGKTMFNTIGRAQGWSDTPLTTFGELGIKELGWGLKASNISFKEAFSSDSGRTLQTMEIILREVQQENIPYTRDKRIREWCFGSLDGGYDGDLFNGVLPRVSNGDMSHLTHEEIANLICQVDTAGWAEPWAILSNRILSGFTAIAKKIEDIGGGNAIVVSHGMTIATFLWLIDHSTPRSLGLDNGSVSVVDFEDGTFSIQSIGDMSYREKGREILEKHCMKKIKYPIS

SEQ ID NO: 13357 - DNA, 408 bp, Streptococcus agalactiae
ttggatggaggatatgatggcgacctttttaatggcgttctgcctcgagtttcaaacggagatatgagccatttgacacacgaagaaattgctaatttgatttgtcaagttgatacggctggctgggcagaaccgtgggcaatattgagtaaccgtattctgtcaggcttcactgctatagctaaaaaaatagaggatattgggggaggtaatgcgattgttgtcagtcatgggatgactattgcgacttttttatggttaatcgaccatagtacccctcgtagtttaggcttagataatggtagtgtctcagtcgttgattttgaagatggaacattttctattcaatctattggggatatgtcctatcgagaaaaaggaagagaaattttagaaaaaacattgcaa

SEQ ID NO: 13358 - protein, 136 aa, Streptococcus agalactiae
MDGGYDGDLFNGVLPRVSNGDMSHLTHEEIANLICQVDTAGWAEPWAILSNRILSGFTAIAKKIEDIGGGNAIVVSHGMTIATFLWLIDHSTPRSLGLDNGSVSVVDFEDGTFSIQSIGDMSYREKGREILEKTLQ

SEQ ID NO: 13359 - DNA, 750 bp, Streptococcus agalactiae
atgaaaaaaaataaaattatccgattcagtttagttggtgttctacttgcgatactatgctttagtctttttgctttattgaagcctaacagtcaacaatcatcatctcaaaagttgaggaatgaggatataaaaaagacatcctctcaaaaaagaaataagaaattacgattaccagctgtatcatcaaaagattggaacttgattttggtcaatcgtgaccataaacatgaagaattaagtccagatgtggtgcctgttgaaaatatttatttggataaacgtattacgaagcaagctactcagtttttagaggctgctagagcaattgattcacgagaacatttaatttcgggttatcgtagtgttgcctatcaggagaagttgttcaattcttatgttactcaagagatgactagtaaccctaatttgacgaggggacaagcagaaaagttggtaaaaacttactctcagcctgcaggtgctagtgaacaccagactggattagcgatggatatgagtactgtagattctttgaatgagagcgatcctagagtagtcagtcagttgaaaaagatagctccacaatatggttttgtcttacggtttccggatggtaaaacagcagaaacaggggtaggttatgaagattggcattaccgctatgttggggtagagtctgcaaaatatatggtcaaacatcatttaacattagaagaatacataactttattaaaggagaataaccaa

SEQ ID NO: 13360 - protein, 250 aa, Streptococcus agalactiae
MKKNKIIRFSLVGVLLAILCFSLFALLKPNSQQSSSQKLRNEDIKKTSSQKRNKKLRLPAVSSKDWNLILVNRDHKHEELSPDVVPVENIYLDKRITKQATQFLEAARAIDSREHLISGYRSVAYQEKLFNSYVTQEMTSNPNLTRGQAEKLVKTYSQPAGASEHQTGLAMDMSTVDSLNESDPRVVSQLKKIAPQYGFVLRFPDGKTAETGVGYEDWHYRYVGVESAKYMVKHHLTLEEYITLLKENNQ

SEQ ID NO: 13361 - protein, 573 aa, Streptococcus agalactiae; identical to SEQ ID NO: 4513

SEQ ID NO: 13362 - protein, 191 aa, Streptococcus agalactiae; identical to SEQ ID NO: 216

SEQ ID NO: 13363 - protein, 1080 aa, Streptococcus agalactiae
ATGTGTAAGAGTGCTAATTTCAGAAAGACCGAGAGGGGTGATGTTTTTGTGATTACACAACGTCAAAATGATATTTTGAATTTAATCGTTGAGTTATTTACACAAACTCATGAACCAGTAGGGTCTAAAGCTTTACAGAGAACGATTGATTCTAGTAGCGCCACTATTCGTAATGATATGGCAAAACTAGAGAAGTTGGGGTTATTGGAAAAAGCACACACTTCTAGTGGACGGATGCCGAGTCCAGCTGGTTTTAAGTATTTTGTAGAGCACTCCCTTAGACTAGATAGTATTGATGAGCAAGATATTTATCATGTTATAAAAGCTTTTGACTTTGAAGCATTCAAATTAGAAGACATGCTTCAAAAAGCTAGTCATATTTTATCGGAGATGACGGGCTATACATCCGTTATTTTAGATGTGGAGCCAGCTCGTCAACGTTTGACAGGGTTTGATGTTGTTCAGCTTAGCAACCATGATGCTCTAGCAGTCATGACTTTAGATGAATCTAAGCCAGTGACAGTGCAGTTTGCTATTCCAAGAAACTTTTTGACACGTGACTTGATAGCATTTAAAGCTATCGTAGAGGAGCGCTTGCTGGATGGTAGTGTCATGGATATTCATTATAAGTTGAGGACAGAAATTCCTCAGATCGTTCAGAAGTATTTTGTAACTACGGATAATGTTTTACAACTATTTGATTATGTTTTTTCAGAGCTGTTTTTGGAAACGGTATTTGTAGCTGGCAAGGTAAATTCTTTAACATATTCAGATCTATCAACGTATCAGTTTTTGGATAATGAGCAGCAAGTAGCAATTTCTTTGAGGCAAGGTCTGAAAGAGAGTGAGATGGCTTCTGTCCAAGTGGCAGATAGTCAAGAAGCCGCACTTGCAGATGTGTCAGTTTTAACTCACAAATTTTTGATTCCTTACCGTGGATTTGGACTCCTGAGTTTGATTGGTCCTATTGATATGGATTATCGTAGGTCTGTTAGTTTGGTAAACATTATCGGAAAGGTATTGGCTGCTAAATTAGGTGATTATTATCGATACCTAAATTCTAACCATTATGAAGTTCAC

SEQ ID NO: 13364 - protein, 360 aa, Streptococcus agalactiae
MCKSANFRKTERGDVFVITQRQNDILNLIVELFTQTHEPVGSKALQRTIDSSSATIRNDMAKLEKLGLLEKAHTSSGRMPSPAGFKYFVEHSLRLDSIDEQDIYHVIKAFDFEAFKLEDMLQKASHILSEMTGYTSVILDVEPARQRLTGFDVVQLSNHDALAVMTLDESKPVTVQFAIPRNFLTRDLIAFKAIVEERLLDGSVMDIHYKLRTEIPQIVQKYFVTTDNVLQLFDYVFSELFLETVFVAGKVNSLTYSDLSTYQFLDNEQQVAISLRQGLKESEMASVQVADSQEAALADVSVLTHKFLIPYRGFGLLSLIGPIDMDYRRSVSLVNIIGKVLAAKLGDYYRYLNSNHYEVH

SEQ ID NO: 13365 - protein, 570 aa, Streptococcus agalactiae
ATGGCAGTATTCAATAAGTTATTTAAAAGGAGGCACTCAGTGTCAGAAGAAATTAAAAAAGACGATTTACAGGAAGAAGTGGAAGCCACTGAAACTGAAGAGATAGTTGAGGAAGTTATTGAAGAAATTCCTGAAAAATCAGAGTTAGAACTCGCAAACGAGCGTGCTGATGAGTTTGAAAATAAATACTTGCGTGCTCATGCAGAAATGCAGAATATACAGCGTCGCTCTAGTGAAGAACGTCAACAACTTCAACGCTATCGTTCTCAGGATCTGGCAAAAGCAATCTTACCATCGCTTGACAATCTAGAACGTGCCTTGGCTGTTGAAGGGTTGACAGATGATGTTAAAAAAGGTTTAGAAATGACTCGTGATAGCCTTATTCAAGCACTAAAGGAAGAAGGCGTAGAAGAAGTAGAAGTCGACTCATTTGACCACAACTTTCATATGGCAGTTCAGACCCTCCCAGCCGATGATGAACATCCAGCCGATAGCATTGCAGAAGTCTTTCAAAAGGGATATAAATTGCACGAGCGTCTGCTAAGACCAGCGATGGTAGTTGTCTATAAC

SEQ ID NO: 13366 - protein, 190 aa, Streptococcus agalactiae
MAVFNKLFKRRHSVSEEIKKDDLQEEVEATETEEIVEEVIEEIPEKSELELANERADEFENKYLRAHAEMQNIQRRSSEERQQLQRYRSQDLAKAILPSLDNLERALAVEGLTDDVKKGLEMTRDSLIQALKEEGVEEVEVDSFDHNFHMAVQTLPADDEHPADSIAEVFQKGYKLHERLLRPAMVVVYN

SEQ ID NO: 13367 - protein, 1827 aa, Streptococcus agalactiae
ATGTCTAAAATTATTGGTATTGACTTAGGTACAACAAACTCAGCAGTAGCAGTTCTTGAAGGGACTGAATCAAAAATCATTGCTAACCCAGAAGGCAATCGTACAACTCCTTCAGTAGTATCATTCAAAAATGGTGAGATTATCGTGGGTGATGCTGCAAAACGTCAAGCGGTAACAAATCCAGATACTGTTATCTCTATCAAATCAAAGATGGGAACTTCTGAAAAAGTTTCTGCAAATGGTAAAGAATATACTCCTCAAGAAATTTCAGCAATGATTCTTCAATACCTTAAAGGTTATGCTGAAGACTATCTTGGAGAAAAAGTAGAAAAAGCAGTTATTACTGTTCCAGCTTACTTCAACGATGCACAACGTCAGGCAACTAAAGACGCTGGTAAAATTGCAGGTCTTGAAGTAGAACGTATCGTTAACGAACCAACAGCAGCCGCACTTGCTTATGGTATGGACAAGACTGACAAGGATGAAAAAATCTTAGTTTTTGACCTTGGTGGTGGTACATTTGACGTATCAATCCTTGAATTAGGTGATGGTGTCTTCGACGTTCTTGCAACAGCAGGTGATAACAAACTTGGTGGTGACGACTTTGACCAGAAAATTATTGATTTCTTGGTAGAAGAATTCAAGAAAGAAAATGGTATTGATCTTTCTCAAGACAAAATGGCTCTTCAACGCTTGAAAGATGCTGCTGAAAAAGCTAAAAAAGACCTTTCAGGTGTAACTCAAACTCAAATTTCATTACCGTTCATCACTGCTGGTTCTGCTGGTCCTCTTCACTTGGAGATGAGCTTATCACGTGCTAAATTTGACGATCTCACTCGTGACCTTGTTGAACGTACGAAAACTCCAGTTCGTCAAGCTCTTTCAGATGCAGGCTTGTCATTGTCAGAAATTGATGAAGTTATCCTCGTTGGTGGATCAACACGTATCCCAGCAGTTGTTGAAGCTGTAAAAGCTGAAACTGGTAAAGAACCAAATAAATCTGTTAACCCTGATGAAGTGGTTGCCATGGGTGCTGCTATCCAAGGTGGTGTTATCACTGGGGATGTGAAAGACGTTGTACTTCTTGACGTAACACCATTGTCACTTGGTATTGAAACAATGGGTGGTGTCTTCACTAAATTGATCGACCGCAACACAACTATCCCAACATCTAAATCACAAGTCTTCTCAACAGCAGCAGACAACCAACCAGCCGTTGATATCCATGTTCTTCAAGGTGAACGCCCAATGGCAGCAGATAACAAAACACTCGGTCGCTTCCAATTGACTGATATCCCAGCTGCACCTCGTGGAATCCCACAAATTGAAGTAACATTTGATATCGATAAAAATGGTATTGTATCTGTTAAAGCTAAAGATCTCGGTACTCAAAAAGAACAACACATTGTTATCCAATCTAATTCAGGATTAACTGATGAAGAAATTGATAAAATGATGAAAGATGCTGAAGCAAATGCTGAAGCAGATGCAAAACGTAAAGAAGAAGTTGATCTTAAAAATGAAGTTGACCAAGCCATCTTTGCAACAGAAAAAACTATTAAAGAAACTGAAGGTAAAGGCTTTGATACAGAACGCGATGCAGCGCAATCAGCACTTGATGAGTTGAAAAAAGCTCAAGAATCAGGTAACCTTGACGACATGAAAGCTAAACTTGAAGCTCTTAACGAAAAAGCACAAGCTCTTGCAGTTAAACTTTACGAACAAGCAGCTGCAGCACAACAAGCAGCTCAAGGGGCTGAAGGTGCACAATCAGCTGATTCATCAAGCAAGGGTGATGATGTTGTAGATGGCGAATTCACTGAGAAA

SEQ ID NO: 13368 - protein, 609 aa, Streptococcus agalactiae; identical to SEQ ID NO: 222

SEQ ID NO: 13369 - protein, 1112 aa, Streptococcus agalactiae
ATGACAATACAGAATTTTATGATCGTCTTGGCGTTTCAAAAGATGCTTCTCAGGACGAAATAAAAAAAGCTTACCGTAGGATGTCTAAGAAATACCATCCAGATATTAATAAGGAAGCGGGAGCAGAGGAAAAATATAAAGAGGTTCAAGAAGCTTATGAAACCTTGAGTGATACACAAAAACGTGCTGCCTATGATCAATATGGCGCTGCTGGGGCAAATGGCGGTTTTGGTGGCTTCGATGGTGGTGGCTTTGGTGGTTTTGAAGACATCTTCTCAAGCTTTTTTGGTGGAGGAGGGATGCGCAATCCTAATGCACCACGTCAAGGAGATGACCTACAATATCGTGTTAATTTAAGTTTTGAAGAAGCTATCTTTGGAGCTGAAAAAGAAGTATCTTATAATCGGGAGTCATCATGTCATACTTGTTCAGGAAGTGGAGCTAAGCCAGGTACTAGCCCTGTGACTTGTCAAAAGTGTCATGGTTCGGGTGTGATTAATGTTGATACACAAACACCTCTAGGAACAATGCGTCGCCAAGTGACTTGTGATGTTTGTCAGGGTAGTGGTCAAGAAATCAAAGAGAAATGTCCAACATGTCATGGAACTGGTCATGAGAAGAAGACGCATAAAGTATCAGTTAAAATACCTGCAGGAGTTGAAACTGGGCAACAAATTCGTTTAACAGGACAAGGAGAAGCTGGCTTCAATGGTGGTCCTTATGGTGATCTCTTTGTTATTATTAACGTTCTCCCAAGCCAACAGTTTGAGCGTAATGGATCAACAATTTATTATACTTTGAATATTGGCTTTGTCCAAGCTGCTTTGGGTGATACAATTGATATACCTACTGTCCATGGAGCGGTAGAAATGTCAATTCCTGCTGGTACTCAGACAGGAAAAACGTTCCGTCTTCGCGGAAAAGGTGCCCCTAAACTTCGAGGGGGTGGACAAGGTGATCAGCATGTTACTGTTAACATCGTAACTCCTACTAAATTGAATGATGCTCAAAAAGAGGCATTGCACGCTTTTGCAGAGGCAAGTGGAGATAAGATGGTACATCCGAAGAAGAAAGGTTTCTTTGATAAAGTCAAAGATGCTTTAGATGTTGAT

SEQ ID NO: 13370 - protein, 371 aa, Streptococcus agalactiae
MNNTEFYDRLGVSKDASQDEIKKAYRRMSKKYHPDINKEAGAEEKYKEVQEAYETLSDTQKRAAYDQYGAAGANGGFGGFDGGGFGGFEDIFSSFFGGGGMRNPNAPRQGDDLQYRVNLSFEEAIFGAEKEVSYNRESSCHTCSGSGAKPGTSPVTCQKCHGSGVINVDTQTPLGTMRRQVTCDVCQGSGQEIKEKCPTCHGTGHEKKTHKVSVKIPAGVETGQQIRLTGQGEAGFNGGPYGDLFVIINVLPSQQFERNGSTIYYTLNIGFVQAALGDTIDIPTVHGAVEMSIPAGTQTGKTFRLRGKGAPKLRGGGQGDQHVTVNIVTPTKLNDAQKEALHAFAEASGDKMVHPKKKGFFDKVKDALDVD

SEQ ID NO: 13371 - DNA, 1245 bp, Streptococcus agalactiae
atggtaaccaaagttgaagagattcgctcatatttgatagcttctatacaaaatggtaagttggctccaggagatcgcctaccatctataagacagttagctaatcaattttcctgtaacaaagatacagtgcaacgagttttgatggaattgcgttttgataattatatctatgcaaagcctaggtcaggctattacgtctttgattctcatcaagaggaagttgaagaaggggttagtttaccaaactctgagattgcaaatatagcttatgatgattttagattgtgtttgaatgagacccttattggtagggaagattaccttttcaattattactatcgtcaagaaggtcttcttgatttaagtaaagcagtggctaaattaatggaagaaacaggggtctatgttccccttgatgatattgttattacggctggtactcaacaggcattatttattttgacacaggttacctttccaaatcgaaaatctcgagttttaatagaagaaccgacttatcctcgtatgattgaactaatcaaaacacaaaatttaccctatgaaactattcctcgaggtactcatggaattgattttcagcgcttagaggagattttccagacacaatcaattaagtttttttatgttatacctcgcatgcataatcctttgggaacatcctataatccggtagagatgaaaagattaatagagatggcagagaagtatgatgtttatattgtggaagatgactatatgtctgattttgcaagtcagtcaccattacattattatgatactcacgggcgtgttatttatctaaaatctttttcaaaggctattttccctgctttaagattagctgcgatttgtttaccacaagctttaaaatcaacatttatggcttacaagaagttgatggattatgatactaatctgattttacaaaaagcattagcgctttatattgaaaatggcctttatgctaagaatagtcaatatttgaaatatcgttatcagaaagaccttgcaaattcaaaatctattttagctgatcaccctaatctacccccatatagtttacatcacgatagtgtattatttgattgttcgaaactcgataacttcaaaatattacggcaatacggcgatactttggaaaattatttttgtcaaaaatcgcatcaatctctcttacaagtaaaaaatgattcctgcttaaagcagttcttgggatcgttg

SEQ ID NO: 13372 - protein, 415 aa, Streptococcus agalactiae
MVTKVEEIRSYLIASIQNGKLAPGDRLPSIRQLANQFSCNKDTVQRVLMELRFDNYIYAKPRSGYYVFDSHQEEVEEGVSLPNSEIANIAYDDFRLCLNETLIGREDYLFNYYYRQEGLLDLSKAVAKLMEETGVYVPLDDIVITAGTQQALFILTQVTFPNRKSRVLIEEPTYPRMIELIKTQNLPYETIPRGTHGIDFQRLEEIFQTQSIKFFYVIPRMHNPLGTSYNPVEMKRLIEMAEKYDVYIVEDDYMSDFASQSPLHYYDTHGRVIYLKSFSKAIFPALRLAAICLPQALKSTFMAYKKLMDYDTNLILQKALALYIENGLYAKNSQYLKYRYQKDLANSKSILADHPNLPPYSLHHDSVLFDCSKLDNFKILRQYGDTLENYFCQKSHQSLLQVKNDSCLKQFLGSL

SEQ ID NO: 13373 - DNA, 774 bp, Streptococcus agalactiae
atgacaaggtataaggcacagatttcttatgatggttcagctttttcaggcttccaaagacaaccaaattgtaggacagttcaagaagaaattgagagaactcttaagcgcctaaatagcgggaacgatgtgataatctatggtgctggtcgcacagatgctggtgttcatgcttatggacaagttattcattttgatttaccacaggcgcgtgatgtagaaaaattacgctttggtttagatacacagtgtccagacgatattgatattgttaaagtagagcaagtgtctgatgattttcattgtcgatatgataaacacattaaaacttatgagtttttagtagatatcggtaggccgaaaaatcctatgatgagaaactatgcaacacattacccttatcctgtcattattgagcttatgcaagaagctattaaagatttagtaggcacccatgactttacaggctttactgcttcaggtacgagtgtagaaaataaagtacgtactatttttgatgcgaaaattcagtttgaagcgtctaaaaatcttttaatttttacctttacaggaaatggttttttgtataaacaggtgcgtaatatggttggtaccctgctaaaaattggtaatggacgcatgcctattagccaaatcaaaacaattttacaggctaaaaatcgggatttagcaggtccaactgcggcaggaaatggtttatatttgaaggagattatttatgaagacgaggaatgttttagcaatttcaggaaa

SEQ ID NO: 13374 - protein, 258 aa, Streptococcus agalactiae
MTRYKAQISYDGSAFSGFQRQPNCRTVQEEIERTLKRLNSGNDVIIYGAGRTDAGVHAYGQVIHFDLPQARDVEKLRFGLDTQCPDDIDIVKVEQVSDDFHCRYDKHIKTYEFLVDIGRPKNPMMRNYATHYPYPVIIELMQEAIKDLVGTHDFTGFTASGTSVENKVRTIFDAKIQFEASKNLLIFTFTGNGFLYKQVRNMVGTLLKIGNGRMPISQIKTILQAKNRDLAGPTAAGNGLYLKEIIYEDEECFSNFRK

SEQ ID NO: 13375 - DNA, 756 bp, Streptococcus agalactiae
atgaagacgaggaatgttttagcaatttcaggaaatgatattttctctggcggcggcttgcatgcagatttagcaacttacgttgttaataaattacatggttttgtggcagtaacatgcttaacagcaatgtcagataaagggtttgaagtcattcctatagaggcatctatactaaagcagcaactagaaagtttaaaagatgtagagtttgggtctattaaactaggattgcttcccaatgtagaaacagcacaagttgttttggaatttgtaaaatcaaaacaagaatgtccagtagtcttagacccagtcttagtttgtaaagaaaatcatgatttagaagttagccaattacgtgagcagctaattgcgtttttcccatatgctgatgtgattactcctaatttagtagagactcaattattgacgggtctttcaattgaaaacttagatcaaatgaaaattgctgctgagaaactttacgatatgggggctaaacatgttgttatcaaagggggcaaccgtttaaatgctgaagaggctacagacctttactatgatggtgaacgttttgaaacctatgtttttcctgtagtagatgccaataatacaggtgctggatgtacatttgcgtcaagtattgccagccaattagctatgggtaaaaatgtagaagatgcagtcaaaatgtctaaaggtttcgtctatcaagctattaaagcatcggataagtacggagttgtccaacatttt

SEQ ID NO: 13376 - protein, 252 aa, Streptococcus agalactiae
MKTRNVLAISGNDIFSGGGLHADLATYVVNKLHGFVAVTCLTAMSDKGFEVIPIEASILKQQLESLKDVEFGSIKLGLLPNVETAQVVLEFVKSKQECPVVLDPVLVCKENHDLEVSQLREQLIAFFPYADVITPNLVETQLLTGLSIENLDQMKIAAEKLYDMGAKHVVIKGGNRLNAEEATDLYYDGERFETYVFPVVDANNTGAGCTFASSIASQLAMGKNVEDAVKMSKGFVYQAIKASDKYGVVQHF

SEQ ID NO: 13377 - DNA, 462 bp, Streptococcus agalactiae
atgaggaaagagaaaactagtcaattggttcaattggcaattgtaacagctatatctattgtattggggatgtttataagtattccgacaccaacaggttttttgacattactagatgctggaatattctttgctgccttttactttggcaaaaaagaaggggctgtggtaggtgccttagctggttttttaattgatttattgaaaggttatcccaattggatgttctttagtttattgattcatggggcgcaagggtatttagcgggtttaccaggtagaagacgtcttttaggtcttattagtgcaactcttgttatggtattaggttatgctatagctagtggattgatgtatggttggggagctgttttaccagatattcctggcaatattatgcaaaatatggttggtatggtcgttggttttgctcttaataagtctctagaaagagtgaagaaa

SEQ ID NO: 13378 - protein, 154 aa, Streptococcus agalactiae; identical to SEQ ID NO: 4530

SEQ ID NO: 13379 - DNA, 567 bp, Streptococcus agalactiae
atgatactagattataataagttaaagcaggaaactaaagctattgtagttgatattattgagcgtagtgctcttaaaaaaggtcaaatttttgtactaggtctatcatctagtgaggtttctggtggtttaattggaaaaaattctagttctgaaattggtgaaattatcgttgaagttatcctcaaagagttacattcacgcggcatctatttagcagttcaaggttgtgaacatgttaatagggcgttggttgttgaagcagaattggctgaacgtcaacagttggaagtcgttaatgttgttcctaatctacatgctggcggtagtggtcaggttgcagcttttaagttgatgacatcaccagttgaggttgaagaaattgtggcacatgctggaattgatattggagatacttctattggaatgcatatcaagagagtacaagttcccttgattccaattagtcgtgagttgggaggggcacacgttacagcactagctagtcgtcctaaattaattggcggtgctagagcaggatatacgagcgatccaatccgtaaattt

SEQ ID NO: 13380 - protein, 189 aa, Streptococcus agalactiae; identical to SEQ ID NO: 4532

SEQ ID NO: 13381 - protein, 840 aa, Streptococcus agalactiae
ATGATTACTTTAGAAAAATTTATTGACCATCTTAATGTAGAGGAAGTTTTATTTACTTTCTTCACCAAACTAATATCAATCTTATTATTAATCATTGCATTCGTTATCGTTAGGCAAGTCATCAATTATCTTTTCGAAAAGACTGTTAATCGCTCACTCGCCTTTTCTAGACAAAAAGTAGCTCGTCAAAAAACATTAGCTAAACTTTCTCACAATGTTTTAAACTATACCCTTTATTTCTTTCTATTCTATTGGATTTTAAGTATATTGGGCGTTCCAATTTCTAGTTTATTAGCTGGGGCTGGTATTGCTGGGGTTGCTATTGGACTTGGTGCTCAAGGCTTCTTATCAGATGTTGTCAATGGCTTTTTTATTCTGCTAGAAAACCAATTTGATGTTGGTGATATTATTAATGTTGGTGCTGTATCAGGCACTGTTACTAATGTTGGGATACGCACCACACAAATTCATGATTTCGATGGAACCTTACACTTCATTCCTAATCGTAATATTACAATTGTCAGCAATAAGTCTCGTAGCAATATGCGTGCTCAAATTGATATTCCTTTATTTGTTCATACAAACCTTGATCAGATTTCTGATATTGTAACAAAAATCAATGAAGAGTATGTTTCAAAACATCCTGCTATCGTTGGAGAGCCTACTGTTTTTGGTCCTACAACCAATGCTAATGGTCAATTTGTTTATCGTATTAATATCTTCACGCAAAACGGTGCTCAGTTTGACATCTATGCTGAATTTTACAAACTTTATCAAAAAGCTATTCTTGAAGAAGGTATTGACTTACCAACATACAATTTCTCCAATAACCACTCTCGT

SEQ ID NO: 13382 - protein, 280 aa, Streptococcus agalactiae
MITLEKFIDHLNVEEVLFTFFTKLISILLLIIAFVIVRQVINYLFEKTVNRSLAFSRQKVARQKTLAKLSHNVLNYTLYFFLFYWILSILGVPISSLLAGAGIAGVAIGLGAQGFLSDVVNGFFILLENQFDVGDIINVGAVSGTVTNVGIRTTQIHDFDGTLHFIPNRNITIVSNKSRSNMRAQIDIPLFVHTNLDQISDIVTKINEEYVSKHPAIVGEPTVFGPTTNANGQFVYRINIFTQNGAQFDIYAEFYKLYQKAILEEGIDLPTYNFSNNHSR

SEQ ID NO: 13383 - protein, 600 aa, Streptococcus agalactiae
ATGTCTACATCATTTGAAAATAAAGCTACAAACCGTGGTATTATCACATTTACAATTAGTCAAGATGAGATCAAGCCAGCTCTTGATCAAGCATTCAACAAAGTTAAAAAAGATTTGAACGTTCCAGGATTCCGTAAAGGACATATGCCTCGTACAGTTTTCAACCAAAAATTTGGTGAAGAAGCACTCTACGAAAATGCATTGAATTTAGTGTTGCCAAAGGCTTACGAAGCAGCTGTTGCAGAACTTGGTTTAGACGTTGTTGCTCAACCAAAAATTGATGTTGTATCAATGGAAAAAGGTCAAGATTGGAAGTTGACAGCTGAAGTTGTTACAAAACCAGAAGTTAAACTTGGGGATTACAAAGACCTTTCAGTAGAAGTTGATGTTTCAAAAGAAGTTTCAGATGAAGAAGTTGATGCTAAAGTTGAACGTGAGCGTAACAACCTTGCAGAATTGACTGTTAAAGATGGTGAAGCAGCACAAGGTGATACAGTTGTTATTGACTTTGTAGTTCAGTTGATGGTGTTGAATTTGATGGTGAAAGGAGATAACTTCTCACTTGAACTTGGTTCAGGTCAATTTANNNNNTTAATTAAT

SEQ ID NO: 13384 - protein, 201 aa, Streptococcus agalactiae
  VARIANT 172, 182, 197, 198: Xaa = Any Amino Acid
MSTSFENKATNRGIITFTISQDEIKPALDQAFNKVKKDLNVPGFRKGHMPRTVFNQKFGEEALYENALNLVLPKAYEAAVAELGLDVVAQPKIDVVSMEKGQDWKLTAEVVTKPEVKLGDYKDLSVEVDVSKEVSDEEVDAKVERERNNLAELTVKDGEAAQGDTVVIDFVXSVDGVEFDGXKGDNFSLELGSGQFXXLIN

SEQ ID NO: 13385 - protein, 699 aa, Streptococcus agalactiae
TTGCATGCAGATTTAGCAACTTACGTTGTTAATAAATTACATGGTTTTGTGGCAGTAACATGCTTAACAGCAATGTCAGATAAAGGGTTTGAAGTCATTCCTATAGAGGCATCTATACTAAAGCAGCAACTAGAAAGTTTAAAAGATGTAGAGTTTGGGTCTATTAAACTAGGATTGCTTCCCAATGTAGAAACAGCACAAGTTGTTTTGGAATTTGTAAAATCAAAACAAGAATGTCCAGTAGTCTTAGACCCAGTCTTAGTTTGTAAAGAAAATCATGATTTAGAAGTTAGCCAATTACGTGAGCAGCTAATTGCGTTTTTCCCATATGCTGATGTGATTACTCCTAATTTAGTAGAGACTCAATTATTGACGGGTCTTTCAATTGAAAACTTAGATCAAATGAAAATTGCTGCTGAGAAACTTTACGATATGGGGGCTAAACATGTTGTTATCAAAGGGGGCAACCGTTTAAATGCTGAAGAGGCTACAGACCTTTACTATGATGGTGAACGTTTTGAAACCTATGTTTTTCCTGTAGTAGATGCCAATAATACAGGTGCTGGATGTACATTTGCGTCAAGTATTGCCAGCCAATTAGCTATGGGTAAAAATGTAGAAGATGCAGTCAAAATGTCTAAAGGTTTCGTCTATCAAGCTATTAAAGCATCGGATAAGTACGGAGTTGTCCAACATTTT

SEQ ID NO: 13386 - protein, 233 aa, Streptococcus agalactiae
MHADLATYVVNKLHGFVAVTCLTAMSDKGFEVIPIEASILKQQLESLKDVEFGSIKLGLLPNVETAQVVLEFVKSKQECPVVLDPVLVCKENHDLEVSQLREQLIAFFPYADVITPNLVETQLLTGLSIENLDQMKIAAEKLYDMGAKHVVIKGGNRLNAEEATDLYYDGERFETYVFPVVDANNTGAGCTFASSIASQLAMGKNVEDAVKMSKGFVYQAIKASDKYGVVQHF

SEQ ID NO: 13387 - protein, 192 aa, Streptococcus agalactiae
ATGAGGAAAGAGAAAACTAGTCAATTGGTTCAATTGGCAATTGTAACAGCTATATCTATTGTATTGGGGATGTTTATAAGTATTCCGACACCAACAGGTTTTTTGACATTACTAGATGCTGGAATATTCTTTGCTGCCTTTTACTTTGGCAAAAAAGAAGGGGCTGTGGTAGGTGCCTNNNNNTTAATTAAT

SEQ ID NO: 13388 - protein, 64 aa, Streptococcus agalactiae
  VARIANT 60, 61: Xaa = Any Amino Acid
MRKEKTSQLVQLAIVTAISIVLGMFISIPTPTGFLTLLDAGIFFAAFYFGKKEGAVVGAXXLIN

SEQ ID NO: 13389 - protein, 480 aa, Streptococcus agalactiae
TTGAAAGCGAAATATCGCAAAGAGCTAGAATCAGCAAAAGAAATTGCATTTGATGATGCAGTTGAAGGTGTAGCAATCGAATTAGCTGTTGCCAATGCAGAAATTGTTGAATTACCAGAAGAAATGGTCCATGATGAAGTACATCGTGCTATGAATGAGTTCATGGGTAATATGCAACGTCAAGGAATTTCACCAGAAATGTACTTCCAATTAACAGGTACAACTGAAGAAGACCTTCATAAGCAATACCAAGCAGATGCTGACAAACGCGTTAAAACTAACCTTGTTATTGAAGCAATTGCAGCTGCAGAAGGCTTTGAAGCAACAGATGAAGAAATCGAAAAAGAAATCACAGATCTTGCTTCAGAATATAATATGGAAGCTGACCAAGTACGCGGTCTACTTTCAGCAGATATGCTTAAACATGATATTGCAATGAAAAAAGCGGTTGACGTTATCACTAGCTCAGCTACTGTAAAA

SEQ ID NO: 13390 - protein, 160 aa, Streptococcus agalactiae
MKAKYRKELESAKEIAFDDAVEGVAIELAVANAEIVELPEEMVHDEVHRAMNEFMGNMQRQGISPEMYFQLTGTTEEDLHKQYQADADKRVKTNLVIEAIAAAEGFEATDEEIEKEITDLASEYNMEADQVRGLLSADMLKHDIAMKKAVDVITSSATVK

SEQ ID NO: 13391 - DNA, 528 bp, Streptococcus agalactiae
atgattgaagttgctcgcgctattttagagcaacgtggtcgtgataacgaaatgtacttcagcgatttggtaaatgatattcaaacctaccttggaaaatctgactcagcaatccgtgagtcattgccatttttctattcagatttgaatacagacggaagttttattccacttggcgaaaacaaatggggacttcgttcatggtatgctatcgatgaaattgacgaggaaatcatcactcttgaagaagatgaagatggcgctccaaaacgtaagaagaaacgtgtcaatgctttcatggatggtgatgaagatgctattgattacmatgatgatgatccagaagatgaagatttcacagaagaaacaccaagtttagaatatgatgaagaaaaccctgacgatgaaaaatcagaggtagaatcgtatgattctgagattaatgaaatcattcctgatgaagatttagatgaggatgtagaaatcaacgaagaagaggaagaagaggaagaagaggaagaagaggtt

SEQ ID NO: 13392 - protein, 176 aa, Streptococcus agalactiae
  VARIANT 110: Xaa = Any Amino Acid
MIEVARAILEQRGRDNEMYFSDLVNDIQTYLGKSDSAIRESLPFFYSDLNTDGSFIPLGENKWGLRSWYAIDEIDEEIITLEEDEDGAPKRKKKRVNAFMDGDEDAIDYXDDDPEDEDFTEETPSLEYDEENPDDEKSEVESYDSEINEIIPDEDLDEDVEINEEEEEEEEEEEEV

SEQ ID NO: 13393 - DNA, 1602 bp, Streptococcus agalactiae
atgacaaagtatatttttgttacaggtggtgtggtctcttctattggtaaggggattgttgcagcaagtcttgggcgcttactaaaaaaccgtgggctaaaggtgacaattcaaaaatttgatccatatattaatattgacccagggacaatgagcccttatcaacatggggaagtttatgttacagatgatggtgcagaaactgaccttgaccttggacactacgagcgttttattgatattaacttaaacaagtattcaaatgttacaacgggtaagatttatagtgaagttcttaaaaaagaacgccgtggagaataccttggtgcaactgttcaagttatcccacacgttacggatgctttgaaagaaaaaatcaaacgtgctgcgacaactacagattcagatgttattattactgaagttggcggtactgttggagatattgagagccttccgtttttagaagcacttcgtcaaatgaaggcagatgttggttctgataatgttatgtacattcatacaacgttattaccatacctaaaggctgccggcgaaatgaaaacaaaaccgactcaacattctgttaaagagttacgtggcctaggtatccaacctaatatgcttgttatccgtacagagcaaccagcaggtcaaagtattaagaataaattggcacaattttgtgatgttgcaccagaggctgttatagagtcccttgatgttgaccatatttatcaaattccacttaacatgcaagctcaaaatatggatcaaattgtttgtgatcacttgaagcttgagacacctgctgctgatatgacagaatggtcagcaatggttgataaagtaatgaaccttgagaaaaaagttaaaattgcattggttggtaaatatgttgaattacctgatgcttacctttcagttgtggaggcccttaagcactcagggtacgtcaacgatgttgctattgacctaaaatgggtaaatgctgctgaagtgacagaagataatattaaagaacttgtcggagatgcagatggtatcatcgttcctggtggatttggccaaagaggtagtgagggtaaaattgaagcaattcgctatgcacgtgaaaatgatgttccaatgcttggtgtttgtctcggaatgcagctaacttgtgtcgaatttgcgcgtaatgttttaamccttcatggagctaattcagcagagcttgaccctaaaacaccgttcccaatcattgatatcatgcgtgatcaaatcgatattgaagatatgggtggtacacttcgccttggtctatatccatgtaaattgaaagcaggttcaagagctgcggcagcttataataatcaagaagttgtccaacgtcgtcaccgtcaccgttatgaatttaatacaaaattccgtgagcaatttgaggctgctggatttgtcttctcaggggtatcaccggataatcgtttgatggaagttgttgagttaccagagaaaaaattctttgttgcagcacaataccatccagaactacaatcacgtcctaaccatgctgaagagctttacacagcttttgtaacagcagcagttgaaaatatgaaa

SEQ ID NO: 13394 - protein, 534 aa, Streptococcus agalactiae
  VARIANT 397: Xaa = Any Amino Acid
MTKYIFVTGGVVSSIGKGIVAASLGRLLKNRGLKVTIQKFDPYINIDPGTMSPYQHGEVYVTDDGAETDLDLGHYERFIDINLNKYSNVTTGKIYSEVLKKERRGEYLGATVQVIPHVTDALKEKIKRAATTTDSDVIITEVGGTVGDIESLPFLEALRQMKADVGSDNVMYIHTTLLPYLKAAGEMKTKPTQHSVKELRGLGIQPNMLVIRTEQPAGQSIKNKLAQFCDVAPEAVIESLDVDHIYQIPLNMQAQNMDQIVCDHLKLETPAADMTEWSAMVDKVMNLEKKVKIALVGKYVELPDAYLSVVEALKHSGYVNDVAIDLKWVNAAEVTEDNIKELVGDADGIIVPGGFGQRGSEGKIEAIRYARENDVPMLGVCLGMQLTCVEFARNVLXLHGANSAELDPKTPFPIIDIMRDQIDIEDMGGTLRLGLYPCKLKAGSRAAAAYNNQEVVQRRHRHRYEFNTKFREQFEAAGFVFSGVSPDNRLMEVVELPEKKFFVAAQYHPELQSRPNHAEELYTAFVTAAVENMK

SEQ ID NO: 13395 - DNA, 717 bp, Streptococcus agalactiae
atgaaaaagattcgattatcaaagtttattaaaatgattgttgttattttgtttttaattagtgtagcagctagtttttattttttccacgttgcccaagttcgagatgataaatcctttatttcaaatggtcaacgtaagcctggaaactctttatatgcttatgataaatcctttgataagctattaaagcaaaaaatagaaatgacaaaccaaaatataaagcaagttgcttggtatgttcctgctgctaagaaaactcataagacagttgttgtcgttcatggttttgcgaatagcaaagagaatatgaaggcatatggttggctgtttcataagttaggatacaatgttcttatgcctgacaacattgcacatggtgaaagtcatgggcagttgataggctatggctggaacgaccgcgagaacattatcaaatggacagaaatgatagtggataagaatccatcaagccaaattactttatttggtgtttcaatgggtggagcaacagtcatgatggctagtggtgaaaaattacctagtcaggttgttaatatcattgaagattgtggttattctagtgtttgggatgaattaaaatttcaggctaaagagatgtatggtttaccagccttcccactcttatatgaagtttcaacaatttctaaaatcagagcaggtttttcgtatggacaagcaagtagtgtcgaacaa

SEQ ID NO: 13396 - protein, 239 aa, Streptococcus agalactiae
MKKIRLSKFIKMIVVILFLISVAASFYFFHVAQVRDDKSFISNGQRKPGNSLYAYDKSFDKLLKQKIEMTNQNIKQVAWYVPAAKKTHKTVVVVHGFANSKENMKAYGWLFHKLGYNVLMPDNIAHGESHGQLIGYGWNDRENIIKWTEMIVDKNPSSQITLFGVSMGGATVMMASGEKLPSQVVNIIEDCGYSSVWDELKFQAKEMYGLPAFPLLYEVSTISKIRAGFSYGQASSVEQ

SEQ ID NO: 13397 - DNA, 675 bp, Streptococcus agalactiae
  misc_feature 666, 667, 668, 669, 670: n = A,T,C or G
atgttgccagcaagtcttgggcgcttactaaaaaaccgtgggctaaaggtgacaattcaaaaatttgatccatatattaatattgacccagggacaatgagcccttatcaacatggggaagtttatgttacagatgatggtgcagaaactgaccttgaccttggacactacgagcgttttattgatattaacttaaacaagtattcaaatgttacaacgggtaagatttatagtgaagttcttaaaaaagaacgccgtggagaataccttggtgcaactgttcaagttatcccacacgttacggatgctttgaaagaaaaaatcaaacgtgctgcgacaactacagattcagatgttattattactgaagttggcggtactgttggagatattgagagccttccgtttttagaagcacttcgtcaaatgaaggcagatgttggttctgataatgttatgtacattcatacaacgttattaccatacctaaaggctgccggcgaaatgaaaacaaaaccgactcaacattctgttaaagagttacgtggcctaggtatccaacctaatatgcttgttatccgtacagagcaaccagcaggtcaaagtattaagaataaattggcacaattttgtgatgttgcaacagaggctgttatagagtccctnnnnnttaat

SEQ ID NO: 13398 - protein, 225 aa, Streptococcus agalactiae
  VARIANT 223, 224: Xaa = Any Amino Acid
MLPASLGRLLKNRGLKVTIQKFDPYINIDPGTMSPYQHGEVYVTDDGAETDLDLGHYERFIDINLNKYSNVTTGKIYSEVLKKERRGEYLGATVQVIPHVTDALKEKIKRAATTTDSDVIITEVGGTVGDIESLPFLEALRQMKADVGSDNVMYIHTTLLPYLKAAGEMKTKPTQHSVKELRGLGIQPNMLVIRTEQPAGQSIKNKLAQFCDVATEAVIESLXXN

SEQ ID NO: 13399 - DNA, 138 bp, Streptococcus agalactiae
atgcaaaatattactgatcaggctgttattttagaagaaggggaacggattgttcaggctgtttttgccccattcttattggcagatgacgatcaggctacaggaatgcgtacaggtggttttggtagtactggaaaa

SEQ ID NO: 13400 - protein, 46 aa, Streptococcus agalactiae; identical to SEQ ID NO: 8992

SEQ ID NO: 13401 - protein, 521 aa, Streptococcus agalactiae
GTGGCTAAGAAAAAATCAGTCTTCACCTGTCAAGAGTGTGGTTACCAATCACCTAAGTATTTGGGACGTTGTCCAAATTGCTCAGCCTGGTCTTCATTTGTAGAAGAGGTTGAAGTTCAAGAAGTTAAAAATGCACGAGTTAGTTTGAACGGTGAAAAGTCCCGACCGACGAAGTTAAAAGATGTTTCCTCAATTAACTATTCTAGAACTAAGACTGATATGGATGAATTTAACCGTGTTCTAGGAGGCGGTGTTGTACCAGGAAGTTTGGTTCTGATTGGAGGAGACCCTGGGATAGGTAAATCTACTTTATTACTACAAGTATCAACTCAGCTAGCTAATAAGGTACAGTATTATATGTCTCAGGTGAGGAATCTGCAGAACAGATTAAGTTACGAAGTGAGCGTCTAGGCGATATCGATAATGAATTTACCTTTATGCCGAGACTAATATGCAAAGTATTCGGTCGGAGATTGAGAAAAAACCAGATTTTCTTATTATTGATTCTATACAAACTATTA

SEQ ID NO: 13402 - protein, 175 aa, Streptococcus agalactiae
  VARIANT 161: Xaa = Any Amino Acid
MAKKKSVFTCQECGYQSPKYLGRCPNCSAWSSFVEEVEVQEVKNARVSLNGEKSRPTKLKDVSSINYSRTKTDMDEFNRVLGGGVVPGSLVLIGGDPGIGKSTLLLQVSTQLANKGTVLYVSGEESAEQIKLRSERLGDIDNEFYLYAETNMQSIRSEIEXINQIFLLLILYKLL

SEQ ID NO: 13403 - protein, 837 aa, Streptococcus agalactiae
ATGAGTCCCGAAGTATCAAGTGTCCAAGGCTCTGTTAGCCAAGTTCGCGAAGTGACCGCTGAGTTGATGCAGTTAGCTAAAACTAATAATATTGCTACTTTTATTGTAGGTCATGTGACTAAGGAGGGAACATTAGCAGGCCCTCGAATGCTAGAACATATGGTGGATACGGTTCTTTATTTTGAAGGGGAGCGTCATCACACGTTCCGTATTTTACGGGCAGTCAAAAACCGTTTTGGTTCGACCAATGAAATAGGTATCTTTGAAATGCAGTCGGGTGGTCTAGTTGAAGTTTTGAATCCAAGTCAAGTTTTTCTTGAAGAACGTTTAGACGGTGCAACAGGATCTGCTATTGTTGTTACTATGGAAGGAACAAGGCCTATTTTAGCAGAGGTTCAAGCTTTAGTGACTCCAACTGTTTTTGGAAATGCTAAGCGCACAACCACAGGTCTTGACTTTAATCGTGTCAGTCTTATTATGGCAGTTCTAGAAAAACGTTGTGGTTTATTGCTTCAAAATCAAGATGCCTATTTAAAATCAGCGGGTGGTGTTAAATTGGATGAACCAGCAATTGATTTAGCTGTTGCTGTAGCTATTGCTTCCAGTTACAAAGAAAAACCCACAAATCCACAAGAATCATTTATTGGAGAAATTGGACTCACTGGTGAGATTCGTCGCGTGACACGTATTGAGCAACGTATTAATGAGGCTAGTAAATTGGGCTTTACTAAAATTTACGCACCAAAGAATTCTCTAGCTGGGATTGAAATACCTAAAGGCATTGATGTTATTGGTGTGACAACTGTTAGTCAGGTCTTAAAAGCAGTGTTTTCAACA

SEQ ID NO: 13404 - protein, 279 aa, Streptococcus agalactiae
MSPEVSSVQGSVSQVREVTAELMQLAKTNNIATFIVGHVTKEGTLAGPRMLEHMVDTVLYFEGERHHTFRILRAVKNRFGSTNEIGIFEMQSGGLVEVLNPSQVFLEERLDGATGSAIVVTMEGTRPILAEVQALVTPTVFGNAKRTTTGLDFNRVSLIMAVLEKRCGLLLQNQDAYLKSAGGVKLDEPAIDLAVAVAIASSYKEKPTNPQESFIGEIGLTGEIRRVTRIEQRINEASKLGFTKIYAPKNSLAGIEIPKGIDVIGVTTVSQVLKAVFST

SEQ ID NO: 13405 - protein, 495 aa, Streptococcus agalactiae
ATGACCACTTATTTTGATAACTTTTTAAAAACCAATCAAGCCTATGCTGACTTACATGGAACAGCTCATCTACCTATCAAGCCAAAGACAAAGGTTGCTATTGTAACCTGTATGGATTCTCGTTTACACGTTGCTCAAGCTCTAGGGCTAGCTTTAGGAGATGCTCATATTTTACGTAATGCTGGTGGACGAGTTACAGCCGATGTTCTACGTTCTTTAGTTATTTCGCAACAACAATTAGGAACACGAGAAATCGTTGTTCTACACCATACAGATTGTGGAGCACAGACGTTTACTAACGAAGCTTTTGCTGCTCAATTACAGAGAGATTTGGGTGTTGATATGCATGGACATGATTTTCTTCCTTTTAATGATATTGAAGAAAGCGTTCGTGAAGATGTGGCAAAATTACATGCTTCTCCATTAATCCCAAATGATGTTGTTATTTCTGGTGCTATTTATGATGTAGATACTGGTCGTATGGTGGAAGTTAAA

SEQ ID NO: 13406 - protein, 165 aa, Streptococcus agalactiae
MTTYFDNFLKTNQAYADLHGTAHLPIKPKTKVAIVTCMDSRLHVAQALGLALGDAHILRNAGGRVTADVLRSLVISQQQLGTREIVVLHHTDCGAQTFTNEAFAAQLQRDLGVDMHGHDFLPFNDIEESVREDVAKLHASPLIPNDVVISGAIYDVDTGRMVEVK

SEQ ID NO: 13407 - protein, 1206 aa, Streptococcus agalactiae
ATGTATGGGGGAACATGTATCAACATTGGATGTATTCCGACAAAAACGCTTTTAGTATCAGCTAGCAAAAATCACGATTTTCAAGAAGCTATGACTACTAGAAATGAAGTTACAAGTCGTTTACGTGCTAAAAATTTTGCTATGTTGGATAATAAAGACACTGTGGATGTTTATAATGCTAAAGCTCGCTTTATATCAAATAAAGTGGTCGAATTAACAGGAGGAGCTGACAAACAAGAACTTACAGCTGATGTTATTATTATCAATACTGGTGCTAAGTCAGTACAATTACCAATTCCAGGATTAGCTGATTCTCAACATGTTTATGATTCAACGGCAATCCAAGAATTGGCTCATCTTCCTAAACGGTTAGGTATCATTGGAGGCGGTAATATTGGGCTTGAATTTGCGACTTTATATTCCGAATTAGGGAGCAAAGTGACAGTTATTGATAGTCAATCTCGTATCTTTGCGCGTGAGGAAGAGGAATTATCAGAGATGGCTCAAGATTATTTAGAAGAGATGGGGATATCTTTTAAATTATCAGCCGATATCAAATCTGTGCAAAATGAAGATGAAAACGTTGTTATTAGCTTTGAGGATGAAAAATTAAGCTTTGATGCAGTATTATATGCAACAGGACGTAAGCCAAATACAGAAGGTTTAGCACTTGAAAATACAGATATTAAATTGACAGAACGTGGAGCTATTGCTGTTGATGAATATTGCCAAACTTCTGTTGAGAATATTTTTGCAGTTGGTGATGTTAATGGCGGCCCTCAATTCACATATATTTCTTTAGATGACTCACGTATTGTCTTAAATTATTTGAATGGTGATAAGGATTATTCTCTAAAAAATCGAGGAGCAGTACCGACTTCAACCTTTACAAATCCTCCTTTAGCAACGGTAGGTCTAGATGAAAAGACCGCTAAGGAAAAAGGATATCAAGTTAAATCTAATAGCCTTCTTGTTTCTGCCATGCCACGTGCACATGTTAATAATGACCTTAGAGGTATTTTTAAAGTTGTGGTAGATACTGAGACAAATCTTATTTTGGGAGCTCGCTTATTTGGTGCAGAATCCCATGAATTAATTAATATCATCACAATGGCAATGGATAATAAAATCCCATATACTTATTTCCAAAAACAAATTTTCACTCACCCAACAATGGTAGAGAATTTTAATGATTTGTTTAACTTT

SEQ ID NO: 13408 - protein, 402 aa, Streptococcus agalactiae
MYGGTCINIGCIPTKTLLVSASKNHDFQEAMTTRNEVTSRLRAKNFAMLDNKDTVDVYNAKARFISNKVVELTGGADKQELTADVIIINTGAKSVQLPIPGLADSQHVYDSTAIQELAHLPKRLGIIGGGNIGLEFATLYSELGSKVTVIDSQSRIFAREEEELSEMAQDYLEEMGISFKLSADIKSVQNEDENVVISFEDEKLSFDAVLYATGRKPNTEGLALENTDIKLTERGAIAVDEYCQTSVENIFAVGDVNGGPQFTYISLDDSRIVLNYLNGDKDYSLKNRGAVPTSTFTNPPLATVGLDEKTAKEKGYQVKSNSLLVSAMPRAHVNNDLRGIFKVVVDTETNLILGARLFGAESHELINIITMAMDNKIPYTYFQKQIFTHPTMVENFNDLFNF

SEQ ID NO: 13409 - protein, 669 aa, Streptococcus agalactiae
GTGAAGTTCAAAAAAAGGCGAAAGAGCACACTCCCTCCTATTCCAAAAGCGATTAAAGAAGGGCGACGGTACGAGGATTTTATAGAACACATGAACCAATCAGAGCTGAACTCCTGGCTTGAAATGGACACGGTTATTGGACGGATTGGTGGAAAGGTCCTTCTCACCTTCAATGTCGCCTTCTGTAACTTCATCTTTGCCAAACTGATGGATTCTAAGACAGCTATCGAAACTGCTAAACACATACAGGTCATTAAGAGGACACTCTATGATAACAAGAGAGACTTCTTCGAACTCTTTCCTGTTATCCTAACGGATAATGGTGGGGAATTCGCTAGAGTGGATGATATTGAGATAGATGTTTGTGGACAGTCTCAACTCTTCTTTTGTGACCCTAATCGGTCTGACCAGAAAGCAAGAATCGAGAAGAATCATACCCTCGTGAGAGACATACTGCCTAAGGGGACTTCCTTCGACAACTTGACTCAAGAGGACATTAATCTGGCACTATCTCATATCAACAGCGTTAAGAGACAGGCTCTAAATGGTAAAACGGCTTATGAGCTATTCTCTTTTACTTACGGAAAAGACATCGCAAGTATACTCGGTATTGAGGAAATTACTGCGGAAGACGTCTGCCAATCTCCCAAACTATTAAAAGACAAAATC

SEQ ID NO: 13410 - protein, 223 aa, Streptococcus agalactiae
MKFKKRRKSTLPPIPKAIKEGRRYEDFIEHMNQSELNSWLEMDTVIGRIGGKVLLTFNVAFCNFIFAKLMDSKTAIETAKHIQVIKRTLYDNKRDFFELFPVILTDNGGEFARVDDIEIDVCGQSQLFFCDPNRSDQKARIEKNHTLVRDILPKGTSFDNLTQEDINLALSHINSVKRQALNGKTAYELFSFTYGKDIASILGIEEITAEDVCQSPKLLKDKI

SEQ ID NO: 13411 - protein, 405 aa, Streptococcus agalactiae
ATGACAAAACACAAACACCTAACTCTCTCAGACCGTAATGACATCCAATCTGGTTTGGATAGAGGAGAAACCTTTAAAGCCATCGGGCTTAATCTACTGAAACACCCTACTACTATCGCAAAAGAAGTCAAACGAAATAAGCAACTAAGAGAATCAACCAAAGACTGCCTAGACTGTCCGCTACTAAGAAAAGCTCCCTATGTTTGTAATGGGTGTCCAAAGAAGAGGATCAACTGTGGTTACAAGAAGACCTTCTATCTTGCTAAGCAAGCTCAAAGAAACTATGAAAAACTTTTAGTTGAATCTAGAGAAGGAATCCCTTTGAACAAAGAGACCTTCTGGGAAATAGATAGAGTGCTTTCTAATGGGGTCAAGAAAGGGCCACGTATCTNNNNNTTAATTAAT

SEQ ID NO: 13412 - protein, 135 aa, Streptococcus agalactiae
  VARIANT 131, 132: Xaa = Any Amino Acid
MTKHKHLTLSDRNDIQSGLDRGETFKAIGLNLLKHPTTIAKEVKRNKQLRESTKDCLDCPLLRKAPYVCNGCPKKRINCGYKKTFYLAKQAQRNYEKLLVESREGIPLNKETFWEIDRVLSNGVKKGPRIXXLIN

SEQ ID NO: 13413 - protein, 1434 aa, Streptococcus agalactiae
GTGCGTTATGCACCAAGTCCAACAGGATTGTTACACATCGGAAATGCGCGTACTGCGCTCTTTAACTACCTTTATGCTCGCCATCATGGTGGGGATTTTGTTATTCGTATTGAAGATACTGACCGAAAACGTCACGTCGAAGATGGTGAACGCTCTCAATTGGAGAACTTACGTTGGCTAGGTATGGACTGGGATGAAAGCCCTGAAACACATGAAAATTATCGTCAATCAGAACGCCTTGAGCTCTACCAACGTTATATTGATCAGTTGTTAGCAGAAGGTAAAGCCTACAAGTCCTATGTGACTGAGGAAGAATTAGCAGCAGAGCGTGAACGCCAAGAATTGGCAGGCGAAACACCTCGCTATATCAACGAATTTATCGGAATGTCAGAAACTGAAAAAGAAGCTTACATTGCAGAACGTGAAGCAGCAGGCATCATTCCGACAGTACGCCTTGCTGTTAATGAATCTGGGATTTATAAGTGGACTGATATGGTAAAAGGTGACATTGAGTTTGAAGGCTCTAATATCGGCGGAGACTGGGTTATTCAGAAGAAAGATGGTTATCCAACTTACAATTTCGCAGTAGTCATTGATGATCATGACATGCAAATTTCGCATGTTATTCGTGGCGATGACCATATTGCAAATACGCCAAAACAATTAATGGTTTATGAAGCACTCGGTTGGGAAGCGCCACAATTTGGTCACATGACATTGATTATAAACTCAGAGACTGGTAAGAAATTATCAAAACGCGACACAAATACTCTTCAATTTATCGAAGACTATCGTAAAAAAGGTTATATGTCGGAAGCTGTCTTTAATTTCATTGCCCTTCTTGGTTGGAATCCTGGTGGAGAAGAAGAAATCTTCTCACGCGAGCAATTAATTAATCTATTTGATGAAAATCGTCTTAGCAAATCACCAGCAGCATTCGATCAGAAGAAGATGGATTGGATGAGTAATGATTACCTAAAAAATGCTGATTTTGAGAGTGTTTTTGCACTTTGCAAACCATTCTTAGAAGAAGCTGGTCGACTTACAGACAAAGCTGAAAAATTAGTTGAGCTTTATAAACCTCAATTAAAATCGGCTGATGAGATTGTACCATTAACAGACCTTTTCTTTGCAGATTTTCCAGAATTAACAGAAGCCGAAAAAGAAGTAATGGCAGCAGAAACAGTCCCAACAGTCTTATCTGCTTTTAAGGAAAAGTTAGTATCGCTTTCTGACGAAGAATTCACTAGAGATACTATTTTCCCTCAAATTAAGGCTGTTCAAAAAGAAACAGGCATCAAAGGTAAGAACCTATTTATGCCTATTCGTATTGCGGTTTCTGGTGAAATGCATGGACCAGAGTTACCAGATACTATTTATTTATTAGGTAAAGAAAAATCAGTTCAACATATCGATAATATGTTAGCAAAATTA

SEQ ID NO: 13414 - protein, 478 aa, Streptococcus agalactiae
MRYAPSPTGLLHIGNARTALFNYLYARHHGGDFVIRIEDTDRKRHVEDGERSQLENLRWLGMDWDESPETHENYRQSERLELYQRYIDQLLAEGKAYKSYVTEEELAAERERQELAGETPRYINEFIGMSETEKEAYIAEREAAGIIPTVRLAVNESGIYKWTDMVKGDIEFEGSNIGGDWVIQKKDGYPTYNFAVVIDDHDMQISHVIRGDDHIANTPKQLMVYEALGWEAPQFGHMTLIINSETGKKLSKRDTNTLQFIEDYRKKGYMSEAVFNFIALLGWNPGGEEEIFSREQLINLFDENRLSKSPAAFDQKKMDWMSNDYLKNADFESVFALCKPFLEEAGRLTDKAEKLVELYKPQLKSADEIVPLTDLFFADFPELTEAEKEVMAAETVPTVLSAFKEKLVSLSDEEFTRDTIFPQIKAVQKETGIKGKNLFMPIRIAVSGEMHGPELPDTIYLLGKEKSVQHIDNMLAKL

SEQ ID NO: 13415 - protein, 966 aa, Streptococcus agalactiae
ATGAAATTTGGAAAAAAACTTGGCTTTCTAGCCTTATTGATGTCTATTGTCCTCATTCTCGGTGCATGTGGTAAAACTGGACTTGGAAATTCTTCTGGGAATTCTACAAAAAATGTAACCAAAAAATCTGCTAAAGATTTGAAACTAGGTGTATCTATTTCAACAACTAACAACCCCTACTTTGTTGCGATGAAAGACGGTATTGACAAATATGCGAGCAATAAAAAAATAAGCATTAAGGTAGCTGATGCTCAAGATGACGCCGCACGTCAAGCAGATGATGTTCAAAACTTTATTAGTCAAAACGTAGATGCTATTTTGATTAATCCCGTTGACTCAAAAGCTATTGTAACAGCTATTAAGTCTGCAAACAACGCTAATATTCCTGTTATTCTAATGGACCGTGGTAGTGAGGGAGGCAAAGTATTAACTACTGTCGCTTCAGATAACGTTGCTGCTGGTAAGATGGCTGCGGATTATGCCGTTAAAAAACTAGGCAAAAAAGCAAAAGCCTTTGAATTATCTGGAGTACCAGGTGCCTCTGCTACTGTAGACCGTGGTAAAGGATTTCATTCAGTTGCAAAATCTAAACTTGACATTCTTTCAAGCCAATCTGCCAATTTTGACCGCGCCAAAGCTTTGAATACTACACAAAATATGATTCAAGGACATAAAGATGTCCAAATTATTTTCGCACAAAATGATGAAATGGCACTTGGGGCTGCACAGGCTGTCAAATCTGCTGGCTTGCAAAATGTTCTTATCGTAGGAATTGATGGTCAGCCAGATGCCCATGATGCCATTAAAAAAGGTGATATTTCAGCCACTATTGCACAACAACCAGCTAAGATGGGAGAAATAGCTATTCAAGCAGCAATTGATCATTATAAAGGCAAAAAAGTAGAGAAAGAAACGATTTCTCCAATTTACCTTGTTACCAAAGACAATGTTGAAAAATACAATTGG

SEQ ID NO: 13416 - protein, 322 aa, Streptococcus agalactiae
MKFGKKLGFLALLMSIVLILGACGKTGLGNSSGNSTKNVTKKSAKDLKLGVSISTTNNPYFVAMKDGIDKYASNKKISIKVADAQDDAARQADDVQNFISQNVDAILINPVDSKAIVTAIKSANNANIPVILMDRGSEGGKVLTTVASDNVAAGKMAADYAVKKLGKKAKAFELSGVPGASATVDRGKGFHSVAKSKLDILSSQSANFDRAKALNTTQNMIQGHKDVQIIFAQNDEMALGAAQAVKSAGLQNVLIVGIDGQPDAHDAIKKGDISATIAQQPAKMGEIAIQAAIDHYKGKKVEKETISPIYLVTKDNVEKYNW

SEQ ID NO: 13417 - protein, 927 aa, Streptococcus agalactiae
ATGAAATATATATCAGAGTTAACAACCCTGATTGCATTAGCTGGTTTAATGGTTATTATCACACTCATTAATCCTAATTTCCTCACAACCAATAATCTACTCAATTTATTATTACAAGTAACTGCAAATGGTTTTATCGCTTTCGGGATGACCTTCGTTATTTTGACTGGCGGTATTGATTTATCAGTCGGGTCCATATTAGCCCTATCTAGTGCATTAACAGCTGGATTAATCGGCCACGGAGTACCCGTTGGTATTGCTATCGTTTTATCTGTTGCCTTAGGTGGCATCTTGGGAATGCTAAACGGACTCTTCATTTCTTACGGAAAATTAACACCATTTATCGTTACACTGGCAACAATGACTATCTTTAGAGGAGCAACGCTAGTTTATTCAAACGGCAACCCAATTACCGCTGGATTATCCGATAGTTTTCTATTCCAATTTTTGGGACAAGGCTATATTGTTGGTATCCCATTCCCAGTCATTCTCATGTTTCTTACTTTTATTATTTTGTATATTTTGTTACATAAAACAGCCTTCGGGAAATCTGTTTACGCTTTAGGAGGTAATGAAAAAGCAGCGTATATCTCGGGTATTAAGTTAAACAAAGTTAAAATTATCATCTACACTATCTCAGGTATCATGGCTTCCATTTCTGGGTTAATTATCACATCACGCCTTAGCTCAGCACAACCAACAGCTGGAGCAAGTTATGAGATGGATGCTATTGCCGCCGTTGTCTTAGGTGGAACGTCTTTATCTGGTGGGAAAGGACGTATCATTGGAACATTGATTGGTGCTCTCATTATTGGTGTCCTGAACAATGGATTAAACATCATTGGTGTCTCTGCATTTTGGCAACAAGTTGTGAAAGGTATCGTTATTTTAATGGCTGTTTTACTTGATCGCTTTAAAGTAGCAAAA

SEQ ID NO: 13418 - protein, 309 aa, Streptococcus agalactiae
MKYISELTTLIALAGLMVIITLINPNFLTTNNLLNLLLQVTANGFIAFGMTFVILTGGIDLSVGSILALSSALTAGLIGHGVPVGIAIVLSVALGGILGMLNGLFISYGKLTPFIVTLATMTIFRGATLVYSNGNPITAGLSDSFLFQFLGQGYIVGIPFPVILMFLTFIILYILLHKTAFGKSVYALGGNEKAAYISGIKLNKVKIIIYTISGIMASISGLIITSRLSSAQPTAGASYEMDAIAAVVLGGTSLSGGKGRIIGTLIGALIIGVLNNGLNIIGVSAFWQQVVKGIVILMAVLLDRFKVAK

SEQ ID NO: 13419 - protein, 1476 aa, Streptococcus agalactiae
ATGAAAATTGACATGAGGAATATCTCCAAATCCTTCGGTACTAATAAAGTTCTAGAGAAGATTGATTTGGAATTACAATCTGGTCAAATACACGCACTTATGGGTGAAAATGGTGCGGGTAAATCAACCTTAATGAACATTCTAACAGGACTTTTTCCAGCAAGTACAGGAACTATTTATATTGATGGCGAGGAACGAACTTTTTCAAACCCTCAAGAAGCAGAGGAATTTGGTATTAGTTTTATTCACCAAGAGATGAATACTTGGCCGGAAATGACTGTCTTGGAAAATCTCTTTCTTGGACGTGAAATCAAGACAACTTTTGGCTTACTCAATCAAAAATTAATGAGACAAAAAGCACTTGAAGCTTTTAAAAGATTAGGTGTGACTATTCCCCTAGACATCCCGATTGGTAACTTGTCTGTTGGACAACAACAAATGATTGAAATCGCCAAAAGTCTCCTAAACCAACTCTCTATTTTGGTAATGGATGAACCGACTGCTGCTTTAACAGATCGTGAAACTGAAAATCTTTTCCGAGTTATCCGAGGTTTAAAACAAGAAGGAGTGGGCGTTGTCTATATCTCCCATCGAATGGAGGAAATTTTTAAAATCACTGACTTCGTAACCGTCATGAGAGATGGTGTCATTGTAGATACAAAAGAAACATCACTCACAAATTCTGACGAATTGGTTAAAAAAATGGTTGGCCGAAAATTGGAAGATTACTATCCTGAAAAACATTCTGAAATTGGGCCTGTTGCTTTTGAAGTTAGTAACCTCTGTGGAGATAATTTCGAGGACGTTTCCTTTTATGTCCGTAAAGGCGAGATTCTTGGATTTTCTGGATTAATGGGAGCTGGGCGTACTGAAGTTATGCGAACTATCTTTGGAATTGATAAAAAGAAGTCTGGTAAGGTGAAAATTGATAACCAAGAAATCACTATTACTAGCCCAAGCCAAGCTATCAAGCAGGGCATTGGTTTTTTGACCGAAAATAGAAAAGATGAAGGTCTCATCCTAGACTTCAATATCAAGGACAATATGACTCTCCCTAGCACTAAAGATTTTAGCAAACATGGTTTCTTTGATGAAAAAACAAGCACAACATTTGTGCAACAATTGATTAATCGCCTCTACATTAAATCAGGGAGACCAGATTTAGAGGTTGGAAATCTTTCTGGAGGTAACCAACAAAAGGTCGTTCTCGCTAAATGGATTGGTATTGCTCCTAAAGTCTTAATTCTTGATGAGCCAACACGTGGTGTTGATGTCGGAGCTAAACGAGAGATTTACCAATTAATGAATGAACTAGCAGACAGAGGTGTTCCAATTGTCATGGTATCATCAGACTTACCTGAAATTCTAGGTGTTAGTGACCGCATCATGGTAATGCACGAAGGTCGAATCAGTGGAGAACTCAGTCGAAAAGAAGCTGACCAAGAAAAAGTTATGCAGCTAGCCACAGGAGGTAAG

SEQ ID NO: 13420 - protein, 492 aa, Streptococcus agalactiae
MKIDMRNISKSFGTNKVLEKIDLELQSGQIHALMGENGAGKSTLMNILTGLFPASTGTIYIDGEERTFSNPQEAEEFGISFIHQEMNTWPEMTVLENLFLGREIKTTFGLLNQKLMRQKALEAFKRLGVTIPLDIPIGNLSVGQQQMIEIAKSLLNQLSILVMDEPTAALTDRETENLFRVIRGLKQEGVGVVYISHRMEEIFKITDFVTVMRDGVIVDTKETSLTNSDELVKKMVGRKLEDYYPEKHSEIGPVAFEVSNLCGDNFEDVSFYVRKGEILGFSGLMGAGRTEVMRTIFGIDKKKSGKVKIDNQEITITSPSQAIKQGIGFLTENRKDEGLILDFNIKDNMTLPSTKDFSKHGFFDEKTSTTFVQQLINRLYIKSGRPDLEVGNLSGGNQQKVVLAKWIGIAPKVLILDEPTRGVDVGAKREIYQLMNELADRGVPIVMVSSDLPEILGVSDRIMVMHEGRISGELSRKEADQEKVMQLATGGK

SEQ ID NO: 13421 - protein, 396 aa, Streptococcus agalactiae
ATGAAAAAGACTGGTATATTAAATAGTCATCTCGCTAAATTAGCAGATGACCTTGGGCATACTGATCAAGTTTGTATTGGAGATCTGGGTCTACCTGTTCCAAATGGCATTCCAAAGATTGATTTGTCTTTGACCTCTGGAATACCTAGTTTCCAAGAGGTACTTGATATCTATTTAGAGAATATCTTAGTTGAAAAAGTCATTTTAGCAGAAGAAATCAAGGAAGCAAATTCGGATCAATTATCAAGGTTATTAGCTAAACTTGATAACTCTGTTAACATAGAGTACGTCAGTCACAATCATTTAAAACAAATGACCCAAGATGTCAAAGCAGTTATTCGTACAGGTGAAAATACACCGTATTCAAATATTATTCTACAATCTGGTGTTATCATC

SEQ ID NO: 13422 - protein, 132 aa, Streptococcus agalactiae
MKKTGILNSHLAKLADDLGHTDQVCIGDLGLPVPNGIPKIDLSLTSGIPSFQEVLDIYLENILVEKVILAEEIKEANSDQLSRLLAKLDNSVNIEYVSHNHLKQMTQDVKAVIRTGENTPYSNIILQSGVII

SEQ ID NO: 13423 - protein, 909 aa, Streptococcus agalactiae
ATGAGTAACATTGTCATTATCGGTAGTATTTCCATGGACTTAGTTATGGAAACCAATCGTATCGCCAAAGAGGGAGAAACCGTATTTGGCCAACGTTTTTCAATGGTTCCAGGAGGTAAAGGTGCTAATCAGGCTGTCGCTATTGGGCGTCTTAGCCAAGATCGAGATAATATTACTATTCTTGGTGCCATTGGCGAGGATTCTTTTGGTCCCATTCTTTTGGATAATTTAAACAAAAACCATGTTACTACGGATTTTGTGGGAACGATACCATCTTCTTCAGGTGTTGCCCAAATCACTCTTTATAATAATGATAATCGAATCATTTACTGTCCTGGAGCCAACGGAAAAGTTGATACTAAAAAGTGGTCTCAGGAGTGGTCAATAATTAAAGAAGCTGATTTAGTTGTATTACAAAATGAAATTCCTCATCAAGCAAATATGAAAATTGCTAATTTTTGTAAAGAACATAGTATTAAATTACTCTATAATCCTGCACCATCTAGAAAGACTGATATTGAGATGCTCGATAAGGTCGATTATTTCACACCAAATGAACACGAATGTCAAGAGCTGTTCCCAAACCAAAAACTAGAGGATATATTAGCCACATATCCTGAAAAACTAATTGTAACACTCGGCACAAAAGGAGCCATCTACTCTGATGGAAAAGAAAGCCATTTAATTCCTGCCTTAGAAACTAAAGCTGTTGATACAACTGGTGCAGGTGATACTTTTAACGGTGCATTCGGTTATGCTATCTCGAAAAAATTTAAGATTGCTAATGCCTTACGTTTTGCAACTCTAGCTGCTCACTTATCCGTGCAAAAATTTGGTGCACAGGGTGGCATGCCTACAATTAAAGAAATGGAGGACAACCAACATTATGAAAAAGACTGGTATATTAAA

SEQ ID NO: 13424 - protein, 303 aa, Streptococcus agalactiae
MSNIVIIGSISMDLVMETNRIAKEGETVFGQRFSMVPGGKGANQAVAIGRLSQDRDNITILGAIGEDSFGPILLDNLNKNHVTTDFVGTIPSSSGVAQITLYNNDNRIIYCPGANGKVDTKKWSQEWSIIKEADLVVLQNEIPHQANMKIANFCKEHSIKLLYNPAPSRKTDIEMLDKVDYFTPNEHECQELFPNQKLEDILATYPEKLIVTLGTKGAIYSDGKESHLIPALETKAVDTTGAGDTFNGAFGYAISKKFKIANALRFATLAAHLSVQKFGAQGGMPTIKEMEDNQHYEKDWYIK

SEQ ID NO: 13425 - protein, 984 aa, Streptococcus agalactiae; identical to SEQ ID NO: 4573

SEQ ID NO: 13426 - protein, 328 aa, Streptococcus agalactiae; identical to SEQ ID NO: 4574

SEQ ID NO: 13427 - protein, 96 aa, Streptococcus agalactiae; identical to SEQ ID NO: 4575

SEQ ID NO: 13428 - protein, 32 aa, Streptococcus agalactiae; identical to SEQ ID NO: 4576

SEQ ID NO: 13429 - protein, 1086 aa, Streptococcus agalactiae
ATGTCACATGCTTGGAAAGAATTAACCTTTTATAAGAAAAAATACCTCCTGATTGAATTGCTAATCATTGTTATGATGTTCATGGTAGTTTTTTTATCAGGTTTAGCAAACGGTTTAGGTAGAGCTGTTAGTGCTGCTATTGAAAATAACCCAGCTCAAACCTATATTTTGAATGAAGGTGCTGAACAAGTGATTACATCATCTGTATTGACAACTAAAGATCAGACAGATTTAAACAGTTTGAATTTAAAAGATAGTACCACTTTAAATATTCAACGTTCGAGTTTAACTCGACAAGGACATGAAAAGAAAATTGATATTTCTTATTTTGCTATTGATAAAGATTCTTTTATGGCACCTACACTTTCTGAGGGAAAACAACTGACAAGTTACAAAAAAGCTATTATTTTAAATGATAGTTTAAAAGCTGAAGGGATAAAGTTAGGTGATAAAGTGATTGATAAGTCATCATCTATATCACTAACAGTCGTTGGATTTGTCCATAATAGTATGTATGGTCACGGACCTGTGGCATTTATTGATAAAGACATTTATACCGAAATTAATAAAAAGATTAATCCTCAATACCAGTTCTTACCTCAGGCATTAGTTATGAAAAATGATAAAAGTATATCTCATTTACCAACTCAATTAGAAGCTGTTAGTAAAAAAGATGTCATTCAACATATTCCTGGTTATAGTGCTGAACAATCCACTTTGAATATGATTTTATGGGTCCTTGTCGTAGCTTCAGCTGGTATTTTAGGTGTCTTTTTCTACATCATCACACTTCAAAAACGTCATGAATTTAGCGTCATGAAAGCTATTGGGACAAAAATGTCAGAGATTGCCCTATTTCAATTGAGTCAAGTCATCATATTGGCACTGTTTGGTATCATTGTTGGAGATCGATTGGCGATTGCTCTCTCTTATGTATTACCAGCTCAAATGCCATTTGTTATTAATTGGCAAAATATTATTCTAGTATCGTTTGTATTTTTAGTCATTGCAATGATTAGTAGTGCTTTGTCAATTGTAAAAGTTGCTAAAATCGACCCAGTCGAAGTTATTAATGGGGGAGGAGAA

SEQ ID NO: 13430 - protein, 362 aa, Streptococcus agalactiae
MSHAWKELTFYKKKYLLIELLIIVMMFMVVFLSGLANGLGRAVSAAIENNPAQTYILNEGAEQVITSSVLTTKDQTDLNSLNLKDSTTLNIQRSSLTRQGHEKKIDISYFAIDKDSFMAPTLSEGKQLTSYKKAIILNDSLKAEGIKLGDKVIDKSSSISLTVVGFVHNSMYGHGPVAFIDKDIYTEINKKINPQYQFLPQALVMKNDKSISHLPTQLEAVSKKDVIQHIPGYSAEQSTLNMILWVLVVASAGILGVFFYIITLQKRHEFSVMKAIGTKMSEIALFQLSQVIILALFGIIVGDRLAIALSYVLPAQMPFVINWQNIILVSFVFLVIAMISSALSIVKVAKIDPVEVINGGGE

SEQ ID NO: 13431 - protein, 684 aa, Streptococcus agalactiae
ATGTCAGCAATCTTAGAATTAAAACACATCTCAAAACACTATCCAGATGGAGATGAGCTTTTATCAATATTAGATAATTTAGATTTATCAGTTTCTGCAGGTGAGTTTGTAGCTATACTGGGACCCTCAGGTTCAGGTAAAAGCACACTTTTATCCATTGCAGGGTTACTTCTTGGTGCAGATCAAGGTAGTTTGTATGTCAATCATGAGAACGTTACGGATTTGTCTCAAAGACAAAGAACACAATTGCGCCGTGAAGCACTAGGTTTTATATTTCAAAGTCATCAACTGCTTCCTTATTTAACAATCCAAGAACAGTTGCAACAAGAGGCTCGATTTGCAAAACACTATGATAAGAAAACAAGCTTGGAAGAAATTAATAAATTATTATCAGATTTAGGAATAGAGCAGTGTGCACATAAATACCCTAACCAATTATCGGGAGGACAAAAGCAACGCGCAGCAATTGCTAGAGCATTTATTAATCATCCTAAGGTTATCTTGGCAGATGAGCCAACAGCTAGCCTTGATGAAGAACGTGGGCGTCAAGTTACAGAACTTATTCGTCAGGAAGTTAAATCACATAATACTGCAGCTATTATGGTGACACACGATGAGCGCGTTCTAGATTTAGTAGATACCGTTTATCGTTTAAAGGACGGGAAATTAGTTAAAGAAAACTTC

SEQ ID NO: 13432 - protein, 228 aa, Streptococcus agalactiae; identical to SEQ ID NO: 4580

SEQ ID NO: 13433 - protein, 669 aa, Streptococcus agalactiae
ATGATTAAAATATTAGTTGTAGAGGATAACATTGTTCAACAAAAAATCATTACCACAAAATTAACACAAGAGGGCTACCAATTTATCACTGCTTCAAATGGACAAGAAGCTCTAAATTGTCTAGATACAGAAGAAGTACAATTGATTATAACTGATATCATGATGCCCATGATGGATGGTTATCAATTAATTCAAGAACTCAGGTCAGCTGCTTACAATGTCCCAATCATTGTTATGACAGCAAAATCACAAATGGAAGATATGACAAAAGGGTTTGGCCTTGGTGCAGATGATTATATGGTTAAGCCTGTGCAGTTACAAGAATTAGCTTTACGTATTAAGGCACTCTTGAGGAGAGCTAATATTGTAGCTCAACATCAGCTAATTATTGGGAATACTTGTCTTAATGAAGATGAATTAAGCTTGAAATATTTTGAGCAAGAAATTGTATTTCCTCAGAAAGAATTTAGGGTTCTTTTCCACTTACTTAGCTATCCTAATAGGATTTTCACACGTTTAGAACTATTGGATAGTATTTGGGGAATGGATACTGATTTAGATGAGCGGGTGGTAGATGCTTGCATCAATAAAATTAGACGAAAAGTAGAACACTTACCAGATTTTAAGATTGAAACGGTGAGAGGGGTAGGGTATCGTGCAAAAAATGAC

SEQ ID NO: 13434 - protein, 223 aa, Streptococcus agalactiae; identical to SEQ ID NO: 4582

SEQ ID NO: 13435 - protein, 1068 aa, Streptococcus agalactiae
ATGACTAAGCTAAGGCGATTTCGGTTTCCGTTAAGATTTTATTTCACATTAATGTTTGTGTTAACGATGCTTTTCTCAGTCCTAGCTTCTCTTTTACTAGTTGCAGCAATAGTTTTTACTTTTTTTCAAGGAGTCTTAACTACTCATGTATTACAAGTTAGCGCTCTCGCTGTTGTTTTTTTAAGCCTTGTGATAGCTAGTATTAGTATGTGGTACGGTTCTTATCATTTAACAAAACCAATTTTAGATATTAGCCATATTGTGTCCAATGTTGCAGGCGGTGACTTTGAAGGGCATATTTATCGAAACAGTAATCGTCGTAAATCCTATGAGTATTATAATGAATTGGATGAGCTATCTGAAAGTATTAATCAGATGATTGTTTCTTTATCTCATATGGATCATATGCGAAAAGACTTTATCACTAATGTTTCTCATGAGCTAAAGACTCCGATTGCTGCAGTAGCTAATATTGTAGAACTATTACAAGATCCAGAATTAGATGAAGAAACACAAAGTGAGTTATTAGGTCTTGTTAAAACAGAGAGCCTAAGGTTAACAAGATTATGTGATACGATGTTGCAAATGTCGCGCGTGGATAATCAGGAGACTATTGGGGAGCTATCCTCTGTTCGTGTAGATGAACAAATTCGTCAAGCAATGATTAGTTTAACAGAACGTTGGCAAGCTAAAAGGATAAATTTTCAACTGGATTCAAAACCATATACTGTTTACTCAAACTCTGACTTGCTGATGCAAGTTTGGATAAACCTTTTAGATAATGCAATAAAATATTCCGAGGATATTGTAGACTTAAGTGTACGAATGGAAGAAACTAATAATCATTATCTGAGAGTTATTATTTCTGATAAAGGTAGGGGAATTTCTCAATATGATGTTCAGCATATATTTGATAAATTTTACCAAGCGGATCAGTCGCATAATCAACAAGGAAATGGATTAGGACTAGCAATAGTTAAACGTATAATTGTTCTTTGTAAGGGACATATTAGTGTCTCCAGTCAGTTGGAAATTGGAACAGAATTTTGTGTAGAACTACCTTTATCA

SEQ ID NO: 13436 - protein, 356 aa, Streptococcus agalactiae
MTKLRRFRFPLRFYFTLMFVLTMLFSVLASLLLVAAIVFTFFQGVLTTHVLQVSALAVVFLSLVIASISMWYGSYHLTKPILDISHIVSNVAGGDFEGHIYRNSNRRKSYEYYNELDELSESINQMIVSLSHMDHMRKDFITNVSHELKTPIAAVANIVELLQDPELDEETQSELLGLVKTESLRLTRLCDTMLQMSRVDNQETIGELSSVRVDEQIRQAMISLTERWQAKRINFQLDSKPYTVYSNSDLLMQVWINLLDNAIKYSEDIVDLSVRMEETNNHYLRVIISDKGRGISQYDVQHIFDKFYQADQSHNQQGNGLGLAIVKRIIVLCKGHISVSSQLEIGTEFCVELPLS

SEQ ID NO: 13437 - protein, 1188 aa, Streptococcus agalactiae
ATGGGAAAAGAAAAATTAATTTTAGCTTATTCTGGTGGTTTAGATACCTCTGTTGCTATAGCTTGGTTAAAAAAAGATTATGACGTTATTGCTGTCTGTATGGATGTTGGCGAAGGTAAAGATCTTGATTTTATTCACGATAAAGCTTTAACAATAGGTGCCATAGAATCTTATATTTTAGATGTTAAAGATGAGTTCGCTGAGCATTTTGTTTTACCAGCTTTACAGGCACATGCGATGTATGAACAAAAATACCCGCTTGTTTCAGCGCTTAGTCGTCCAATTATTGCCCAAAAATTAGTTGAAATGGCACATCAAACAGGTGCGACCACAATTGCACATGGATGTACAGGTAAAGGAAATGACCAAGTGCGTTTTGAAGTTGCAATTGCAGCACTAGATCCTGAATTAAAAGTAATTGCCCCTGTTCGTGAGTGGCAGTGGCATCGTGAAGAGGAAATTACTTTTGCAAAAGCTAACGGCGTACCTATTCCAGCAGATTTAGATAACCCTTATTCTATAGACCAAAATTTATGGGGACGTGCCAATGAATGTGGTGTGCTTGAGAATCCTTGGAATCAAGCGCCAGAAGAAGCTTTTGGTATTACAAAATCACCAGAAGAAGCTCCTGATTGTGCAGAATATATTGATATTACGTTCCAAAATGGGAAGCCTATAGCTATAAACAATCAAGAAATGACACTAGCAGATTTGATTTTATCGCTAAATGAAATTGCAGGAAAACATGGTATTGGACGCATTGATCATGTTGAAAATCGTTTAGTCGGTATCAAATCACGTGAAATTTATGAATGTCCTGCGGCAATGGTACTGTTAGCTGCTCATAAAGAAATTGAAGATTTAACATTAGTCCGTGAAGTGTCTCATTTTAAACCTATCCTTGAAAATGAACTATCAAATCTTATTTATAATGCTTTATGGTTTAGTCCAGCTACAAAAGCTATCATTGCCTATGTCAAAGAAACACAAAAAGTGGTTAATGGTACTACAAAAGTTAAGTTATATAAAGGTTCTGCCAAAGTCGTTGCTCGCCACTCGTCTAATTCATTATATGATGAGAACTTAGCAACTTATACAGCTGCTGATAACTTTGATCAAGATGCAGCAGTTGGTTTTATCAAACTCTGGGGACTTCCAACCCAAGTTAATGCACAAGTAAACAAAGGA

SEQ ID NO: 13438 - protein, 396 aa, Streptococcus agalactiae
MGKEKLILAYSGGLDTSVAIAWLKKDYDVIAVCMDVGEGKDLDFIHDKALTIGAIESYILDVKDEFAEHFVLPALQAHAMYEQKYPLVSALSRPIIAQKLVEMAHQTGATTIAHGCTGKGNDQVRFEVAIAALDPELKVIAPVREWQWHREEEITFAKANGVPIPADLDNPYSIDQNLWGRANECGVLENPWNQAPEEAFGITKSPEEAPDCAEYIDITFQNGKPIAINNQEMTLADLILSLNEIAGKHGIGRIDHVENRLVGIKSREIYECPAAMVLLAAHKEIEDLTLVREVSHFKPILENELSNLIYNALWFSPATKAIIAYVKETQKVVNGTTKVKLYKGSAKVVARHSSNSLYDENLATYTAADNFDQDAAVGFIKLWGLPTQVNAQVNKG

SEQ ID NO: 13439 - protein, 1384 aa, Streptococcus agalactiae
ATGACAAAAAATCATAAGTTATGGGGTGGTCGTTTTGAAAGTAGTCTTGAAAAATGGGTTGAAGAGTTCGGTGCATCAATCAGTTTCGACCAAAAGTTAGCTCCCTATGATATGAAGGCTTCTATGGCCCATGTCACAATGTTAGGCAAAACGGATATTATTAGTCAAGAAGAAGCAGGCTTGATAAAAGATGGTTTAAAAATCTGCAAGATAAATACAGAGCAGGTCAATTGACTTTTAGCATATCAAATGAAGACATTCATATGAACATAGAGAGCTTATTAACCGCTGAAATTGGAGAAGTAGCAGGTAAGCTTCATACTGCACGTTCACGAAATGATCAAGTGGCTACAGATATGCACCTTTATTTGAAAGATAAATTGCAAGAAATGATGAAGAAATTGCTTCATTTACGAACAACCTTAGTTAATTTAGCAGAAAATCATATCTATACTGTTATGCCAGGATATACACATTTACAACATGCTCAGCCGATTTCATTTGGACATCATCTAATGGCTTACTATAATATGTTTACGCGTGATACAGAGCGATTAGAGTTTAATATGAAACACACCAATCTATCACCATTAGGAGCAGCAGCTCTAGCAGGGACAACATTTCCTATTGACCGCCATATGACAACTCGTTTATTAGATTTTGAAAAACCATATAGTAATTCGCTTGATGCTGTCTCAGATCGTGACTTTATCATAGAATTTTTATCCAATGCTAGCATTTTAATGATGCATTTATCACGTTTTTGTGAAGAAATCATTAATTGGTGCAGTTATGAATATCAATTCATCACATTATCAGATACTTTCTCTACAGGATCATCTATTATGCCTCAAAAGAAAAATCCTGATATGGCAGAATTAATTCGAGGGAAGACAGGCCGTGTTTATGGAAATTTATTTAGTTTACTAACTGTTATGAAATCATTGCCGTTAGCTTATAACAAAGATTTACAAGAAGATAAAGAAGGGATGTTTGATAGCGTAGAAACAGTCAGCATAGCTATTGAAATCATGGCTAATATGCTTGAGAAAATGACTGTGAATGAGCACATAATGATGACCTCAACGGAGACTGATTTTTCAAATGCAACAGAATTAGCAGATTATTTAGCAAGTAAGGGGGTACCTTTCAGAAAAGCACATGAAATTGTAGGTAAATTGGTTTTAGAATGCAGTAAAAATGTTCTTATTTACAGGATATACCTTTAAAATATTATCAAGAAATTTCAGAGTTGATAGAAAACGATATCTATGAGATATTAACTGCAAAGACAGCAGTTAAACGAAGAAATTCATTAGGAGGAACAGGGTTTGACCAGGTTAAAGAACAGATCCTGTTGGCACGTAAAGAATTGAAAGCGGAA

SEQ ID NO: 13440 - protein, 462 aa, Streptococcus agalactiae
MTKNHKLWGGRFESSLEKWVEEFGASISFDQKLAPYDMKASMAHVTMLGKTDIISQEEAGLIKDGLKILQDKYRAGQLTFSISNEDIHMNIESLLTAEIGEVAGKLHTARSRNDQVATDMHLYLKDKLQEMMKKLLHLRTTLVNLAENHIYTVMPGYTHLQHAQPISFGHHLMAYYNMFTRDTERLEFNMKHTNLSPLGAAALAGTTFPIDRHMTTRLLDFEKPYSNSLDAVSDRDFIIEFLSNASILMMHLSRFCEEIINWCSYEYQFITLSDTFSTGSSIMPQKKNPDMAELIRGKTGRVYGNLFSLLTVMKSLPLAYNKDLQEDKEGMFDSVETVSIAIEIMANMLEKMTVNEHIMMTSTETDFSNATELADYLASKGVPFRKAHEIVGKLVLECSKNGSYLQDIPLKYYQEISELIENDIYEILTAKTAVKRRNSLGGTGFDQVKEQILLARKELKAE

SEQ ID NO: 13441 - protein, 876 aa, Streptococcus agalactiae
ATGGCAATCGTTTCAGCAGAAAAATTCGTCCAAGCAGCTCGTGATAACGGCTATGCAGTAGGTGGATTTAACACAAACAACCTTGAGTGGACTCAAGCTATCTTGCGCGCAGCAGAAGCTAAAAAAGCTCCAGTACTTATCCAAACTTCAATGGGTGCGGCTAAATACATGGGTGGTTACAAACTTTGTAAACAACTTATTGAAACTTTGGTTGAATCAATGGGTATTACTGTACCAGTTGCTATCCACCTTGACCACGGTCATTACGATGATGCCCTTGAGTGTATTGAAGTAGGTTACACTTCAATTATGTTTGATGGTTCACACCTTCCAGTTGAAGAAAACCTTGAAAAAGCACGCGAAGTTGTTGCTAAAGCACATGCTAAAGGTATTTCAGTAGAAGCTGAAGTTGGTACTATCGGTGGTGAAGAAGATGGTATTGTCGGTAAAGGTGAATTAGCACCAATCGAAGACGCTAAAGCTATGGTTGAAACTGGTATTGACTTCTTGGCTGCAGGTATCGGTAACATTCATGGACCATACCCAGCAAACTGGGAAGGACTTGACCTTGATCACTTGAAGAAATTGACTGAAGCTGTTCCTGGTTTCCAATCGTGTTACACGTGGTTCAGTATTCCTGATGATCAAATCCAAGAAGCTATCAAACTTGGTGTTGCTAAAGTTAACGTTAACACAGAATGTCAATTAGCTTTCTGTCAAGCAACTCGTGACTACGCTGTTGAATTCAACGCTAACGAAGCTGAATACATGAAGAAAAAACTCTTTGACCCACGTAAATTCTTGAAACCTGGTTTCGATGCAATTACAGAAGCAGTTGAAGAACGTATTGACGTGTTTGGTTCAGCAAACAAAGCA

SEQ ID NO: 13442 - protein, 293 aa, Streptococcus agalactiae
  VARIANT 212: Xaa = Any Amino Acid
MAIVSAEKFVQAARDNGYAVGGFNTNNLEWTQAILRAAEAKKAPVLIQTSMGAAKYMGGYKLCKQLIETLVESMGITVPVAIHLDHGHYDDALECIEVGYTSIMFDGSHLPVEENLEKAREVVAKAHAKGISVEAEVGTIGGEEDGIVGKGELAPIEDAKAMVETGIDFLAAGIGNIHGPYPANWEGLDLDHLKKLTEAVPGFPIVLHGGSXIPDDQIQEAIKLGVAKVNVNTECQLAFCQATRDYAVEFNANEAEYMKKKLFDPRKFLKPGFDAITEAVEERIDVFGSANKA

SEQ ID NO: 13443 - protein, 561 aa, Streptococcus agalactiae
ATGAAATATATATCAGAGTTAACAACCCTGATTGCATTAGCTGGTTTAATGGTTATTATCACACTCATTAATCCTAATTTCCTCACAACCAATAATCTACTCAATTTATTATTACAAGTAACTGCAAATGGTTTTATCGCTTTCGGGATGACCTTCGTTATTTTGACTGGCGGTATTGATTTATCAGTCGGGTCCATATTAGCCCTATCTAGTGCATTAACAGCTGGATTAATCGGCCACGGAGTACCCGTTGGTATTGCTATCGTTTTATCTGTTGCCTTAGGTGGCATCTTGGGAATGCTAAACGGACTCTTCATTTCTTACGGAAAATTAACACCATTTATCGTTACACTGGCAACAATGACTATCTTTAGAGGAGCAACGCTAGTTTATTCAAACGGCAACCCAATTACCGCTGGATTATCCGATAGTTTTCTATTCCAATTTTTGGGACAAGGCTATATTGTTGGTATCCCATTCCCAGTCATTCTCATGTTTCTTACTTTTATTATTTTGTATATTTTGTTACATAAAACAGCCTTCGGGAGATCTGTTACGCTT

SEQ ID NO: 13444 - protein, 187 aa, Streptococcus agalactiae
MKYISELTTLIALAGLMVIITLINPNFLTTNNLLNLLLQVTANGFIAFGMTFVILTGGIDLSVGSILALSSALTAGLIGHGVPVGIAIVLSVALGGILGMLNGLFISYGKLTPFIVTLATMTIFRGATLVYSNGNPITAGLSDSFLFQFLGQGYIVGIPFPVILMFLTFIILYILLHKTAFGRSVTL

SEQ ID NO: 13445 - protein, 174 aa, Streptococcus agalactiae
ATGAATGAACTAGCAGACAGAGGTGTTCCAATGTCATGGGTATCATCAGACTACCCTGAAATTCTAGGTGTTAGTGACCGCATCATGGTAATGCACGAAGGTCGAATCAGTGGAGAACTCAGTCGAAAAGAAGCTGACCAAGAAAAAGTTATGCAGCTAGCCACAGGAGGTAAG

SEQ ID NO: 13446 - protein, 58 aa, Streptococcus agalactiae
MNELADRGVPMSWVSSDYPEILGVSDRIMVMHEGRISGELSRKEADQEKVMQLATGGK

SEQ ID NO: 13447 - protein, 186 aa, Streptococcus agalactiae
ATGGCTAAAGTATGTTATTTCACAGGACGTAAAACAGTTTCTGGTAACAACCGTTCACACGCGATGAACCAAACAAAACGTACTGTTAAACCAAACCTTCAAAAAGTTACTGTTCTTATCGACGGTAAACCAAAAAAAGTTTGGGTTTCAGCTCGTGCGCTTAAATCTGGTAAAGTAGAACGCGTT

SEQ ID NO: 13448 - protein, 62 aa, Streptococcus agalactiae
MAKVCYFTGRKTVSGNNRSHAMNQTKRTVKPNLQKVTVLIDGKPKKVWVSARALKSGKVERV

SEQ ID NO: 13449 - protein, 258 aa, Streptococcus agalactiae
ATGGCAAGTAAAAGTGCTATCAAAGATAACTTTCAAGCACTTTTGCGTAAGGAAAACTACGCAAAAGGTGTTGTTGTGAGGTCTAGTGAAGCGGGCATCGCAGTAGATGTTTATACTGTCATGAGTTACGGCGTCAAAATTAGTGAAGTTTCAAAAAATATTCAAGAGCGAGTGAAATTCAATCTCGAAAATCAGCTTGGTTTATCTGCTGATATGGTGAATGTTTATGTGCAAAGTATTAAGGTTGTAGGAGAAGAT

SEQ ID NO: 13450 - protein, 86 aa, Streptococcus agalactiae
MASKSAIKDNFQALLRKENYAKGVVVRSSEAGIAVDVYTVMSYGVKISEVSKNIQERVKFNLENQLGLSADMVNVYVQSIKVVGED

SEQ ID NO: 13451 - protein, 1627 aa, Streptococcus agalactiae
ATGGTACAAGCTGCCAGTACACGTCTGAGTAAACAGGCAGAGTATGTCAACTCATTAAATGTATTCCCAGTTCCAGATGGTGATACTGGTACGAATATGGGGATGACTATGGAAAACGGAGCCAAGGAAGTTTCGGACAAACCAGCGACGACTGTTGGAGAAGTTGGTCAAATTCTTTCTAAAGGTGTATTGATGGGAGCACGTGGAAATTCAGGTGTAATTACATCACAATTATTCCGTGGTTTTGGTCAAAGTATCAAGGATAAAGAAGAATTAACGGGTCAAGATTTGGCACACGCTTTCCAGAATGGTGTTGAAGTAGCTTATAAAGCCGTTATGAAACCAGTTGAAGGAACTATCTTGACAGTATCACGCGGTGCAGCTACCGCTGCTCTAAAAAAAGCTGAAGAAACTGATGATGCAGTTGAAGTTATGCGCGCAACTCTCAAAGGTGCTAAGCGTGCTCTTGCTAAAACACCGGATATGCTACCTGTTCTTAAAGAGGTTGGTGTTGTTGATTCTGGTGGTCAAGGACTCGTCTTTATTTACGAAGGTTTCCTCTCAGCACTGACTGGGGAATATATCGCATCAGAAGATTTTAAAGCAACTCCCGCAACAATGACTGAAATGGTTAATGCAGAGCACCATAAAGCTGTAGTAGGCCACGTAGCCACAGAAGATATTAAATATGGCTATTGTACAGAAGTCATGGTTGGTTTAAAGCAAGGACCAACTTACGTTAAGGAATTTAACTACGAAGAATTTCAGGTATCTTAGCAATCTAGGGGATTCTTTACTAGTTGTTAATGATGATGAAATTGTCAAGGTTCATGTTCATACAGAAGATCCAGGTCTTGTTATGCAAGAAGGTTTGAAATATGGATCGCTTGTGAAGGTTAAAGTTGAAAACATGCGTAACCAACATGATGCCCAAATGCAAAAGGTTGAAGTTGAAGAAACTGTCAAAGAAACTAAAGAATATGGTATTATTGCTGTTGTAGCTGGTGACGGTCTAGCTGAGATTTTTAAATCACAAGGTGTTGATTATATCATCTCTGGCGGCCAGACTATGAACCCATCTACAGAAGATATTGTAAAAGCGATTGAAAAAGTAAACGCTAGAAATGTTATTATTTTACCAAACAATAAGAACATCTTCATGGCTGCACAGTCAGCTGCAGATGTCGTTGATATTCCAGCAGCAGTAGTAGAGACACGTACAGTTCCACAAGGATTTACTAGCTTACTTGCTTTTGATCCTGCTAAGTCTCTTGAAACTAATGTAGCTGATATGACAAATAGCCTCTCAGATGTCATTAGTGGTAGTGTGACTTTAGCTGTTCGTGATACAACGATAGATGGCCTTGAAATTCATGAAAACGACATCCTTGGGATGGTTGATGGTAAAATTCTAGTATCTACACCAGATATGGAAAAAGCACTTAAAGACACTTTTGATAAAATGATTGATGAAGATAGTGAAATCGTGACAATCTATGTTGGTGAAGATGGTAAACAAGCATTAGCCGAGACCTTGTCGGAATATCTTGAGGAGACTTATGAAGATGTTGAAGTTGAGATCCACCAAGGAGATCAACCTGTATATCCATACCTCATGAGCGTTGAA

SEQ ID NO: 13452 - protein, 543 aa, Streptococcus agalactiae; identical to SEQ ID NO: 9036

SEQ ID NO: 13453 - protein, 882 aa, Streptococcus agalactiae
ATGTCATTAATTATTCTTACGGTTATTTTGGTTTTAGTGATTGTTCTGTTGATAACTTCTTTATACGTTGTTAAACAACAGACGGTAGCCATCATTGAACGCTTTGGTAAATATCAAAAGACTGCTACTAGCGGTATTCATATTCGTGTACCATTGGGTATCGATAAGATTGCAGCACGAGTGCAGTTACGTCTTTTACAGAGTGAAATTATAGTTGAGACAAAAACAAAAGATAATGTTTTTGTCACTTTAAATATTGCTACACAATATCGTGTCAATGAAAATAACGTTACAGACGCTTATTACAAATTAATAAAGCCAGAAGCTCAGATTAAATCTTATATCGAAGATGCTTTGCGTTCATCAGTTCCTAAACTTACATTAGATGAGCTATTCGAAAAGAAAGATGAAATAGCCTTGGAAGTTCAACATCAAGTGGCAGAAGAAATGTCAACATACGGCTACATCATTGTTAAGACTTTAATTACTAAGGTTGAGCCAGATGCAGAAGTAAAACAATCCATGAACGAAATCAATGCTGCACAACGTAAACGTGTAGCAGCTCAAGAATTAGCGAATGCTGATAAGATCAAAATTGTAACTGCTGCAGAAGCAGAAGCAGAAAAAGATCGTCTACATGGTGTGGGTATTGCGCAACAACGTAAAGCAATTGTAGATGGGTTAGCTGATTCGATTCAAGAATTGAAAGATGCTAACGTGACATTGACAGAAGAACAAATCATGTCTATCTTGTTAACAAATCAATATTTAGATACTTTAAATACATTTGCTATTAATGGTAATCAAACGATTTTCTTACCAAATAACCCAGAAGGTGTTGAAGATATTCGTACACAAGTTTTATCTGCTCTTAAAACAAGA

SEQ ID NO: 13454 - protein, 294 aa, Streptococcus agalactiae; identical to SEQ ID NO: 274

SEQ ID NO: 13455 - protein, 114 aa, Streptococcus agalactiae; identical to SEQ ID NO: 4595

SEQ ID NO: 13456 - protein, 38 aa, Streptococcus agalactiae; identical to SEQ ID NO: 276

SEQ ID NO: 13457 - protein, 228 aa, Streptococcus agalactiae
ATGAAACTTAAAATCAGTGTTTTAACAGCAGCTTCAGCTGTCACTCTATTATTAGCTACTTCAGCAAGTCTTGCGAAGGCAGACACAGTGTCTTATCCTTCACGTGATGCCGGATTTATCTACTCTCGTGGGTATGCGCCTTCTGAATCAAGCTATCCTTCACGCGATGCCGGGTTTATCTACTCTCGTGGATACGCTCCAAAACACTTCCTAAGTGCTTACGATAAA

SEQ ID NO: 13458 - protein, 76 aa, Streptococcus agalactiae
MKLKISVLTAASAVTLLLATSASLAKADTVSYPSRDAGFIYSRGYAPSESSYPSRDAGFIYSRGYAPKHFLSAYDK

SEQ ID NO: 13459 - protein, 603 aa, Streptococcus agalactiae
TTGAGGCTAGTCGTAGATTTCATCAAAGATGTGGTAATAAAAAATCCCCTCCAGTTCCATTGTAATGATGACAATGACAAAACCTGTAGGGGTATAAATAGTCTATATTTAAATGTGGATAAATTTTATTTTAAGAAGCGTTGTAGAAATTCCTTAGTTCTTTCTTGTGTTGGATTTTCGAAAAGTTGCTTAGGAGTACCCTGCTCTGCAATGATTCCTTTGTCCATGAAAATAACGCGGTCTGATACTTCTTTAGCAAATTCCATCTCGTGTGTCACAATTATCATTGTTAATCCAGATTTAGCTAGATCTTGCATTGTTTTAAGGACCTCACCAACCATTTCTGGATCCAAGGCTGAAGTTGGTTCATCAAAAAGTATAGCTTCTGGGTTAACAGAAAGTGCTCGGGCGATTGCGACACGTTGCTTTTGCCCACCTGATAATTGTTTTGGTTTAGCTTTCCAATATTGCTCAGTCATGCCAACAGCATTTAAGTTTTCTTTAGCAATCTTTTCAGCTTCTTGGCGTTCACGTTTTAGAACAGTAGTCTGTGCAACAATAGCGTTCTCTAAGATGTTTAAATTCTCAAAGAGGTTAAAAGAT

SEQ ID NO: 13460 - protein, 201 aa, Streptococcus agalactiae
MRLVVDFIKDVVIKNPLQFHCNDDNDKTCRGINSLYLNVDKFYFKKRCRNSLVLSCVGFSKSCLGVPCSAMIPLSMKITRSDTSLANSISCVTIIIVNPDLARSCIVLRTSPTISGSKAEVGSSKSIASGLTESARAIATRCFCPPDNCFGLAFQYCSVMPTAFKFSLAIFSASWRSRFRTVVCATIAFSKMFKFSKRLKD

SEQ ID NO: 13461 - protein, 738 aa, Streptococcus agalactiae
ATGACACAAGCTATTTTAGAAATTAAACATTTGAAAAAATCTTACGGAAGCAATGAAGTGTTAAAAGACATTTCGCTTTCGGTCAACAAAGGCGAAGTTATTTCTATCATTGGTTCTTCTGGATCAGGAAAATCAACTTTCCTACGTTCTATTAACCTCTTAGAAGAACCAAGTGGAGGAGAAATCTTATATCACGGTCACAATGTTCTTGAAAAAGGCTATGATTTAAATAATTATCGTGAAAAACTTGGGATGGTCTTTCAATCTTTTAACCTCTTTGAGAATTTAAACATCTTAGAGAACGCTATTGTTGCACAGACTACTGTTCTAAAACGTGAACGCCAAGAAGCTGAAAAGATTGCTAAAGAAAACTTAAATGCTGTTGGCATGACTGAGCAATATTGGAAAGCTAAACCAAAACAATTATCAGGTGGGCAAAAGCAACGTGTCGCAATCGCCCGAGCACTTTCTGTTAACCCAGAAGCTATACTTTTTGATGAACCAACTTCAGCCTTGGATCCAGAAATGGTTGGTGAGGTCCTTAAAACAATGCAAGATCTAGCTAAATCTGGATTAACAATGATAATTGTGACACACGAGATGGAATTTGCTAAAGAAGTATCAGACCGCGTTATTTTCATGGACAAAGGAATCATTGCAGAGCAGGGTACTCCTAAGCAACTTTTCGAAAATCCAACACAAGAAAGAACTAAGGAATTTCTACAACGCTTCTTAAAA

SEQ ID NO: 13462 - protein, 246 aa, Streptococcus agalactiae; identical to SEQ ID NO: 4604

SEQ ID NO: 13463 - protein, 1548 aa, Streptococcus agalactiae
ATGAAAAAAATATTACTAAGTTTATTCACTGCTTTGCTTATCACCTTTGGAGGTATGACAAGTATACAAGCAGATGAATATCTACGTGTCGGTATGGAGGCAGCCTATGCGCCTTTCAACTGGACACAAAATGATAACACAAATGGTGCAGTTCCTATTGAAGGAACTGATCAATATGCTAATGGTTATGATGTACAAGTCGCTAAAAAGTTAGCTAAAAAGTTAAATAAAAAAGTTGTTGTTGTCAAAACAAAATGGGAAGGCCTTGTTCCAGCACTAACTTCTGGAAAACTCGATATGATTATTGCAGGAATGAGTCCTACCGAAGAACGTAAAAAAGAAATTAATTTTTCAAAGCCTTACTACATTTCAGAACCTACTCTAGTTGTTAACGCTGAAGGAAAATATACTAATGCTAAAAATATTAGTGATTTCAAAAATGCTAAAGTAACTGCCCAACAAGGAGTCTACTTATACAACCTCATTGATCAAATCAATGGTGTCAAAAAAGAAGTTGCCATGGGGGACTTTAATCAATTAAGACAAGCTGTAGAATCTGGTGTTGTAGACGCCTATGTTTCAGAACGTCCAGATGCAACTTCCGCTCAAACTGCTAATCCTAAATTAAAAATGATTGAACTGCACCAAGGGTTTAAAACATCTGATGCCGATACAAATATTTCCGTTGGGATGCGTAAAGGTGACAATCGTATTAATCAAGTCAATCAAGTTCTCGAAAGCATTTCTAGAGATAAACAAATCGCCTTGATGGATAAGATGATTAAAGAACAACCATCCGTTAAAAAAGAAAAAAATGGAAAACCAAACTTCTTTGAACAGATGGCAACTATTTTAAAAAACAATGGTTCTCAATTCCTCAGAGGAACAGCTACAACCCTCCTAATTTCTATGGTAGGAACTATCGTCGGATTATTTATCGGCCTTCTCATCGGTGTTTTCCGTACAGCACCAAAATCTGACAATAAGTTAAAGGCTGCCTTACAAAAATTATTAGGTTGGTTACTTAACATCTATATTGAGGTCTTCCGCGGGACACCTATGATTGTACAATCAATGGTTATCTACTACGGAACAGCACAAGCTTTCGGAGTTTCGCTGGACCGTACACTAGCAGCTATATTTATTGTTTCAATCAATACTGGTGCTTATATGAGCGAAATTGTACGTGGTGGTATTTTCTCTGTTGATAAAGGACAATTTGAAGCCGCAACTGCACTTGGTTTCACCCATGGACAAACCATGCGAAAAATTGTTCTACCACAAGTTGTACGTAACATACTCCCAGCTACTGGTAATGAGTTTGTTATCAATATCAAAGATACCTCTGTACTGAACGTTATCTCTGTTGTCGAACTCTACTTCTCTGGTAATACTGTTGCAACACAAACCTACCAATATTTCCAAACATTCACCATTATTGCGATTATTTACTTCATCTTAACCTTCACCGTAACACGTATCTTACGTTACATTGAAAAACGTTTTGATTCAGATAATTACACAACCGGTGCGAATCAATTACAAGTC

SEQ ID NO: 13464 - protein, 516 aa, Streptococcus agalactiae; identical to SEQ ID NO: 288

SEQ ID NO: 13465 - protein, 1887 aa, Streptococcus agalactiae
ATGATAATGAAGAAATGTTTTTTGGCTATTTGTTTAGCTCTTAGTTTTTTTATGGTTTCAGTTCAAGCAGATGAGGTGGACTATAACATTCCTCATTATGAGGGTAATCTAACTATTCACAATGATAATAGTGCTGATTTTACAGAGAAGGTTACTTACCAATTTGATTCGTCCTATAATGGACAGTATGTCACGTTAGGTACGGCGGGTAAGTTATCTGACAATTTTGATATTAATAATAAGCCACAGGTTGAAGTTTCAATTAATGGTAAAGTAAGGAAAGTTAGTTACCAGATAGAAGATTTGGAGGATGGCTACCGTTTGAAAGTGTTTAATGGTGGTGAAGCAGGTGATACTGTTAAAGTCAATGTTCAGTGGAAACTAAAAAATGTTCTATTTATGCATAAGGATGTTGGTGAACTTAACTGGATTCCTATTAGCGACTGGGATAAAACGTTAGAGAAAGTAGATTTTTGGATATCAACTGACAAAAAGGTTGCTCTTTCTCGTCTTTGGGGGCACTTGGGTTATCTTAAAACTCCTCCTAAAATAAGACAAAATAATAATCGTTACCATTTGACAGCTTTTAATGTAAACAAACGATTAGAATTTCATGGTTATTGGGATAGATCTTATTTTAATCTACCTACAAACAGTAAAAATAATTACAAGAAAAAAATTGAACATCAAGAGAAGATAATAGAGCGTCATGGTTTTATCCTAAGTTTCTTGTTAAGGATATTATTACCTTCATTCTTTATTATTGTGACACTATTCATCTCAATTAGGGTGTTCCTGTTTAGAAAAAAAGTTAATAAATACGGGCAATTCCCTAAGGATCATCATTTATATGAAGCACCTGAGGACCTTTCACCATTAGAGTTAACTCAAAGCATTTATAGTATGAGCTTTAAAAATTTTCAAGATGAGGAGAAGAAAACTCACCTTATCAGTCAAGAACAACTCATACAGTCAATTCTATTAGACTTGATTGATAGAAAAGTATTGAATTATGATGATAACTTGTTATCTCTAGCTAACTTAGATAGAGCTTCTGATGCAGAAATAGATTTTATAGAGTTTGCTTTTGCGGATTCTACGAGTTTGAAGCCAGATCAACTCTTTTCTAATTACCAATTTAGTTATAAAGAAACACTACGTGAACTGAAAAAGCAGCACAAGGCTTCAGATCTGCAAAATCAAATGAGACGCCGAGGAAGTAATGCCTTATCAAGAATTACGCGTCTCACAAGGTTGATTTCTAAAGACAATATAAACTCTCTTAGAAGAAAGGGAATTTCATCCCCTTATCGTAAAATGTCTTCAGAAGAGTCTAAAGAATTATCTAGGTTAAAAAGATTCAGTTACCTATCACCTCTTATTTCTTTTGTTGTTATAATTTATACGCTTTTTTTAAATTATTTTACCTATTTCTGTATCTATCTCTTATTGTTTGGTGTTATCCTGTTGTTGAATAAAATCATTTTTATGATGACAAGAAAAATAAGTAACGGTTATATTGTAACTGAAGATGGAGCAAGTCGTGTCTACCAATGGACTAGTTTTAGGAACATGCTAAGGGATATCAAATCGTTTGATCGTTCAGAGTTAGAAAGTATCGTATTATGGAATCGAATATTGGTTTACGCTACTTTATTCGGCTACGCTGACCGTGTTGAGAAAGTACTCAGAGTGAACCAAATAGATATTCCAGAAAGATTTGCAAACATTGATAGTCATCGATTTGCGATTTCAGTCAATCAATCTAGTAATCATTTTTCAACGATAACTGAAGATGTTAGTCACGCTTCTAATTTTAGTGTTAATTCAGGCGGTTCTTCAGGTGGTTTCTCAGGCGGCGGAGGCGGCGGAGGTGGCGGTGCCTTC

SEQ ID NO: 13466 - protein, 629 aa, Streptococcus agalactiae
MIMKKCFLAICLALSFFMVSVQADEVDYNIPHYEGNLTIHNDNSADFTEKVTYQFDSSYNGQYVTLGTAGKLSDNFDINNKPQVEVSINGKVRKVSYQIEDLEDGYRLKVFNGGEAGDTVKVNVQWKLKNVLFMHKDVGELNWIPISDWDKTLEKVDFWISTDKKVALSRLWGHLGYLKTPPKIRQNNNRYHLTAFNVNKRLEFHGYWDRSYFNLPTNSKNNYKKKIEHQEKIIERHGFILSFLLRILLPSFFIIVTLFISIRVFLFRKKVNKYGQFPKDHHLYEAPEDLSPLELTQSIYSMSFKNFQDEEKKTHLISQEQLIQSILLDLIDRKVLNYDDNLLSLANLDRASDAEIDFIEFAFADSTSLKPDQLFSNYQFSYKETLRELKKQHKASDLQNQMRRRGSNALSRITRLTRLISKDNINSLRRKGISSPYRKMSSEESKELSRLKRFSYLSPLISFVVIIYTLFLNYFTYFCIYLLLFGVILLLNKIIFMMTRKISNGYIVTEDGASRVYQWTSFRNMLRDIKSFDRSELESIVLWNRILVYATLFGYADRVEKVLRVNQIDIPERFANIDSHRFAISVNQSSNHFSTITEDVSHASNFSVNSGGSSGGFSGGGGGGGGGAF

SEQ ID NO: 13467 - protein, 837 aa, Streptococcus agalactiae
ATGTTAATAATTGAATTACTCAAAGCCCTATTTTTAGGAGTCGTTGAGGGAGTGACAGAATGGTTACCTGTTTCTAGTACTGGCCATTTAATCTTGGTTCAAGAGTTTATGAAGTTGAACCAAAGCAAATCCTTTGTTGAAATGTTTAATATTGTTATACAACTTGGGGCAATTATGGCAGTTATTGTCATTTATTTTAAACGCCTTAACCCATTTCAGCCAGGTAAATCTGCTAGAGAAATTCGTTTAACTTGGCAATTATGGTTAAAAGTAGTGATAGCTTGTATTCCATCTATTTTAATTGCTTTACCATTTGATAATTGGTTTGAAGCTCATTTTAATTTCATGATTCCGATTGCAATAGCCCTAATCTTTTATGGTTTTGTCTTCATATGGGTTGAAAAACGTAATGCACACCTCAAACCACAGGTAACCGAATTGGCAAGTATGTCTTACAAGACAGCTTTCTTGATTGGATGTTTCCAGGTTCTCAGTATTGTTCCGGGAACCAGTCGTTCTGGAGCTACTATTTTAGGAGCAATTATTATTGGAACTAGTCGTTCGGTCGCTGCTGACTTTACTTTCTTCCTTGCCATCCCAACTATGTTTGGTTATAGTGGACTTAAGGCGGTTAAATATTTTTTAGATGGTAACGTCTTGAGTTTAGACCAATCTTTAATACTTTTAGTAGCAAGTCTGACAGCTTTCGTAGTTAGTTTATATGTTATTCGTTTCTTGACAGACTATGTCAAACGACACGATTTCACCATCTTTGGTAAGTATCGTATAGTCTTAGGAAGTTTACTCATCCTCTACTGGTTAGTTGTTCATTTATTC

SEQ ID NO: 13468 - protein, 279 aa, Streptococcus agalactiae; identical to SEQ ID NO: 292

SEQ ID NO: 13469 - protein, 681 aa, Streptococcus agalactiae
ATGGAGCTGAAAGATTTCCTAATCCCTCAGGAGAAGACTGAGGAATTTTTCTATTCTGTCATGGATGAATTAGACTTGCCAGAAAACTTTAAAAATAGTGGTATGTTAAGTTTTCGAGTAACACCTAAAAAAGATCGCATTGATGTTTTTGTTACAAAGTCTGAATTAAGTAAAGATTTAAATTTAGAAGAATTAGCAGATTTGGGTGACATTTCAAAAATGTCTCCAGAAGACTTTTTTAAAACCTTGGAACAATCGATGTTGGAAAAAGGGGATACGGATGCCCATGCCAAATTAGCAGAAATTGAAAATATGATGGATAAAGCAACTCAAGAAGTAGTTGAGGAAAATGTTTCTGAAGAACAACCTGAAAAGGAAGTAGAAACGATTGGATATGTTCACTATGTCTTTGATTTTGATAATATTGAAGCTGTAGTTCGATTTTCACAAACGATTGATTTTCCAATAGAAGCTTCTGAACTCTATAAAAATGGTAAAGGCTATCATATGACAATTTTGCTAGACTTGGAAAACCAACCAAGCTACTTTGCTAATTTGATGTATGCTCGAATGCTTGAACATGCTAATGTGGGCACAAAAACACGAGCTTACTTGAAAGAGCATAGTATTCAATTGATTCATGATGATGCTATTTCAAAATTACAAATGATTGAGATGGGA

SEQ ID NO: 13470 - protein, 227 aa, Streptococcus agalactiae; identical to SEQ ID NO: 4614

SEQ ID NO: 13471 - protein, 1157 aa, Streptococcus agalactiae
ATGATACCTTTTACAATTGAGTATATTTTTGTATTGATTGGAGCATTTTTATTATCAATCATTCTAACTCCTATTATTCGAGTTATATCTTTGAAGGTAGGAGCGGTTGATAAACCGAACGCTCGAAGAATCAACAAAGTACCAATGCCAAGTAGTGGTGGTTTAGCAATATTTCTCTCCTTTGTTGTAACAACATTATTTTTCATGCCAATGGCGGCCAGTAGACACTTTATAGAAGTCTCTTATTTTCACTACATTTTGCCTGTAATTATTGGCGGTCTCGTAGTTACAACAACAGGATTTATAGATGACATCTTTGAATTAAGACCTCGTTATAAAATGTTGGGAATTATTATTGCAGCTATTATCATATGGAAATTTACACATTTTAGATTTGATAGTTTTAAGATTCCAATAGGTGGTCCACTCTTGGAGTTTGGTCCTATTTTAACTTTCTTTTTGACAGTTTTATGGATTATTTCAATCACTAATGCTATCAATCTGATTGATGGTCTAGATGGTCTAGTTAGTGGTGTTTCAATCATCAGTCTAGCAACGATGGCAGTGGTTTCTTATTTCTTTTTACCTAAAATAGATTTTTTTCTCACGCTAACTATTGTTATTTTAATCGCCTCAATAGTTGGTTTTTTCCCTTATAATTATCATCCAGCCATTATCTACCTAGGTGATGCTGGTGCCTTGTTTATAGGATTTATGATTGGTGTATTATCGCTTCAAGGTTTAAAAAACTCCACAGCTGTTGCAGTGATAACACCTGTCATTATTTTAGGAGTTCCTATTTTGGATACAGCTGTTGCTATTGTGAGGCGTAAATTATCAGGGAAAAAGATTTCTGAAGCTGATAAGATGCACCTGCATCACCGATTGCTATCTATGGGATTTACACATAGAGGAGCAGTTTTAGTTGTTTATGGTATTGCAATTATCTTTTCGCTTATCGCTTTGCTTTTAATGTTTCTAGTCGTATTGGGGGAATTTTTCTTCTATTGGCTCTACTATTAGTAATGGAAATTTTTATAGAAGGTTTAAATATTTGGGGTGAGAATCGGACACCGCTATTTAATCTCTTAAAGTTCATTGGCAACAGTGATTACAGACAAAGTGTTATTGCTAAATATAGCGATAAGCATCAAAAA

SEQ ID NO: 13472 - protein, 386 aa, Streptococcus agalactiae
MIPFTIEYIFVLIGAFLLSIILTPIIRVISLKVGAVDKPNARRINKVPMPSSGGLAIFLSFVVTTLFFMPMAASRHFIEVSYFHYILPVIIGGLVVTTTGFIDDIFELRPRYKMLGIIIAAIIIWKFTHFRFDSFKIPIGGPLLEFGPILTFFLTVLWIISITNAINLIDGLDGLVSGVSIISLATMAVVSYFFLPKIDFFLTLTIVILIASIVGFFPYNYHPAIIYLGDAGALFIGFMIGVLSLQGLKNSTAVAVITPVIILGVPILDTAVAIVRRKLSGKKISEADKMHLHHRLLSMGFTHRGAVLVVYGIAIIFSLIALLLNVSSRIGGIFLLLALLLVMEIFIEGLNIWGENRTPLFNLLKFIGNSDYRQSVIAKYSDKHQK

SEQ ID NO: 13473 - protein, 768 aa, Streptococcus agalactiae
ATGTCTGTACTTGAAATCAAAAATCTTCATGTTTCTATTGAAGATAAAGAAATTTTAAAAGGTCTTAATTTAACGCTGAAAACAGGAGAAATTGCTGCTATCATGGGTCCAAATGGTACTGGGAAGTCGACACTTTCAGCAGCTATTATGGGAAATCCTAATTATGAAGTTACAGCAGGTGAAATTCTTTTTGATGGTGAAGATATTTTAGAGCTAGAAGTGGATGAACGTGCTCGTTTGGGTCTATTTCTTGCGATGCAATACCCTTCAGAGGTTCCAGGGATTACTAATGCTGAATTTATCCGAGCAGCTATGAATGCGGGAAAGGCTGATGATGATAAAATTTCCATCCGCCAATTTATTACTAAGTTAGATGAAAAGATGGAACTACTTGGCATGAAAGAAGAAATGGCGGAACGTTATCTTAACGAAGGTTTTTCAGGTGGTGAGAAGAAGCGCAATGAAATTTTACAACTCCTAATGTTAGAGCCTAAGTTTGCCCTCTTGGATGAGATTGACTCTGGCCTGGATATTGATGCTCTTAAAGTGGTATCAAAGGGAGTCAATGAAATGCGTGGTGAAGGTTTTGGTGCTATGATTATTACACACTATCAACGCCTTTTGAATTACATTACACCAGATAAAGTACACGTTATGATGGACGGGAAGGTAGTATTGTCAGGAGGACCAGAATTAGCGGTTCGCCTTGAGAAAGAAGGTTATGCTCAAATCGCTGAAGAGCTTGGTTTAGAGTATAAAGAAGAAGTC

SEQ ID NO: 13474 - protein, 256 aa, Streptococcus agalactiae; identical to SEQ ID NO: 300

SEQ ID NO: 13475 - protein, 1260 aa, Streptococcus agalactiae
ATGTCTAAAGAAGCTATATTAAATTTTTTACAAGCCAAAGGTGAGCCTACTTGGTTACAAGAATTACGACTAAAGGCTTTTGAAAAAATAGAAGAACTAGAATTACCAGTAATTGAACGTGTAAAATTTCATAGATGGAATTTAGGTGATGGAACTATTTTAGAGAATGACTATACAGCTAACATTCCAGATTTCACAGAGTTAGGAAACAATCCCAAGTTGGTTCAAATTGGGACCCAAACTGTCCTTGAACAAGTTCCTATGGAATTAATAGAGAAAGGCGTTGTCTTTACAGATTTCTATTCGGCTTTGGAAGAAATTCCAGAAGTCATAGAGCGCTACTTTGGGAAAGCACGTCCTTTTGAAGAAGATAGACTTGCTGCCTATCACACAGCTTACTTCAACAGTGGTGCAGTGCTTTATATTCCAGATAATGTTGAAATTACTCAACCAATCGAAGGTCTTTTTTATCAAGATAGTCAATCTAAAGTACCATTTAATAAGCATATCCTTCTTATTGTTGGAAAAAATGCAAAAGTTAGTTACTTAGAGCGATTTGAGTCAATTGGTGATGGGACAGAACGAACAAGTGCTAATATTTCTGTAGAAGTAATTGCCCAAGCAGGTAGCCAAATTAAATTTGCCTCAATTGATCGCCTCGGAGAAAATGTGACAACGTTTATAAGTCGTCGTGGTCGTCACAGTAGCGATGCAACAATAGATTGGGCCCTTGGGGTGATGAATGAGGGCAATGTTGTTGCTGACTTTGATTCTGATTTAATTGGTGATGGAAGCCACGCTAATTTAAAAGTAGTTGCTGCTTCGTCAGGGCGTCAAGTTCAAGGAATTGATACGCGTGTTACAAACTACGGCTGTAATTCAGTAGGACATATTTTACAGCATGGGGTTATTTTAGAGCGTGGGACTCTTACTTTTAACGGTATCGGACATATTATAAAAGGTGCAAAGGGAGCAGACGCCCAACAAGAAAGCCGAGTTCTCATGTTATCAGACAAAGCACGTTCAGATGCTAATCCTATCCTTTTGATTGATGAAAATGATGTTACAGCTGGTCACGCAGCCTCAATTGGTCAGGTTGACCCAGAGGATTTATATTATTTGATGAGCCGTGGCTTGAACCAAAAAACAGCAGAGCAATTAGTTATTCGTGGATTTTTAGGAACAGTCATTGCTGAAATACCAGTAAAAGAAGTTCGCGATGAAATGATTGCCGTTATTGATACAAAACTAGAAAAACGT

SEQ ID NO: 13476 - protein, 420 aa, Streptococcus agalactiae
MSKEAILNFLQAKGEPTWLQELRLKAFEKIEELELPVIERVKFHRWNLGDGTILENDYTANIPDFTELGNNPKLVQIGTQTVLEQVPMELIEKGVVFTDFYSALEEIPEVIERYFGKARPFEEDRLAAYHTAYFNSGAVLYIPDNVEITQPIEGLFYQDSQSKVPFNKHILLIVGKNAKVSYLERFESIGDGTERTSANISVEVIAQAGSQIKFASIDRLGENVTTFISRRGRHSSDATIDWALGVMNEGNVVADFDSDLIGDGSHANLKVVAASSGRQVQGIDTRVTNYGCNSVGHILQHGVILERGTLTFNGIGHIIKGAKGADAQQESRVLMLSDKARSDANPILLIDENDVTAGHAASIGQVDPEDLYYLMSRGLNQKTAEQLVIRGFLGTVIAEIPVKEVRDEMIAVIDTKLEKR

SEQ ID NO: 13477 - protein, 1230 aa, Streptococcus agalactiae
ATGACATTACTAGATAGTTATAAACTAAAGCAAGATTTCCCAATTTTAAATCAATTAGTTAATGATGAGCCGCTTATCTATTTAGATAATGCAGCAACGACACAAAAACCGAATCAAGTTTTAGAAACTTTGCGAGATTACTACCAAAATGACAATGCAAATGTCCATCGTGGTGTTCATACTTTAGCAGAACGAGCGACTGCTCAGTACGAGACTGCTCGTGAAAAAGCAAGGCAGTTTTTAAATGCTAAATCAAGTAAAGAAATTTTATTCACACGTGGCACCACAACAGGATTAAATTGGGTAGCTAAGTTTGCCGAAAGTATTTTAGAACGAGGTGATGAGGTACTTATTTCCATTATGGAGCATCATTCTAATATTATCCCATGGCAACAAGCTTGCGAGAGAACTGGTGCTAAATTGGTTTATGCCTATCTAAAAGATGGTTCTTTAGATTTAGAAGATTTCTATAATAAATTATCCTCTAAAACTAAATTTGTTAGTTTGGCACATATCTCAAATGTACTTGGCTGTATTACACCAGTAAAAGCAATAGCAGAACGTGTGCATCAAGTTGGGGCATACATGGTTGTTGATGGAGCTCAATCAGCGCCACATATGGCGATTGATGTTCAAGACCTTGATTGTGATTTCTTCGCCTTATCTGGCCATAAGATGCTTGGTCCTACTGGTATTGGTGTTCTTTATGGGAAAGAAAGCATTTTAGATAAGATGCCACCTGTCGAATTTGGTGGTGAAATGATTGATTTTGTCTATGAGCATAGTGCAACATGGAAGGAATTGCCCTGGAAGTTTGAAGCTGGAACGCCTAATATTGCTGGAGCGATCGCTTTTGGAGAAGCTTTAGATTATTTAACGGATGTTGGTATGGATGAGATTCATCAATATGAACAAAGTTTAGTTTCTTATGTGTTGCCTAAATTACAGGCTATCGATGGTTTAACTATTTACGGACCTAGTGATGCTGAATCTCATGTAGGCGTTATTGCCTTCAATTTAGAAGGTTTACACCCACATGATGTGGCAACTGCAATGGATTACGAAGGAGTGGCTGTTCGTGCAGGTCATCATTGTGCACAACCCCTTATTAATCATCTTGGTATCCATTCGGCGGTTCGAGCAAGTTTCTATTTCTATAATACCAAAGAGGATTGCGACAAATTGGTAGACGCTATCCAAAAAACTAAGGAGTTTTTCAATGGCACTCTC

SEQ ID NO: 13478 - protein, 410 aa, Streptococcus agalactiae
MTLLDSYKLKQDFPILNQLVNDEPLIYLDNAATTQKPNQVLETLRDYYQNDNANVHRGVHTLAERATAQYETAREKARQFLNAKSSKEILFTRGTTTGLNWVAKFAESILERGDEVLISIMEHHSNIIPWQQACERTGAKLVYAYLKDGSLDLEDFYNKLSSKTKFVSLAHISNVLGCITPVKAIAERVHQVGAYMVVDGAQSAPHMAIDVQDLDCDFFALSGHKMLGPTGIGVLYGKESILDKMPPVEFGGEMIDFVYEHSATWKELPWKFEAGTPNIAGAIAFGEALDYLTDVGMDEIHQYEQSLVSYVLPKLQAIDGLTIYGPSDAESHVGVIAFNLEGLHPHDVATAMDYEGVAVRAGHHCAQPLINHLGIHSAVRASFYFYNTKEDCDKLVDAIQKTKEFFNGTL

SEQ ID NO: 13479 - protein, 441 aa, Streptococcus agalactiae
ATGGCACTCTCTAAATTAGATAACCTCTACATGGCGGTGGTAGCTGATCATTCAAAACACCCTCATCATCATGGATTTTTAGAAGGCGTTGAACAAGTGCAGTTAAACAATCCTACATGTGGAGATGTTATTTCCTTATCTGTTAAATTTGATGGGAATATTATTTCAGATATTGCATTTGCTGGTAATGGTTGTACAATTTCTACGGCTTCATCAAGCATGATGACAGATGCAGTTATTGGGAAAACAAAAGAAGAAGCATTGCAGCTTGCTGATGTATTCTCCAAAATGGTTCAAGGCAATCAAAATCCAAAACAAGAGAAACTTGGGGATGCAGAGTTTCTAGCTGGGGTATCAAAATTTCCACAACGTATCAAATGTGCTACGCTTTCGTGGAATGCTTTAAGAAAGGCTATTGAGAGAGATAATCAGGCAGAACTC

SEQ ID NO: 13480 - protein, 147 aa, Streptococcus agalactiae
MALSKLDNLYMAVVADHSKHPHHHGFLEGVEQVQLNNPTCGDVISLSVKFDGNIISDIAFAGNGCTISTASSSMMTDAVIGKTKEEALQLADVFSKMVQGNQNPKQEKLGDAEFLAGVSKFPQRIKCATLSWNALRKAIERDNQAEL

SEQ ID NO: 13481 - protein, 1416 aa, Streptococcus agalactiae
ATGTCCGAAATAAATGAAAAAGTAGAACCACAGCCAATAGATCTTGGGGAATATAAATTTGGATTTCATGACGATGTAAAGCCAATTTATTCTACGGGAAAAGGTCTAAATGAGGCTGTTATTCGTGAGTTATCTGCAGCTAAGGGTGAACCTGAGTGGATGTTGGACTTTCGTCTAAAATCCTTGGAAACGTTTAATAAAATGCCGATGCAGACCTGGGGAGCAGATTTATCAGATATTGATTTTGATGATATTATTTATTATCAAAAAGCATCTGATAAACCTGCGCGTGATTGGGATGATGTTCCAGAAAAAATCAAAGAAACTTTTGAAAGAATTGGGATTCCAGAAGCTGAAAGAGCCTATCTTGCAGGAGCATCAGCACAATATGAATCAGAAGTAGTTTATCACAATATGAAAGAAGAATATGATAAGCTGGGTATTGTTTTTACGGATACTGACTCTGCACTTAAAGAGTACCCAGAGCTATTCAAAAAATATTTTGCTAAACTTGTCCCTCCAACAGATAATAAATTAGCTGCTCTGAACTCTGCTGTATGGTCAGGTGGAACATTTATTTATGTTCCTAAAGGTGTTAAGGTGGATATTCCACTTCAAACTTACTTCCGTATTAATAATGAAAATACTGGACAATTTGAACGTACTCTCATTATTGTTGATGAGGGAGCAAGTGTTCACTATGTTGAAGGTTGTACCGCCCCAACTTATTCTTCAAATAGTTTACATGCAGCTATAGTTGAAATTTTTGCACTTGATGGAGCTTATATGCGCTATACGACTATTCAAAATTGGTCCGATAATGTCTATAATTTAGTGACAAAACGTGCTACCGCTAAAAAAGATGCAACAGTTGAGTGGATAGATGGAAATCTAGGAGCTAAAACAACAATGAAATACCCATCGGTTTACCTTGATGGTGAAGGAGCACGTGGCACGATGTTGTCTATTGCTTTTGCAAACAAAGGACAACACCAAGATACGGGTGCAAAGATGATTCATAATGCCCCCCATACTAGTTCATCCATTGTCTCTAAATCAATTGCTAAGGGTGGGGGAAAAGTTGATTATCGAGGTCAAGTGACATTTAATAAAGATTCCAAAAAATCAGTGTCACATATAGAATGTGACACCATATTGATGGATGATATTTCAAAATCAGATACCATACCGTTTAATGAGATTCATAATTCACAGGTTGCTTTAGAGCATGAAGCAAAGGTGTCTAAGATTTCTGAAGAGCAACTGTACTACTTGATGAGTCGAGGTTTATCTGAAGCTGAAGCAACAGAAATGATTGTTATGGGGTTTGTTGAGCCCTTTACGAAAGAATTACCAATGGAATATGCGGTAGAGTTAAATCGTTTAATTTCCTATGAAATGGAAGGTTCAGTTGGT

SEQ ID NO: 13482 - protein, 472 aa, Streptococcus agalactiae; identical to SEQ ID NO: 308

SEQ ID NO: 13483 - protein, 1185 aa, Streptococcus agalactiae
ATGCCTAAATTAATCGTATCTTTCCTCTGCATTTTATTATCCCTGACTTGTGTAAACTCTGTGCAAGCTGAAGAACATAAAGATATTATGCAAATTACCCGAGAAGCCGGATATGATGTTAAAGATATTAATAAACCTAAAGCGTCTATCGTTATTGACAATAAAGGTCATATTTTGTGGGAAGATAACGCCGATTTAGAACGTGATCCCGCTAGCATGTCTAAAATGTTTACTTTATATTTACTATTTGAAGACTTAGCTAAAGGAAAAACAAACCTCAACACCACAGTGACTGCAACAGAAACAGACCAAGCCATAAGTAAGATTTATGAAATTAGTAATAACAATATTCATGCTGGGGTTGCTTATCCTATTCGTGAACTGATTACTATGACGGCTGTCCCGTCATCTAATGTAGCAACTATTATGATTGCTAACCACTTATCACAAAACAATCCTGACGCCTTTATTAAACGAATCAATGAAACCGCCAAGAAACTCGGTATGACAAAAACTCACTTTTATAACCCCAGTGGGGCGGTAGCGAGTGCTTTTAATGGACTTTACTCCCCAAAAGAATACGATAACAATGCTACTAACGTTACGACTGCACGTGATCTATCAATTTTAACCTATCATTTCCTTAAAAAATACCCTGATATACTGAACTATACAAAATATCCTGAAGTCAAGGCCATGGTCGGAACTCCTTATGAAGAAACATTTACAACTTATAACTACTCTACCCCCGGCGCTAAATTTGGATTAGAAGGAGTAGATGGCTTAAAAACTGGTTCTAGCCCTAGCGCTGCTTTTAATGCCTTAGTTACAGCTAAACGCCAGAATACTCGCTTGATAACTGTGGTTTTAGGAGTTGGCGATTGGTCAGACCAAGACGGAGAGTACTATCGTCATCCGTTTGTCAACGCTCTTGTAGAAAAAGGTTTTAAAGACGCTAAAAATATTTCTTCTAAAACTCCTGTATTAAAAGCCGTTAAACCTAAAAAAGAAGTTACTAAAACCAAAACTAAATCTATTCAAGAACAGCCTCAAACAAAAGAACAGTGGTGGACAAAAACAGATCAATTTATCCAATCACATTTTGTATCTATTTTAATTGTTCTGGGCACCATCGCTAGCCTTTGTCTTTTAGCTGGGATAGTATTACTTATAAAGCGCTCTAGA

SEQ ID NO: 13484 - protein, 395 aa, Streptococcus agalactiae
MPKLIVSFLCILLSLTCVNSVQAEEHKDIMQITREAGYDVKDINKPKASIVIDNKGHILWEDNADLERDPASMSKMFTLYLLFEDLAKGKTNLNTTVTATETDQAISKIYEISNNNIHAGVAYPIRELITMTAVPSSNVATIMIANHLSQNNPDAFIKRINETAKKLGMTKTHFYNPSGAVASAFNGLYSPKEYDNNATNVTTARDLSILTYHFLKKYPDILNYTKYPEVKAMVGTPYEETFTTYNYSTPGAKFGLEGVDGLKTGSSPSAAFNALVTAKRQNTRLITVVLGVGDWSDQDGEYYRHPFVNALVEKGFKDAKNISSKTPVLKAVKPKKEVTKTKTKSIQEQPQTKEQWWTKTDQFIQSHFVSILIVLGTIASLCLLAGIVLLIKRSR

SEQ ID NO: 13485 - protein, 1184 aa, Streptococcus agalactiae
ATGCCAACCATCTCTGCTGAATCTTTTAATGCTTCCGCTAACATGCCTTAGCAGTTGATTTAGATTCAGGAAAAATCTTGTATGAAAAAGATGCTAACAAACCCGCTGCTATTGCTTCCTTGACTAAAATAATGACCGTTTATATGGTCTATAAAGAAATTGATAACGGTAACCTCAAGTGGAATACCAAAGTAAATATATCTGACTACCCTTATCAACTAACACGCGAATCTGATGCTAGTAATGTTCCTTTAGAAAAAAGGCGCTATACTGTTAAACAACTCGTGGACGCTGCCATGATTTCTAGTGCTAACAGTGCAGCCATTGCTTTAGCTGAACATATTTCAGGAACTGAAAGTAAATTTGTTGATAAAATGACTGCTCAATTGGAAAAGTGGGGAATTCATGATAGCCACCTAGTCAATGCTTCTGGCTTAAATAATAGTATGTTAGGCAATCACATTTATCCAAAATCGTCACAAAACGACGAAAATAAAATGAGTGCACGTGATATTGCTATTGCTGCCTACCATTTGGTCAACGAATATCCTTCCATTCTTAAGATTACTAGTAAGTCCGTTGCTAAATTTGATAAAGATATTATGCATTCTTATAACTACATGCTACCAGATATGCCTGTCTTTAGACCAGGTATTACAGGTTTGAAAACTGGGACAACGGAATTAGCTGGCCAATCTTTTATTGCTACATCTACTGAAAGTGGAATGAGACTACTCACTGTTATTATGCATGCTGATAAGGCCGATAAAGACAAATATGCTCGCTTTACAGCAACTAACTCTCTCTTGAACTATATCACAAACACCTACGAACCTAACCTTGTATTAGCTAAAGGAGCTGCATATAAAGGTAAAGAAGCAAGTGTGAGAGACGGAAAAGAACAATCGGTCATCGCTGTTGCTAAAAACGATTTGAAAGTAGTACAGAAGAAAAATATCACTAAACAAAATCAGTTAAAAATTAACTTTAAAAAAGAGCTTACTGCTCCTATTACAAAAAAAGAGAACCTAGGGAAAGCTTATTACGTTGACCTTAATAAGGTTGGAAAAGGCTATCTCATAAAGGAACCTAGCGTTCATTTAGTGGCAAAAGATAGTATTGAGCGCAGTTTCTTCCTCAAAGTGTGGTGGAATCATTTTGTGCGCTACGTTAACGAAAAACTT

SEQ ID NO: 13486 - protein, 395 aa, Streptococcus agalactiae
MPTISAESFNASAKHALAVDLDSGKILYEKDANKPAAIASLTKIMTVYMVYKEIDNGNLKWNTKVNISDYPYQLTRESDASNVPLEKRRYTVKQLVDAAMISSANSAAIALAEHISGTESKFVDKMTAQLEKWGIHDSHLVNASGLNNSMLGNHIYPKSSQNDENKMSARDIAIAAYHLVNEYPSILKITSKSVAKFDKDIMHSYNYMLPDMPVFRPGITGLKTGTTELAGQSFIATSTESGMRLLTVIMHADKADKDKYARFTATNSLLNYITNTYEPNLVLAKGAAYKGKEASVRDGKEQSVIAVAKNDLKVVQKKNITKQNQLKINFKKELTAPITKKENLGKAYYVDLNKVGKGYLIKEPSVHLVAKDSIERSFFLKVWWNHFVRYVNEKL

SEQ ID NO: 13487 - protein, 231 aa, Streptococcus agalactiae
TTGACAGTATCACGCGGTGCAGCTACCGCTGCTCTAAAAAAAGCTGAAGAAACTGATGATGCAGTTGAAGTTATGCGCGCAACTCTCAAAGGTGCTAAGCGTGCTCTTGCTAAAACACCGGATATGCTACCTGTTCTTAAAGAGGTTGGTGTTGTTGATTCTGGTGGTCAAGGACTCGTCTTTATTTACGAAGGTTTCCTCTCAGCACTGGACTTGGGGGGGGGAAAAATT

SEQ ID NO: 13488 - protein, 77 aa, Streptococcus agalactiae
MTVSRGAATAALKKAEETDDAVEVMRATLKGAKRALAKTPDMLPVLKEVGVVDSGGQGLVFIYEGFLSALDLGGGKI

SEQ ID NO: 13489 - protein, 345 aa, Streptococcus agalactiae
TTGCGAGATTACTACCAAAATGACAATGCAAATGTCCATCGTGGTGTTCATACTTTAGCAGAACGAGCGACTGCTCAGTACGAGACTGCTCGTGAAAAAGCAAGGCAGTTTTTAAATGCTAAATCAAGTAAAGAAATTTTATTCACACGTGGCACCACAACAGGATTAAATTGGGTAGCTAAGTTTGCCGAAAGTATTTTAGAACGAGGTGATGAGGTACTTATTTCCATTATGGAGCATCATTCTAATATTATCCCATGGGCACAAGCTTGCGAGAGAACTGGTGCTAAATTGGTTTATGCCTATCTAAAAGATGGTTCTTTAGATTTAGAAGANNNNNTTAAT

SEQ ID NO: 13490 - protein, 115 aa, Streptococcus agalactiae
  VARIANT 112, 113, 114: Xaa = Any Amino Acid
MRDYYQNDNANVHRGVHTLAERATAQYETAREKARQFLNAKSSKEILFTRGTTTGLNWVAKFAESILERGDEVLISIMEHHSNIIPWAQACERTGAKLVYAYLKDGSLDLEXXXN

SEQ ID NO: 13491 - protein, 1404 aa, Streptococcus agalactiae
TTGGCTACTAAAGTTGATGTTTCAAAAGATGGCTTAACTTATACAGCTACATTACGTAAAGGCTTGAAGTGGTCAGATGGCAGTAAACTTACTGCAAAGGATTTTGTTTATTCATGGCAACGTTTAGTTGATCCTAAAACAGCTTCACAATATGCTTACCTTGCTGTTGAAGGGCATGTGCTTAATGCCGATAAAATCAACGAAGGACAAGAGAAAGACTTGAATAAGCTAGGTGTTAAGGCAGAAGGCGATGACAAAGTTGTTATTACTTTATCTAGTCCGTCTCCGCAATTCATCTACTACCTTGCATTCACTAACTTCATGCCACAAAAACAAGAAGTTGTTGAAAAATATGGAAAAGATTACGCAACTACTTCAAAAAATACAGTTTACTCAGGACCATATACTGTTGAAGGTTGGAATGGTTCGAATGGTACTTTCACGCTGAAGAAAAACAAAAATTATTGGGACGCTAAAAATGTAAAAACAAAAGAAGTTCGCATCCAGACTGTTAAAAAACCAGATACCGCCGTTCAAATGTATAAACGTGGTGAGTTAGATGCAGCTAATATCTCAAATACTTCTGCTATTTATCAAGCTAATAAAAATAATAAAGATGTCACAGATGTTCTAGAAGCGACCACTGCCTATATGGAATATAATACTACTGGTTCTGTGAAAGGGCTTGATAATGTTAAGATTCGTCGCGCCTTAAACTTAGCAACTAACCGTAAAGGAGTTGTTCAAGCAGCCGTTGATACAGGCTCAAAACCGGCAATTGCTTTTGCACCTACTGGTTTAGCCAAAACACCAGATGGAACTGATTTGGCAAAATATGTTGCCCCAGGTTATGAATATAATAAAACTGAAGCAGCAAAACTCTTTAAAGAAGGTTTGGCTGAATCAGGCTTGACTAAGCTAAAATTAACAATTACAGCAGATGCTGATGCTCCTGCTGCCAAAAACTCTGTTGACTATATCAAGTCTACTTGGGAAGCTGCTCTTCCAGGACTTACTGTTGAAGAAAAATTTGTAACCTTTAAACAACGCTTAGAAGACAGTAGAAAACAAAACTTTGACATTGTAGTTTCTCTTTGGGGTGGGGATTATCCAGAAGGATCAACTTTCTACGGCCTCTTTAAGTCGGATTCACAAAATAACGATGGAAAATTTGCTAACAAGGACTATGATGCTGCTTATAACAAGGCAATTTCTGAAGATGCGATGAAACCAGCAGAATCAGCGAAGGACTATAAAGAAGCAGAGAAAATTTTATTTGAGCAAGGTGCTTATAACCCACTCTACTTCCGTAGTGGTAAAGGTTTACAAAATCCAAAATTAAAAGGTGTTATTCGTAATACTACAGGTTTGTCAATAGACTTTACACATGCTTATAAAAATAAT

SEQ ID NO: 13492 - protein, 468 aa, Streptococcus agalactiae
MATKVDVSKDGLTYTATLRKGLKWSDGSKLTAKDFVYSWQRLVDPKTASQYAYLAVEGHVLNADKINEGQEKDLNKLGVKAEGDDKVVITLSSPSPQFIYYLAFTNFMPQKQEVVEKYGKDYATTSKNTVYSGPYTVEGWNGSNGTFTLKKNKNYWDAKNVKTKEVRIQTVKKPDTAVQMYKRGELDAANISNTSAIYQANKNNKDVTDVLEATTAYMEYNTTGSVKGLDNVKIRRALNLATNRKGVVQAAVDTGSKPAIAFAPTGLAKTPDGTDLAKYVAPGYEYNKTEAAKLFKEGLAESGLTKLKLTITADADAPAAKNSVDYIKSTWEAALPGLTVEEKFVTFKQRLEDSRKQNFDIVVSLWGGDYPEGSTFYGLFKSDSQNNDGKFANKDYDAAYNKAISEDAMKPAESAKDYKEAEKILFEQGAYNPLYFRSGKGLQNPKLKGVIRNTTGLSIDFTHAYKNN

SEQ ID NO: 13493 - protein, 912 aa, Streptococcus agalactiae
ATGATTAAATATATTTTAAAGCGTGTTGCTATTTTGTTAGTAACGCTATGGGTTGTCATAACCCTATCGTTCTTTCTGATGCAGATCCTTCCAGGAACACCCTACAATAATCCAAAACTCACTGAAGAAATGATCACATTGCTTAATAAACAGTATGGTTTAGACAAGCCTGTATGGCAACAATATTTGACTTACCTTTGGAATGTACTTCATGGTGATTTTGGAACGAGTTATCAATCAGTGAATCAGCCAGTATCACGTATGATTAGCTTGAGATTAGGAGTTTCAGTACATCTAGGTGTTCAGGCTCTCGTATTTGGTGTTTTAGGCGGTATTTTGGTAGGAGCTATTTCGGCACGTCATAAGAATGATAAAGTCGATGGTATCTTAAGTGTTATTGCAACGCTAGGGATTTCTATGCCTTCATTTATCATTGGTATCTTATTATTAGACTATTTTGGATTTAAGTGGAACTTGTTGCCTTTATCAGGTTGGGGGACTTTCTCTCAAACAATTTTACCTTCTTTAGCTCTAGGACTCCCTACATTAGCATCTGTTTCACGCTTCTTCCGTAGTGAAATGATTGAAACTTTAAATTCTGATTATGTGCAACTAGCTCGTTCAAAAGGTATGACAATTCGTCAAGTAACTCGAAAACATGCTTACCGTAATTCTATGATTCCAATTTTAACTCTAATTGGCCCTTTGGCGGCGGGTCTGTTAACTGGTTCTGCACTAATTGAGCAGATTTTCTCGATTCCAGGAATTGGGCAGCAGTTTGTTACTTCGATTCCAACAAAAGACTATCCTGTTATTATGGGGACAACCATTGTTTATGCAGTAATGTTGATGGTTGCTATCTTGATAACAGACGTTGTTATTAGTATCGTAGACCCACGTGTTCGCTTGCAG

SEQ ID NO: 13494 - protein, 304 aa, Streptococcus agalactiae
MIKYILKRVAILLVTLWVVITLSFFLMQILPGTPYNNPKLTEEMITLLNKQYGLDKPVWQQYLTYLWNVLHGDFGTSYQSVNQPVSRMISLRLGVSVHLGVQALVFGVLGGILVGAISARHKNDKVDGILSVIATLGISMPSFIIGILLLDYFGFKWNLLPLSGWGTFSQTILPSLALGLPTLASVSRFFRSEMIETLNSDYVQLARSKGMTIRQVTRKHAYRNSMIPILTLIGPLAAGLLTGSALIEQIFSIPGIGQQFVTSIPTKDYPVIMGTTIVYAVMLMVAILITDVVISIVDPRVRLQ

SEQ ID NO: 13495 - protein, 1029 aa, Streptococcus agalactiae
ATGGCAGATAAAAACAGAACATTTAAACTTGTAGGTGCAGGATCTTCTAGCACACAAGAAAAAATTGAAAAGCCTGCTCTTTCGTTTATGCAAGATGCGTGGCGTCGCTTGAAAAAAAACAAATTAGCAGTAGTTTCACTCTATTTATTAGCTCTTTTACTTACTTTTTCGTTAGCCTCAAATTTATTTGTAACTCAGAAGGATGCTAATGGGTTTGATTCGAAAAAAGTAACGACATATCGCAACTTACCACCTAAATTGAGTTCAAACCTTCCTTTTTGGAATGGTAGCATTAAGTACGCTGGAAATACAGAATCTACAGACGCTTATAAGTCTCAAAATGTCCCTGAAAAAGTTAAGTATGCTTTAGGTACAGATTCTCTAGGGAGAAGTGTTGCTAAGCGCATCATCGTAGGTATTCGAATTTCCTTACTTGTAGCTATTGCAGCTACATTCATTGATTTAATTATCGGTGTTACATACGGTCTTGTTTCAGGTTTTGCTGGAGGACGCCTTGATACATTAATGCAACGTGTCGTAGAGGTAATTTCATCAATTCCAAACTTAGTTATTGTTACAATGTTAGGTTTGGTCCTTGGTAACGGTATTACGGCTATTATTATCTCTATTGCTTTTACCGGATGGACTTCTATGTCTCGTCAGGTAAGGAATTTAACCCTATCATATCGAGAAAGAGAGTTTGTGCTTGCTGCACGTTCACTTGGGGAAAGTCCAATTAAAATAGCCTTCAAACATATTTTACCTAACATTTCTGGTATTATCATTGTACAAATTATGATGACAATCCCAAGTGCTATTATGTATGAAGCGGTACTTTCAGCAATCAATTTAGGTGTTAAACCACCGACAGCTTCATTAGGATCATTGATTTCAGATGCACAAGAAAATTTACAATATTATCCATATCAAGTTATCTTGCCAGCTTTAGCATTGGTAATGATTTCATTGGCATTTATTTTGCTTGGTGATGGGTTGCGAGATGCTTTTGATCCAAAATCTAGCGATGAA

SEQ ID NO: 13496 - protein, 343 aa, Streptococcus agalactiae
MADKNRTFKLVGAGSSSTQEKIEKPALSFMQDAWRRLKKNKLAVVSLYLLALLLTFSLASNLFVTQKDANGFDSKKVTTYRNLPPKLSSNLPFWNGSIKYAGNTESTDAYKSQNVPEKVKYALGTDSLGRSVAKRIIVGIRISLLVAIAATFIDLIIGVTYGLVSGFAGGRLDTLMQRVVEVISSIPNLVIVTMLGLVLGNGITAIIISIAFTGWTSMSRQVRNLTLSYREREFVLAARSLGESPIKIAFKHILPNISGIIIVQIMMTIPSAIMYEAVLSAINLGVKPPTASLGSLISDAQENLQYYPYQVILPALALVMISLAFILLGDGLRDAFDPKSSDE

SEQ ID NO: 13497 - protein, 1021 aa, Streptococcus agalactiae
ATGGAAAAAGAAACTATTTTAAGTGTTAATAATCTTCATGTTGACTTCCACACATATGCTGGAGAAGTAAAAGCAATTCGTGATGTCAACTTTGAATTAAAAAAAGGTGAGACTCTTGCAATCGTTGGTGAATCTGGTTCAGGAAAATCTGTAACTACCAGAACTTTAATTGGTTTAAATGCTAAAAATTCAGAGATATCAGGGAATGTTCAATTTAAGGGGCGTAACCTTGTTGAACTATCAGAAGAAGAGTGGACTAAGGTACGCGGGAATGAGATTTCTATGATTTTCCAAGACCCTATGACTAGTTTGGATCCAACGATGAAAATTGGTATGCAAATAGCGGAGCCAATGATGATTCATCAAAAAATTTCAAAAAAGGATGCTTTAAAATTAGCTCTTGAGCTAATGAAAGATGTAGGTATCCCAAATGCTGAAGAGCATATTAACGATTACCCACATCAGTGGTCTGGAGGAATGCGTCAACGTGCGGTTATAGCGATTGCTTTAGCTGCTGATCCTGAAATTCTTATTGCTGATGAACCAACGACTGCTTTAGATGTAACAATTCAAGCACAAATTTTAAACTTAATGAAAAAAATTCAAGCAGAACGAGACTCCTCCATTGTTTTCATAACTCATGACTTAGGGGTCGTTGCAGGGATGGCAGACCGTGTAGCAGTTATGTATGCAGGGAAAATCGTTGAATTTGGAACTGTTGATGAAGTCTTTTATAATCCACAACATCCATATACTTGGGGATTATTGAATTCAATGCCGACACCGAAACAGAATCAGGTAGTTTAGAGTCAATTCCGGGAACACCACCAGATTTGTTGAACCCACCTAAAGGAGATGCATTTGCAGCTCGTAATGAATTTGCATTAGATATTGATCATGAAGAAGAACCACCGTACTTCAAAGTTTCAGAAACACATTTCGCTGCTACATGGCTTTTAGATGAAAGATCACCTAAGGTGCTTCCTCCATTAGATCCAAACGGGGAAAAATGGAACGAGAT

SEQ ID NO: 13498 - protein, 342 aa, Streptococcus agalactiae
MEKETILSVNNLHVDFHTYAGEVKAIRDVNFELKKGETLAIVGESGSGKSVTTRTLIGLNAKNSEISGNVQFKGRNLVELSEEEWTKVRGNEISMIFQDPMTSLDPTMKIGMQIAEPMMIHQKISKKDALKLALELMKDVGIPNAEEHINDYPHQWSGGMRQRAVIAIALAADPEILIADEPTTALDVTIQAQILNLMKKIQAERDSSIVFITHDLGVVAGMADRVAVMYAGKIVEFGTVDEVFYNPQHPYTWGLLNSMPTTETESGSLESIPGTPPDLLNPPKGDAFAARNEFALDIDHEEEPPYFKVSETHFAATWLLDERSPKVLPPFTIQNVGKMERD

SEQ ID NO: 13499 - protein, 705 aa, Streptococcus agalactiae
GTGATCTCACATCTGAAAGGTAAAGCATTACATAGTTTTCGTAAAGACGCTCAGATGATTTTCAGGGATCCTCAGGCTAGCTTAAACGGCCGTATGAAGATTCGTGATATCGTAGCAGAAGGTTTAGACATACATAAATTAGCTAAATCAAAATCAGATCGTGATAGTAAAGTTCAGGCCCTATTAGATCTTGTAGGGTTAAATAAAGATCATTTAACACGTTATCCGCATGAATTTTCAGGTGGACAACGACAACGTATCGGGATTGCACGTGCTTTAGCAGTAGAGCCTAAATTTATCATTGCTGATGAACCAATATCTGCCTTAGATGTTTCAATCCAAGCACAAGTTGTTAATTTAATGCAAAAATTGCAAAGAGAACAAGGATTGACTTATTTGTTTATCGCACATGATTTGTCTATGGTAAAATACATTTCAGATCGTATCGGTGTTATGCATTGGGGGAAACTGTTAGAAGTTGGAACATCTGATGATGTTTATAACAAACCAATCCACCCTTATACGAAGAGTCTATTATCAGCTATTCCAGAACCAGATCCGGAGAGTGAACGTCAACGTGTTCACCAGCCGTATAATCCAGCTATTGAGCAAGACGGACAAGAACGTCAAATGCACGAGATTACACCTGGTCATTTTGTTTTATCTACACCCCAAGAAGCTGAAGAATATAAAAAACAAATATTA

SEQ ID NO: 13500 - protein, 235 aa, Streptococcus agalactiae
MISHLKGKALHSFRKDAQMIFRDPQASLNGRMKIRDIVAEGLDIHKLAKSKSDRDSKVQALLDLVGLNKDHLTRYPHEFSGGQRQRIGIARALAVEPKFIIADEPISALDVSIQAQVVNLMQKLQREQGLTYLFIAHDLSMVKYISDRIGVMHWGKLLEVGTSDDVYNKPIHPYTKSLLSAIPEPDPESERQRVHQPYNPAIEQDGQERQMHEITPGHFVLSTPQEAEEYKKQIL

SEQ ID NO: 13501 - protein, 312 aa, Streptococcus agalactiae
ATGAAAATTTTTGAGAAAGCTCCTGCCAAACTTAATTTAGGATTAGATATTAAAGGACGATGTGACGATGGTTATCATGAATTAGCTATGATTATGGTTAGTATTGATCTTAATGACTACGTTACCATTTCTGAGCTAAAGGAAGATTGTATTGTTATCGATTCTGATAGTAGCAAAATGCCTTTAAATAATGATAATGATGTGTTTAAAGCTGCAGATATAATCAAAAATCAATATGGTATTAATAAAGGTGTTCATATTAGATTAGAAAAATCCATTCCTATCTGTGCAGGACTGGGGGGGGGGGTCTAC

SEQ ID NO: 13502 - protein, 104 aa, Streptococcus agalactiae
MKIFEKAPAKLNLGLDIKGRCDDGYHELAMIMVSIDLNDYVTISELKEDCIVIDSDSSKMPLNNDNDVFKAADIIKNQYGINKGVHIRLEKSIPICAGLGGGVY

SEQ ID NO: 13503 - protein, 522 aa, Streptococcus agalactiae
GTGCAGGACTGGGGGGGGGGGTCTACTGATGCTGCTGCTACAATAAGAGCTCTTAATCGATTATGGAATCTTCAAATGGGCCATGACGAAATGGTTGCTATTGGTTTTAAAATTGGTAGTGATGTTCCTTATTGCCTTGGTGGGGGATGTTCGTTAGTATTAGGTAAAGGTGAAATTGTTAAACCCTTACCGACATTGAGACCATGTTGGATAGTTCTGGTTAAGCCGGATTTTGGTATTTCACTAAATCCATTTTTAGAGATATTGATGTAAGTCTATAAGCAGAGTTGATATTGATTTATTAAAGTCTGCTATTTTGTCATCGATTATCAGTTAATGGTCAAATCTATGGGAAATTCACTCGAGGATATTACAATTACTAAAAATCCAGTTATAAGTACAATAAAAGAACGTATGTTAAATTCTGGAGCCGATGTTGCATTAATGACAGGAAGTGGACCAACTGTTTTTTCAATGTGTTCTACAGAGAAAAAAGCTGATCGTGTTTTTAANNNNNTTAAT

SEQ ID NO: 13504 - protein, 175 aa, Streptococcus agalactiae
  VARIANT 82, 91, 172, 173, 174: Xaa = Any Amino Acid
MQDWGGGSTDAAATIRALNRLWNLQMGHDEMVAIGFKIGSDVPYCLGGGCSLVLGKGEIVKPLPTLRPCWIVLVKPDFGISXKSIFRDIDXKSISRVDIDLLKSAILSSDYQLMVKSMGNSLEDITITKNPVISTIKERMLNSGADVALMTGSGPTVFSMCSTEKKADRVFXXXN

SEQ ID NO: 13505 - protein, 441 aa, Streptococcus agalactiae
ATGACAGTTTTAGAACAAAAATTAGACCATTTAGTGAGTCAAATCTTGCTTAAGGCAGAAAATCAACATGAATTATTGTTTGGTACTTGTCAAAGTGATGTAAAATTGACTAATACGCAAGAACACATTCTGATGCTTTTATCACAAGAGCAGTTGACAAATTCTGATTTAGCTAAGAAGTTAAATATTAGTCAGGCAGCTGTAACTAAAGCAGTAAAAAGTTTAATTTCTCAGGATATGTTGAAAGCGAATAAAGATTCTAAAGATGCTCGTATTACTTATTTTGAGTTATCTGAACTTGCTAAACCCATTGCAGATGAACACACACATCATCATGACAATACGTTAGGGGTTTACGGAAGATTAGTAAATCATTTTTCAAAGGACGAAAAGGTCGTTTTAGAACGTTTTCTTGATCTTTTCTCTAGAGAATTAGAAGGG

SEQ ID NO: 13506 - protein, 147 aa, Streptococcus agalactiae; identical to SEQ ID NO: 326

SEQ ID NO: 13507 - protein, 708 aa, Streptococcus agalactiae
ATGCGATATATTACAGTTAGTGGTCTTACTTTTCAGTATGATAGCGATCCTGTGCTGGAAGGGGTTAATTACCATTTAGACAGTGGGGAGTTTGTTACCTTAACAGGTGAAAATGGGGCTGCTAAATCAACTTTAATAAAGGCTACTTTAGGTATTTTAACGCCCAAAGTGGGTACAGTTAATATCTCTAAAGAAAACAAAGAAGGAAAAAAATTACGTATTGCCTATTTACCTCAACAGATTGCAAGTTTTAACGCTGGCTTTCCATCGTCAGTTTATGAATTTGTGAAATCTGGACGATACCCTAGAAATGGTTGGTTTAGAAGACTGACTAAACATGATGAAGAACATATTAGGGTTAGTTTAGAAGCTGTTGGTATGTGGGATAATCGCCATAAAAAGATAGGAAGTTTATCTGGCGGTCAAAAGCAGAGGGCTGTCATTGCTAGGATGTTTGCTTCTGATCCAGATATTTTTGTATTGGATGAGCCAACAACTGGTATGGACGCAGGGACTACTGAGAAATTTTATGAGTTAATGCATCATAATGCTCATAAGCATGGTAAGTCTGTTTTGATGATTACTCACGATCCTGATGAAGTAAAGGGGTATGCTGACCGAAATATTCATCTTGTTAGGAACCAATCTTTACCATGGCGTTGTTTCAATGTCCATACAAACGAAATGGAGGTTGAATCAGATGCTACT

SEQ ID NO: 13508 - protein, 236 aa, Streptococcus agalactiae; identical to SEQ ID NO: 328

SEQ ID NO: 13509 - protein, 810 aa, Streptococcus agalactiae
ATGCTACTTGATATGCTTTCCTATGATTTTATGCAACGAGCGCTCTTAGCAGTTGTGGCTATTAGTATTTTTGCTCCAATTTTAGGCATCTTCCTAATTTTACGTCGTCAGAGTTTGATGAGTGATACTTTGAGCCACGTTTCCTTAGCCGGTGTTGCATTAGGCGTTGTTTTAGGTATCTCGCCTACGTGGTCAACTATTTTCGTTGTTACTTTGGCGGCAGTTGTATTAGAGTATTTGCGTACTGTATACAAACATTATATGGAAATATCAACTGCTATCCTGATGTCGATGGGGTTGGCTATATCTTTAATCGTTATGAGTAAAGCTCATAATGTTGGTAATGTCAGTCTTGAACAGTATTTATTTGGTTCTATTATCACTATTGGGAAGGAACAAGTGATTGCTTTGTTTGTTATTGCATTAATCACTTTTATTTTAACCATCCTATTTATTAGACCAATGTATATATTAATGTTTGATGAGGATACAGCTTTTGTAGATGGATTGCCTGTGCGTACAATGTCTATTTTGTTCAATGTTGTTACAGGTATTGCTATTGCGTTAACAATTCCTGCCGCAGGTGCTCTATTGGTGTCAACTATTATGGTTTTACCAGCTAGTATTGCTATGCGGTTAGGTCGAAATTTTAAAACTGTTATTTTTCTTGGGATGTTAATTGGATTTGTGGGAATGGTAGCTGGTATTTTCCTTTCTTATTATTGGGAGACACCTGCTAGTGCAACAATAACGATGATTTTTATTGGCATTTTCCTATTAGTTAGCTTAGTAGGCTTGCTTCGCAAACGT

SEQ ID NO: 13510 - protein, 270 aa, Streptococcus agalactiae
MLLDMLSYDFMQRALLAVVAISIFAPILGIFLILRRQSLMSDTLSHVSLAGVALGVVLGISPTWSTIFVVTLAAVVLEYLRTVYKHYMEISTAILMSMGLAISLIVMSKAHNVGNVSLEQYLFGSIITIGKEQVIALFVIALITFILTILFIRPMYILMFDEDTAFVDGLPVRTMSILFNVVTGIAIALTIPAAGALLVSTIMVLPASIAMRLGRNFKTVIFLGMLIGFVGMVAGIFLSYYWETPASATITMIFIGIFLLVSLVGLLRKR

SEQ ID NO: 13511 - DNA, 501 bp, Streptococcus agalactiae
gtgactccaatatacgaaggaaataatttagtacctagccgagttgaacttcagtatgttggaattgataaacaaggaaaacttctagaaatcaaattaggcggcggcaaagaacaagttgatgaatacggcgtcacaactgttacattagaaaatacgtctccactcgcaaaaattgattacaaaactggtatgctaatcaaagaagatgggaaacaggcagaagaaggtgaagatccaaatagcgatgctgatgaaaacgaagcagctattgaaggtgcatctgatatagaagaaaatgctaacactaatacttctgaatcagatacaaataatgtagctcccaaaaatagaatcgtctacgttgcaaataagggtcgttcaaatacttattggtatagtttagaaaacataaaaaatgcaaataccgctaatatcgttcaaatgactgaacaagaagcgttaaatcaacacaaatatcacagcactactgaagcacaa

SEQ ID NO: 13512 - protein, 167 aa, Streptococcus agalactiae
MTPIYEGNNLVPSRVELQYVGIDKQGKLLEIKLGGGKEQVDEYGVTTVTLENTSPLAKIDYKTGMLIKEDGKQAEEGEDPNSDADENEAAIEGASDIEENANTNTSESDTNNVAPKNRIVYVANKGRSNTYWYSLENIKNANTANIVQMTEQEALNQHKYHSTTEAQ

SEQ ID NO: 13513 - DNA, 1257 bp, Streptococcus agalactiae
atgaatatttttgatgaactcaaagaacgtggactcgtttttcagacaactgacgaagatgctttacgcaaagctcttgaagaaggttctgtctcttactatactggctacgatcctacggctgacagccttcatcttggacatttagttgctattttaacctctcgtcgcttacaacttgctggtcacaagccttatgcacttgtgggaggcgcaactggacttattggggacccttcatttaaagatgttgagcgcagtttacaaacaaagaaaactgtagttagttggggtaataaaatccgcggtcaattatctaattttctagagtttgaaacaggtgataacaaagctgtattggtaaataattatgattggttcagcaatattagtttcattgatttcttacgagatgttggtaaatattttactgtcaattatatgatgagtaaagaatctgttaaaaaacgtatcgaaacagggatttcctatactgaatttgcttatcaaattatgcaaggatatgacttttacgaattaaataagaactataatgtcactttgcaaattggtggttctgaccaatggggcaacatgactgctggaaccgaacttattagacgaaaatcaaatggtgtatctcatgttatgactgttccattgataacagattctacaggaaaaaaattcggaaaatctgaaggaaatgctgtttggcttgatgctgacaaaacctctccttatgaaatgtaccaattttggctcaatgttatggatgctgatgccgttcgcttccttaagatttttacattcctaagccttaaagaaatagaagatatacgtattcaattcgaggaagcacctcaccaacgcttagcacaaaaaacactagcacgtgaagttgtaactcttgttcatggtgaaaaagcttataaggaggccgttaatatcacggaacagctatttgctggcaatataaaaggattgtctgttaaagagctcaaacaaggtttacgtggagtaccaaattatcacgttcagacggaagataacctcaatatcatagaccttctagtcacttcaggagttgtcaattctaaacgtcaagctcgagaagatgtctccaatggagctatttatattaatggagatcgtattcaagatttagaatatactatctcagaaaatgataagcttgaaaatgaaattacagtcattcgtcgtggaaagaaaaaatactttgtattaaactttaaa

SEQ ID NO: 13514 - protein, 419 aa, Streptococcus agalactiae; identical to SEQ ID NO: 334

SEQ ID NO: 13515 - DNA, 513 bp, Streptococcus agalactiae
  misc_feature 500, 501, 502, 503, 504: n = A,T,C or G
atgtttaaaggtaataagaagttgaatagttctaaattaggtgattacacaccacttgaatttggttctatttttttaagaattgtaaagcttttatcagatttcatctatgttattattttactatttgttatgctcggagtaggacttgcagtagggtatcttgctagtcaagttgactctgttaaagtaccaagtaaaaatagtttagtgacacaagttaatacacttactagggtgtctaggttaacttattctgataaatcacaaatttcagagattgccactgatttacaacgtacaccagtggcaaaggatgctatatctgataatattaaaaaggctatcattgcaacagaggacgaaaatttcaatgaccataaaggtgtagttcccaaagccgtactacgtgctgcagcgggatctgttctggggtttggagagagtagcggtggttcaacgctgacacaacaattattaaagcagcaaatttttgggannnnnttaattaat

SEQ ID NO: 13516 - protein, 171 aa, Streptococcus agalactiae
  VARIANT 167, 168: Xaa = Any Amino Acid
MFKGNKKLNSSKLGDYTPLEFGSIFLRIVKLLSDFIYVIILLFVMLGVGLAVGYLASQVDSVKVPSKNSLVTQVNTLTRVSRLTYSDKSQISEIATDLQRTPVAKDAISDNIKKAIIATEDENFNDHKGVVPKAVLRAAAGSVLGFGESSGGSTLTQQLLKQQIFGXXLIN

SEQ ID NO: 13517 - DNA, 1884 bp, Streptococcus agalactiae
gtgctgcagcgggatctgtctgggtttggagagagtagcggtggttcaacgctgacacaccaattattaaagcagcaaatttggggagatgatccgtcatttaaacgcaaatcaaaagaaattatttatgctctagcattagagcgttacatggataaggattcgattttatcagattatttaaatgtatcaccgtttggtcgcaataacaaaggacagaatattgcaggtattgaagaagcagcacaagggatttttggagtttccgcaaaagatttaacaattcctcaggcagctttccttgcaggtttaccgcaaagtcctattgtatattctccttatactgcagatgcccagttgaaatcagataaagatcttagttttggtataaagcgccaaaaaaatgtgttatacaatatgtatagaacgagagctttaaccaaagatgagtacaaatcctacaaagattatgacatcaaaaaagattttatcaaacctgcagtggcgacaacaaatcatcatgattatctttactactcggcattatctgaagctcaaaaagtgatgtacaattacctcattaaaaaggataatgtttcagagcatgatttaaaaaatgatgagactagagcgacgtacagacaccgcgctattgaagagattcaacagggagggtatactattaaaactactatcaataaatctgtttatcaagccatgcaggatgctgcagctcaatacggagggttgttagatgatggtactggcaaggttcaaatgggaaatgtactaacggacaattctagtggtgctattataggatttattggtggtcgtaactatagtgagaatcaaaataaccatgcttttgatacggcacgctctccagggtcaagtattaaaccgatattaccttacggaattgctattgatcaagggatgttaggaagtggtagtgttctttcaaattatccaacgacatattcaagtggcgaaaagattatgcatgcggatgaagaaggtactgctatggttaaccttcaagagtcattggacatttcttggaacattccagctttctggacttacaagatgctacgagatcgaggcgttgatgtaaaaaactatatggagaaattagactatccaattgaaaactttggtatagaaagtttaccacttggtggtggtattgatacgtcagttgctcagcaaacaaacctttatcaaatgattgcaaatggtggtgtttatcataagcagtatatgatagaaagtatagaggatagtaatgggaaagtgatttataatcacgaaagtaaacctgtccgtgtcttttcgaaagcaacagctactatcttacagcagctattacatggaccaattaactccggaaagactacaacctttaaaaatcgcttacaaggtttaaatagtggtttagctggggtagattggattggaaaaacgggtactactaactcaacttctgatgtttggttgatgctttctacacctaaagtgactttaggtggatgggcaggacatgataataatgcctctttagcgaaattgacaggttacaataataatgctaattatatggctcacttggttaatgctattaataatgcagatggcaatacttttggtaagtcagaaaggtttagacttgatgatagcgttataaaagctaaagttcttaagtctacaggtttacagccaggtgtagtaacagtaaacggtcgtcgaatcactgttggaggtgaaagcacaacaagttattgggcaaaaaatggacctggaacgatgacctatcgttttgctattgggggaaccgatagtgattatcaaaaagcttggtctactttgggtggaaaacga

SEQ ID NO: 13518 - protein, 628 aa, Streptococcus agalactiae
MLQRDLSGFGESSGGSTLTHQLLKQQIWGDDPSFKRKSKEIIYALALERYMDKDSILSDYLNVSPFGRNNKGQNIAGIEEAAQGIFGVSAKDLTIPQAAFLAGLPQSPIVYSPYTADAQLKSDKDLSFGIKRQKNVLYNMYRTRALTKDEYKSYKDYDIKKDFIKPAVATTNHHDYLYYSALSEAQKVMYNYLIKKDNVSEHDLKNDETRATYRHRAIEEIQQGGYTIKTTINKSVYQAMQDAAAQYGGLLDDGTGKVQMGNVLTDNSSGAIIGFIGGRNYSENQNNHAFDTARSPGSSIKPILPYGIAIDQGMLGSGSVLSNYPTTYSSGEKIMHADEEGTAMVNLQESLDISWNIPAFWTYKMLRDRGVDVKNYMEKLDYPIENFGIESLPLGGGIDTSVAQQTNLYQMIANGGVYHKQYMIESIEDSNGKVIYNHESKPVRVFSKATATILQQLLHGPINSGKTTTFKNRLQGLNSGLAGVDWIGKTGTTNSTSDVWLMLSTPKVTLGGWAGHDNNASLAKLTGYNNNANYMAHLVNAINNADGNTFGKSERFRLDDSVIKAKVLKSTGLQPGVVTVNGRRITVGGESTTSYWAKNGPGTMTYRFAIGGTDSDYQKAWSTLGGKR

SEQ ID NO: 13519 - DNA, 3573 bp, Streptococcus agalactiae
ttggcaggacatgaagttcagtacggaaaacaccgtacacgtcgtagcttttcaagaattaaggaagttcttgatttaccaaacttaattgaaattcaaactgattcattccaagattttcttgatgctggcttgaaagaagtatttgaggatgtacttccaatttcaaactttacagatactatggatcttgaatttgttggttatgaattaaaagaacctaaatatactttggaagaagctcgtatccatgatgctagctactcagcacctatttttgttactttccgtttagttaataaagaaactggtgaaattaaaactcaagaagttttctttggtgattttccaattatgactgaaatgggtactttcatcatcaatggtggtgaacgtatcattgtttcacaattagtccgttctcctggtgtttactttaatgataaggtagataaaaatggaaaagttggttatgggtcaactgttatccctaaccgtggagcttggttggaacttgagacagacgcaaaagatattgcttatacacgtatcgaccgcacacgtaaaattccatttacaacactagtccgtgcacttggtttctctggagacgatgaaattgttgacatctttggtgacagtgaacttgttcgcaatactattgaaaaagacattcataaaaatccaagtgattctcgtacagatgaagcacttaaagaaatctatgaacgtcttcgtccaggtgaaccaaaaactgcagacagctcacgtagtcttttagttgcacgtttctttgatccacgtcgttatgacttagcggctgttggtcgttataagattaataaaaaactgaatcttaaaacacgcctattgaaccaaacaatcgctgaaaatttagttgatggtgaaacaggagagattcttgttgaagctggaaccgttatgacacgagatgtcattgattcaattgcagagcatatcgatggagacttaaacaagtttgtctacacaccaaatgattatgctgtagttactgaaccagttattcttcaaaaattcaaagttgttgctccaactgatccagaccgtgttgttactattgttggaaactcaaatcctgaagataaagttcgtgccttaactcctgcagatattttagcagagatgtcatacttcttaaaccttgcagagggtatcggtaaggtagatgacattgaccatttaggtaaccgtcgtattcgtgcagttggtgaattacttgcgaaccaattccgtatcggacttgctcgtatggaacgcaatgtccgcgaacgtatgtctgtacaagacaatgaagtcttgacacctcaacaaatcattaacattcgtccagtgactgccgctgttaaagaattctttggttcatcacagctgtcacaattcatggaccaacacaaccctctatcagaattgtcgcacaaacgccgtctctctgccttaggacctggtggtttgacacgtgaccgtgctggatatgaagttcgtgacgtgcactatacccactatgggcgcatgtgtccaattgaaacacctgaaggtccaaacattggtttgattaataacttatcttcatttggacacctcaataaatatggatttattcaaacaccatatcgtaaagtagatcgttctactggtgcggtaacgaacgaaattgtttggttgactgctgatgaagaagatgaatttacagttgcacaagccaactctaagcttaacgaagacggtacatttgcagaagaaatcgttatgggtcgtcatcaaggtaataaccaagagtttccttcaagcattgttgactttgttgacgtgtcacctaagcaagtagttgctgtcgcaacagcatgtattcctttcttggaaaatgatgactctaaccgtgccttgatgggtgccaacatgcaacgtcaggctgtgccattgattgatccaaaagcaccatatgttggtactggtatggagtatcaagcagcccacgattcaggtgcagctgtgattgctaaacatgacggtcgtgttattttttcagatgctgaaaaagttgaagtgcgtcgcgaagatggttctcttgatgtttatcatgttcaaaaattccgccgttcaaactcaggtactgcttataaccaacgtaccttagttaaagttggtgatctcgttgaaaaaggtgattttatcgccgacggaccatctatggaaaatggtgaaatggctcttggacaaaacccagttgttgcttatatgacttgggaaggttataacttcgaggatgccgttatcatgagtgagcgccttgtgaaagaagacgtctatacatctgttcacttggaagaattcgaatctgaaacgcgtgatacaaagcttgggcctgaagaaattactcgtgaaattccaaatgttggtgaagattcactacgtgatctcgatgaaatgggaattatccgcattggtgctgaggtaaaagaaggtgacattcttgttggtaaggtaacgcctaagggtgaaaaggacttatctgctgaagaacgtctcttgcatgccatttttggtgataaatcacgtgaagttcgtgatacttcactacgtgtacctcacggtggcgatggagtagttcgtgacgttaaaatctttactcgtgcaaatggtgatgaattgcaatcaggtgttaatatgcttgtccgcgtttatatcgctcaaaaacgtaaaatcaaagtcggtgataagatggccggtcgtcacggaaacaaaggtgtcgtctcacgtattgttcctgttgaagatatgccttatttaccagatggaacgccagttgatatcatgttgaacccacttggggtgccatcacgtatgaatatcggacaagttatggagcttcatttaggtatggctgctcgtaatttaggtattcatattgcaacaccagtctttgatggggcttcttcagaagacctttgggaaactgttcaagaagcaggtatggattcagatgctaagactgttctttatgatggtcgtactggtgaaccattcgataaccgtgtgtcggttggtgtcatgtacatgatcaaacttcaccacatggttgatgataaacttcatgcccgttcagtaggaccatactcacttgttactcaacaaccacttggaggtaaagctcaatttggtggacaacgttttggtgagatggaggtttgggcgcttgaagcttatggagcttcaaatgttcttcaagaaattttaacatacaaatctgatgatgttacaggacgtcttaaagcttatgaagctatcacaaaaggtaagccaattccaaaaccaggtgttccagaatcattccgtgttcttgtaaaagaattgcaatcacttggtcttgatatgcgtgtccttgatgaagatgacaacgaagttgaactccgtgatcttgatgaaggtgaagatgatgatgtgatgcacgttgatgaccttgaaaaagcgcgtgtgaaacaagaagctgaagaaaaacaagctgaacaagtatctgaagtcgttcaagaagat

SEQ ID NO: 13520 - protein, 1191 aa, Streptococcus agalactiae; identical to SEQ ID NO: 338

SEQ ID NO: 13521 - protein, 3678 aa, Streptococcus agalactiae
ATGATGATAAATCGAAGAAAGGTAAAACTAGTGGTTGACGTAAATCGTTTTAAAAGTATGCAAATCACATTAGCATCACCAAGTAAGGTCCGTTCATGGTCTTATGGTGAAGTTAAAAAACCTGAAACAATCAACTACCGCACATTGAAACCAGAACGTGAAGGACTTTTTGATGAAGTTATTTTTGGTCCAACAAAAGATTGGGAATGTGCGTGTGGAAAATACAAACGTATTCGTTACAAAGGAATCATTTGTGACCGTTGTGGCGTTGAAGTAACTCGTGCAAAAGTTCGTCGCGAACGTATGGGACATATCGAGTTAAAAGCACCAGTATCTCATATCTGGTATTTCAAAGGTATCCCATCGCGTATGGGACTCACATTGGATATGAGTCCTCGTGCACTTGAAGAAGTTATTTATTTTGCGGCTTATGTTGTTATCGATCCAATGGACACACCATTAGAACCGAAGTCACTCCTTACTGAGCGTGAATACCGTGAAAAACTTCAAGAGTACGGTTACGGTTCGTTTGTTGCTAAAATGGGTGCTGAAGCCATTCAAGATCTTCTTAAACGCGTTGATTTAGATGCAGAAATCGCAGTTCTTAAAGAGGAGTTGAAATCAGCGACAGGTCAAAAACGTGTGAAAGCAGTTCGTCGTCTGGATGTGTTAGATGCCTTTAAAAAATCTGGAAATAAACCAGAATGGATGGTTCTTAACATTTTACCGGTTATCCCACCGGATCTTCGTCCGATGGTTCAATTAGATGGTGGTCGTTTTGCGGCATCAGACTTGAATGACCTTTACCGCCGTGTTATTAACCGTAACAATCGTTTGGCACGTTTGTTGGAATTAAATGCTCCTGGCATCATCGTTCAAAATGAAAAACGTATGTTACAAGAAGCTGTTGATGCGCTTATCGACAATGGTCGTCGTGGTCGTCCAATTACCGGACCAGGTAGTCGTCCTTTGAAATCATTAAGCCATATGCTTAAAGGTAAACAAGGTCGTTTCCGCCAAAACTTGCTTGGTAAACGTGTTGACTTCTCTGGACGTTCCGTTATTGCTGTTGGTCCAACACTTAAAATGTACCAATGTGGTGTACCACGTGAAATGGCTATTGAGCTCTTCAAACCTTTTGTAATGCGTGAAATCGTTGCTCGTGACCTCGCAGGGAACGTTAAAGCAGCTAAACGTATGGTTGAACGTGGGGACGAGCGTATTTGGGACATCTTAGAAGAAGTTATTAAAGAGCACCCAGTACTTCTAAACCGTGCACCTACTCTTCACAGATTAGGTATCCAAGCGTTTGAACCTGTCCTTATTGATGGTAAGGCGCTTCGTCTTCATCCACTTGTATGTGAGGCCTACAATGCTGACTTTGATGGAGACCAAATGGCCATCCACGTTCCATTGTCTGAAGAAGCCCAAGCAGAAGCTCGTCTTTTGATGCTTGCTGCAGAGCACATCCTTAACCCTAAAGATGGTAAGCCAGTCGTAACACCATCTCAGGACATGGTTTTAGGAAATTACTACCTGACTATGGAAGATGCTGGTCGTGAAGGTGAAGGCATGATTTTCAAAGATCATGACGAAGCAGTTATGGCATATCAAAATGGTTATGTTCATTTACATACACGTGTTGGTATCGCTGTTGATTCAATGCCGAATAAGCCTTGGACAGAAGAGCAAAAACATAAAATCATGGTTACAACAGTTGGTAAGATTCTCTTCAACGATATCATGCCTGAAGATTTACCGTACTTAATTGAACCTAATAATGCAAACTTGACAGAAAAAACTCCAGATAAATACTTCTTAGAGCCAGGTCAGGATATTCAAGCAGTTATTGATAACTTAGAGATTAATATTCCCTTTAAGAAGAAAAATCTTGGTAATATTATCGCAGAAACTTTCAAACGTTTCCGTACAACAGAAACTTCTGCTTTCCTTGACCGTTTGAAGGACCTTGGATATTATCATTCAACACTTGCTGGTTTAACTGTGGGTATTGCTGATATCCCAGTTATTGACAATAAAGCTGAGATTATTGATGCAGCTCACCACAGAGTTGAAGATATCAATAAAGCCTTCCGTCGAGGTTTGATGACTGAAGAAGATCGTTATGTTGCTGTTACAACAACATGGCGTGAAGCTAAAGAAGCACTTGAAAAACGTCTTATTGAGACACAAGATCCAAAGAACCCTATCGTTATGATGATGGACTCAGGAGCTCGTGGTAACATCTCAAACTTCTCACAACTTGCCGGTATGCGTGGTTTGATGGCTGCTCCTAACGGACGTATCATGGAATTGCCAATCTTATCAAACTTCCGTGAAGGTCTTAGTGTTTTGGAAATGTTCTTCTCAACTCACGGTGCGCGTAAAGGTATGACTGATACGGCCCTTAAGACAGCCGACTCAGGTTACCTTACTCGTCGTTTGGTTGACGTTGCCCAAGATGTTATTATTCGTGAAGATGACTGTGGAACAGACCGCGGTTTGACAATCACAGCAATTACAGATGGTAAAGAGGTTACTGAGACACTTGAAGAGCGTTTGATAGGACGTTATACTAAGAAGTCAATCAAACATCCTGAGACAGGTGAAATTCTCGTTGGTGCGGATACCTTAATTACTGAAGATATGGCTGCTAAAGTTGTTAAAGCGGGCGTTGAGGAAGTAACTATCCGATCAGTATTTACATGTAACACTCGCCATGGTGTTTGTCGTCACTGTTACGGTATTAACTTGGCAACAGGTGATGCTGTTGAGGTTGGTGAAGCAGTTGGTACTATTGCAGCTCAATCTATCGGTGAACCAGGGACACAGCTTACAATGCGTACCTTCCATACCGGTGGTGTTGCTTCAAATACTGATATTACACAAGGTCTTCCACGTATCCAAGAAATCTTTGAAGCACGTAACCCTAAAGGTGAGGCAGTCATTACTGAAGTTAAGGGTGAAGTCGTTGCAATTGAAGAAGACTCTTCAACACGTACTAAGAAAGTATTCGTTAAAGGTCAGACAGGTGAGGGAGAATACGTTGTTCCATTTACAGCACGTATGAAAGTTGAAGTTGGTGATGAAGTAGCTCGTGGTGCGGCCTTAACTGAAGGATCTATCCAACCAAAACGTCTTCTTGAAGTTCGTGATACTTTATCTGTTGAAACGTACCTACTTGCTGAAGTACAAAAAGTTTACCGTAGCCAAGGGGTAGAAATCGGAGATAAACACGTTGAGGTAATGGTTCGTCAAATGCTCCGTAAAGTTCGTGTCATGGATCCAGGAGATACAGATCTTCTTCCAGGTACACTTATGGATATTTCAGACTTTACAGATGCTAACAAAGATATTGTTATTTCTGGTGGAATCCCTGCGACAAGCCGTCCTGTCCTTATGGGTATTACTAAGGCTTCCCTTGAAACTAATTCATTCTTATCAGCTGCATCCTTCCAAGAAACAACACGTGTTCTTACAGATGCTGCTATTCGTGGTAAGAAAGATCACTTACTTGGTCTTAAAGAAAATGTTATTATCGGTAAAATCATTCCAGCGGGTACTGGTATGGCTCGTTACCGTAATATTGAACCACTTGCTGTTAATGAAGTTGAGATTATTGAAGGAACTCCTGTTGATGCAGAAGTTACGGAAGTATCAACACCTACAACAGAAGAT

SEQ ID NO: 13522 - protein, 1226 aa, Streptococcus agalactiae; identical to SEQ ID NO: 340

SEQ ID NO: 13523 - protein, 363 aa, Streptococcus agalactiae; identical to SEQ ID NO: 4665

SEQ ID NO: 13524 - protein, 121 aa, Streptococcus agalactiae; identical to SEQ ID NO: 346

SEQ ID NO: 13525 - protein, 369 aa, Streptococcus agalactiae
ATGGTTCAATCATTAGCAAAGCACGTCATTCATCAGGCAGTAGAAGTAAATGCTCAAGATATTTATATCATTCCCAAAGGTGATTGTTATGAATTCTATATGCGTATTGATGATGAAAGGCGGTTTATTGATGTTTTTGAGTTTAATAGGATGGCTAGTCTTATTAGTCACTTTAAATTTGTGGCAGGCATGAACGTTGGAGAAAAAAGACGAAGTCAATTAGGTTCTTGTGACTATGAACTGTCAGAGGGAAGACTGGTTTCATTACGACTATCAAGTGTGGGAGATTATCGTGGTCAAGAATCTTTAGTTATTCGTACTTTGTATTCAGGTCATCAGGACTTAAAATATTGGTTTGATAATATAAAG

SEQ ID NO: 13526 - protein, 123 aa, Streptococcus agalactiae
MVQSLAKHVIHQAVEVNAQDIYIIPKGDCYEFYMRIDDERRFIDVFEFNRMASLISHFKFVAGMNVGEKRRSQLGSCDYELSEGRLVSLRLSSVGDYRGQESLVIRTLYSGHQDLKYWFDNIK

SEQ ID NO: 13527 - protein, 597 aa, Streptococcus agalactiae
ATGAAGGAAGTACTGTGTGCAAGAGGGCTATATCTTTTTTCCGGCCCTGTGGGGAGTGGTAAAACAACTCTCATGTATCAATTAGCTTCAGAAGTATTTAAAAATAAGCAAATTATCACGATTGAAGATCCGGTAGAAATCAAGAATGACAAGATGTTACAACTCCAATTGAATGAGGATATTGGAATGACTTATGATGCTTTAATCAAACTGTCTTTACGGCATCGTCCAGATATTTTAATTATCGGAGAGATTAGAGATCAAGCGACGGCCCGTGCTGTTATTCGTGCAAGTTTAACGGGAGTAATGGTTTTTTCTACTATTCATGCTAAAAGTATTCCCGGAGTCTATGATAGGCTTATAGAATTAGGGGTTAACTATCAAGAGTTAGAAAATAGTCTAAAATTAATAGCATATCAACGTTTAATTGGAGGAGGAAGCCTAATTGACTTTGAGACAAGTAACTTTAAAAAACACTCATCAGACAAGTGGAATAGACAAGTGGATATCTTGGCTGAAGAAGGACATATCAGTAAGAAACAGGCACAAGTCGAAAAAATTATCCCTCAAGAAACAACGGAAAGTAGTCCAACTTTT

SEQ ID NO: 13528 - protein, 199 aa, Streptococcus agalactiae
MKEVLCARGLYLFSGPVGSGKTTLMYQLASEVFKNKQIITIEDPVEIKNDKMLQLQLNEDIGMTYDALIKLSLRHRPDILIIGEIRDQATARAVIRASLTGVMVFSTIHAKSIPGVYDRLIELGVNYQELENSLKLIAYQRLIGGGSLIDFETSNFKKHSSDKWNRQVDILAEEGHISKKQAQVEKIIPQETTESSPTF

SEQ ID NO: 13529 - protein, 844 aa, Streptococcus agalactiae
ATGAATAAGGCATTATTAGAGGGAAAAGATTTATCAAAAATGTTAGGAGAGTTAGGTTTTTCTGACACTGTTATCACACAGGTTGCATTAGCTGATTTGCATGGTAACATTTCAAGGAGCCTACTAAAGATTGAGTCTTATTTAGCTAATCTTTTGTTAGTTAGAAAAAAAGTAATAGAAGTAGCTACTTACCCATTGATATTATTGTCTTTTCTGGTGCTAATTATGATTGGCCTTAGGCATTATTTAATGCCCCAATTAGGAGAAAATAATTTTGCAACTAGACTGATTACAAATGTGCCGAATATTTTCTTATTCTTTTAGCAGTTGTACTTATTTTTAGTTTAATATTTTATATTATTCAAAAGCGATTGTCGCGCATTAAAGTAGCTTGTTTTTTAACAACAATTCCTTAGTTGGATCATATGTTAAGCTTTATTTAACTGCTTACTATGCCCGTGAGTGGGGAAATTTATTAAGTCAAGGTGTTGAATTGGACCAAATTGTTAAAGTAATGCAAAATCAGAAATCCAAACTTTTTAGGGAAATAGGATATGACATGGAAGAAGGTTTTCTATCAGGTAAAGCATTTCACCAAAAAGTATTAGACTATCCGTTTTTCTTAACTGAGCTTAGTTTAATGATTGAATATGGTCAAGTTAAGGCGAAATTAGGAACAGAGTTAGATATATATGCTGATGAGAAGTGGGAGGATTTTTTTACAAAATTAGCTAGAGCGACCCAATTAATCCAACCCGTTATTTTTATTTTTGTAGCTCTTATCATTGTTATGATTTATGCAGCAATGCTGTTACCAATGTATCAAAATATGGAGATATTATCA

SEQ ID NO: 13530 - protein, 282 aa, Streptococcus agalactiae
MNKALLEGKDLSKMLGELGFSDTVITQVALADLHGNISRSLLKIESYLANLLLVRKKVIEVATYPLILLSFLVLIMIGLRHYLMPQLGENNFATRLITNVPNIFLLLLAVVLIFSLIFYIIQKRLSRIKVACFLTTIPLVGSYVKLYLTAYYAREWGNLLSQGVELDQIVKVMQNQKSKLFREIGYDMEEGFLSGKAFHQKVLDYPFFLTELSLMIEYGQVKAKLGTELDIYADEKWEDFFTKLARATQLIQPVIFIFVALIIVMIYAAMLLPMYQNMEILS

SEQ ID NO: 13531 - DNA, 330 bp, Streptococcus agalactiae
ttggctcaacagatagtagtgatgtcttcttccagtcagtctgaatgggtgttattaactcagcaactaaatgcagaattcgaaggcgctcacttggaatatttaagacagaacaaactttatttacgtaagcaagataagattgtaacctttggcaaatctaataaagatgatttccgtaagacaggttataatggtcgaggttatcaaccaatggtttatgggttagacaattgtcaaatgagtcagaccaaaagtatggtaaaacttgttttttattttaaggacgggttaaaaaggacattttactatgattttaaagaagaaact

SEQ ID NO: 13532 - protein, 110 aa, Streptococcus agalactiae
MAQQIVVMSSSSQSEWVLLTQQLNAEFEGAHLEYLRQNKLYLRKQDKIVTFGKSNKDDFRKTGYNGRGYQPMVYGLDNCQMSQTKSMVKLVFYFKDGLKRTFYYDFKEET

SEQ ID NO: 13533 - DNA, 972 bp, Streptococcus agalactiae
atgaattttgaaaaaattgagacagcctatgagctgattttagaaaatatccaaacgattgagaaccaattaaaaactcatatttatgatgccttaattgaacagaactcttattaccttggttcaagttgtgatttagatattgttgtggtgaataaccaaaaattacgtcaacttgacttaagtcaagaagaatggcgtcgcactttccagttcatttttatcaaatctgcgcaaacagagcaattacaagctaatcatcagtttacgccagatagtattggttttatcttgttatttcttttggaagaattaacgagtcaagagacagtggatgtcttggaaattggaagtggaactgggaatttagctcagactctcctcaataacagctcgaaagagttaaattatatgggcattgaagttgatgatcttttgattgatctatcagcaagcattgctgaaattataggttctagtgcccaatttatccaagaggatgccgttagaccacaaattttgaaagaaagcgatgtaatcattagtgatttaccagttggctattatcctaatgatgatattgctaaacgatatgctgtatcaagttctaaagagcacacctatgctcaccatctattgatggagcaatctcttaaatatttgaaaaaagatggaatcgctatatttttagtacccgaaaaccttttaacaagtccacaaagtgatttgctgaaggagtggttaaaaggatatgcagatgtcattgccgttttaactctaccagaaactatttttggaagtcgtcaaaatgcgaaatctatatttgttctcaagaagcaagcagaacaaaaaccagaaacctttgtatatccgctgacagatttgcaaaatcgtgagaatatggcaaacttcattgaaaattttcaaaaatggagcagagaaaatagtcattactcaaaaaatatgatagaa

SEQ ID NO: 13534 - protein, 324 aa, Streptococcus agalactiae
MNFEKIETAYELILENIQTIENQLKTHIYDALIEQNSYYLGSSCDLDIVVVNNQKLRQLDLSQEEWRRTFQFIFIKSAQTEQLQANHQFTPDSIGFILLFLLEELTSQETVDVLEIGSGTGNLAQTLLNNSSKELNYMGIEVDDLLIDLSASIAEIIGSSAQFIQEDAVRPQILKESDVIISDLPVGYYPNDDIAKRYAVSSSKEHTYAHHLLMEQSLKYLKKDGIAIFLVPENLLTSPQSDLLKEWLKGYADVIAVLTLPETIFGSRQNAKSIFVLKKQAEQKPETFVYPLTDLQNRENMANFIENFQKWSRENSHYSKNMIE

SEQ ID NO: 13535 - DNA, 1191 bp, Streptococcus agalactiae
atgtcaaaaacaatagcaattaatgctggaagttcaagtttgaaatggcaattatatgaaatgccagaggagaaagtagttgccaaagggattatcgaacgtattggtttgaaagattctatttcgactgtaaaatttgacgataaaaaagatgaacaaattttagatatcgtagatcatacccaagctgttaaaattcttttagaagatctaacaaaacatggtattatcaaagactttaatgaaattacaggtgttggtcatcgtgtcgttgctggtggtgaatattttaaagagtctgctttagtagatgataaagttgtagaacaggttgaagaattatcagctttagctccactccacaacccagcagctgcagcagggattcgtgcgtttagagaaattttaccagatatcacgagtgtatgtgtatttgatacagccttccatacaacaatgcaacctcatacctacttatatccaatcccacaaaagtactatactgattataaagtacgtaaatacggtgcacacgggacaagccaccaatacgttgcacaagaagcagctaagcaattaggacgtcctttagaagaattaaaattaatcacagcacatgtgggtaatggtgtttctattacagcaaattatcatggacagtctattgatacatcgatgggattcacaccacttgcaggaccaatgatgggaacacgttcaggagacattgatcctgcgattatcccttatcttgtagctaatgatccagaattggaagatgcagctgctgttgttaatatgcttaacaaacaatcaggattgcttggagtatcaggcacttcaagtgatatgcgagatattgaagcaggtcttcaaagtaaagatccaaatgcagtgttagcctataatgtctttattgaccgtattaagaaatttattggacaatacttggcagtattaaatggcgcggatgctattatttttactgcaggtatgggagaaaatgcgccattaatgcgtcaagatgttatcgcaggattatcatggtttggcattgaacttgatccagaaaaaaatgtttttggttattttggagatatcacaaaaccagattcaaaagtgaaggttttagttattcctactgatgaagaattaatgattgcgcgtgacgttgagcgccttaaagctaaa

SEQ ID NO: 13536 - protein, 397 aa, Streptococcus agalactiae; identical to SEQ ID NO: 358

SEQ ID NO: 13537 - DNA, 204 bp, Streptococcus agalactiae
atgaaaaattctctacaaaagttacgaaaatctaggaaattaagtcaagcagaacttgcagttgcacttggagttactaggcaaactattatttctctagaaaaagagaaatacacggcatctttggagctagcatttaagatagcgcgttattttgataaacaaattgaggaagtttttatttatacagaaagtgaaggagga

SEQ ID NO: 13538 - protein, 68 aa, Streptococcus agalactiae; identical to SEQ ID NO: 360

SEQ ID NO: 13539 - DNA, 135 bp, Streptococcus agalactiae
atgtcaaggatgtggactattgatttttgtccaccaatcgtttaccagcaatatgtttttatcagtactattagtattagcattgcgatgtctatttttgctatttatcgctatgcttcattgaagaaaacgata

SEQ ID NO: 13540 - protein, 45 aa, Streptococcus agalactiae
MSRMWTIDFCPPIVYQQYVFISTISISIAMSIFAIYRYASLKKTI

SEQ ID NO: 13541 - protein, 451 aa, Streptococcus agalactiae
ATGTTAATAAAAGGATTATTGTCACCCAATAGTAAAGTATCTCCGAAGGATTACAAAGTATATATGAGATTTTTGTCTTTGTTTTTAGTGTATGTAGTTGATTATGATAGTATCATCATTTCTACATACCTTTGAATCTAATTTTACTAAAGGTTTTTCCTTTGGTTCAGGTATTGCCTTATTTGCAGGAAGTTTTTATTTTTTGGTGATAACATTTAGTGAAAAGCGATTTCAACATTACTATACCAAAGTTTTTGATGAGCGTAATCAATTTATTGCTAATATGTCTTGTCGACTCCTTTTCCTTTTATCTGTCCTTGTTTTAGTGGTATTGTGTCTGATTAATGTCTGGTTTGGTATAACTTTTTCCTATGCAAAGTTCTTGCTATTGATACTCTCTTTTGTTTTATACGGTTATTTATTAATTTACTTTATTTTACAGAAGTTATTG

SEQ ID NO: 13542 - protein, 151 aa, Streptococcus agalactiae
MLIKGLLSPNSKVSPKDYKVYMRFLSFVFSVCSLIMIVSSFLHTFESNFTKGFSFGSGIALFAGSFYFLVITFSEKRFQHYYTKVFDERNQFIANMSCRLLFLLSVLVLVVLCLINVWFGITFSYAKFLLLILSFVLYGYLLIYFILQKLL

SEQ ID NO: 13543 - protein, 663 aa, Streptococcus agalactiae
GTGTCATTTATTATTAAAAAAGGCAAAATTTTAGCTTTGCTAATAGCATTTTTAGTTATTAATCAACTTGTTCCTATATTGGCTGTGTGGCTCCTAAAGAATCACTATCAAACGCCTTTTACTAGTATATTGTTAATTGGCTTAGAATTACTTATTATTGCTCTTTTCCTTTATTATGCCAAGGTTAAACAAATAATCAGATGGAAAGTATTATTGACAAGGAAAGCATTAGTTACTATTCTCTTAGGTTGGTTATCATTGAGGGTTCCACAAATTATTGGTTACCTCATTATGACTATGCAAGGGGTTAAAGATACAGCAAATCAAACAGTAATTATGGAATTAACAAAGCAACTTCCACTAGCTTTGATGTTAATTTTTGCCATAATAGGGGCACCAATTATGGAAGAAATTATATTTCGCTATATTATCCCTAAAGAACTTTTTGCGAAACATCAAAAATGGGGTTTTGTCATCGGTACTTTAGCTTTTGCTCTTATTCATTCCCCTTCTGATATAGGTAGTTTTATTATTTATGCTGGGATGGGTGCTATTTTATCTTTTGTTTATTATAAAACTGAGCACTTAGAATATAGTATAATGATTCATTTTATTAACAATGCTCTTGCTTATAGCGTGTTAATCAGTACAATGATGAATAAC

SEQ ID NO: 13544 - protein, 221 aa, Streptococcus agalactiae
MSFIIKKGKILALLIAFLVINQLVPILAVWLLKNHYQTPFTSILLIGLELLIIALFLYYAKVKQIIRWKVLLTRKALVTILLGWLSLRVPQIIGYLIMTMQGVKDTANQTVIMELTKQLPLALMLIFAIIGAPIMEEIIFRYIIPKELFAKHQKWGFVIGTLAFALIHSPSDIGSFIIYAGMGAILSFVYYKTEHLEYSIMIHFINNALAYSVLISTMMNN

SEQ ID NO: 13545 - protein, 768 aa, Streptococcus agalactiae
ATGAAAATTGGAATTATCGGCGTTGGAAAAATGGCCAGTGCAATTATTCAAGGCCTCAAACAAACCCAACATGACATTGTCATATCCGGATCTTGCTTAGAGCGTTCAAAAGAAATTGCAGAAAGACTTGATGTTACTTACGCCGAATCTCATCAGTCATTAATCAATCAAGCTGATATTATCATGTTAGGTATTAAACCTCAACTATTTGAAAAGGTTCTTCTTCCACTTGATATCACAAAACCAATCATCTCAATGGCAGCAGGAATCTCCTTAGCGCGTTTAAGCCAATTAACTCGTTCTGATTTACCATTGATTCGTATTATGCCAAATATTAACGCACAAATACTTCAAAGTTGCACAGCTATTTGTTACAACAATCATGTATCAGATGAGTTACGACAATTAGCCAAAGAAATTACGGATAGTTTTGGAAGTAGCTTTGATATAGCAGAAATCAATTTTGATACCTTCACTGCTCTAGCAGGTTCTAGTCCTGCCTATATCTATCTATTTATAGAAGCCTTAGCTAAAGCAGGTGTAAAATATGGATTTCCAAAAGAACAAGCACTCTCTATTGTAGGACAGACTGTCTTAGCTTCTAGTCAAAACCTATTACAAGGACAAAATAGCACCTCTGACTTAATCGACAACATTTGTAGCCCAGGCGGAACTACTATTGCTGGCCTTTTAGACTTAGAAAAAAATGGTCTGACGCATAGTGTTATTTCTGCCATTGATGCTACTATTGAGAAAGCAAAAAAACTT

SEQ ID NO: 13546 - protein, 256 aa, Streptococcus agalactiae
MKIGIIGVGKMASAIIQGLKQTQHDIVISGSCLERSKEIAERLDVTYAESHQSLINQADIIMLGIKPQLFEKVLLPLDITKPIISMAAGISLARLSQLTRSDLPLIRIMPNINAQILQSCTAICYNNHVSDELRQLAKEITDSFGSSFDIAEINFDTFTALAGSSPAYIYLFIEALAKAGVKYGFPKEQALSIVGQTVLASSQNLLQGQNSTSDLIDNICSPGGTTIAGLLDLEKNGLTHSVISAIDATIEKAKKL

SEQ ID NO: 13547 - protein, 1065 aa, Streptococcus agalactiae
ATGTCAGATTTATTTAACAAAATTAAAACCGTAACTGAGCTTGATGGGATTGCTGGCTATGAACACAATATCCGCAACTTCCTTCGTCAAGAAATAACTCCTTTAGTTGATCAAGTTGAGACAGACGGACTTGGTGGAATTTTTGGAGTAAAAAATACTCATGAGACTAATGCTCCTAAAGTCATGGTTGCTGCCCATATGGATGAAGTCGGCTTTATGGTTAGTCATATTCAGCCAGATGGAACATTTCGTGTACTTGAGGTTGGAGGATGGAATCCCCTAGTAGTCAGCTCACAACGCTTTACCCTCTACACACGTTCTGGTGATGCCATTCCTGTTATATCAGGCTCAGTTCCTCCTCACTTTCTTCGTGGACAAAGCGGTGGAACAACATTACCCAAAATTAGTGACATTGTTTTTGATGGAGGATTCACAGATAAAAATGAAGCTGAAAGCTTTGGCATTGCTCCTGGCGATATCATTGTTCCTAAATCTGAAACCATTTTAACTGCAAATCAAAAACATATTATGTCAAAAGCTTGGGATAATCGCTATGGTGTGCTTATGGTGACCGAATTGCTAAAAAGCTTAAAAGATCAAAGTCTTAGCAACACACTTATTGCTGGGGCTAATGTTCAAGAAGAAGTCGGACTTCGTGGCGCACATGTTTCAACAACTAAATTCAACCCAGATATCTTCTTAGCTGTCGATTGTTCCCCAGCTGGAGATATTTATGGGGAACAAGGCAAAATAGGAGAGGGAACCTTAATCCGTTTTTATGATCCCGGACATATCATGCTTAAAGATATGAGAGATTTCTTGCTTACAACAGCTGAAGAAGCAGGTATAAAATACCAATATTATGCTGCAAAAGGTGGTACCGATGCTGGGGCTGCTCACCTAAAAAATAGTGGTATTCCTTCTACAACTATCGGTGTCTGTGCACGCTACATTCATTCTCATCAAACACTCTACGCTATGGATGATTTTCTACAAGCACAAGCTTACCTTCAGGCCATCGTTAACAAATTAGACCGCTCGACGGTGGATATTATTAAAGGTTAT

SEQ ID NO: 13548 - protein, 355 aa, Streptococcus agalactiae; identical to SEQ ID NO: 4694

SEQ ID NO: 13549 - protein, 237 aa, Streptococcus agalactiae
ATGAAAGAAAAATTATTAGTACCTGCTTTAAATTGTTTGCTAGGTCTACTCTTCCTAGGTGATCACTGGTTTTTATTTCGTCTTCAAAATGGAGAACTTTTTGCTATTGTGACGCTAATACTGCTTTGCACAGCTTCATTTTTAATCAATAAGAATCACCCCAAAAATTTGACTTTAATTGCTATGGTTATCACTTTTTTAGCCGTATTATCTTTCCTATCTACCTTTTTATTAGCT

SEQ ID NO: 13550 - protein, 79 aa, Streptococcus agalactiae
MKEKLLVPALNCLLGLLFLGDHWFLFRLQNGELFAIVTLILLCTASFLINKNHPKNLTLIAMVITFLAVLSFLSTFLLA

SEQ ID NO: 13551 - DNA, 318 bp, Streptococcus agalactiae
gtgtctaattccggggggtatggtataataacagttatgaaaaataaaaaaatcttatttgggactggccttgctggtgtgggtttactggcagctgctggttataccctaactaaaaaagtaacagattataaacgtcagcaaatcactcagaccttaagagaactttttagtcagatgggtgatattcaggtattttattttaatgaatttgaatctgatattaaaatgaccagtggtggtcttgtcttggaagatggcagaattttcgaattcatttatcgtcaaggtgttcttgattatgtggaggtgagcaaa

SEQ ID NO: 13552 - protein, 106 aa, Streptococcus agalactiae
MSNSGGYGIITVMKNKKILFGTGLAGVGLLAAAGYTLTKKVTDYKRQQITQTLRELFSQMGDIQVFYFNEFESDIKMTSGGLVLEDGRIFEFIYRQGVLDYVEVSK

SEQ ID NO: 13553 - DNA, 321 bp, Streptococcus agalactiae
atgattttaccagaatcttatgaagaaatagcagcttatattgatagcactaagaaagttgttttcttttttacagcagattggtgtccagattgtcaatttatatatccagtaatgccatcaattgaaaaagatttctcagattttgtctttgtacgtgttaatcgtgatgactatatagaattagctcagcagtggaatatttttgggattccgagtttcgttgttgtggaaaatggtcaggaactgggtcgtttggttaataagaatcgcaaaacaaaggctgaaattactaaatttctcgctgaaattaaccataaa

SEQ ID NO: 13554 - protein, 107 aa, Streptococcus agalactiae
MILPESYEEIAAYIDSTKKVVFFFTADWCPDCQFIYPVMPSIEKDFSDFVFVRVNRDDYIELAQQWNIFGIPSFVVVENGQELGRLVNKNRKTKAEITKFLAEINHK

SEQ ID NO: 13555 - DNA, 624 bp, Streptococcus agalactiae
atgatttttacttataatagagagcatgttggtgataccttaatggttattgttaaggatagtcaaggagctaagctagatgttgatcgtcgcggacaagtagcacgcgtctatctgcaagatagtaaagaaacagttgcttggaatatctttgaagtgtcaagtttaattgctattgagggagtaggtcaagtaactttatctgatcaagttattaaaatccttaatgcagaactactgaaagaaggattcgaagactctcttgttaataatattgaacctacatttgttgtggcgcaaattaaagaaatgattgatcatccagatagtgaccatttacacatctgtcaagtagaaatcaacgatgggaagacggttcaaatcgtttgtggggcacctaatgcttcagtaggccttaaaacagttgcagctcttccaggagctatgatgccaaatggtagccttattttcccaggaaaacttcgtggagaagatagctttggaatgttatgtagtgctcgcgagttagctcttccaaatgctcctcaagtcagaggtatcattgaattatctgatcaggtaattgttggagagtctttcgacgccaataaacattggaaaaat

SEQ ID NO: 13556 - protein, 208 aa, Streptococcus agalactiae
MIFTYNREHVGDTLMVIVKDSQGAKLDVDRRGQVARVYLQDSKETVAWNIFEVSSLIAIEGVGQVTLSDQVIKILNAELLKEGFEDSLVNNIEPTFVVAQIKEMIDHPDSDHLHICQVEINDGKTVQIVCGAPNASVGLKTVAALPGAMMPNGSLIFPGKLRGEDSFGMLCSARELALPNAPQVRGIIELSDQVIVGESFDANKHWKN

SEQ ID NO: 13557 - DNA, 714 bp, Streptococcus agalactiae
atgacaaatgtaactagttataaagaaatgctggctaaaccttggggaaaaatacaatatgaaataacttttgctcaattaagccatatcaaaaatcagaacgttttagattttggagctggtttttgtctcaccgcacaacatctagcaaaagaaaacaatgtaactgctattgaacccaatcctaaactgctttacgataatcaaagtgacaatatttataaaatcctaggttcctacgaagcattaagagctttgcctgatcaaagttttgatactattatttgtcataatgttcttgaatatatagacaaacataatcatcctgcttattttgacgaattttctcgacttctaaaacctaatggagaactatctctcatcaaacataatataattggtaaaatattacaatcagttatttttagcaatgatacctccactgcgatggaactcttaacaggagaagcaaactttaaaagtgccagttttgaccagggaaatatttataccttagaagaactaaaacaaaatacaaatttattagttgaacgttatcagggtattcgtaccttctattcattacaaccaaaccattttaaaactgaaactgattggctaaacaaaatgcttgctatcgagctaagtgttgctgacaaagctccttataaagatattgcttttttgcaacacatcacacttaaaaagtcattg

SEQ ID NO: 13558 - protein, 238 aa, Streptococcus agalactiae
MTNVTSYKEMLAKPWGKIQYEITFAQLSHIKNQNVLDFGAGFCLTAQHLAKENNVTAIEPNPKLLYDNQSDNIYKILGSYEALRALPDQSFDTIICHNVLEYIDKHNHPAYFDEFSRLLKPNGELSLIKHNIIGKILQSVIFSNDTSTAMELLTGEANFKSASFDQGNIYTLEELKQNTNLLVERYQGIRTFYSLQPNHFKTETDWLNKMLAIELSVADKAPYKDIAFLQHITLKKSL

SEQ ID NO: 13559 - DNA, 393 bp, Streptococcus agalactiae
atgtataataaagttattatgattgggcgtctaacagcaaagcctgagatggtaaaaacaccaactgacaagtcagtaacgcgtgcaactgttgctgttaatagacgctttaaaggaagtaatggtgagcgtgaagcagattttattaatgtggttatgtggggtcgtctagcggaaacccttgcgagctatgggacaaagggctctttaatttcaatagatggtgaattgcgtacgcgcaagtacgaaaaggatggtcaaacgcactatatcactgaagtattagcatcatcatttcagttgttagaaagccgtgcccaacgtgctatgcgtgaaaataatgtttctggtgatttgtcagatttagtattggaagaagaggagctccccttt

SEQ ID NO: 13560 - protein, 131 aa, Streptococcus agalactiae; identical to SEQ ID NO: 382

SEQ ID NO: 13561 - protein, 642 aa, Streptococcus agalactiae
ATGGAAAAAGTCATTATTTTTGATATGGACGGCGTTATTGTTGATTCCGAGTACACGTTTTTAGATAATAAGACAGAAATGTTACGTGAGGAGGGTATTGATACGGACGTCTCGTATCAATACCAGTACATGGGGACTACTTTTGAATTCATGTGGCAAGCTATGAAAGAGGAGTTTGGCTTACCGAAAACAGTAAAAGAGTATATTGCTGAGATGAACAGACGTCGACAAGCGATTGTGACGCGTGATGGTGTTAGGCCCATTAAAGGAGCTCAGCAACTGATTCATTGGTTACACCAACATGGCTATCGCTTAGCAGTTGCGTCCTCATCTCCAATGGTAGATATTAAGCGTAATCTAAAAGAGTTGGGTGTGACAGAATGCTTTGAATACATGGTTACAGGAGAAGATGTATCGTCTTCTAAACCAGCACCAGATGTTTTTCTTAGAGCTGCAGAGCTTTTAGATGTAGACCCTAAAGTTTGTATAGTTATAGAAGATACAAGAAATGGGAGTTTAGCTGCTAAGGCAGCAGGAATGTATTGCTTTGGCTTTGCCAATCCTGATTATCCACCGCAAGATTTATCAATGGCAGACAAGGTTATTTCAGATTATCAAGATATCTATATTTATCTTCCGGAG

SEQ ID NO: 13562 - protein, 214 aa, Streptococcus agalactiae
MEKVIIFDMDGVIVDSEYTFLDNKTEMLREEGIDTDVSYQYQYMGTTFEFMWQAMKEEFGLPKTVKEYIAEMNRRRQAIVTRDGVRPIKGAQQLIHWLHQHGYRLAVASSSPMVDIKRNLKELGVTECFEYMVTGEDVSSSKPAPDVFLRAAELLDVDPKVCIVIEDTRNGSLAAKAAGMYCFGFANPDYPPQDLSMADKVISDYQDIYIYLPE

SEQ ID NO: 13563 - protein, 1743 aa, Streptococcus agalactiae
ATGTTGATGGTGTTGTTATTCCAAAGGCTAGGAATTATTATGATTTTAGCCTTTTTATTGGTAAATAATAGTTATTTCAGACAGTTAATTGAAGAGCGGTCTAAACGTGAAACGGTAGTCCTTGTCATCATTTTCGGCTTGTTTGTTATTATATCTAATATAACAGGAATTGAAATAAAAGGGGATCGAAGTTTGGTCGAGCGCCCTTTTCTAACAACGATTTCCCATTCTGACTCACTTGCTAATACAAGGACTTTAGTTATTACAACGGCAAGTTTGGTTGGTGGACCTCTGGTTGGATCAATTGTTGGTTTTATTGGAGGAGTTCATCGCTTTTTTCAAGGAAGCTTTTCAGGTTCTTTCTATATTGTCAGTTCAGTTCTAGTCGGCATTGTTAGCGGAAAGATTGGTGATAAGCTTAAGGAAAACCATCTCTACCCTTCAACAAGCCAAGTTATTTTAATTAGTATTATTGCCGAAAGTATCCAGATGCTATTTGTTGGCATTTTTACAGGATGGGAACTTGTCAAAATGATTGTCATTCCAATGATGATTTTAAATAGTTTAGGTTCCACACTTTTCCTTGCGATTTTGAAAACTTATTTGTCAAATGAAAGTCAGTTACGCGCAGTTCAAACGAGAGATGTTCTTGAATTGACTCGACAGACTCTGCCCTACCTTAGACAAGGTTTGACACCGCAATCTGCTAGGAGCGTTTGCGAAATTATAAAGAGGCATACTAACTTTGATGCTGTGGGATTAACAGATCGGTCAAACGTATTAGCTCATATTGGTGTTGGCCATGATCACCATATTGCAGGACAACCGGTCAAAACAGACTTATCTAAAAGTGTTATTTTTGATGGCGAACCAAGAATTGCGCAAGATAAAGCGGCGATTTCTTGTCCAGATCACAACTGTCAGTTAAATTCTGCTATTGTAGTTCCTCTAAAAATAAATGATAAAACTGTGTGTGCCTTAAAAATGTACTTTGCAGGAGATAAGACAATGTCTGAGGTGGAGGAAAACCTAGTCCTTGGTTTAGCGCAAATATTTTCAGGACAACTGGCAATGGGGATAACAGAGGAACAAAATAAGTTAGCCAGTATGGCAGAGATAAAGGCTTTACAAGCACAAATCAACCCTCATTTCTTCTTTAATGCCATTAACACAATTAGTGCATTAATCCGTATTGATTCTGATAAAGCACGTTATGCACTGATGCAGTTAAGTACTTTTTTTAGAACAAGTTTGCAAGGTGGTCAGGATCGTGAGGTAACGCTTGAGCAAGAAAAATCACATGTGGATGCTTATATGAATGTTGAAAAATTACGTTTCCCTGATAAATATCAGTTATCTTATGATATTAGTGCACCAGAAAAAATGAAGTTACCGCCTTTTGGTTTACAGGTACTGGTAGAGAATGCAGTTCGACATGCTTTCAAAGAACGTAAGACGGACAACCATATATTGGTTCAAATAAAGCCAGATGGTCATTATTATTGTGTTTCTGTTAGTGACAATGGACAAGGAATCTCAGATACTATCATTGATAAATTAGGTCAAGAAACAGTTGCAGAGAGTAAGGGGACAGGTACTGCTCTAGTTAATCTAAATAACAGGCTGAATTTATTATATGGTAGTGTAAGTTGCCTTCATTTTTCGAGCGACAAGAATGGTACAAAAGTTTGGTATCGAATACCTAATAGAATAAGGGAGGATGAGCATGAAAATTTTAATTCT

SEQ ID NO: 13564 - protein, 581 aa, Streptococcus agalactiae
MLMVLLFQRLGIIMILAFLLVNNSYFRQLIEERSKRETVVLVIIFGLFVIISNITGIEIKGDRSLVERPFLTTISHSDSLANTRTLVITTASLVGGPLVGSIVGFIGGVHRFFQGSFSGSFYIVSSVLVGIVSGKIGDKLKENHLYPSTSQVILISIIAESIQMLFVGIFTGWELVKMIVIPMMILNSLGSTLFLAILKTYLSNESQLRAVQTRDVLELTRQTLPYLRQGLTPQSARSVCEIIKRHTNFDAVGLTDRSNVLAHIGVGHDHHIAGQPVKTDLSKSVIFDGEPRIAQDKAAISCPDHNCQLNSAIVVPLKINDKTVCALKMYFAGDKTMSEVEENLVLGLAQIFSGQLAMGITEEQNKLASMAEIKALQAQINPHFFFNAINTISALIRIDSDKARYALMQLSTFFRTSLQGGQDREVTLEQEKSHVDAYMNVEKLRFPDKYQLSYDISAPEKMKLPPFGLQVLVENAVRHAFKERKTDNHILVQIKPDGHYYCVSVSDNGQGISDTIIDKLGQETVAESKGTGTALVNLNNRLNLLYGSVSCLHFSSDKNGTKVWYRIPNRIREDEHENFNS

SEQ ID NO: 13565 - protein, 738 aa, Streptococcus agalactiae
ATGAAAATTTTAATTCTTGATGATGAAATGTTTGCCAGACAAGAATTATCGTTTTTAGTTGAACATAGCCAGGAGGTTGACAACCCTGAGATTTTTCAGGCTGAGGATATCAGTGAAGCCGAAAAAATCTTATTTAGACAGCAAATTGATTTAATTTTTTTAGATATTTCGCTTAGTGAAGAAAATGGCTTTACTTTGGCTAATCAGTTGAGCCAACTTGCACATCCCCCACTTGTTGTTTTTGCGACAGCTTATGATAACTACGCTGTGAAAGCTTTTGAAAGTAATGCTGTTGATTATATCATGAAACCGTTTGAACAACAGCGCGTTGATATGGCTCTATCAAAAGTGAAGAAATTGAGCCAACTCACCACTGCTTCAGATGTAGAGCAAGCAATACCTAAAAAAGCCAGTGCTGAATTGTTAACCTTGACATTATCAGATCGCAGTGTTGTTGTTAAAATGCAAGATATCGTTGCAGCTAGTGTTGAAGATGGCGAATTAACTGTTAGTACAGTTCAGAAAACTTACACTATTCGGAAAACACTCAATTGGTTTAAGTCACGCGCCGTAGCACCATATTTTCTCCAGATTCATCGAAACACAGTGATTAATCTAGAGATGATTGAGGAAATTCAACCTTGGTTTAATCATACTTTGTTACTAATTATGTCTAATGGAGAGAAATTTCCAGTAGGTCGATCGTATTTAAAAGACCTAAATGAGCATTTAACCATG

SEQ ID NO: 13566 - protein, 246 aa, Streptococcus agalactiae
MKILILDDEMFARQELSFLVEHSQEVDNPEIFQAEDISEAEKILFRQQIDLIFLDISLSEENGFTLANQLSQLAHPPLVVFATAYDNYAVKAFESNAVDYIMKPFEQQRVDMALSKVKKLSQLTTASDVEQAIPKKASAELLTLTLSDRSVVVKMQDIVAASVEDGELTVSTVQKTYTIRKTLNWFKSRAVAPYFLQIHRNTVINLEMIEEIQPWFNHTLLLIMSNGEKFPVGRSYLKDLNEHLTM

SEQ ID NO: 13567 - protein, 453 aa, Streptococcus agalactiae; identical to SEQ ID NO: 4713

SEQ ID NO: 13568 - protein, 151 aa, Streptococcus agalactiae; identical to SEQ ID NO: 390

SEQ ID NO: 13569 - protein, 726 aa, Streptococcus agalactiae; identical to SEQ ID NO: 4715

SEQ ID NO: 13570 - protein, 242 aa, Streptococcus agalactiae; identical to SEQ ID NO: 4716

SEQ ID NO: 13571 - DNA, 108 bp, Streptococcus agalactiae; identical to SEQ ID NO: 9157

SEQ ID NO: 13572 - protein, 36 aa, Streptococcus agalactiae; identical to SEQ ID NO: 396

SEQ ID NO: 13573 - DNA, 1488 bp, Streptococcus agalactiae
atgggggcaaagcttcctcatgaattcgatccaaaggaccgttatggaatccataatgaaggtaatattactcatagtaccctattgaaacgttctcctgaactagatataaaaggagagcttgctaaaaaatataaaatctctaaggatggcttaacgtggtcgttcgacttaaatgatgattttaaattctccaatggtgagcctgttactgctgacgatgttaagtttacttatgatatgttgaaagcagatggaaaagcttgggatttgacctttattaagaatgttgaagtagttgggaaaaaccaggtaaatattcatttgactgaggcgcattcgacatttacagcacagttgacagaaatcccaatcgtccctaaaaaacattacaatgataagtataagagcaatcctatcggttcaggaccttacatggtaaaagaatataaggctggagaacaagcaatcttcgttcgaaatccatattggcacggtaaaaagccttattttaaaaagtggacttgggtattacttgatgaaaatacagcactagctgctttagaatctggtgatgttgacatgatttacgcaacgccagagcttgctagcaagaaagtcaaaggaacacgtcttctagatattgcttcaaatgatgttcgtgggttatcgctaccttatgtgaagaaaggtgttgtgaaaaattcaccagacggttatccagtaggaaatgatgtcactagtgatccagcaatcagaaaagccttgactattggtttaaatagacaaaaagttctggatactgttttaaatggttatggtaaaccagcttattcaattattgatagaacaccattctggaatccaaaaacagcaattaaagataataaagtagctaaagctaagcaacttttgacaaaagctggatggaaagaacaagcagacggtagccgcaaaaaaggaaatcttaaagcggaatttgacctttactaccctactaatgatcaattacgagcaaacttagccgttgaagtagcggagcaagctaaagccttaagtattactattaaactcaaggctagtaactgggatgaaatggcaactaagtcacatgattcagccttactttatgcgggaggacgtcatcatgcgcagcaattttatgaatcacattacccaagtttagctggtaaaggttggaccaatattactttttataacaatcctactgtgactaagtaccttgacaaagcaatgacatctcccgaccttgataaagctaacaaatattggaagttagctcagtgggatggcaaaacaggtgcttccactcttggagatttaccaaatgtatggttggtgagtcttaaccatacttatattggtgataaacgtatcaatgtaggtaaacaaggtgtccatagtcatggtcatgattggtcattattgactaacattgctgaatggacttgggatgaatctgctaag

SEQ ID NO: 13574 - protein, 496 aa, Streptococcus agalactiae
MGAKLPHEFDPKDRYGIHNEGNITHSTLLKRSPELDIKGELAKKYKISKDGLTWSFDLNDDFKFSNGEPVTADDVKFTYDMLKADGKAWDLTFIKNVEVVGKNQVNIHLTEAHSTFTAQLTEIPIVPKKHYNDKYKSNPIGSGPYMVKEYKAGEQAIFVRNPYWHGKKPYFKKWTWVLLDENTALAALESGDVDMIYATPELASKKVKGTRLLDIASNDVRGLSLPYVKKGVVKNSPDGYPVGNDVTSDPAIRKALTIGLNRQKVLDTVLNGYGKPAYSIIDRTPFWNPKTAIKDNKVAKAKQLLTKAGWKEQADGSRKKGNLKAEFDLYYPTNDQLRANLAVEVAEQAKALSITIKLKASNWDEMATKSHDSALLYAGGRHHAQQFYESHYPSLAGKGWTNITFYNNPTVTKYLDKAMTSPDLDKANKYWKLAQWDGKTGASTLGDLPNVWLVSLNHTYIGDKRINVGKQGVHSHGHDWSLLTNIAEWTWDESAK

SEQ ID NO: 13575 - DNA, 975 bp, Streptococcus agalactiae
gtgaaacatattaccactgtagttatctggaagatacttaggtgtttgtcactcgtttttggagtatcaattttgacctttattttactaaaacaatcaccggttgatccagtcatggcaagtgtcaattatgacacgtcactaacccctgttcagtacaaagcgattgctcaccactatggcttggataagccagctccggtccagtattttatttggttaaaaaattttatacagggacatttagggacttcactagtttatcggcaacctgttattgatattattagatcacgggcaggtgcctctttcatacttatgggactctcctgggtcttatcgggtcttattggatttatcttaggaactttatcagctttccatcaagggaaattgcttgatcgaattgtaaggtggttttcttaccttcagatatcagtaccaactttttggattgggctcatttttttattaatcttttctgtccatctggggtggttcccgattggtatttcttctccgataggtactttgagtcaagatattacgttagctgatcgtattaagcaccttattttacctgttttcacgctaagtattctaggcattgccaatgtaactcttcatactagaactaaaatgatgtcggtactttctagtgaatatgtcttatttgccagagcgcgtggggaaacggaatggcaaatttttaaaaatcattgtcttagaaatgctatcgtaccagctattacactgcatttttcctattttggagaattgtttggaggatccgttcttgctgagcaagttttctcatatccaggactagggtctaccctaactgaagcaggacttaaaagtgatacaccgctacttctagctattgtgatgatagggacattatttgtttttgcgggcaatcttattgcggatattttaaatagcataatcaatccacagttaaggagaaaagta

SEQ ID NO: 13576 - protein, 325 aa, Streptococcus agalactiae
MKHITTVVIWKILRCLSLVFGVSILTFILLKQSPVDPVMASVNYDTSLTPVQYKAIAHHYGLDKPAPVQYFIWLKNFIQGHLGTSLVYRQPVIDIIRSRAGASFILMGLSWVLSGLIGFILGTLSAFHQGKLLDRIVRWFSYLQISVPTFWIGLIFLLIFSVHLGWFPIGISSPIGTLSQDITLADRIKHLILPVFTLSILGIANVTLHTRTKMMSVLSSEYVLFARARGETEWQIFKNHCLRNAIVPAITLHFSYFGELFGGSVLAEQVFSYPGLGSTLTEAGLKSDTPLLLAIVMIGTLFVFAGNLIADILNSIINPQLRRKV

SEQ ID NO: 13577 - DNA, 819 bp, Streptococcus agalactiae
atgatattgagacgtcgaactattgttttatggcaactgggtatcgccatttctctcattcttagtattctagccttaaatctttatttccatagtactcccttgcaaaccaatgcagctttacggaaccttgctccttcattaaaccatctttttgggacagatggtttaggtagggatatgtttgtcagaacgattaaaggactttatttctctctacaagtcggcttattaggtgcccttatgggggtcattctggcgacagtttttggagtgcttgcaggtttaggaaatagcattattgataaaataatagcatggttagttgatttgtttattggtatgcctcatttgatttttatgattctcatttcttttgttgttgggaaaggtgctcaaggggtcatcattgcaacggctgttacacattggccttctttagcaaggcttatccgcaatgaagtctatcatctaaagaataaagaatttgtccaactttctaaaagtatgggaaaaacgccttattatattgtgaggcatcatatcctgcctttgattgcttctcaaattttcattggttttatcctcttatttccacatgtcatcctacatgaagcatcaatgactttcttaggatttgggctctctgccgaacaaccttcggttggtatcattctgtcagaggcagctaagcatatctctcttggaaattggtggttggttatctttccaggactttatcttattttggttgtcaatgcatttgatactatcggagaatctttaaagaaactcttttaccctcaaactgatcatttt

SEQ ID NO: 13578 - protein, 273 aa, Streptococcus agalactiae; identical to SEQ ID NO: 402

SEQ ID NO: 13579 - DNA, 801 bp, Streptococcus agalactiae
atgacagaaacattattaagcattaaagacctctccatcaccttcactcaatacggaagatttttaaaaccatttcaatcaacaccgatacaagcgctgaatttagaaattaaaaaaggtgagttattagctattataggtgctagtggttcggggaagagtttattagcacatgctattatggatattcttcctaaaaatgcatctgtaacaggagatatgatttatcgtggtcaatcactaaattctaaacgcattaaacagttgcgaggaaaagatattacgttgattccacaatcagttaattatttagatccatctatgaaagtcaaacatcaggtgcgcttaggtatctcagaaaattcaaaggctactcaagaaggattgtttcaacagtttggtttaaaagaaagtgatggtgacttgtatcctttccaactttctggcggaatgctccgacgtgttttgtttacaacgtgtattagtgataaggtttctttgattattgcggatgagcccacccctggattacatccagatgctctgcaaatggttttagaccaactacgctcctttgcagataaaggaataagcgttatatttatcactcatgatattgtagcagctagtcaaattgctgatcgtattactatttttaaagagggaaaagctattgaaacagctccagctagtttctttagcggaaatggagagcagttacaaacagaatttgctagaagtttatggcgctctctcccacagcaagaatttttgaaaggagttactcatgaccttagaggc

SEQ ID NO: 13580 - protein, 267 aa, Streptococcus agalactiae
MTETLLSIKDLSITFTQYGRFLKPFQSTPIQALNLEIKKGELLAIIGASGSGKSLLAHAIMDILPKNASVTGDMIYRGQSLNSKRIKQLRGKDITLIPQSVNYLDPSMKVKHQVRLGISENSKATQEGLFQQFGLKESDGDLYPFQLSGGMLRRVLFTTCISDKVSLIIADEPTPGLHPDALQMVLDQLRSFADKGISVIFITHDIVAASQIADRITIFKEGKAIETAPASFFSGNGEQLQTEFARSLWRSLPQQEFLKGVTHDLRG

SEQ ID NO: 13581 - protein, 624 aa, Streptococcus agalactiae
ATGACCTTAGAGGCTAAAAAGCTTGGCTTTTATCATAAAAAAGATCAATGGCTTTTTAAGGAGATTAATTTAGAGGTAGCACCTGGTCAAGTTTTAGGTATATTTGGACAAAGTGGTTGTGGAAAAACTAGTTTATCCAAAGTGCTTGCAGGTTTTTTACATCCTAGATCTGGTGAAGTATTAGTTGATGGCAGTAATTTGCCTAACAAAGCATTTAGACCTGTACAACTTATTCAACAACATCCTGAAAAAACGATGAATCCTTTATGGCCTATGAAAAAAAGTTTAGAAGAAGCTTATTACCCAAGTCGAGATTTACTAGATGCTTTTGGAATTCAAGAAAAATGGCTAAATCGTCGCCCTAGTGAACTCTCGGGAGGGGAATTACAACGCTTTTCGATTGTGCGTTCATTACATCCAGAGACTAAATACCTTATTGCAGATGAAATGACTACTATGTTGGATAGTATTACACAAGCTAGTGTATGGAAAAGCCTGTTGGAGATTGTAAAGGATAGAAATTTAGGTCTCATCGTTATTAGTCATGATTTCGCTATGTTAGAGAAACTTTGTAACCAATGCTATATGATTGAAGAGAATCGTATCGTATCTTTCAATGGAGAT

SEQ ID NO: 13582 - protein, 208 aa, Streptococcus agalactiae
MTLEAKKLGFYHKKDQWLFKEINLEVAPGQVLGIFGQSGCGKTSLSKVLAGFLHPRSGEVLVDGSNLPNKAFRPVQLIQQHPEKTMNPLWPMKKSLEEAYYPSRDLLDAFGIQEKWLNRRPSELSGGELQRFSIVRSLHPETKYLIADEMTTMLDSITQASVWKSLLEIVKDRNLGLIVISHDFAMLEKLCNQCYMIEENRIVSFNGD

SEQ ID NO: 13583 - protein, 2028 aa, Streptococcus agalactiae
ATGGAACAATTTAAACATGATGCCAAAGCCTTGTTAGAGGCAATTGGGGGTAAAGAAAATATTAGTGCAGTGACACATTGTGCCACACGCATGAGATTTGTTTTGAATGACAGTAGTAAAGCTAAGGTAAAGGTAATTGAGGAGTTACCATCAGTCAAGGGTACCTTTACCAATGCTGGGCAATTTCAAGTCATTATTGGTAATGATGTCCCTATTTTTTATAATGCTTTTGTAGCCGTTTCTGGTATTGAGGGTGTGTCTAAAGAGGCGGCAAAATCGGCTGCCCAAAAAAATCAAAACCCTTTACAGCGTGTGTTGACAATGCTGGCTGAAATATTTACACCGATTATTCCAGCCATTATTGTTGGTGGTCTGATCCTTGGTTTTCGTAATATTTTAGATGCCGTTCCATTTGAATTTTTAGGTCAAAAAGTTGTTGATGGTGTCAGGCAAGTAGACTCTTCTGGGCATCCAATTTGGAATACTCTAGTAGATGTTTCAACGTTTTGGAGCGGAGTAGACTCTTTTTTATGGTTACCAGGTGAAGCTATATTTCATTTCTTACCAGTTGGTATTGTATGGTCTGTGACTCGTAAGATGGGGACTACTCAAATCCTCGGTATTGTTCTAGGTATCTGTCTAGTGTCGCCACAATTACTTAATGCTTATTCTGTAGCTAGTACTTCAGCAGCAGACATTGCTAAAAATTGGTCTTGGAATTTTGGTTACTTTACAGTACAAAAAATTGGTTATCAAGCTCAAGTTATTCCAGCTCTGTTAGCTGGTTTGAGCCTGTCTTACTTAGAAATCTTCTGGAGAAAACATATTCCTGAAGTTGTTTCAATGATTTTTGTGCCATTTCTATCCTTAGTTCCAGCTATTATCTTGGCTCATACTGTCCTTGGACCTATTGGTTGGACACTAGGTAAATGGATTTCTGCTATCGTTCTTATTGGATTGACTGGTCCTGTAAAATGGCTCTTTGGTGCTATTTTTGGTGCCCTGTATGCCCCATTTGTTATTACTGGTTTGCACCACATGACAAATGCTATCGATACTCAACTCATAGCAGATACAAAAACACATACAACTGGCCTTTGGCCGATGATTGCTCTTTCAAATATTGCTCAGGGTTCAGCTGTACTAGCTTATTATTTTATGCATCGTCATGATGAAAAAGAGGCTCAAATATCACTTCCAGCTGCTATCTCAGCCTACCTTGGTGTTACAGAGCCGGCGCTTTTTGGTGTAAACGTTAAATACATTTATCCATTTGTTGCTGGTATGATTGGTTCAAGTGTGGCAGGTCTTTTGGCGACAACTTTTAATGTCCAAGCTAACTCTATTGGTGTAGGCGGTCTTCCAGGCTTCCTGTCAATTAATGTTAAATATATGGGATATTTCTTTATCTGTATGGCAGTGGCTATCTTTATTCCTTTATTTTTGACACTATTCTTTAAAAAATCAGGTATTTTGACAAAAACTGAAGAGGAAAAATTAGTATCTGATGCTGTCATTGCTTCAACAACAGAAACAAAATCAGCAAAAGAAAAAGCTGTCGTCTCAGGTACAAAGCTTAGTGTAGTAAGCCCTTTATCAGGTTTAGCTAAACCACTGGATCAAGCTAGTGATCCTGTCTTTTCACAAGGAATTATGGGGAAGGGAGTGGTTATCGATCCAAGTGATGGAGAACTAGTTTCACCGGTCGATGCGACAGTTTCAGTTCTTTTCCCTACGAAACATGCTATTGGATTATTAACATCAGAGGGTGTTGAGTTTCTTATTCATATTGGTATGGATACTGTTAATTTAGAAGGAAAAGGGTTTACCTCTCATGTTGCCCAAGGTGACAATGTAAAAGTAGGAGATAAACTCATTACTTTCGATATTCCAATGATAAAAGAAGAAGGATACATTGTGGAAACTCCTATTCTGATTACTAATCAAGAAGAATTCCGACCAGAAGAATTGATAGATTTACCCAAACAGATAAAACGTGGACAAGCATTAATGGTTGCCAAGAAAATT

SEQ ID NO: 13584 - protein, 676 aa, Streptococcus agalactiae
MEQFKHDAKALLEAIGGKENISAVTHCATRMRFVLNDSSKAKVKVIEELPSVKGTFTNAGQFQVIIGNDVPIFYNAFVAVSGIEGVSKEAAKSAAQKNQNPLQRVLTMLAEIFTPIIPAIIVGGLILGFRNILDAVPFEFLGQKVVDGVRQVDSSGHPIWNTLVDVSTFWSGVDSFLWLPGEAIFHFLPVGIVWSVTRKMGTTQILGIVLGICLVSPQLLNAYSVASTSAADIAKNWSWNFGYFTVQKIGYQAQVIPALLAGLSLSYLEIFWRKHIPEVVSMIFVPFLSLVPAIILAHTVLGPIGWTLGKWISAIVLIGLTGPVKWLFGAIFGALYAPFVITGLHHMTNAIDTQLIADTKTHTTGLWPMIALSNIAQGSAVLAYYFMHRHDEKEAQISLPAAISAYLGVTEPALFGVNVKYIYPFVAGMIGSSVAGLLATTFNVQANSIGVGGLPGFLSINVKYMGYFFICMAVAIFIPLFLTLFFKKSGILTKTEEEKLVSDAVIASTTETKSAKEKAVVSGTKLSVVSPLSGLAKPLDQASDPVFSQGIMGKGVVIDPSDGELVSPVDATVSVLFPTKHAIGLLTSEGVEFLIHIGMDTVNLEGKGFTSHVAQGDNVKVGDKLITFDIPMIKEEGYIVETPILITNQEEFRPEELIDLPKQIKRGQALMVAKKI

SEQ ID NO: 13585 - protein, 1623 aa, Streptococcus agalactiae
ATGACGATTGATAAACGTAAAGTTGTCTATCAAATTTATCCAAAATCATACAAAGACACAACTGGTAATGGGGTTGGTGATCTTCGTGGTATTATCGAAAAATTACCCTATTTAGCAGAACTTGGTATTGATATGGTTTGGCTCAACCCATTTTATCCAAGTCCACAACGAGATAATGGATATGATATCTCTGATTATACAGCCATTAACCCTGATTTTGGAACGATGGACGATTTTGAAGAAATGATTGAGGTGGGACGTCAATACCGTATAGATTTTATGCTTGATATGGTGCTTAATCATTGTTCAATAGAACATGAGTGGTTTAAAAAAGCACTTGCAGGAGATCGCTACTATCAAGATTTCTTTATCTTACGTGATAATCCAACAGATTGGGTATCTAAATTTGGTGGAAATGCTTGGTCACCATTTGGTGATACAGGGAAGTATTATCTTCATCTTTTTGATATCACTCAAGCTGACCTTAATTGGCGCAATGCCGATGTTCGCAAGGAACTTTTTAAAGTTGTCAATTTTTGGCGTGATAAAGGGGTTAAAGGTTTTCGATTTGATGTGATTAATTTAATTGGGAAAGATGAGATACTTGAGAACTGCCCAATTAATGATGGAAAACCAGCTTATACTGATCGTCCAATAACACATGATTATCTCAAGATGTTGAATAATGCTAGTTTTGGACAAGCTGATTCCTTCATGACAGTTGGTGAAATGTCTTCAACGACAATTGCAAATTGCATTCTTTACACTGCACCAGAACGTGAAGAGTTATCCATGGCTTTTAATTTTCACCACCTCAAAGTAGATTATAAAGATGGGCAAAAGTGGACCATTATGGCTTTTGATTTTCCTGCATTACGTGACCTTTTCCATAGTTGGGGCGAAGGAATGAGCGAAGGAAATGGTTGGAATGCTTTATTCTATAATAATCATGACCAACCGCGAGCATTAAATCGTTTTGTAGACGTGAAACGTTTTCGAAATGAAGGAGCAACCATGTTAGCAGCATCTATCCACTTATCGCGTGGTACTCCTTATATATATATGGGTGAAGAAATCGGAATGCTTGATCCCGATTACAGTTCTATGGATGATTATGTGGATATTGAGAGTTTGAATGCCTACCAAATAATGCTTGATGAAGGCAAGTCACAAGAAGAGGCATTTAGCATTATTCGAGCGAAATCTCGAGACAATTCTCGAGTACCAATGCAATGGGATGATAGTACGAATGCAGGTTTTTCTGAAGGCGCTCCATGGTTGAAAGTAGGAAAATCATATAAAGAAATCAATGTCGCAAAGGAGAAAACAGGGCTGATATTTACTTTCTATCAAGAGTTGATAAGGCTACGTAAACAACTGCCAATAATAGCTGACGGGAATTATAAAGCAGCTTTCAAAGATAACGAAAAAGTATATGCTTTTGAACGCCATCTTGATAAGGAAAAACTTCTTGTTTTAAATAATTTCTTTGCTGAGAAAGTTAAGATAAAATTACCGGAGAATTATCTCCAAGGACAAGTTCTTCTATCAAATTATAAGGATGTTACTCTTGATGAAACGGTTACTTTGCAACCTTATCAAACTTTAGCTATCTTAGTGTCA

SEQ ID NO: 13586 - protein, 541 aa, Streptococcus agalactiae
MTIDKRKVVYQIYPKSYKDTTGNGVGDLRGIIEKLPYLAELGIDMVWLNPFYPSPQRDNGYDISDYTAINPDFGTMDDFEEMIEVGRQYRIDFMLDMVLNHCSIEHEWFKKALAGDRYYQDFFILRDNPTDWVSKFGGNAWSPFGDTGKYYLHLFDITQADLNWRNADVRKELFKVVNFWRDKGVKGFRFDVINLIGKDEILENCPINDGKPAYTDRPITHDYLKMLNNASFGQADSFMTVGEMSSTTIANCILYTAPEREELSMAFNFHHLKVDYKDGQKWTIMAFDFPALRDLFHSWGEGMSEGNGWNALFYNNHDQPRALNRFVDVKRFRNEGATMLAASIHLSRGTPYIYMGEEIGMLDPDYSSMDDYVDIESLNAYQIMLDEGKSQEEAFSIIRAKSRDNSRVPMQWDDSTNAGFSEGAPWLKVGKSYKEINVAKEKTGLIFTFYQELIRLRKQLPIIADGNYKAAFKDNEKVYAFERHLDKEKLLVLNNFFAEKVKIKLPENYLQGQVLLSNYKDVTLDETVTLQPYQTLAILVS

SEQ ID NO: 13587 - protein, 2034 aa, Streptococcus agalactiae
ATGGTTGATAATAAGACTGTTGTGATAATGTTGGTATTTTTAGCTCGGAAAAATCTTTCCTTGTATGAGTTAACAGTGCAAACAAAGTTTTCAATAAAAGTTATCATAGAGCAAATTAACTATCTCAATAGTTTTTTAGCAAAAAATCACCTAACAGCTATTGCTCACTCTGCTGGACGTTATCAGTTATTAGGAGATGAAAAAGAGCATGATAAAATTGTCTCCTTATTAGAAGCTGAGCAATTTTACCTAACTCAGGAAGAAAGGGTATGTCTGATTTACCTTTATAGCTTTTGCCGAAGAGAGTTTGTCTCCAATGTGCATTATCAAGATTTTTTGAAAGTAAGTAAGAATACTACTTTATCAGATATCAAGATGCTACGTTCTAAATTAGCAAAAAGAGGTATCTCACTCACTTATACAAGAGCAAAGGGATATAGTCTAGTAGGAGATGAGATGGATAAGCATCAAGTTGCTTTTCAGATGATAACTCAACTACTAGAATCTCCCATTGGTTTTTGGTCTTTGAATTATATCTTGTCTTCTTGGAAATTCGCTCTCTCATATGAGAAGTTAGAAAAGACGGTAGAATATTTCTATGAATCTTTTCAACTTTCTCCAATACAAGATAGGCTTGAGAAATCTTTATATTTTATCATTTTAATACTGTGTCGTTATCAAAGGTCAGTAGATCGTGTTTTGCAGGGTTCTCCTATTGTTTCTGAACAATTAAAAGAGTTAACGACTATTATTGTGACTAATTTAAGTCAGGATATTTCCTTATCTAAACCATTAGATCAGAAAGAAAAAGATTATATTACCTTGATCTTATCTGGCTGTTTTGAAGGTGAGGGAACTAAAGATGATGATTTCTTTGAAGCATTGGCAAAAGCAATCGTTGATGAGATGGAAACTGTTTCACTTCTTAATTTTTCCAATAAAGAAGAGTTATTACAAGGTCTGAAGCGTCATATTATTCCAGCTTATTTCCGATTGAAATATGGTTTAACTGGCGATAGTGGTTATACACAAAATATTAAAGAGCATTACAGTGATTTATTTCTATTGGTTAAAAAGGCACTACGTCCTTTGGAAGAGCAAGTAGGATTAATACCCGATAGTGAAATTTCTTACTTCGTGATTCACTTTGGAGGCTATCTTAGACAATCAGGTGATACACAATCAATGTCTTATAAAGCTTTGATACTCTGTCCAAACGGCGTTAGTTCATCCTTAGTGATTAAGGAAAAATTGCGTGGATTATTTCCTCAAATTCATTTTCATCGTGTCTCTAAAATTGAGCAGCTGAAACTGATTGACAATCAAACTTACGATATGGTCTTTTCTACTATATTTGTAGAAACAAAAAAACCTAATTATCTAGTTTCGCTGATGATGACAGCAGAGCAAGTACAACAGCTCAAAGAACTGGTTATTTCAGATTTTCCCAAAGCTTGCCTTGACGATTTCCAACTTGATCAATTAATAGCAACTATAAAAAAATACGCTCATGTTCATTGTGAAGAGGAATTAAAATTGGCTTTGAGGACAATGGTAAAACAAGATATATTTAGAAAGGATGTGAGGCCCTTGTTGCACCAACTTATAACAGAGGAAACTTATCAGACAAGTTCTGAACAAATGAATTGGAAAGAGGCAATTCGTTTAGCGGCAAAACCCTTGTTAGCTTCTGGAAAAATTACGGAAAGTTACCCAGAAGCTATGATTGAAAAGGTCGAAGAGTTTGGTCCTTTTATCAATCTTGGTAAAGGTATTGCTATTCCACATGCCAGACCAGAAGATGGGGTAAACTCTGTCGGTATGTCAATGCTTGTTTTGGAACAGCCTATTTATTTATTGGATGACCCCAAACAGGAAATTTATCTCTTATTATGCATAGCAGCTATTGATAATGAAACGCATTTGAAAGCTCTATCGCATTTGACAACAATACTTCGTGATAATAATAATGTTAAAGCTTTGTTAGCTTCACGTGGGTATCAAGATATTGAAATGATTATAAAACAGGAGGAT

SEQ ID NO: 13588 - protein, 678 aa, Streptococcus agalactiae
MVDNKTVVIMLVFLARKNLSLYELTVQTKFSIKVIIEQINYLNSFLAKNHLTAIAHSAGRYQLLGDEKEHDKIVSLLEAEQFYLTQEERVCLIYLYSFCRREFVSNVHYQDFLKVSKNTTLSDIKMLRSKLAKRGISLTYTRAKGYSLVGDEMDKHQVAFQMITQLLESPIGFWSLNYILSSWKFALSYEKLEKTVEYFYESFQLSPIQDRLEKSLYFIILILCRYQRSVDRVLQGSPIVSEQLKELTTIIVTNLSQDISLSKPLDQKEKDYITLILSGCFEGEGTKDDDFFEALAKAIVDEMETVSLLNFSNKEELLQGLKRHIIPAYFRLKYGLTGDSGYTQNIKEHYSDLFLLVKKALRPLEEQVGLIPDSEISYFVIHFGGYLRQSGDTQSMSYKALILCPNGVSSSLVIKEKLRGLFPQIHFHRVSKIEQLKLIDNQTYDMVFSTIFVETKKPNYLVSLMMTAEQVQQLKELVISDFPKACLDDFQLDQLIATIKKYAHVHCEEELKLALRTMVKQDIFRKDVRPLLHQLITEETYQTSSEQMNWKEAIRLAAKPLLASGKITESYPEAMIEKVEEFGPFINLGKGIAIPHARPEDGVNSVGMSMLVLEQPIYLLDDPKQEIYLLLCIAAIDNETHLKALSHLTTILRDNNNVKALLASRGYQDIEMIIKQED

SEQ ID NO: 13589 - protein, 282 aa, Streptococcus agalactiae; identical to SEQ ID NO: 4751

SEQ ID NO: 13590 - protein, 94 aa, Streptococcus agalactiae; identical to SEQ ID NO: 416

SEQ ID NO: 13591 - DNA, 1353 bp, Streptococcus agalactiae
atgaaaggtctattggattttttagttaatattgccagaacgccagctattttagtcgccttgatagccattatcggtttagtactgcagaaaaaaggtgttcctgatattgtaaaaggtggaataaaaacatttgttggcttcttagtggtttctggaggtgcagggatagtccaaaattccttgaatccatttggaaaaatgtttgaacatgcttttcatttggtgggggtagttcctaataatgaagccattgtagcagtagctcttacgaagtatggctcagcaactgctttgattatgttagcgggaatgatttttaatattttaattgctcgttttacaaaatttaaatatatttttctgacaggacatcatacattgtatatggcttgtatgattgctgttatttttgccgtagcaggctttacttcgttctcgctcatcctttttggaagtctagcgttagggattattatgagcgtatctcctgcatttgtgcaaaaatacatgattcaactgacaggtaatgataaggtggcacttgggcactttggttctttaggctattggttgagtggatttattggtggaattgttggagataaatcaaaatcaacagaagatattaaatttccaaagagtttatcatttttacgtgacagtaccgtaagtattactatctcaatggcaattatttaccttatcgttgcagtgtttgctggtgaggcttatattgcaaaagaaataagtaacggtgtcaatggtcttgtttatgccctccaactagctgggcaatttgcagcaggtgtattcgttattttagcaggtgtacgccttatcctaggtgaaattgtaccagcctttaagggaatctcagaaaaattggttccaaattcaaaaccagccttggattgtccaattgtttacccttatgcacctaatgcagtattgattggttttatctcaagttttgttggtggattggttagtatgatagttatgattgtgactggcactactgtcattttaccaggggtcgttcctcatttcttctgtggggcaacggcaggtgttatcggtaatgcttctggtggtgtgagaggagcgactattggtgcatttgttcaaggtatcctcatcagtttcttgccgattttcttgatgcctgtactaggtggacttggtttcaaaggttcaacattctcagatgctgattttggtttgaccggtatcattcttggcgctcttaatcatgtcggcggtgcgatagctattgttattggtattgtagttatcttaattggactttttggcatttcatttgttggaaaatcaacccataaggaaggt

SEQ ID NO: 13592 - protein, 451 aa, Streptococcus agalactiae
MKGLLDFLVNIARTPAILVALIAIIGLVLQKKGVPDIVKGGIKTFVGFLVVSGGAGIVQNSLNPFGKMFEHAFHLVGVVPNNEAIVAVALTKYGSATALIMLAGMIFNILIARFTKFKYIFLTGHHTLYMACMIAVIFAVAGFTSFSLILFGSLALGIIMSVSPAFVQKYMIQLTGNDKVALGHFGSLGYWLSGFIGGIVGDKSKSTEDIKFPKSLSFLRDSTVSITISMAIIYLIVAVFAGEAYIAKEISNGVNGLVYALQLAGQFAAGVFVILAGVRLILGEIVPAFKGISEKLVPNSKPALDCPIVYPYAPNAVLIGFISSFVGGLVSMIVMIVTGTTVILPGVVPHFFCGATAGVIGNASGGVRGATIGAFVQGILISFLPIFLMPVLGGLGFKGSTFSDADFGLTGIILGALNHVGGAIAIVIGIVVILIGLFGISFVGKSTHKEG

SEQ ID NO: 13593 - DNA, 855 bp, Streptococcus agalactiae
atgacatcaccagaagaaagatattcatctctaagacgatttgcaacggagattcgtttaaatacactagaaacgctaaaccatttaggattcggtcactatgggggtagtttatcaattgttgagactttggctattctgtacggtgatattatggatataaaccctgaaaaattcaaagaaagtgatcggaattatatggtcttatcaaaaggacatgctggtccagccttgtatagtacactctatttaaaaggtttttttgataaaacattccttcattcgctcaatacaaacggtaccaaactaccttcgcatcctgaccgcaatttaactcctggtatagatgtaacgacaggctcattaggtcaaggcattagtattgcaacgggaattgcttatgctcaaaagattgagaattcaagctattatacttatactattgtaggtgatggtgaattaaatgaaggacaatgttgggaggctatacaatttgctgcgcatcatcaactgcaccatttaattgtttttgtagatgataataaaaaacaattagatggtttgacagctgatatttgtaatcctggagactttgttgctaaatttgaagcttttggatttgatgcagtacgtgtaaaaggagatgacattgaggcaattgacaaagctattaaaacttttcaagattcaaatagtgtcaaaccaaaatgcattgttttagatagtatcaagggacaaggtgtgaaagagttggaggagttagcttctaatcatcatttacgaccagatttacaacaaaaaacaatgttagagcgagcggtgataagcttgagagaaagtttggaggtggtagaa

SEQ ID NO: 13594 - protein, 285 aa, Streptococcus agalactiae; identical to SEQ ID NO: 4756

SEQ ID NO: 13595 - DNA, 927 bp, Streptococcus agalactiae
atgagatgttcaaccaaagaaatgaggcttgtctatcgtgatttcctccttcaagctaatcaagaaaataaacaaattaccgttttagaagccgatttgtcgagttcaatgtcaacaaatgtactggcatcagaatttggaaaacgttatattaatctaggtattatggaggctgagatggtaggtcttgcagcagggctcgccattaaaggttacaagccataccttcatacttttggtcctttcgcgtcaaggcgtgtctttgatcaagtatttttatcgttaggttactcacaattatcagctacgattattggctcagatgcaggagttagcgcagaaatgaatggcggaactcatatgccttttgaagagttaggtctactaaggttaattccaaaggcgactatttttgaggttagtgatgatattcagtttgaagcaattttaaaacaaacattaagtattgatggtctaaaatacattagaactattcgtaaggcccccactgcagtttatgagggatgcgaagatttttcaaaaggttttatacaattacgccagggaaaagatattgctcttgtagcaagtggtattatggtttctagagcgatagaagcagccgactacctcaaagaactagggattgaggcctcagttatcgacctttttaaaattaagccccttccagaagaactgaaaccattactgatagatcaatccattgtaactattgagaatcataaccgtattggcggtatcggaagtgcattatgcgaatggcttagtatggagaaagacactactgttagtcgtatgggtattgatgagcgatttggtcaggtaggtcagatggaatatttattagaggagtatggactcgctgttaaagatatagtagagcattgcaaatcaatttataaatca

SEQ ID NO: 13596 - protein, 309 aa, Streptococcus agalactiae
MRCSTKEMRLVYRDFLLQANQENKQITVLEADLSSSMSTNVLASEFGKRYINLGIMEAEMVGLAAGLAIKGYKPYLHTFGPFASRRVFDQVFLSLGYSQLSATIIGSDAGVSAEMNGGTHMPFEELGLLRLIPKATIFEVSDDIQFEAILKQTLSIDGLKYIRTIRKAPTAVYEGCEDFSKGFIQLRQGKDIALVASGIMVSRAIEAADYLKELGIEASVIDLFKIKPLPEELKPLLIDQSIVTIENHNRIGGIGSALCEWLSMEKDTTVSRMGIDERFGQVGQMEYLLEEYGLAVKDIVEHCKSIYKS

SEQ ID NO: 13597 - DNA, 1257 bp, Streptococcus agalactiae
atgcgagcttggaaaggtattgttttaattttatctagcatagtggtgacactagtagcatggcaaaatgcaggattaagtgaatttgttgtaccaggattagctttgacaagtttatcgctaacattcctcttatcaaccaaatttaggatacttgaaagttactttcaaggtattgaaaatatgtatttttaccacaaggtaatggctgtattttcaatgattttgcttctattgcacaaaattggtcttgtacaaggcggacatggaagtgagtttgcaaagactattggcagtgcgggattatatctttttctaagtattgtttttgtagcttatttcggaaattttttaaagtatgaaatttggcgttttattcatcgctttgtttatttagtctatattttgggattggtacatacttttctgattttaggagataggatactagggaatactttactcagtttaatcgtattaggttatgctgtcattggggttatatctggattttatattattttcctatattctagaatgcgttttcgtcgtgtagggtacgttcaaaaggttactcatcttaaccatgatacaactgagattgaaatagcaatgaagcgtccttatcgatatgactatggacaatttacttttttaaaaatttatcaagccggctttgaatcagcagctcatcctttctcgatatcgggtggtcatgatagagtgatatttttaactgttaaagcttcaggagattatacgaaatccatttacaaacagctaaaagttgggacaaaaatagccttagatagagcttatggtcatatgttatttgataaagacaagaaagaacaggtttggattgcaggaggtatcggcatcactcccttcatttcatttattagagaaaatagtattttgactaagagagttgacttcttttatacattttcaaatcaagacaatttgatttatcaagatatgttagaatcctatgctaaagccaatcctaattttaaacttcacttaaataatagtagcctccaaggaagacttgattttagtcagtctgtttttgaaggacaaccaacgatatttatgtgtgggccaactagtatgacatctacttatgctaaggtctttcggcaaaaagatgcaaagtctcgtttagtctatgaaggattttcctttagagacagttggttatccatatttctattaaaaacttttgacaaagtttattctaatttgataaaa

SEQ ID NO: 13598 - protein, 419 aa, Streptococcus agalactiae
MRAWKGIVLILSSIVVTLVAWQNAGLSEFVVPGLALTSLSLTFLLSTKFRILESYFQGIENMYFYHKVMAVFSMILLLLHKIGLVQGGHGSEFAKTIGSAGLYLFLSIVFVAYFGNFLKYEIWRFIHRFVYLVYILGLVHTFLILGDRILGNTLLSLIVLGYAVIGVISGFYIIFLYSRMRFRRVGYVQKVTHLNHDTTEIEIAMKRPYRYDYGQFTFLKIYQAGFESAAHPFSISGGHDRVIFLTVKASGDYTKSIYKQLKVGTKIALDRAYGHMLFDKDKKEQVWIAGGIGITPFISFIRENSILTKRVDFFYTFSNQDNLIYQDMLESYAKANPNFKLHLNNSSLQGRLDFSQSVFEGQPTIFMCGPTSMTSTYAKVFRQKDAKSRLVYEGFSFRDSWLSIFLLKTFDKVYSNLIK

SEQ ID NO: 13599 - DNA, 267 bp, Streptococcus agalactiae
atggcaatctcaaaagagaaaaaaaatgaaatcattgctcaatatgcacgtcacgaaggtgatacaggatcagttgaagttcaagtagcagttcttacttgggaaatcaaccaccttaatgaccacatcaaacaacacaaaaaagaccacgctacttaccgtggattgatgaaaaaaattggtcaccgtcgtaacttattagcatacctacgtcgtacagatgttaaccgttaccgtgaattgattcaatcacttggacttcgtcgt

SEQ ID NO: 13600 - protein, 89 aa, Streptococcus agalactiae; identical to SEQ ID NO: 428

SEQ ID NO: 13601 - protein, 2127 aa, Streptococcus agalactiae
ATGTCAAAACAAGTCTTTGAAATGATTTTTGCTGGTAAAAAATTAGTTGTTGAAACTGGCCAAGTGGCTAAACAAGCAAATGGATCAGTTGTCGTTCGTTATGGAGATTCTACTGTACTTACAGCAGCAGTTATGTCTAAGAAAATGTCAACAGGTGATTTTTTCCCACTTCAAGTCAATTACGAAGAAAAAATGTATGCTGCTGGGAAATTTCCGGGTGGTTTTAACAAACGTGAAGGGCGTCCAAGTACGGATGCTACCTTAACAGCACGTCTTATTGATAGACCAATCCGTCCGATGTTTGCTGAGGGATTTCGTAACGAAGTCCAGGTCATCAATACTGTTCTTTCATTTGATGAAAATGCTAGCGCACCAATGGCTGCTATGTTTGGTTCATCATTAGCATTATCGATTTCCGATATTCCTTTCAATGGGCCAATTGCTGGAGTTCAAGTTGCTTATGTTGATGGCAATTTTATTATTAATCCGACAGCACAAGAACAAGAGGCTTCTGCGTTAGAATTAACGGTTGCAGGTACTAAAGAAGCGATTAACATGGTTGAATCTGGAGCGAAAGAACTTTCAGAAGAAATCATGCTAGAGGCTCTTCTTAAAGGACATGAGGCTGTCTGTGAATTAATCGCCTTTCAAGAAGAGATTGTAACTGCTATTGGTAAAGAAAAAGCCGAAGTAGAACTTCTTCAAGTTGATCCAGAACTTCAAGCAGAAATTATTGCTACTCATAACATAGCTTTACAGGCTGCAGTACAAGTTGAAGAGAAAAAGGCTAGAGAAGCAGCTACAGAAGCAGTTAAAGAAGTAGTTATAGGTGAATATGAGGCGCGTTACGCTGAACATGAAGAATATGATCGCATTATGCGTGATGTTGCTGAAATTTTAGAACAAATGGAACATGCAGAAGTTCGTCGCCTCATTACAGAAGATAAGGTTCGTCCTGATGGACGTCGTGTGGATGAGATTCGTCCATTAGATGCAGTGATTGATTTTTTACCACAAGTTCATGGATCAGGTCTCTTTACACGAGGACAAACCCAAGCATTATCAGTATTAACGTTAGCACCTATGGGTGAAGCACAAATCATTGATGGGCTAACACCAGAGTATAAGAAACGCTTTATGCACCACTATAACTTCCCACAATATTCAGTTGGTGAGACGGGACGTTATGGAGCTGCAGGGCGTCGTGAAATTGGTCACGGTGCTTTAGGAGAGCGTGCATTAGAACAAGTCCTTCCAAGCTTGGAGGAGTTTCCGTATGCTATCCGACTAGTTGCAGAAGTTTTAGAATCAAACGGTTCATCATCTCAGGCTTCTATATGTGCTGGAACGCTTGCTCTTATGGCAGGTGGTGTGCCTATAAAAGCTCCGGTTGCTGGTATTGCCATGGGACTCATATCAGATGGAACAAACTACACAGTCCTTACTGATATTCAAGGATTAGAAGACCATTTTGGCGATATGGACTTTAAGGTTGCGGGTACACGTGAAGGGATTACAGCACTTCAAATGGATATTAAAATTGAAGGTATTACCCCTCAAATTTTGGAAGAAGCTCTTGCGCAAGCTAAAAAAGCACGCTTTGAAATTCTTGATGTCCTTCATGGAGCTATCGCAGAGTCACGTCCACAATTAGCACCAACGGCACCTAAGATTGATATGATAAAAATCGATGTTGATAAGATTAAAGTTGTCATCGGTAAAGGCGGCGAAACTATCGATAAAATCATCGCTGAAACAGGTGTTAAGATTGATATTGATGAAGAAGGAAATGTATCTATCTTCTCTAGTGATCAGGCTGCTATTGATCGTACGAAAGACATTATTGCAAGTTTAGTACGTGAAGCAAAAGTGGGAGAAGTTTACCATGCTAAAGTAGTTCGTATCGAGAAATTCGGTGCCTTTGTCAACCTCTTTGATAAAACAGATGCATTGGTACATATTTCAGAAATTGCATGGACACGTACAGCAAATGTAGCTGATGTTCTTGAAATTGGTGAAGAAGTTGATGTGAAAGTCATCAAAATTGATGATAAAGGGCGAGTTGATGCCTCTATGAAAGCATTATTACCACGTCCTCCAAAAGCTGACAATCCTAAAAAGGAATCT

SEQ ID NO: 13602 - protein, 709 aa, Streptococcus agalactiae
MSKQVFEMIFAGKKLVVETGQVAKQANGSVVVRYGDSTVLTAAVMSKKMSTGDFFPLQVNYEEKMYAAGKFPGGFNKREGRPSTDATLTARLIDRPIRPMFAEGFRNEVQVINTVLSFDENASAPMAAMFGSSLALSISDIPFNGPIAGVQVAYVDGNFIINPTAQEQEASALELTVAGTKEAINMVESGAKELSEEIMLEALLKGHEAVCELIAFQEEIVTAIGKEKAEVELLQVDPELQAEIIATHNIALQAAVQVEEKKAREAATEAVKEVVIGEYEARYAEHEEYDRIMRDVAEILEQMEHAEVRRLITEDKVRPDGRRVDEIRPLDAVIDFLPQVHGSGLFTRGQTQALSVLTLAPMGEAQIIDGLTPEYKKRFMHHYNFPQYSVGETGRYGAAGRREIGHGALGERALEQVLPSLEEFPYAIRLVAEVLESNGSSSQASICAGTLALMAGGVPIKAPVAGIAMGLISDGTNYTVLTDIQGLEDHFGDMDFKVAGTREGITALQMDIKIEGITPQILEEALAQAKKARFEILDVLHGAIAESRPQLAPTAPKIDMIKIDVDKIKVVIGKGGETIDKIIAETGVKIDIDEEGNVSIFSSDQAAIDRTKDIIASLVREAKVGEVYHAKVVRIEKFGAFVNLFDKTDALVHISEIAWTRTANVADVLEIGEEVDVKVIKIDDKGRVDASMKALLPRPPKADNPKKES

SEQ ID NO: 13603 - protein, 750 aa, Streptococcus agalactiae
ATGACAAGTACAAACGAGTTAGACATTAGATTGCGTGCTTTTATCAATGCACCGGATAATTTTTTAGATAGTATAGGTCTTGTGAATGCCTTGCACCACTCTACGGTTTGGGCAAGCAAGGAACCCTATGCTATTCAAGTAGATGGTCAAGAAGTTGTTCCTGTTTTTACGGATATTACTGACCTTAATCATTTCAAAGAGGAGCAAGAAAGTGCTCGAGATATGTTTTGGGAGAGTCGTCGTAGTTTAGACGTTCTTGATGAAGCTATTTCACATGGCTTAGCAGGATTGGTCTATAATTTAAAAAAAGAAGGCGATTTTGGGAACTCGACTATTTTCTACTGTGAAGATATGGTGCAATTTATGAACAATTACACCACAATCTTGAATCAGTTGTTAAATGAAGATAACATTGTTGCCGATATCATGGATAAAACCTACTTGGTACCTGCCTTTGTCCATCCACGTGAAGAAGGTAGTTTTGACCGTTTTTTCCCTACAATGTCTACCCCCGAAGGAAAAAGTTATGTTCCAGTATTCTCAAACCTTTTAAGTTTTGAAAAATGGTATAACCATAATGATTTTGGTGGTGCTTTTAGGAAAGCACAAGGAGTAATTTTAGCCTGGACGATTGACGATATTTATAAACCGCGTAATGGAGAAAATGAGATTGATGATACCTTTGGAGTAGCCATCAATCCATTTGATGAACAACAAGTTTTAGTTGATTGGTCTGATGTAGAAAACGAT

SEQ ID NO: 13604 - protein, 250 aa, Streptococcus agalactiae; identical to SEQ ID NO: 4766

SEQ ID NO: 13605 - protein, 582 aa, Streptococcus agalactiae; identical to SEQ ID NO: 4767

SEQ ID NO: 13606 - protein, 194 aa, Streptococcus agalactiae; identical to SEQ ID NO: 434

SEQ ID NO: 13607 - protein, 180 aa, Streptococcus agalactiae; identical to SEQ ID NO: 4769

SEQ ID NO: 13608 - protein, 60 aa, Streptococcus agalactiae; identical to SEQ ID NO: 4770

SEQ ID NO: 13609 - protein, 1341 aa, Streptococcus agalactiae
ATGATAAAAATTTACGACACTATGACTCGCAGTTTACAAGATTTTATACCTCTCAATGAAGGTAAAGTCAACATGTACGTCTGTGGGCCAACAGTTTATAACTATATACACATCGGGAATGCCCGCAGTGTAGTAGCTTTTGATACTATTCGTCGTTATTTTGAGTATTGTGGTTACCAAGTCAATTATATTTCTAACTTTACTGATGTTGATGATAAAATTATAAAAGGTGCAGCTGAAGCAGGTATGGATACAAAATCCTTTTCAGATAAGTTTATTTCAGCATTTATGGAAGATGTTGCTGCATTAGGTGTCAAACCTGCTACAAAAAATCCTCGAGTTATTGACTATATGGATGAGATTATTGATTTTGTTAAAGTTTTAGTTGATAAGGAATTTGCCTATGAAGCTAATGGAGATGTTTATTTTAGAGTAAGTAAATCACATCATTATGCAAAATTAGCCAATAAAACTTTGGAAGATTTAGAGATTGGTGCAAGTGGTCGTGTTGATGGGGAAGGAGAGATTAAAGAGAATCCTTTAGATTTTGCACTTTGGAAATCAGCTAAATCTGGGGAAGTCTCATGGGAAAGTCCTTGGGGGAAAGGGCGCCCAGGGTGGCATATTGAATGTTCTGTTATGGCAACTGAGATCCTTGGTGATACTATTGATATCCATGGTGGAGGAGCTGATTTAGAATTTCCACATCACACGAATGAGATTGCACAATCTGAAGCTAAAACAGGTAAGACCTTTGCAAATTACTGGATGCATAATGGTTTTGTTAACGTTGATAACGAGAAAATGTCTAAATCTCTTGGTAACTTTATTACTGTTCACGATATGTTGAAGAGCGTTGACGGACAAGTAATACGTTTTTTCTTAGCGACACAACAGTATCGTAAACCCGTGAATTTCACTGAAAAGGCCGTTCATGATGCGGAAGTTAACCTTAAATATTTAAAAAATACTTTCAACTTACCAATCCAAGAGAATGCTAATGATGAAGAATTAGAACAATTTGTGAAAGCATTTCAAGAAGCGATGGATGATGATTTTAATACAGCAAACGGTATTACTGTTATCTTTGAAATGGCAAAATGGATTAATTCAGGACACTATACTTCAAAAGTTAAGGAAACCCTTGCTGAATTATTAGAAATTTTTGGTATTGTATTCCAAGAGGAAGTTCTTGATGCTGATATTGAATCTTTAATAGAACAACGTCAAGAAGCACGAGCTAATCGTGATTTTGCAACTGCTGATCGTATTAGAGATGAATTAGCAAAACAAGGAATTAAATTGTTAGATACTAAGGATGGCGTGAGGTGGACTCGTGAT

SEQ ID NO: 13610 - protein, 447 aa, Streptococcus agalactiae
MIKIYDTMTRSLQDFIPLNEGKVNMYVCGPTVYNYIHIGNARSVVAFDTIRRYFEYCGYQVNYISNFTDVDDKIIKGAAEAGMDTKSFSDKFISAFMEDVAALGVKPATKNPRVIDYMDEIIDFVKVLVDKEFAYEANGDVYFRVSKSHHYAKLANKTLEDLEIGASGRVDGEGEIKENPLDFALWKSAKSGEVSWESPWGKGRPGWHIECSVMATEILGDTIDIHGGGADLEFPHHTNEIAQSEAKTGKTFANYWMHNGFVNVDNEKMSKSLGNFITVHDMLKSVDGQVIRFFLATQQYRKPVNFTEKAVHDAEVNLKYLKNTFNLPIQENANDEELEQFVKAFQEAMDDDFNTANGITVIFEMAKWINSGHYTSKVKETLAELLEIFGIVFQEEVLDADIESLIEQRQEARANRDFATADRIRDELAKQGIKLLDTKDGVRWTRD

SEQ ID NO: 13611 - protein, 477 aa, Streptococcus agalactiae
ATGTCAGATTTATTTAACAAAATTAAAACCGTAACTGAGCTTGATGGGATTGCTGGCTATGAACACAATATCCGCAACTTCCTTCGTCAAGAAATAACTCCTTTAGTTGATCAAGTTGAGACAGACGGACTTGGTGGAATTTTTGGAGTAAAAAATACTCATGAGACTAATGCTCCTAAAGTCATGGTTGCTGCCCATATGGATGAAGTCGGCTTTATGGTTAGTCATATTCAGCCAGATGGAACATTTCGTGTACTTGAGGTTGGAGGATGGAATCCCCTAGTAGTCAGCTCACAACGCTTTACCCTCTACACACGTTCTGGTGATGCCATTCCTGTTATATCAGGCTCAGTTCCTCCTCACTTTCTTCGTGGACAAAGCGGTGGAACAACATTACCCAAAATTAGTGACATTGTTTTTGATGGAGGATTCACAGATAAAAATGAAGCTGAAAGCTTTGGCATGCTNNNNNTTAAT

SEQ ID NO: 13612 - protein, 159 aa, Streptococcus agalactiae
  VARIANT 157, 158: Xaa = Any Amino Acid
MSDLFNKIKTVTELDGIAGYEHNIRNFLRQEITPLVDQVETDGLGGIFGVKNTHETNAPKVMVAAHMDEVGFMVSHIQPDGTFRVLEVGGWNPLVVSSQRFTLYTRSGDAIPVISGSVPPHFLRGQSGGTTLPKISDIVFDGGFTDKNEAESFGMLXXN

SEQ ID NO: 13613 - protein, 264 aa, Streptococcus agalactiae
ATGGTGGCTGCCCATATGGATGAAGTCGGCTTATGGGTTAGTCATATTCAGCCAGATGGAACATTTCGTGTACTTGAGGTTGGAGGATGGAATCCCCTAGTAGTCAGCTCACAACGCTTTACCCTCTACACACGTTCTGGTGATGCCATTCCTGTTATATCAGGCTCAGTTCCTCCTCACTTTCTTCGTGGACAAAGCGGTGGAACAGCATTACCCAAAATTAGTGACATTGTTTTGATGGAGGATTCACAGATAAAANNNNNT

SEQ ID NO: 13614 - protein, 88 aa, Streptococcus agalactiae
  VARIANT 87, 88: Xaa = Any Amino Acid
MVAAHMDEVGLWVSHIQPDGTFRVLEVGGWNPLVVSSQRFTLYTRSGDAIPVISGSVPPHFLRGQSGGTALPKISDIVLMEDSQIKXX

SEQ ID NO: 13615 - protein, 622 aa, Streptococcus agalactiae
ATGATTTTTACTTATAATAGAGAGCATGTTGGTGATACCTTAATGGTTATTGTTAAGGATAGTCAAGGAGCTAAGCTAGATGTTGATCTGCGGACAAGTAGCACGCGTCTATCTGCAAGATAGTAAAGAAACAGTTGCTTGGAATATCTTTGAAGTGTCAAGTTTAATTGCTATTGAGGGAGTAGGTCAAGTAACTTTATCTGATCAAGTTATTAAAATCCTTAATGCAGAACTACTGAAAGAAGGATTCGAAGACTCTCTTGTTAATAATATTGAACCTACATTTGTTGTGGCGCAAATTAAAGAAATGATTGATCATCCAGATAGTGACCATTTACACATCTGTCAAGTAGAAATCAACGATGGGAAGACGGTTCAAATCGTTTGTGGGGCACCTAATGCTTCAGTAGGCCTTAAAACAGTTGCAGCTCTTCCAGGAGCTATGATGCCAAATGGTAGCCTTATTTTCCCAGGAAAACTTCGTGGAGAAGATAGCTTTGGAATGTTATGTAGTGCTCGCGAGTTAGCTCTTCCAAATGCTCCTCAAGTCAGAGGTATCATTGAATTATCTGATCAGGTAATTGTTGGAGAGTCTTTCGACGCCAATAAACATTGGAAAAAT

SEQ ID NO: 13616 - protein, 208 aa, Streptococcus agalactiae
  VARIANT 30: Xaa = Any Amino Acid
MIFTYNREHVGDTLMVIVKDSQGAKLDVDXRGQVARVYLQDSKETVAWNIFEVSSLIAIEGVGQVTLSDQVIKILNAELLKEGFEDSLVNNIEPTFVVAQIKEMIDHPDSDHLHICQVEINDGKTVQIVCGAPNASVGLKTVAALPGAMMPNGSLIFPGKLRGEDSFGMLCSARELALPNAPQVRGIIELSDQVIVGESFDANKHWKN

SEQ ID NO: 13617 - protein, 468 aa, Streptococcus agalactiae
GTGTCAAGTTTAATTGCTATTGAGGGAGTAGGTCAAGTAACTTTATCTGATCAAGTTATTAAAATCCTTAATGCAGAACTACTGAAAGAAGGATTCGAAGACTCTCTTGTTAATAATATTGAACCTACATTTGTTGTGGCGCAAATTAAAGAAATGATTGATCATCCAGATAGTGACCATTTACACATCTGTCAAGTAGAAATCAACGATGGGAAGACGGTTCAAATCGTTTGTGGGGCACCTAATGCTTCAGTAGGCCTTAAAACAGTTGCAGCTCTTCCAGGAGCTATGATGCCAAATGGTAGCCTTATTTTCCCAGGAAAACTTCGTGGAGAAGATAGCTTTGGAATGTTATGTAGTGCTCGCGAGTTAGCTCTTCCAAATGCTCCTCAAGTCAGAGGTATCATTGAATTATCTGATCAGGTAATTGTTGGAGAGTCTTTCGACGCCAATAAACATTGGAAAAAT

SEQ ID NO: 13618 - protein, 156 aa, Streptococcus agalactiae
MSSLIAIEGVGQVTLSDQVIKILNAELLKEGFEDSLVNNIEPTFVVAQIKEMIDHPDSDHLHICQVEINDGKTVQIVCGAPNASVGLKTVAALPGAMMPNGSLIFPGKLRGEDSFGMLCSARELALPNAPQVRGIIELSDQVIVGESFDANKHWKN

SEQ ID NO: 13619 - protein, 267 aa, Streptococcus agalactiae
ATGGACTCTTTAACAGGAGAAGCAAACTTTAAAAGTGCCAGTTTTGACCAGGGAAATATTTATACCTTAGAAGAACTAAAACAAAATACAAATTTATTAGTTGAACGTTATCAGGGTATTCGTACCTTCTATTCATTACAACCAAACCATTTTAAAACTGAAACTGATTGGCTAAACAAAATGCTTGCTATCGAGCTAAGTGTTGCTGACAAAGCTCCTTATAAAGATATTGCTTTTTTGCAACACATCACACTTAAAAAGTCATTG

SEQ ID NO: 13620 - protein, 89 aa, Streptococcus agalactiae
MDSLTGEANFKSASFDQGNIYTLEELKQNTNLLVERYQGIRTFYSLQPNHFKTETDWLNKMLAIELSVADKAPYKDIAFLQHITLKKSL

SEQ ID NO: 13621 - protein, 1052 aa, Streptococcus agalactiae
ATGGTAAAAGAATATAAGGCTGGAGAACAAGCAATCTTCGTTCGAAATCCATATTGGCACGGTAAAAAGCCTTATTTTAAAAAGTGGACTTGGGTATTACTTGATGAAAATACAGCACTAGCTGCTTTAGAATCTGGTGATGTTGACATGATTTACGCAACGCCAGAGCTTGCTAGCAAGAAAGTCAAAGGAACACGTCTTCTAGATATTGCTTCAAATGATGTTCGTGGGTTATCGCTACCTTATGTGAAGAAAGTGTTGTGAAAAATTCACCAGACGGTTATCCAGTAGGAAATGATGTCACTAGTGATCCAGCAATCAGAAAAGCCTTGACTATTGGTTTAAATAGACAAAAAGTTCTGGATACTGTTTTAAATGGTTATGGTAAACCAGCTTATTCAATTATTGATAGAACACCATTCTGGAATCCAAAAACAGCAATTAAAGATAATAAAGTAGCTAAAGCTAAGCAACTTTTGACAAAAGCTGGATGGAAAGAACAAGCAGACGGTAGCCGCAAAAAAGGAAATCTTAAAGCGGAATTTGACCTTTACTACCCTACTAATGATCAATTACGAGCAAACTTAGCCGTTGAAGTAGCGGAGCAAGCTAAAGCCTTAAGTATTACTATTAAACTCAAGGCTAGTAACTGGGATGAAATGGCAACTAAGTCACATGATTCAGCCTTACTTTATGCGGGAGGACGTCATCATGCGCAGCAATTTTATGAATCACATTACCCAAGTTTAGCTGGTAAAGGTTGGACCAATATTACTTTTTATAACAATCCTACTGTGACTAAGTACCTTGACAAAGCAATGACATCTCCCGACCTTGATAAAGCTAACAAATATTGGAAGTTAGCTCAGTGGGATGGCAAAACAGGTGCTTCCACTCTTGGAGATTTACCAAATGTATGGTTGGTGAGTCTTAACCATACTTATATTGGTGATAAACGTATCAATGTAGGTAAACAAGGTGTCCATAGTCATGGTCATGATTGGTCATTATTGACTAACATTGCTGAATGGACTTGGGATGAATCTGCTAAG

SEQ ID NO: 13622 - protein, 351 aa, Streptococcus agalactiae
MVKEYKAGEQAIFVRNPYWHGKKPYFKKWTWVLLDENTALAALESGDVDMIYATPELASKKVKGTRLLDIASNDVRGLSLPYVKKGVVKNSPDGYPVGNDVTSDPAIRKALTIGLNRQKVLDTVLNGYGKPAYSIIDRTPFWNPKTAIKDNKVAKAKQLLTKAGWKEQADGSRKKGNLKAEFDLYYPTNDQLRANLAVEVAEQAKALSITIKLKASNWDEMATKSHDSALLYAGGRHHAQQFYESHYPSLAGKGWTNITFYNNPTVTKYLDKAMTSPDLDKANKYWKLAQWDGKTGASTLGDLPNVWLVSLNHTYIGDKRINVGKQGVHSHGHDWSLLTNIAEWTWDESAK

SEQ ID NO: 13623 - protein, 393 aa, Streptococcus agalactiae
ATGGCAACTAAGTCACATGATTCAGCCTTACTTTATGCGGGAGGACGTCATCATGCGCAGCAATTTTATGAATCACATTACCCAAGTTTAGCTGGTAAAGGTTGGACCAATATTACTTTTTATAACAATCCTACTGTGACTAAGTACCTTGACAAAGCAATGACATCTCCCGACCTTGATAAAGCTAACAAATATTGGAAGTTAGCTCAGTGGGATGGCAAAACAGGTGCTTCCACTCTTGGAGATTTACCAAATGTATGGTTGGTGAGTCTTAACCATACTTATATTGGTGATAAACGTATCAATGTAGGTAAACAAGGTGTCCATAGTCATGGTCATGATTGGTCATTATTGACTAACATTGCTGAATGGACTTGGGATGAATCTGCTAAG

SEQ ID NO: 13624 - protein, 131 aa, Streptococcus agalactiae
MATKSHDSALLYAGGRHHAQQFYESHYPSLAGKGWTNITFYNNPTVTKYLDKAMTSPDLDKANKYWKLAQWDGKTGASTLGDLPNVWLVSLNHTYIGDKRINVGKQGVHSHGHDWSLLTNIAEWTWDESAK

SEQ ID NO: 13625 - protein, 108 aa, Streptococcus agalactiae
TTGGGTGATAAACGTATCAATGTAGGTAAACAAGGTGTCCATAGTCATGGTCATGATTGGTCATTATTGACTAACATTGCTGAATGGACTTGGGATGAATCTGCTAAG

SEQ ID NO: 13626 - protein, 36 aa, Streptococcus agalactiae
MGDKRINVGKQGVHSHGHDWSLLTNIAEWTWDESAK

SEQ ID NO: 13627 - protein, 555 aa, Streptococcus agalactiae
GTGAAACATATTACCACTGTAGTTATCTGGAAGATACTTAGGTGTTTGTCACTCGTTTTTGGAGTATCAATTTTGACCTTTATTTTACTAAAACAATCACCGGTTGATCCAGTCATGGCAAGTGTCAATTATGACACGTCACTAACCCCTGTTCAGTACAAAGCGATTGCTCACCACTATGGCTTGGATAAGCCAGCTCCGGTCCAGTATTTTATTTGGTTAAAAAATTTTATACAGGGACATTTAGGGACTTCACTAGTTTATCGGCAACCTGTTATTGATATTATTAGATCACGGGCAGGTGCCTCTTTCATACTTATGGGACTCTCCTGGGTCTTATCGGGTCTTATTGGATTTATCTTAGGAACTTTATCAGCTTTCCATCAAGGGAAATTGCTTGATCGAATTGTAAGGTGGTTTTCTTACCTTCAGATATCAGTACCAACTTTTTGGATTGGGCTCATTTTTTTATTAATCTTTTCTGTCCATCTGGGGAGGTTCCCGATTGGTATTTCTTCTCCGATAGGTACTTTGAGTGCAGATATNNNNNTTAAT

SEQ ID NO: 13628 - protein, 185 aa, Streptococcus agalactiae
  VARIANT 182, 183, 184: Xaa = Any Amino Acid
MKHITTVVIWKILRCLSLVFGVSILTFILLKQSPVDPVMASVNYDTSLTPVQYKAIAHHYGLDKPAPVQYFIWLKNFIQGHLGTSLVYRQPVIDIIRSRAGASFILMGLSWVLSGLIGFILGTLSAFHQGKLLDRIVRWFSYLQISVPTFWIGLIFLLIFSVHLGRFPIGISSPIGTLSADXXXN

SEQ ID NO: 13629 - protein, 568 aa, Streptococcus agalactiae
AACAATCCCGGTTGATCCAGTCATGGCAAGTGTCAATTATGACACGTCACTAACCCCTGTCCAGTACAAAGCGATTGCTCACCACTATGGCTTGGATAAGCCAGCTCCGGTCCAGTATGTTATTTGGTTAAAAAATTTTATACAGGGACATTTAGGGACTTCACTAGTTTATCGGCAACCTGTTATTGATATTATTAGATCCGGGCAGGTGCCTCTTTCATACTTATGGGACTCTCCTGGGTCTTATCGGGTCTTATTGGACTTATCTTAGGAACTTTATCAGCTTTCCATCAAGGGAAATTGCTCGATCGAATTGTAAGGTGGTTTTCTTACCTTCAGATATCAGTACCAACTTTTTGGATTGGGCTCATTTTTTTATTAATCTCTTCTGTCCATCTGGGGTGGTTCCCGATTGGTATTTCTTCTCCGATAGGTACTTTGAGTCAAATATTACGTTAGCTGATCGTATTAAGCACCTTATTTTACCTGTTTTCACGCTAAGTATTTAGGCATTGCCAATGTAACTCTTCATACTAGAACTAAAATGATGTCGGTACTTTCTAGTGAA

SEQ ID NO: 13630 - protein, 191 aa, Streptococcus agalactiae
  VARIANT 171: Xaa = Any Amino Acid
NQSPVDPVMASVNYDTSLTPVQYKAIAHHYGLDKPAPVQYVIWLKNFIQGHLGTSLVYRQPVIDIIRSRAGASFILMGLSWVLSGLIGLILGTLSAFHQGKLLDRIVRWFSYLQISVPTFWIGLIFLLISSVHLGWFPIGISSPIGTLSQDITLADRIKHLILPVFTLSIXGIANVTLHTRTKMMSVLSSE

SEQ ID NO: 13631 - protein, 102 aa, Streptococcus agalactiae
TTGGTAATCTTTCCAGGACTTTATCTTATTTTGGTTGTCAATGCATTTGATACTATCGGAGAATCTTTAAAGAAACTCTTTTACCCTCAAACTGATCATTTT

SEQ ID NO: 13632 - protein, 34 aa, Streptococcus agalactiae
MVIFPGLYLILVVNAFDTIGESLKKLFYPQTDHF

SEQ ID NO: 13633 - protein, 414 aa, Streptococcus agalactiae
ATGACAGAAACATTATTAAGCATTAAAGACCTCTCCATCACCTTCACTCAATACGGAAGATTTTTAAAACCATTTCAATCAACACCGATACAAGCGCTGAATTTAGAAATTAAAAAAGGTGAGTTATTAGCTATTATAGGTGCTAGTGGTTCGGGGAAGAGTTTATTAGCACATGCTATTATGGATATTCTTCCTAAAAATGCATCTGTAACAGGAGATATGATTTATCGTGGTCAATCACTAAATTCTAAACGCATTAAACAGTTGCGAGGAAAAGATATTACGTTGATTCCACAATCAGTTAATTATTTAGATCCATCTATGAAAGTCAAACATCAGGTGCGCTTAGGTATCTCAGAAAATTCAAAGGCTACTCAAGAAGGATTGTTTCAACAGTTTGGTTTAAAAGAAAAG

SEQ ID NO: 13634 - protein, 138 aa, Streptococcus agalactiae
MTETLLSIKDLSITFTQYGRFLKPFQSTPIQALNLEIKKGELLAIIGASGSGKSLLAHAIMDILPKNASVTGDMIYRGQSLNSKRIKQLRGKDITLIPQSVNYLDPSMKVKHQVRLGISENSKATQEGLFQQFGLKEK

SEQ ID NO: 13635 - protein, 576 aa, Streptococcus agalactiae
ATGATTTATCGTGGTCAATCACTAAATTCTAAACGCATTAAACAGTTGCGAGGAAAAGATATTACGTTGATTCCACAATCAGTTAATTATTTAGATCCATCTATGAAAGTCAAACATCAGGTGCGCTTAGGTATCTCAGAAAATTCAAAGGCTACTCAAGAAGGATTGTTTCAACAGTTTGGTTTAAAAGAAAGTGATGGTGACTTGTATCCTTTCCAACTTTCTGGCGGAATGCTCCGACGTGTTTTGTTTACAACGTGTATTAGTGATAAGGTTTCTTTGATTATTGCGGATGAGCCCACCCCTGGATTACATCCAGATGCTCTGCAAATGGTTTTAGACCAACTACGCTCCTTTGCAGATAAAGGAATAAGCGTTATATTTATCACTCATGATATTGTAGCAGCTAGTCAAATTGCTGATCGTATTACTATTTTTAAAGAGGGAAAAGCTATTGAAACAGCTCCAGCTAGTTTCTTTAGCGGAAATGGAGAGCAGTTACAAACAGAATTTGCTAGAAGTTTATGGCGCTCTCTCCCACAGCAAGAATTTGAAAGGAGTCNNNNNTTAATTAAT

SEQ ID NO: 13636 - protein, 192 aa, Streptococcus agalactiae
  VARIANT 188, 189: Xaa = Any Amino Acid
MIYRGQSLNSKRIKQLRGKDITLIPQSVNYLDPSMKVKHQVRLGISENSKATQEGLFQQFGLKESDGDLYPFQLSGGMLRRVLFTTCISDKVSLIIADEPTPGLHPDALQMVLDQLRSFADKGISVIFITHDIVAASQIADRITIFKEGKAIETAPASFFSGNGEQLQTEFARSLWRSLPQQEFERSXXLIN

SEQ ID NO: 13637 - protein, 111 aa, Streptococcus agalactiae
TTGAAAGCTCTATCGCATTTGACAACAATACTTCGTGATAATAATAATGTTAAAGCTTTGTTAGCTTCACGTGGGTATCAAGATATTGAAATGATTATAAAACAGGAGGAT

SEQ ID NO: 13638 - protein, 37 aa, Streptococcus agalactiae
MKALSHLTTILRDNNNVKALLASRGYQDIEMIIKQED

SEQ ID NO: 13639 - protein, 282 aa, Streptococcus agalactiae; identical to SEQ ID NO: 4751

SEQ ID NO: 13640 - protein, 94 aa, Streptococcus agalactiae; identical to SEQ ID NO: 416

SEQ ID NO: 13641 - protein, 349 aa, Streptococcus agalactiae
ATGAAAGGTCTATTGGATTTTTTAGTTAATATTGCCAGAACGCCAGCTATTTTAGTCGCCTTGATAGCCATTATCGGTTTAGTACTGCAGAAAAAAGGTGTTCCTGATATTGTAAAAGGTGGAATAAAAACATTTGTTGGCTTCTTAGTGGTTTCTGGAGGTGCAGGGATAGTCCAAAATTCCTTGAATCCATTTGGAAAAATGTTTGAACATGCTTTTCATTTGGTGGGGGTAGTTCCTAATAATGAAGCCATTGTAGCAGTAGCTCTTACGAAGTATGGCTCAGCAACTGCTTTGATTATGTTAGCGGGAATGATTTAATATTTTAATTGCTCGTTTTACAAAATTT

SEQ ID NO: 13642 - protein, 117 aa, Streptococcus agalactiae
MKGLLDFLVNIARTPAILVALIAIIGLVLQKKGVPDIVKGGIKTFVGFLVVSGGAGIVQNSLNPFGKMFEHAFHLVGVVPNNEAIVAVALTKYGSATALIMLAGNDFNILIARFTKF

SEQ ID NO: 13643 - protein, 408 aa, Streptococcus agalactiae
ATGCTAGAGGCTCTTCTTAAAGGACATGAGGCTGTCTGTGAATTAATCGCCTTTCAAGAAGAGATTGTAACTGCTATTGGTAAAGAAAAAGCCGAAGTAGAACTTCTTCAAGTTGATCCAGAACTTCAAGCAGAAATTATAGCTACTCATAACATAGCTTTACAGGCTGCAGTACAAGTTGAAGAGAAAAAGGCTAGAGAAGCAGCTACAGAAGCAGTTAAAGAAGTAGTTATAGGTGAATATGAGGCGCGTTACGCTGAACATGAAGAATATGATCGCATTATGCGTGATGTTGCTGAAATTTTAGAACAAATGGAACATGCAGAAGTTCGTCGCCTCATTACAGAAGATAAGGGTCGTCCTGATGGACGTCGTGTGGATGAGATTCGTCCATTAGATGCAGTGATT

SEQ ID NO: 13644 - protein, 136 aa, Streptococcus agalactiae
MLEALLKGHEAVCELIAFQEEIVTAIGKEKAEVELLQVDPELQAEIIATHNIALQAAVQVEEKKAREAATEAVKEVVIGEYEARYAEHEEYDRIMRDVAEILEQMEHAEVRRLITEDKGRPDGRRVDEIRPLDAVI

SEQ ID NO: 13645 - protein, 357 aa, Streptococcus agalactiae
GTGAAAGAGCGTGACGGGACAAGTAATACGTTTTTTTAGCGACACACAGTATCGTAAACCCGTGAATTTCACTGAAAAGGCCGTTCATGATGCGGAAGTTAACCTTAAATATTTAAAAAATACTTTCAACTTACCAATCCAAGAGAATGCTAATGATGAAGAATTAGAACAATTTGTGAAAGCATTTCAAGAAGCGATGGATGATGATTTTAATACAGCAAACGGTATTACTGTTATCTTTGAAATGGCAAAATGGATTAATTCAGGACACTATACTTCAAAAGTTAAGGAAACCCTTGCTGAATTATTAGAAATTTTTGGTATTGTATTCCAAGAGGAAGTTCTTGATGCTGATAT

SEQ ID NO: 13646 - protein, 120 aa, Streptococcus agalactiae
  VARIANT 16: Xaa = Any Amino Acid
MKERDGTSNTFFLATXQYRKPVNFTEKAVHDAEVNLKYLKNTFNLPIQENANDEELEQFVKAFQEAMDDDFNTANGITVIFEMAKWINSGHYTSKVKETLAELLEIFGIVFQEEVLDADI

SEQ ID NO: 13647 - protein, 384 aa, Streptococcus agalactiae
GTGATTGATGTTCGTTTGATTAATGGTATTGCTTTAGCTTTTGAAGGAGATGCAGTTTATTCTTTGTATATCCGACGCCATTTAATTATGCAGGGTTTTACCAAACCTAATCAGTTACATCGGAAAGCAACCCAATATGTTTCTGCTAATGCCCAAGCATTGTTAATTAATGCCATGTTAGAAGAAAATATTTTAACTGATGAAGAGCAGTTAATTTATAAACGAGGACGTAATGCGAATAGTCATACAAAAGCTAAAAATGCTGATATTATTACCTATCGTATGTCTACAGGTTTTGAGGCTCTTATGGGGTACTTGGATATGACTGGTCAGATAAAGCGCTTGGAAACTCTAATACAGTGGTGTATTGAAACCATTGAAAAA

SEQ ID NO: 13648 - protein, 128 aa, Streptococcus agalactiae; identical to SEQ ID NO: 442

SEQ ID NO: 13649 - protein, 753 aa, Streptococcus agalactiae
ATGACTATGAAAGATAAACAATTTAAAGAAGAATCAAGTGACCTTGTCTATGGCTTACATGCTGTGACAGAGAGTTTAAGAGCTAATACTGGTAATAAATTATACTTGCAAGATGACTTAAGAGGAAAGAACGTTGATAAAGTCAAAGCACTAGCGACTGAAAAAAAAGTATCCATTTCCTGGACTCCTAAAAAAATCTTATCAGACATGACAAATGGTGGAGTTCACCAAGGATTCGTTCTAAAAGTTTCGGAATTTGCCTATGCGGATTTATCAGAGATAATGACAAAGGCAGAGAATGAAGAAAATCCTCTAATTTTAATCCTTGATGGTCTGACCGACCCTCATAACCTAGGTTCTATTCTACGCACAGCTGATGCAACCAATGTAACAGGCATTATCATCCCCAAACATCGTTCTGTTGGAGTGACCCCGGTGGTTTCAAAGACATCTACAGGAGCTGTTGAACATGTTCCTATCGCAAGGGTAACTAATCTCAGTCAAACTTTGGATACTTTAAAAGATAAGGACTTCTGGATATTTGGCACTGATATGAATGGGACACCATCGCATAAGTGGAATACCAAAGGTAAATTAGCCCTAGTTATTGGTAATGAAGGAAAAGGTATTTCTCATAATATCAAAAAGCAAGTAGATGAAATGATTACAATTCCCATGAATGGTCATGTTCAGAGTTTAAATGCCAGTGTCGCAGCTGCTATTTTGATGTATGAAGTATTTAGAAACCGCCTA

SEQ ID NO: 13650 - protein, 251 aa, Streptococcus agalactiae; identical to SEQ ID NO: 4776

SEQ ID NO: 13651 - protein, 516 aa, Streptococcus agalactiae
ATGAAAAAACATTCTATTTTACTCGTTGATGGCTACAATATGATTGCTTTTTGGAAAGATACTCGACAGCTTTTTAAAAGCAATCGTTTAGAAGAGGCAAGGGAAGTATTACTTAGAAAGCTAAATCATTACGCACATTTCGAACACATTGATATTATTTGTGTATTTGATGCCCAGTATGTTCCTGGTGTACGTCAACGTTATGACCAATACAAAATATCCGTTATCTTTACTGAGGAGGACGAAACTGCGGATAGCTATATTGAACGAGCAGCGGCAGAACTTAATCAATCTGTGTTAAATTTAGTCTCCGTTGCTACCAGTGATTTAAATGAACAATGGACTATATTTTCTCAGGGTGCTTTACGTGTCTCAGCTAGAGAATTGGAACAGCGTGTAGCGACAGTAAAATCAGATTTGGATAAGATGTCCAGTCAAATCGATTTGAGTACGCCAAAGTTAAGGCCGTGGAATGATGAACAACTAGGAAAACTCAAGGATTTTTTAGATGGTATG

SEQ ID NO: 13652 - protein, 172 aa, Streptococcus agalactiae; identical to SEQ ID NO: 446

SEQ ID NO: 13653 - protein, 654 aa, Streptococcus agalactiae
ATGACTTTTAAAATACTAACGGATTCGACATCGGATTTAGATGAAAAGTGGGCTCAAGAGCACAATGTCGATATTATAGGTTTAACCATTGAACTTGATGGAAAGACTTATGAGACAGTCGGAGACGAAAAAATTACTAGTGACTTCTTGTTGGAGCGTATGCAAGAGGGAGCAAAGCCTACAACAAGCCAAATTAACGTTGGTCAGTTTGAAGAAGTTTTTTCAACCTATGCAGAAAATGACCATGCCTTGTTATATTTAGCGCTATCTTCACATTTATCAGGGACTTACCAGAGTGCAACTATTGCGCGTGAGATGGTCTTAGACAAATATCCTGATGCTCAAATTGAGATTGTGGATACAATGGCAGCTTCATGTGGTGAGGGTGTCTTAGCGATGTTAGCAACTAAAGAGCGACAAGAAGGTAAGTCTTTAGAAGAAGTGAAACAAAAAATTGAATCACTTCTCCCTAAATTAAACACATACTTTTTAGTTGACGATCTCAACCATTTAATGCGTAGTGGTCGCTTATCAAAAGGTGCAGCTATCATTGGAAGTGTTGCTAAGATTAAACCATTACTTAAGTTAGATAGTGAGGGTAAATTAGTACCATTTGCCAAGACAAGGGGCCGTAAAAAAGTATTAAAGAGATTG

SEQ ID NO: 13654 - protein, 218 aa, Streptococcus agalactiae
MTFKILTDSTSDLDEKWAQEHNVDIIGLTIELDGKTYETVGDEKITSDFLLERMQEGAKPTTSQINVGQFEEVFSTYAENDHALLYLALSSHLSGTYQSATIAREMVLDKYPDAQIEIVDTMAASCGEGVLAMLATKERQEGKSLEEVKQKIESLLPKLNTYFLVDDLNHLMRSGRLSKGAAIIGSVAKIKPLLKLDSEGKLVPFAKTRGRKKVLKRL

SEQ ID NO: 13655 - protein, 204 aa, Streptococcus agalactiae
GTGACTCAGGCAACAAAAACACTATCTTATAGCACTTTAATTATTGCTTATAGTGGAGAGAAAGATTCAGCTCAAGTTATGAAAGAACAGTTATTAGCAGATGAGCGTATTGAAGAAGTTATTATTCGTCCATTAGGGCCAGTTATTTCAGCTCATGTGGGCTCAGGTGCTTTAGCTCTATTCTCTTTAGGGGAAGAAAACCGA

SEQ ID NO: 13656 - protein, 68 aa, Streptococcus agalactiae
MTQATKTLSYSTLIIAYSGEKDSAQVMKEQLLADERIEEVIIRPLGPVISAHVGSGALALFSLGEENR

SEQ ID NO: 13657 - protein, 120 aa, Streptococcus agalactiae; identical to SEQ ID NO: 4783

SEQ ID NO: 13658 - protein, 40 aa, Streptococcus agalactiae; identical to SEQ ID NO: 4784

SEQ ID NO: 13659 - protein, 443 aa, Streptococcus agalactiae
ATGAACAAAACAACTTTCATGGCTAAACCAGGCCAAGTTGAACGCAAATGGTACGTTGTTGACGCAACAGATGTACCTCTTGGACGTCTTTCTGCAGTAGTTGCTAGCGTACTTCGCGGAAAAACAAACCAACTTTCACACCACACACTGATACAGGTGACTTTGTGATTGTTATCAATGCTGAAAAAGTTAAATTAACTGGTAAAAAAGCATCAGATAAAATCTACTACACTCACTCAATGTATCCAGGTGGTTTGAAACAAATCTCAGCAGGTGAACTTCGTTCTAAAAATGCTGTTCGTTTGATTGAAAAATCAGTTAAAGGCATGCTTCCACATAACACTCTTGGACGTGCACAAGGTATGAAATTGAAAGTATTTGTTGGCGGTGAGCATACACATGCTGCACAACAACCAGAAGTACTTGATATCTCAGGACTTATC

SEQ ID NO: 13660 - protein, 148 aa, Streptococcus agalactiae; identical to SEQ ID NO: 4788

SEQ ID NO: 13661 - protein, 388 aa, Streptococcus agalactiae
ATGGCACAAGCACAATATGCAGGTACTGGTCGCCGTAAAAACGCTGTTGCACGCGTTCGTTTGGTTCCAGGTACTGGTAAAATTACAATCAATAAAAAAGATGTAGAAGAGTACATCCCACACGCAGACCTTCGTCTTGTTATCAACCAACCTTTCGCAGTTACTTCAACTCAAGGTTCATACGATGTTTTTGTTAACGTTGTAGGTGGTGGATATGCAGGTCAATCAGGTGCGATCCGTCATGGTATCTCACGTGCACTTTTAGAATGACCCAGATTTCCGCGATTCATTGAAACGTGCTGGACTTCTTACACGTGACGCACGTATGGTTGAACGTAAAAAACCAGGTCTTAAGAAAGCTCGTAAAGCATCACAATTCTCAAAACGT

SEQ ID NO: 13662 - protein, 130 aa, Streptococcus agalactiae; identical to SEQ ID NO: 452

SEQ ID NO: 13663 - protein, 456 aa, Streptococcus agalactiae
ATGAGAAAATATATAAAATGGTTAATTCCCATATCAATTTTTGGGATGATACTTGGAGGCTGTCAAATGAATAGTGAACCTAAAAGTCAGTCAAACGAAGTAAAAAATAGCAAGCAATCAGAAGTGAAGAAAGATAAAAAAATGACAAAAAAAGAACAATTAGCCTATCTCAAAGAGCATGAGCAAGAAATCATAGATTATGTAAAATTACATAACAACCAAATTGAGTCCGTTCAATTCGATTGGTCAAGTGTAAAAGTAGAACAAAGCGGGAATGGAACTCCACAAGGGGGTGATTATAATCTTTCACTGAGAGGAAAGTTTAATCATCTACAAAATTCAAAATTAATAGTTGATTTTTATTTAGCTCATAAAAATGATATCCCAAATATCAAATCAATGGGAATGCTAAATAAGCCATATATACATAAAAATGGTATTTGGCACATTTATGAA

SEQ ID NO: 13664 - protein, 152 aa, Streptococcus agalactiae
MRKYIKWLIPISIFGMILGGCQMNSEPKSQSNEVKNSKQSEVKKDKKMTKKEQLAYLKEHEQEIIDYVKLHNNQIESVQFDWSSVKVEQSGNGTPQGGDYNLSLRGKFNHLQNSKLIVDFYLAHKNDIPNIKSMGMLNKPYIHKNGIWHIYE

SEQ ID NO: 13665 - protein, 1632 aa, Streptococcus agalactiae
TTGAGTAATTGGAACTTAGATAATTTTGATAACTTACATAGCTCTTTAGCAGAAAGTGCATATAATAGTCGACCTAATTCATTTCCTGAATTATTTGAGACTGACTCAGTAACAGAAGTAAAATTTTCTCAACCCTCAGAAGATAACAAAGGTCAAATCACACAGGGTGGCACTAACCTCCCCAATGATGGTATTGTCTACCTGCAACCAGATAAGTCCTTAAAATCTATTGATGAAAATGTAAAGGTCCTCATTCCAGATGTCAATGGAGGCTATCACACTGAGCATTATGTTACTCATTCTTATCAAAAAGGTGTGCTTACTGACGATAAGGCAGGTTTTAATGCTTACTACCTGTCAGATACTGAAAAAATAGATAGCACTACAAAGCACACTTATCTAGCCATTCGTGGTAGTGATGGGATTGGTCTAGATACACTAAACGATTGGGTTAGTAACAATGCAATGTTTGCTGTCTCTAACAAGTATATTCCACAAGCGAAATTGGCTAATAAGGCAATGAAAGAAAAAATTGCCGAGCTAAAAGGAAAAGCACCTGGAGCTGTTATGGATATTACTGGTCACTCACTCGGTACAATTGTATCATCTCAAGCAGTAGTTAATCTTAGCTATGCAGAATTGGAGAATGTTGGTCAAGTAGTCCTTTTCGATGGCCCTGATGTATCAAGAAGCTTGGAAAAAATGGAAGGCATTTCTGCTAAAAAAATCCAAGAAGCTGGGAAGCATGTTACCTACTATGTCAATCCCTTTGATATAGTTAGTATGCTTAATCGTGAAAAGCCATGGAAAGACCAATTCGGGAAAGTAAATGTCATTGTTCCTAGTAAATATACGGGTACTTTTGATGAGCAATCTTCTCACGATTTTGGTGCCTTCCAAATTGATAGTAGCGGAAATCCTTTAGTTGCTTCTGAAAGCTATCATCCAGAATTATTAACATCTGGTCAAGACTTAGCTAGACTCGAAAAAAAATTCATAAAGAATCTTTTAGGAGAGCATTATGATTCGGATAAGCTAGGACCAGTACTCAAAGGCGCTCTGACTGGGGACCTGACTCGACTAATTGCAACATTAAAAGCTTGTGGTATCAGTGTCACTGTAAACGAAGCTAAAAAACTGTACGATAACTTCCAAAAAGACTACAAAGCCATAATTTCCAAAGCTAAAAAAGATGGCCTCGAGTGGGATCGCAAAAACATCGCAAGCTTCCATAGTAGGATCAAATCAGCATCAGGCAGTCAACGGATTTTACTTAGAACTCAAATGCTCTATATGGCAACGCAATTAGCAGAAGCAGATGTTTCAGAAAAAGTCTCTGCAACAAAAAAACATATTAGTGAAGCTAAGGATACGATTGTAGAAATATCGACATCCACTATTTCATCAGCTGAAATAATGGCTATGCACCTTGGCCAATCAGAAGTTGATGCTCTGGTTTCAGATATAAAAATGTCAACAGTTTGGAATGATAGCGTAGAGACTTCTGATTATGAAGCACTTGATCACTATAAAACAAAAATGACCACATTTACGACCAATTTAGTAACAGTTGCACAAAATTTAACAGCTCAAGATGAGCAACTAGCTGGTGATATTGTCACAAACTTATCC

SEQ ID NO: 13666 - protein, 544 aa, Streptococcus agalactiae
MSNWNLDNFDNLHSSLAESAYNSRPNSFPELFETDSVTEVKFSQPSEDNKGQITQGGTNLPNDGIVYLQPDKSLKSIDENVKVLIPDVNGGYHTEHYVTHSYQKGVLTDDKAGFNAYYLSDTEKIDSTTKHTYLAIRGSDGIGLDTLNDWVSNNAMFAVSNKYIPQAKLANKAMKEKIAELKGKAPGAVMDITGHSLGTIVSSQAVVNLSYAELENVGQVVLFDGPDVSRSLEKMEGISAKKIQEAGKHVTYYVNPFDIVSMLNREKPWKDQFGKVNVIVPSKYTGTFDEQSSHDFGAFQIDSSGNPLVASESYHPELLTSGQDLARLEKKFIKNLLGEHYDSDKLGPVLKGALTGDLTRLIATLKACGISVTVNEAKKLYDNFQKDYKAIISKAKKDGLEWDRKNIASFHSRIKSASGSQRILLRTQMLYMATQLAEADVSEKVSATKKHISEAKDTIVEISTSTISSAEIMAMHLGQSEVDALVSDIKMSTVWNDSVETSDYEALDHYKTKMTTFTTNLVTVAQNLTAQDEQLAGDIVTNLS

SEQ ID NO: 13667 - protein, 270 aa, Streptococcus agalactiae
ATGTCCAAAGAATTGAAATTGCCCTTGAATAAAATGTTGAAAGAACAAGAAAGAATAGCTATTAAGGCAATAGTTGCTACAGCAAAAAGCACTATTACGGATACTGGAACAAATTTAAAAGCAACCATAGAGACAGATGCCCAAGACCTAAAAAACTATGCATCCACCTATAACGCCAATATCACGGATGGTCTTGAAGGCCAGTCAGCTCAAGCAGCATCTGATTTCTTGACACAACTTCCAAAACCAGAGTTAGATAATCCAGTCAAC

SEQ ID NO: 13668 - protein, 90 aa, Streptococcus agalactiae
MSKELKLPLNKMLKEQERIAIKAIVATAKSTITDTGTNLKATIETDAQDLKNYASTYNANITDGLEGQSAQAASDFLTQLPKPELDNPVN

SEQ ID NO: 13669 - protein, 348 aa, Streptococcus agalactiae
ATGGTAGATACAAAAAAACTGCAAGAACTCGATCAAGAGTATGATCAAAATCTCAGAAACATTTATCGTAACAGAGAGCAACTAGAGGATGACTTTCACTTGTTTATGGCAAGAACAGATAGCCTAAAAGAGTCTGTCTATCAAGCAACTTTAGGTCAAGGTTGGGAATTACCCCAAGAAGCTCATGCACACCTATATAATATGGATGATAATAAGGATACATTCATATCAGAATTCAATGAATATATGGAAAAGCTTGAAGAAAAGGAAATAGAGCTTCGAAGAGTTTATAATGATAGAGTAGATGAATTGTATCAGAAGGCTAAGCAAAACGAAGCAAAAAAAGGA

SEQ ID NO: 13670 - protein, 116 aa, Streptococcus agalactiae
MVDTKKLQELDQEYDQNLRNIYRNREQLEDDFHLFMARTDSLKESVYQATLGQGWELPQEAHAHLYNMDDNKDTFISEFNEYMEKLEEKEIELRRVYNDRVDELYQKAKQNEAKKG

SEQ ID NO: 13671 - protein, 558 aa, Streptococcus agalactiae; identical to SEQ ID NO: 9487

SEQ ID NO: 13672 - protein, 186 aa, Streptococcus agalactiae; identical to SEQ ID NO: 9488

SEQ ID NO: 13673 - protein, 276 aa, Streptococcus agalactiae
TTGATTTTGGCGAATGTCTGTATGAAATCATTATTAGGAATCTATGCGATGATTGAAACAGAATCAAATAAAATGATTGGTATTATAGAATTAGAAATTAGAGACGAGTTTCCAGCAGAATTCGGTTATATATTAAATAAAAATTATAGTGGAAAAGGTTATATGATAAAAGCTTGTTCAAAATTGATGTCAATTGGATTTGAACAACTAGATTTGGAAAGAATTTATGCTCGATTTGAACTAATAATAAAAAATCTGAAAATGTTATGGAATGCC

SEQ ID NO: 13674 - protein, 92 aa, Streptococcus agalactiae
MILANVCMKSLLGIYAMIETESNKMIGIIELEIRDEFPAEFGYILNKNYSGKGYMIKACSKLMSIGFEQLDLERIYARFELIIKNLKMLWNA

SEQ ID NO: 13675 - protein, 705 aa, Streptococcus agalactiae
ATGAGATACAATAGGTTTAATCAACTAGTGGGTGATGTCGTTGAAAATTTTACGGAAGGTAAAAATCCGAAGATTGATACACTTAATGGGAAAACAGTTAGAATAGAAAAAATAAATCCAGATCATTTTGAAGACTTATTTCAAGTTTATGGAGAATTGTCTACTGAAGATAGTTTAACTTATATGTCTTTTAGCAAATTTAATAGTAAGAATGAATTTGATGTCTTTTTCCAAACTCTATTAAAATCAGAAGATCCTTATTATTTAGCTATTGTTGATAATAATACTGGTAAAGCATTAGGGACTTTTTCATTAATGCGTATTGATACAAAAAATAGAGTTGTTGAAATGGGATGGGTGGTTTATTCATCAAAACTAAAACAAACAAGGATAGCAACAGAAGCTCAATATTTGGTTATGAAATATGTTTTTGAAGAACTCTGTTACCGCCGTTATGAGTGGAAATGTGATAGTTTGAATGCACCATCTAATAATTCTGCAAAACGACTTGGTTTTACTTTTGAAGGAACTTTCAGACAAGCTGTTGTATATAAGGGTCGTAACAGAGATACAAATTGGTATTCTATTTTAGATAAAGAATGGCCAGAGAAAAAAACACGGTTTGAAAGATGGCTAGATGATTCAAACTTTGATGTAAATGAGTATCAAATCAGATCACTATCAAGCATTGAGCAGAAGACAAAA

SEQ ID NO: 13676 - protein, 235 aa, Streptococcus agalactiae
MRYNRFNQLVGDVVENFTEGKNPKIDTLNGKTVRIEKINPDHFEDLFQVYGELSTEDSLTYMSFSKFNSKNEFDVFFQTLLKSEDPYYLAIVDNNTGKALGTFSLMRIDTKNRVVEMGWVVYSSKLKQTRIATEAQYLVMKYVFEELCYRRYEWKCDSLNAPSNNSAKRLGFTFEGTFRQAVVYKGRNRDTNWYSILDKEWPEKKTRFERWLDDSNFDVNEYQIRSLSSIEQKTK

SEQ ID NO: 13677 - protein, 945 aa, Streptococcus agalactiae
ATGATAAAAACAAAGTTTAGTGATCCACTGGAACAATTAGCCAAAAAAAGGAAAAGGAAAACATTATTCAAGACAGTAGTATTGGCATTAATAACTGTACTATTAGTAGTTGGAATAGCTTTTAAAGGATTTACATATTTAACTTCAAAAAATGGTCAAAAAACATATCATAACTTTGAACTACTTTCTGAAATAGCATATCCAAATATTTCCTATGATAGTCTCTATTACCAGCCAAGCGGTCAGTTTACTGGTAAAGTACATGCTGATAGATTTAAAGATATCGATGGGGTTCAAATTCCATATTCTAGTTTTGAAGAAAATTATAGTATCTCAGGTACTTTTGGCACAAATGCTGATGAAAAATCAGAAAAGAATGGCTTGTATGATCGAGGTACTAGACAAAAAGTTCCACAATTTTTCAATAAAAATGTTAAGTATAAAAAAGGAGAAGCCAAAACAACTCCAACAAATGATTTAAAATATGTAAATAAATTGAATAATGATCTTATTGAAATTGCAATAACTTTTGATAAGTCCTATAGTTACAAAGAAATAAAAACAATGATACCAAATAATATAAAACAAAATTGGTTATGGATAGGTACAAGCACAGAATTAGATACATCATATTGGCCAACAAAGTATCAATTCGGTACAGATCCTGAAACTTTGAATACACCACAAATATTCATAGATAAAATAAAAGAAAACTTAAAAGGTAACTCAAAAGTATACTTTAATAATATAAATATCTACTCAGATTTAGAAAAGTATGCCAAAAAATACGACAAGGTAAATAATAGCGACAAATTAAAATTTTCGGGAATAATATTAACAGGTAAAGCCGAAAACTTTAAACAACTTAAAGAAAAAGAATGGATACATGCTTCAAGTATAGGGGCAAACATAGAATATAAGCCCTATTATAAATTAGATAAAGAA

SEQ ID NO: 13678 - protein, 315 aa, Streptococcus agalactiae
MIKTKFSDPLEQLAKKRKRKTLFKTVVLALITVLLVVGIAFKGFTYLTSKNGQKTYHNFELLSEIAYPNISYDSLYYQPSGQFTGKVHADRFKDIDGVQIPYSSFEENYSISGTFGTNADEKSEKNGLYDRGTRQKVPQFFNKNVKYKKGEAKTTPTNDLKYVNKLNNDLIEIAITFDKSYSYKEIKTMIPNNIKQNWLWIGTSTELDTSYWPTKYQFGTDPETLNTPQIFIDKIKENLKGNSKVYFNNINIYSDLEKYAKKYDKVNNSDKLKFSGIILTGKAENFKQLKEKEWIHASSIGANIEYKPYYKLDKE

SEQ ID NO: 13679 - protein, 489 aa, Streptococcus agalactiae
ATGTCAATTTTAGATGACTATGAAAAAGAATTACTAGTTATTTCACATCAAATAATAGCTTACCTTATTAAGTCAGGTGTTAATCCTAGTCAAGCACAGGATGTTACTCAAGACGTCTTTTTACAAATACTAGAATCTGATTTCTCCCTTCCACTTGATAAAATAAAAGCTTGGATGTATCGTACTACAATTAGGAGGTATATTGATCTTTATCGAAGAAATAAACGCTATAACGAAATCCTGCAAAAAGAATTCTTTATAGAAAATAACTTGTATTACACCGAATCAGAGAAGTTTTTTGAATTACATGAAGCAATATTACACTTGAAGAAGGATTATCAAACTTTAATAGATTTATATTATTTTAATGATTTTTCAATTAAAGAAATATCTGAAATTACTGGACAATCACAAAGTACAATTAAAATAAGACTTATGCGAGCTAGAAGAGAAGTTAAAAAATATTTAGAAAAGGATAATTTTAAAATA

SEQ ID NO: 13680 - protein, 163 aa, Streptococcus agalactiae; identical to SEQ ID NO: 526

SEQ ID NO: 13681 - protein, 159 aa, Streptococcus agalactiae; identical to SEQ ID NO: 4875

SEQ ID NO: 13682 - protein, 53 aa, Streptococcus agalactiae; identical to SEQ ID NO: 4876

SEQ ID NO: 13683 - protein, 555 aa, Streptococcus agalactiae
ATGCCAAAAGGAAAACAAAAAGTTATTTTATCCGCTATAGAGCTCTTTGCCTCACAAGGCTTCCATGGAACTTCCACTGCTCAACTAGCTAAAAATGCAGAAGTTAGCCAAGCAACTATATATAAATATTTTGAAACTAAAGACAAGCTTTTGGTCTTTATTCTCGAGTTAATCGTACAAACTATTGGACGCCCCTTCTTTACAGAATTATCTACATTTTCTACTAAAGAGGAACTAATTCATTTCTTTGTACAGGACCGTTTTAAATTTATTGAAAAAAATAATGATCTCATTAAAATATTGATGCAAGAATTATTAATCAATAGTGAAACATCAACTATTTTTACTAAGCTAATAAATTCAACTGATCCAAACATTACTAAAATTTTCAACTGTTTAAGTGAAGGAAATTCGTTGAATAAAATGGAAATACTTCGAGCAGTAATCGGACAGTTCATTACTTTCTTTATTCAATTATATATCCTTAATATAAAGCCTGAAAATCTAGAGGAAGAACTAAAACAAATAGAAAAACAAATATTAAAATTACTGAGC

SEQ ID NO: 13684 - protein, 185 aa, Streptococcus agalactiae
MPKGKQKVILSAIELFASQGFHGTSTAQLAKNAEVSQATIYKYFETKDKLLVFILELIVQTIGRPFFTELSTFSTKEELIHFFVQDRFKFIEKNNDLIKILMQELLINSETSTIFTKLINSTDPNITKIFNCLSEGNSLNKMEILRAVIGQFITFFIQLYILNIKPENLEEELKQIEKQILKLLS

SEQ ID NO: 13685 - protein, 96 aa, Streptococcus agalactiae
TGTTTTATAGCTCATAAAAATGATATCCCAAATATCAAATCAATGGGAATGCTAAATAACCATATATACATAAAAATGGTATTTGGCACATTATAA

SEQ ID NO: 13686 - protein, 34 aa, Streptococcus agalactiae
LILLAHKNDIPNIKSMGMLNKPYIHKNGIWHIYE

SEQ ID NO: 13687 - protein, 796 aa, Streptococcus agalactiae
TTGAGTAATTGGAACTTAGATAATTTTGATAACTTACATAGCTCTTTAGCAGAAAGTGCATATAATAGTCGACCTAATTCATTTCCTGAATTATTTGAGACTGACTCAGTAACAGAAGTAAAATTTTCTCAACCCTCAGAAGATAACAAAGGTCAAATCACACAGGGTGGCACTAACCTCCCCAATGATGGTATTGTCTACCTGCAACCAGATAAGTCCTTAAAATCTATTGATGAAAATGTAAAGGTCCTCATTCCAGATGTCAATGGAGGCTATCACACTGAGCATTATGTTACTCATTCTTATCAAAAAGGTGTGCTTACTGACGATAAGGCAGGTTTTAATGCTTACTACCTGTCAGATACTGAAAAAATAGATAGCACTACAAAGCACACTTATCTAGCCATTCGTGGTAGTGATGGGATTGGTCTAGATACACTAAACGATTGGGTTAGTAACAATGCAATGTTTGCTGTCTCTAACAAGTATATTCCACAAGCGAAATTGGCTAATAAGGCAATGAAAGAAAAAATTGCCGAGCTAAAAGGAAAAGCACCTGGAGCTGTTATGGATATTACTGGTCACTCACTCGGTACAATTGTATCATCTCAAGCAGTAGTTAATCTTAGCTATGCAGAATTGGAGAATGTTGGTCAAGTAGTCCTTTGATGGCCCTGATGTATCAAGAAGCTTGGAAAAAATGGAAGGCATTTCTGCTAAAAAAATCCAAGAAGCTGGGAAGCATGTTACCTACTATGTCAATCCCTTTGATATAGTTAGTATGCTTAATNNNNNT

SEQ ID NO: 13688 - protein, 266 aa, Streptococcus agalactiae
  VARIANT 223, 265, 266: Xaa = Any Amino Acid
MSNWNLDNFDNLHSSLAESAYNSRPNSFPELFETDSVTEVKFSQPSEDNKGQITQGGTNLPNDGIVYLQPDKSLKSIDENVKVLIPDVNGGYHTEHYVTHSYQKGVLTDDKAGFNAYYLSDTEKIDSTTKHTYLAIRGSDGIGLDTLNDWVSNNAMFAVSNKYIPQAKLANKAMKEKIAELKGKAPGAVMDITGHSLGTIVSSQAVVNLSYAELENVGQVVLXDGPDVSRSLEKMEGISAKKIQEAGKHVTYYVNPFDIVSMLNXX

SEQ ID NO: 13689 - protein, 348 aa, Streptococcus agalactiae; identical to SEQ ID NO: 13669

SEQ ID NO: 13690 - protein, 116 aa, Streptococcus agalactiae; identical to SEQ ID NO: 13670

SEQ ID NO: 13691 - protein, 582 aa, Streptococcus agalactiae
ATGAGAATTATTGCAATAACTGAAAAGGTTATAAAAGAACTGTTTCGTGATAAAAGAACACTTGCTATGATGTTTTTAGCACCTATTTTAATTATGTTTTTGATGAATGTTATGTTTTCTGCGAATAGTAATACAAAAGTTAAGATTGGAACTATTAACGTTAACACGAAGGTCGTTTCAAATTTAGATAATATTAAGCATATTCAAGTGAGATCATTTAAATTTAACTCATCTGCTAAAAAAGCACTCAAATCAAATAAAATTGATGCTCTTATTTCGGAGGACAATAAATCTTATACTGTCTTCTATGCGAATACAGATTCTTCAAAGACGACTTTAACAAGACAAGCTTTTAAAACCGCTGTTAATACAATGAACAGTAAGGAACTGATTTCGCAAGTTAAAATTTTAGCTAATAAGAATCCGAAACTAGCACAATCCTTACAAACTCGCTCCAAATATATCAAAGAAAAATATAATTACGGAAATAAAAATACAGGCTTTTTTGCAAAAATGATACCAATACTAATGGGATTTATGGCCTTCTTCTTTGGTTTTTTAATTTCTGGAATGGCTTTATTA

SEQ ID NO: 13692 - protein, 194 aa, Streptococcus agalactiae
MRIIAITEKVIKELFRDKRTLAMMFLAPILIMFLMNVMFSANSNTKVKIGTINVNTKVVSNLDNIKHIQVRSFKFNSSAKKALKSNKIDALISEDNKSYTVFYANTDSSKTTLTRQAFKTAVNTMNSKELISQVKILANKNPKLAQSLQTRSKYIKEKYNYGNKNTGFFAKMIPILMGFMAFFFGFLISGMALL

SEQ ID NO: 13693 - protein, 713 aa, Streptococcus agalactiae
ATGAAAAAAGTCATCGATTTAAAAAAACTACAAAAAGCATACGCCTCAGAAACTGTTTTAAATAATATTAATTTGGAGGTGTTTAAAGGAGAAATAATTGGATTAATAGGACCCTCTGGAGCAGGGAAATCTACCTTGATTAAAACTATGCTTGGCATGGAAAAAGCAGATAAGGGAACAGCTCTTGTTCTTGATACTCAATGCCAGATCGTAATATTTTAAATCAAATTGGCTATATGGCTCAATCTGATGCCTTACACGAGTCTTTAACTGGCTTAGAAAATTTATTATTCTTTGGAAAAATGAAAGGTATTCAAAAAACTGAATTAAAACAGCAGATAACTCATATTTCTAAAGTAGTAGATCTAGAAAACCAACTTGATAAATTTGTCTCAGGTTACTCAGGAGGTATGAAAAGACGGCTTTCTCTAGCCATCGCCCTACTTGGAAACCCCACAGTTTTAATCCTAGATGAACCTACCGTTGGAATTGATCCATCCTTGAGGAGAAAAATCTGGCAAGAGCTAATTAATATTAAGGATGAAGGACGTTCTATCTTTATTACAACCCACGTTATGGATGAAGCAGAATTAACAAGTAAGGTTGCACTACTATTACGTGGAAACATTATTGCCTTTGATACTCCATTACATTTAAAAAAACAATTTAATGTGAGTACTATTGAGGAAGTTTTCTTAAAAGCTGAAGGAGAA

SEQ ID NO: 13694 - protein, 238 aa, Streptococcus agalactiae
MKKVIDLKKLQKAYASETVLNNINLEVFKGEIIGLIGPSGAGKSTLIKTMLGMEKADKGTALVLDTQMPDRNILNQIGYMAQSDALHESLTGLENLLFFGKMKGIQKTELKQQITHISKVVDLENQLDKFVSGYSGGMKRRLSLAIALLGNPTVLILDEPTVGIDPSLRRKIWQELINIKDEGRSIFITTHVMDEAELTSKVALLLRGNIIAFDTPLHLKKQFNVSTIEEVFLKAEGE

SEQ ID NO: 13695 - protein, 681 aa, Streptococcus agalactiae
ATGGATAAACTGAAAAAATTACAAAAAGAAAATACGCTATTAGAAGGAAGAATTGATAACTCTAATAACCAAACCTATACAGATATGATTGTCTATTTGCGAGGTGCTAGCATTAGCCCCTACCACCAGGAGCTCATTCGAAATGATATTGTCAATATGTTATTAGAAGCACAAGAGCGACAAGCAAGTTTAGTTAGTGTATTTGGAGAAGATAGGCACGACTTTATAAACCAAGTTATTAAATCTACACCTAAAATCTCTAAGAAAGAAGAAACATTACAACGTTGGGATTTAGCCATTTTACTACTAACTATCCAAATGATTATCTTTTTAGGAGGATATCTCATTACTGAAGCACTTCAACAGTCAGTACCAGATCTAATCCCTATTACTCTATTAGATGTTCTTTTTGCAATCTTTATCAGTATTATTGCTGTCAAGATAACTGATACCATAATATATGCTACATATAACTTCGATAAATCGAAAGAAAAGAAATATTTCTTTCGATATATGTTTCTAATTCTTTCGCTTATCATAGCTTATATCCTTATAGGAAAATATTGTCATCTTCCTTTCATTAATATCCCCCTTTGGATTTATTTAATTATACTGGGACTTAGCTTCTCTCTTCATATCATTGTTAAAAAATACCTGAATAAACATTATTATATTGAATTT

SEQ ID NO: 13696 - protein, 227 aa, Streptococcus agalactiae
MDKLKKLQKENTLLEGRIDNSNNQTYTDMIVYLRGASISPYHQELIRNDIVNMLLEAQERQASLVSVFGEDRHDFINQVIKSTPKISKKEETLQRWDLAILLLTIQMIIFLGGYLITEALQQSVPDLIPITLLDVLFAIFISIIAVKITDTIIYATYNFDKSKEKKYFFRYMFLILSLIIAYILIGKYCHLPFINIPLWIYLIILGLSFSLHIIVKKYLNKHYYIEF

SEQ ID NO: 13697 - protein, 307 aa, Streptococcus agalactiae
ATGATTCCATCGCAAATGCTAAAAGGATTACTTGAAGGAGCTATCCTAAAAATCATACAGCAAGAGGAGACTTATGCTTATGAAATCTCAAAAAAATTAAATTCTTATGGTTTTGGGGAAATTTCCGAAGGGACAATCTACCCCATTATCTTAAGGCTACAAAGCAATAAATATATAAAAGGCAACAAAAGCCTTCCCCTCAAGGACCTAAACGTAAATATTATACGTTACCAATGAAGGCGTGGAGCAATTAGCCCAATTTAAACAGAATTGGGAGTCACTTAGTAAAGCATTAAACAAACTACTC

SEQ ID NO: 13698 - protein, 103 aa, Streptococcus agalactiae
  VARIANT 78: Xaa = Any Amino Acid
MIPSQMLKGLLEGAILKIIQQEETYAYEISKKLNSYGFGEISEGTIYPIILRLQSNKYIKGQQKPSPQGPKRKYYTLXNEGVEQLAQFKQNWESLSKALNKLL

SEQ ID NO: 13699 - protein, 704 aa, Streptococcus agalactiae
ATGAAAATAGATAAAAAAGAACTTTTAGCACTTATTGCTAGTATTATTTTATTAATTTTTGCTTCTGTTACGTTTTTCTTATTTAAAGATCATGGCACTACTCAAATGGATACTGTAGAAAGCAGTGTTAACCATGTCAGTGATTCTCAATTAACTGAGGCACAAGATATGTTAGATAAATTTGAGAAGAAACCTTCAGAAAATTATTGAAGGATGTCGAACTTGCTTTAAATAAATTGTCCAATTCTTCTAAAAAAGAAGCTTTGCAAAAACGTTTTAAGAAAGCAAAAGATAAGTATCTTAAAGACGAAGCAGATAAGAAAGCTACCAAAGATGCTACAGATTTAGTAGAAATTCTAGAACAAGCCCCTTCAGAAGAAAATGTGTTAAAAGCTGAAGCAGCAGTCAAAAAGTTAACTGTCAAAGAATCTAAAGAAGCTTTACAAAAACGTATTGATACTGTTAAGACACAATATGGTTTGATTGGGAATCAAACTCCCTCTAGTTCAGTAGCTGAAACTACAGAACAAGGGACAGCTAATCCTGCTAGTCAGGATACTTCTAGTTACGTTAATCAGGATGTAGCACCAACTTATGAGCAACCGCAAACGAATAATACACCAGTTACTCCAGGGGTTAACAATACTGTTCCGACTCCAGGAACTGGTACTGTACCTGCTACTAATGGGACGGGTGTTGCTCAG

SEQ ID NO: 13700 - protein, 235 aa, Streptococcus agalactiae
MKIDKKELLALIASIILLIFASVTFFLFKDHGTTQMDTVESSVNHVSDSQLTEAQDMLDKFEKKPSEKLLKDVELALNKLSNSSKKEALQKRFKKAKDKYLKDEADKKATKDATDLVEILEQAPSEENVLKAEAAVKKLTVKESKEALQKRIDTVKTQYGLIGNQTPSSSVAETTEQGTANPASQDTSSYVNQDVAPTYEQPQTNNTPVTPGVNNTVPTPGTGTVPATNGTGVAQ

SEQ ID NO: 13701 - protein, 1143 aa, Streptococcus agalactiae
ATGACGAAGTACATCAAGGCTGACCGATTCTTTTATGCTGATCATGTAAAGGAAAACGGTTATTTAGAAATAAAAGATAATCACTTTGGTAAATGGATAGAAAATATTTCTGGACAAGAGGAGATTTTAGATTATTCAGGTTACCAAATAGCACCTGGTTTAGTTGATACACATATTCATGGTTTTGCTGGCGCTGATGTTATGGATTGTGATTCAGAAGGAATTTTGCGAATGAGTGCTGGCTTACTATCTACTGGAGTCACATCTTTCTTGCCGACAACCCTAACTTCAGATACAAAGCGACTAGAAGAGGCGTCTAAAGCAGTTGCGGCAGTAGCGGGCAAAGAACAAGGAGCAAAAATTCAAGGCATCTATTTTGAGGGACCATATTTACTGAGGAATATAAAGGAGCTCAAAATCCGATTTATATGAGAAATCCAAACTTGGAAGAGTTTGCTCAATGGCAGAAGGCTGCAAAAGGCTTGATTACAAAAATTGCTTTGGCACCAGAACGTGAGGGAGTTGAGGAATTTGTCTCAGCAATCACAAAGCAAGGTGTTACGGTAGCTTTAGGTCATTCTAATGGGACATATAAAGAAGCTAAAAAGGCAGTGAAGGCGGGTGCCTCAGTTTGGGTACATGCGTATAATGGTATGCGTGGTTTGACACACCGAGAACCAGGTATGGTTGGTGCGGTTTATAATTTACCTAATACTTATGCTGAACTCATTTGCGATGGTCATCACGTTGATCCTGTTGCTTGTGACATTTTAATGACACAAAAAGGCCATAATCATGTGGCATTAATAACAGATTGTATGGCAGCTGGAGGTGCCCCTGATGGAGATTATATGTTAGGGGAATTGCCCGTGGTTGTGTCTAATGGAACTGCGCGTTTGAAAGATGGAGGGAATTTAGCTGGTTCTATTCTTAAGCTCAAAGATGGATTAAAAAATGTTGTAGAATGGGGAATTGCTACTCCGGAAGAGGCAGTGCGTATGGCGAGTATGTTCCAGCAGTGTCTGTAGGCATTGATAATGTCTGGGACAGATAAAAGAAGGCTATGCAGCGGATTTTATTGTATTAGATAAACATCTAGATTTAGTTGCAACATACCTTGATGGAGAAAAACGTTGGCAATCT

SEQ ID NO: 13702 - protein, 382 aa, Streptococcus agalactiae
  VARIANT 337: Xaa = Any Amino Acid
MTKYIKADRFFYADHVKENGYLEIKDNHFGKWIENISGQEEILDYSGYQIAPGLVDTHIHGFAGADVMDCDSEGILRMSAGLLSTGVTSFLPTTLTSDTKRLEEASKAVAAVAGKEQGAKIQGIYFEGPYFTEEYKGAQNPIYMRNPNLEEFAQWQKAAKGLITKIALAPEREGVEEFVSAITKQGVTVALGHSNGTYKEAKKAVKAGASVWVHAYNGMRGLTHREPGMVGAVYNLPNTYAELICDGHHVDPVACDILMTQKGHNHVALITDCMAAGGAPDGDYMLGELPVVVSNGTARLKDGGNLAGSILKLKDGLKNVVEWGIATPEEAVRMASXVPAVSVGIDNVCGQIKEGYAADFIVLDKHLDLVATYLDGEKRWQS

SEQ ID NO: 13703 - protein, 540 aa, Streptococcus agalactiae
ATGTCAATTATTATTGGGTTAATGGCCGCTATGTTTATCATTCGTTTAGCTTATTTAAAGCTATCTATAGCTAATGAAAAGGCCTTAAGAAAAAATGGTGCTAAAGAATATGGTGTAGGTGTTTCAAAAGCAATCACAGTTCTTCATATTATCATTTATTTTTCATCTGTAACTGAGGCTGTTCTAACAAAAGCAAGTTTTAATTTTGTTAGCGTAATCGGGCTTAGCTTGATGATTTTTTCTGTGTTTATGTTACATACAGTAACACGTTTACTTGGTCGTATTTGGACAGTGAAATTAATGGTAGATAAAAATCATCAATTTGTAGATCACTGGCTATTTAGGGTTGTTAAGCATCCTAACTATTTCTTAAATATTGCTCCTGAACTTTTAGGTGTAACTTTATTGTGTCATGCTAAGTATACAGCATTATTTGTCTTGCCAATTTATGCTTTTGTTATTTATTTAAGAATTCGTGAAGAAAACTTATTATTAAAAACGATCATTATTCCAAATGGAATCAAAAAGTCTAGGGTATCT

SEQ ID NO: 13704 - protein, 180 aa, Streptococcus agalactiae
MSIIIGLMAAMFIIRLAYLKLSIANEKALRKNGAKEYGVGVSKAITVLHIIIYFSSVTEAVLTKASFNFVSVIGLSLMIFSVFMLHTVTRLLGRIWTVKLMVDKNHQFVDHWLFRVVKHPNYFLNIAPELLGVTLLCHAKYTALFVLPIYAFVIYLRIREENLLLKTIIIPNGIKKSRVS

SEQ ID NO: 13705 - protein, 800 aa, Streptococcus agalactiae
ATGAGCCCTTATACTTTCTTACGTGCTATAGGCCCTGAGCCTTGGAATGCTGCATACGTTGAACCATCACGTCGTCCAGCTGATGGCCGCTATGGTGAAAATCCAAACCGTCTTTACCACATCATCAATTTCAAGTGGTAATGAAGCCTTCGCCGTCAAATATTCAAGAACTTTATTTGAAGTCTTTGGAATTACTAGGTATCAATCCACTTGAGCATGATATCCGTTTTGTTGAAGATAACTGGGAAAATCCATCTACAGGTTCAGCTGGATTAGGTTGGGAAGTTTGGCTTGATGGAATGGAAATAACACAATTTACTTATTTCCAACAAGTAGGTGGACTTCAAACAGGTCCTGTAACTTCTGAAGTTACTTATGGACTAGAGCGTTTAGCCTCTTATATTCAAGAGGTAGATTCTGTTTATGATATTGAGTGGGCACCAGGTGTTAAATATGGTGAAATCTTTACTCAGCCAGAGTATGAGCATTCAAAATATTCATTTGAGATATCAGACCAAGTAATGTTACTTGAAAACTTTGAGAAATTTGAAAGAGAAGCAAAACGTGCTTTAGAAGAAGGACTTGTTCATCCAGCTTATGACTACGTCCTTAAATGTTCACACACCTTTAATTTATTAGATGCACGTGGAGCAGTATCTGTTACTGAGCGTGCAGGCTATATTGCACGTATTCGGAATTTAGCACGTGTTGTTGCTAAAACCTTTGTTGCCGAACGTAAAAAACTTGGTTTCCCACTTTTGGATGAGGAAACTCGTATCAAATTACTTGCTGAGGAAGAC

SEQ ID NO: 13706 - protein, 267 aa, Streptococcus agalactiae; identical to SEQ ID NO: 542

SEQ ID NO: 13707 - protein, 639 aa, Streptococcus agalactiae
ATGAACACACTCATTGTTAATAGTCATCCTGATTTTTCGAATCCGTACTCATTTACAACTATTCTACAAGAAAAGTTTATTGAACTTTATAATGAGCATTTCCCTAACCATCAGTTATCTATTTTAAATTTATATGATTGTGTTTTGCCAGAAATTACGAAAGAAGTACTACTTTCGATTTGGTCTAAACAAAGAAAGGGTTTGGAATTAACAGCCGATGAGATTGTTCAAGCTAAAATCTCTAAAGATTTACTTGAACAGTTTAAGTCACATCACCGTATTGTCTTTGTTTCTCCAATGCACAATTACAATGTGACTGCTAGAGCAAAAACTTATATTGATAATATTTTTATTGCAGGTGAGACTTTCAAGTACACTGAAAATGGTTCGGTCGGATTAATGACAGATGACTATCGTCTGCTTATGTTAGAATCTGCGGGTTCTATTTATTCTAAAGGACAATATAGTCCATATGAATTTCCTGTTCATTATTTAAAAGCTATCTTTAAAGATTTTATGGCTTTTGATGATTTCTGTGTTGTTCGTGCAGAAGGTACCGATATTTTAGATAGGCAAGTTGTTCTTGATAAGATGAATCAGGATTTAAGAGAAGCATTTGAAGCGTTTTATAGTAAGGAG

SEQ ID NO: 13708 - protein, 213 aa, Streptococcus agalactiae; identical to SEQ ID NO: 544

SEQ ID NO: 13709 - protein, 2037 aa, Streptococcus agalactiae
ATGACTAAAGATTTATTATTGGAGCTTGGACTTGAAGAGTTGCCAGCTTATGTTGTGACACCGAGTGAGAAGCAATTGGGCCAAAAAATGGTCAAGTTTTTAGAGGATCATCGTTTATCATTTGAAACTGTTCAAACTTTTTCAACTCCACGTCGTTTGGCTGTTCGTGTTAAAGGATTGGCAGACCAGCAGACAGATTTAACAGAAGATTTCAAGGGTCCTTCTAAGAAAATTGCTTTGGATGCAGAAGGGAATTTTTCTAAAGCAGCCCAAGGTTTTGTTCGCGGAAAAGGTTTAAGTGTTGATGATATCGAATTTCGTGAAGTTAAGGGAGAAGAATATGTTTATGTCACTAAGCATGAAACTGGAAAAAGTGCGATTGATGTTTTAGCGAGTGTGACAGAGGTATTAACAGAATTGACTTTCCCAGTGAACATGCATTGGGCAAATAATAGTTTTGAATATATTCGTCCAGTTCACACTTTAGTGGTATTATTAGATGATCAAGCCTTAGAGCTAGACTTCCTTGATATTCATTCAGGGCGTATTAGTCGAGGACACCGTTTCTTGGGTTCTGACACTGAAATTTCATCTGCCAGTTCGTATGAAGATGACTTGCGACAACAATTTGTTATTGCTGATGCAAAAGAACGTCAGCAAATGATTGTTAATCAAATTCATGCTATCGAAGAAAAGAAAAATATTTCAGTTGAAATTGACGAAGATTTACTAAATGAAGTGCTTAATTTAGTTGAGTATCCGACAGCATTCTTGGGTTCATTTGACGAGAAATACCTTGATGTACCTGAAGAAGTTTTAGTCACTTCAATGAAAAATCATCAACGCTATTTTGTTGTTCGCGACAGGGATGGAAAATTGTTACCAAACTTTATTTCTGTGCGTAATGGAAATGCTGAGCATATCGAAAATGTTATAAAAGGCAATGAAAAAGTTTTAGTGGCTCGTCTTGAAGATGGTGAATTCTTCTGGCAAGAAGATCAGAAACTTAATATTGCAGATTTAGTTGAGAAATTAAAACAAGTAACTTTCCATGAAAAAATTGGTTCACTTTATGAACATATGGATCGTGTAAAAGTTATTTCACAACATTTGGCTGATAAGGCAGGTCTTTCTGATGAAGAAAAATTAGCTGTGCTTCGAGCTGCAAGTATTTATAAATTTGACCTCTTAACTGGAATGGTTGATGAGTTTGATGAATTACAAGGTATTATGGGTGAGAAATATGCCTTACTTGCAGGGGAACAGCCCGCAGTAGCAGCAGCGATACGTGAACATTATATGCCGACATCGGCCGATGGAGAGCTTCCAGAAACCAGAATTGGTGCAATTCTAGCGTTAGCTGATAAATTTGACACCTTACTTTCATTCTTCTCAGTTGGTTTGATTCCAAGTGGTTCAAATGATCCATATGCTCTTCGTCGAGCTACTCAGGGGATTGTCCGTATTTTGGAAGCTTTTGGTTGGGATATCCCACTTGATGAATTAGTAACTAACCTTTATGGTCTATCGTTTGCTAGTTTAGATTATGCTAATCAAAAAGAGGTCATGGCCTTTATTTCAGCTCGTATTGAAAAGATGATTGGCTCTAAGGTCCCTAAAGATATTCGAGAAGCCGTTTTAGAATCAGACACTTATATTGTTAGCCTTATTCTAGAAGCTAGCCAAGCATTGGTGCAAAAGAGCAAGGATGCTCAATATAAAGTTTCCGTTGAAAGTTTGTCACGTGCATTTAATTTAGCTGAAAAAGTTACTCATTCTGTATCGGTGGACTCTTCATTGTTTGAAAATAATCAGGAGAAGGCGCTATATCAAGCTATTTTGTCACTTGAACTGACTGAGGATATGCATGACAACTTAGATAAGCTTTTCGCACTTAGTCCAATTATTAATGATTTCTTTGATAATACAATGGTAATGACAGATGATGAAAAAATGAAACAAAATCGTCTGGCTTTACTCAATAGCCTTGTTGCAAAGGCAAGAACAGTCGCTGCTTTTAACTTATTAAACACAAAA

SEQ ID NO: 13710 - protein, 679 aa, Streptococcus agalactiae
MTKDLLLELGLEELPAYVVTPSEKQLGQKMVKFLEDHRLSFETVQTFSTPRRLAVRVKGLADQQTDLTEDFKGPSKKIALDAEGNFSKAAQGFVRGKGLSVDDIEFREVKGEEYVYVTKHETGKSAIDVLASVTEVLTELTFPVNMHWANNSFEYIRPVHTLVVLLDDQALELDFLDIHSGRISRGHRFLGSDTEISSASSYEDDLRQQFVIADAKERQQMIVNQIHAIEEKKNISVEIDEDLLNEVLNLVEYPTAFLGSFDEKYLDVPEEVLVTSMKNHQRYFVVRDRDGKLLPNFISVRNGNAEHIENVIKGNEKVLVARLEDGEFFWQEDQKLNIADLVEKLKQVTFHEKIGSLYEHMDRVKVISQHLADKAGLSDEEKLAVLRAASIYKFDLLTGMVDEFDELQGIMGEKYALLAGEQPAVAAAIREHYMPTSADGELPETRIGAILALADKFDTLLSFFSVGLIPSGSNDPYALRRATQGIVRILEAFGWDIPLDELVTNLYGLSFASLDYANQKEVMAFISARIEKMIGSKVPKDIREAVLESDTYIVSLILEASQALVQKSKDAQYKVSVESLSRAFNLAEKVTHSVSVDSSLFENNQEKALYQAILSLELTEDMHDNLDKLFALSPIINDFFDNTMVMTDDEKMKQNRLALLNSLVAKARTVAAFNLLNTK

SEQ ID NO: 13711 - DNA, 255 bp, Streptococcus agalactiae; identical to SEQ ID NO: 9339

SEQ ID NO: 13712 - protein, 85 aa, Streptococcus agalactiae; identical to SEQ ID NO: 548

SEQ ID NO: 13713 - DNA, 318 bp, Streptococcus agalactiae
ttgggtggggcaaaagataatctttgtctcgccttttttattaggaaggaaaaaataatgattgaattactattagcattactgttatggaatattttagtatttgcaacctatgctattgataaaaggcgtgcaattagaggggcatggcgtattagtgagaaaacattgttgatagagagtttattattagggggatttggtgcattcctaggtggagaagtttttcgacataaaacgactaaatggtattttagactagtttggtatatcggaatgattattgatttagctattatttggctaatttggtgttat

SEQ ID NO: 13714 - protein, 106 aa, Streptococcus agalactiae; identical to SEQ ID NO: 4904

SEQ ID NO: 13715 - DNA, 1506 bp, Streptococcus agalactiae
atgtcttcagaagaaaaatacgttatggcgattgaccagggaacaacaagttctcgagcaattatttttaataaaaaaggtgaaaaaattgcgagtagccaaaaagaatttccccaaatttttcctcaagcaggctgggtagagcataatgctaatcagatttggaattctgttcaatctgtcattgctggagcttttattgaatcaagcatcaaacctggacagatagaggctattggtattaccaatcaacgtgaaacaactgttgtttgggataaaaaaacaggtcttccaatttataatgctattgtatggcaatcgcgacaaacagccccgattgctgatcaattgaagcaagaaggtcatactaatatgattcatgaaaaaactggtcttgtcattgatgcttacttctcggcaacaaaagttcgttggattttagaccatgttcctggagcacaggaacgtgctgaaaaaggagagttgctttttggaacaattgatacttggttagtttggaagttaactgacggtctcgtccatgttacagactattcaaatgctgctcgtacgatgctttataatattaaagaacttaaatgggatgatgaaattttagagttactgaatattcctaaagcaatgttaccagaagtaaaatctaattctgaagtttatgggaaaactactccattccatttttatggtggagaggtgccaatttctggtatggctggtgaccaacaggcagcattatttggacagttggcctttgaacctggtatggtaaaaaacacttatggtacaggttccttcattatcatgaatacgggcgaagagatgcaactgtctcaaaataatctattaacaacgattggttacggcattaatggtaaggttcattatgcacttgaaggatcaatcttcattgcaggaagcgctattcaatggttacgtgatggtcttagaatgattgaaacgtcaagtgagtcagaaggccttgctcaatcatcaacaagtgacgatgaggtttatgtggttccagcttttacaggtttgggtgcaccgtattgggattcaaatgctagagggtcagtatttggattaactcgtgggacaagtaaagaagattttgttaaagctacacttcagtcaattgcttatcaagtacgagacgttattgacactatgcaagttgattcaggaattgatatccaacaacttcgtgtagatggtggagctgcaatgaataatttattaatgcaattccaagcggatattttagggattgatattgctcgtgcgaagaaccttgaaactactgccttgggtgcagctttcttagccggactttcagttggctattgggaaagtatggatgaactaaaagaactgaacgcaacaggacaacttttccaagcaacaatgaatgagtctcgaaaagaaaaactgtataaagggtggagaaaagctgtcaaagcgacacaagtatttgctcaagaggat

SEQ ID NO: 13716 - protein, 502 aa, Streptococcus agalactiae
MSSEEKYVMAIDQGTTSSRAIIFNKKGEKIASSQKEFPQIFPQAGWVEHNANQIWNSVQSVIAGAFIESSIKPGQIEAIGITNQRETTVVWDKKTGLPIYNAIVWQSRQTAPIADQLKQEGHTNMIHEKTGLVIDAYFSATKVRWILDHVPGAQERAEKGELLFGTIDTWLVWKLTDGLVHVTDYSNAARTMLYNIKELKWDDEILELLNIPKAMLPEVKSNSEVYGKTTPFHFYGGEVPISGMAGDQQAALFGQLAFEPGMVKNTYGTGSFIIMNTGEEMQLSQNNLLTTIGYGINGKVHYALEGSIFIAGSAIQWLRDGLRMIETSSESEGLAQSSTSDDEVYVVPAFTGLGAPYWDSNARGSVFGLTRGTSKEDFVKATLQSIAYQVRDVIDTMQVDSGIDIQQLRVDGGAAMNNLLMQFQADILGIDIARAKNLETTALGAAFLAGLSVGYWESMDELKELNATGQLFQATMNESRKEKLYKGWRKAVKATQVFAQED

SEQ ID NO: 13717 - DNA, 1827 bp, Streptococcus agalactiae
atggaattttcacgagaaacacgacgtttagccttacaaagaatgcaagatcgtactctggatttacttatcataggtgggggtatcacaggcgctggtgtcgctttacaagcagcagctagtggattagatactggacttattgaaatgcaagattttgcagaagggacaagtagtcgctcaacaaaattggtccatggtggtcttcgttacttgaagcaatttgatgtagaagttgtttctgatacagtatcagagcgtgcagtcgtgcagcaaattgcaccacacattcctaagccagatccaatgcttttaccggtttacgatgagccgggttctacttttagtatgtttcgccttaaagtggctatggatttatatgatttattagcaggtgtgacaaacacacccgcagccaataaagttttaagcgcagaagatgttcttaagcgtgagcctgatttacaaaaagaaggtttgctaggcggaggggtctatttagatttccgtaataacgatgcacgcctagtgattgaaaatattaaacgtgctaatagggatggagcttatattgccagtcatgtcaaagctgaggacttcttatttgatgacaacaatcaaattataggagtacgtgcgcgtgatttgttgactgaccaagttatcgatataaaagctagacttgttattaatacaactggaccttggagtgacaccgttcgcaacttctccaatgaaggtaaacaaattcatcaattacgtccaactaagggagttcacttagttgtagatcgccaaaaattaaatgtttctcaacctgtttatgttgatacaggtctaaatgatggtcgcatgatttttgttttgccacgtgaagataagacttattttggaaccacagatactgattaccatggagacttagaacatcctacggtaactaaagaagatgttgactacctccttaatattgtaaacaaacgcttcccagaagcagagcttactattgatgatattgagagttcatgggcaggtctgcgtccactactatcagggaatagtgcctctgactataatggaggcaatagtggaaaactaagcgatgaaagttttgaagaattaattgattccgttaaagattatattgcacataaaaatcatcgtgaggatgttgaaaaagctatttctcatgtagaatctagtacttctgaaaaagaattggacccatcagctgtttctcgaggatcaagttttgagcgtgatgataatggcctattaacacttgctggtggtaaaattactgattatcgaaaaatggcagaaggtgccatggaaactattattaacattttggataaagaatataatcgcaagtttaaactaatcaattctaaaacctatcctgtttcaggaggagagattaacccatctaatgttgattctgaaattgaagcttatgctcaattgggcacactaagtggtttaagtattgaggatgcacgttatattgctaacctttatgggtcaaatgcaccaaaattatttgcattgacacgccaaattacagaagcagaaggtctgagcttggtagaaacgttgtcacttcactatgctatggattatgaaatggcgcttagcccaacggatttcttcttaagacgtacgaatcatatgcttttcatgagagataatttagattctttgattcagcctgttattgatgagatggctaaacattatcaatggtctgatcaagacaaaactttctatgaagaagaattacatgagactctaaaagacaatgacttggcagctttgaaggataat

SEQ ID NO: 13718 - protein, 609 aa, Streptococcus agalactiae
MEFSRETRRLALQRMQDRTLDLLIIGGGITGAGVALQAAASGLDTGLIEMQDFAEGTSSRSTKLVHGGLRYLKQFDVEVVSDTVSERAVVQQIAPHIPKPDPMLLPVYDEPGSTFSMFRLKVAMDLYDLLAGVTNTPAANKVLSAEDVLKREPDLQKEGLLGGGVYLDFRNNDARLVIENIKRANRDGAYIASHVKAEDFLFDDNNQIIGVRARDLLTDQVIDIKARLVINTTGPWSDTVRNFSNEGKQIHQLRPTKGVHLVVDRQKLNVSQPVYVDTGLNDGRMIFVLPREDKTYFGTTDTDYHGDLEHPTVTKEDVDYLLNIVNKRFPEAELTIDDIESSWAGLRPLLSGNSASDYNGGNSGKLSDESFEELIDSVKDYIAHKNHREDVEKAISHVESSTSEKELDPSAVSRGSSFERDDNGLLTLAGGKITDYRKMAEGAMETIINILDKEYNRKFKLINSKTYPVSGGEINPSNVDSEIEAYAQLGTLSGLSIEDARYIANLYGSNAPKLFALTRQITEAEGLSLVETLSLHYAMDYEMALSPTDFFLRRTNHMLFMRDNLDSLIQPVIDEMAKHYQWSDQDKTFYEEELHETLKDNDLAALKDN

SEQ ID NO: 13719 - DNA, 696 bp, Streptococcus agalactiae
atggatatttttggagaattcttaggaacagctctcttagtcttacttggtaatggtgttgtagcaggtgttgttttgcctaaaacgaagaatcataattctggatggattgttatcacatttggatgggggcttgctgtagctattgcagcgttggtatctggcaatattagccctgcccacttgaatccagctgtgtcattagcttttgcgatcaaaggtgatttagcttggggaacagctattctttatatgattgcacagattattggtgcaatgctaggttcacttcttgtttatttgcaatttagaccccattatgaggctgcagaaaataaagcagatatccttggaacttttgcaactggtccggctttgaaggataatttttccaattttttaagtgaagtattgggaacacttgttcttgtacttactatttttgccatcggaaaatacaatatgcctccaggagttggtacgatgagtgttggtatgttagtggttgggattggtctatcgctcggtggaacaacaggttatgctattaatcctgcacgtgattttggtcctcgtttattgcatgccttgttaccgatgaagaacaaaggtgattctgattggacttattcatggattccgatagtaggacctatggtaggagctattttagcagccttaatatttgctatgatg

SEQ ID NO: 13720 - protein, 232 aa, Streptococcus agalactiae
MDIFGEFLGTALLVLLGNGVVAGVVLPKTKNHNSGWIVITFGWGLAVAIAALVSGNISPAHLNPAVSLAFAIKGDLAWGTAILYMIAQIIGAMLGSLLVYLQFRPHYEAAENKADILGTFATGPALKDNFSNFLSEVLGTLVLVLTIFAIGKYNMPPGVGTMSVGMLVVGIGLSLGGTTGYAINPARDFGPRLLHALLPMKNKGDSDWTYSWIPIVGPMVGAILAALIFAMM

SEQ ID NO: 13721 - protein, 1278 aa, Streptococcus agalactiae
ATGACTTGTGCGCAGAAATTACGCCAATTAAATCCTAATTGGGATATCGTTTTGATTGATAAAGAAATTCATCCAGATTATGTTCCAAATGGCTTAAATTGGTATTATCGTCACGAAATTAGTGGTTTAAATCAGGCCATGTGGCAGACAGAAGAAGAGCAACGGTTGCAGAATATACGCTGTCTATTTGGTCTAAAAGTTGAGAAAATTAATAAAGAAGATAGGGAATTAATGTTATCAGATGGTTCTTCTGTCTATTATGATCAATTGATTTGTGCCATGGGCTCCCAAGCAGAATCAACTTATATTGATGGGGCTGATGCGCAAGGTGTTTTAACAACAAAAACTTATGCAACTAGTCAAAATGCTAAGCAGGTATTAGATAAAAGTCATAAGGTAGCAGTTGTTGGGGCAGGTATCATCGGTTTAGATATTGCTTATAGTTTACATGAATCAGGGAAGGCGGTCACTTTGTTAGAAGCTCAAGAAAGACCAGACTTCAGGCATACAGATCCTGATATGTCCCTTCCTTTACTTGATGCGATGGCTGAATCAAAACTACATTTTTTCCAAAATCAAAAGGTTGAGAAAATTACTGTAACCCGAGAAGAAAAACTTTGTTTGCGAACGCTAACAGGAGACACCTTTACAGTTGATACTGTCATATTAGCTGTTAATTTTCGTCCGGATAGTCGTCTTTTAACTGGGTTGGTTGATTTAAGTGTTGATAATAGTGTTGTTGTAAATGATTATTTCCAAACGAGTGACCCTAATATCTATGCTATTGGCGATTTGATTTGGTCGTATTTTAAAGGTCTTAATAGTGCTTATTATATGCCCTTAATTAACCAAGCAATCCGTTCGGCACAAATGTTGGCATACCATTTATCGGGACATGCTGTTCCAAAATTAAAAATAACACGCGCTACAGGATCTAAACACTTTGGCTATTATAGAGCTAACATTGGATTAACTGAGCTGGAAGCTGGTCTTTACGAGGATACCGTTAGTGTTACTTATTTCCCTAAAGAACAGTATGATTTAAGGATAAAATTGATTGCTAATCAAAAAACGGGCCATTTATTGGGGGCTCAATTAATCTCAAAGGAAAATTGTTTGGCTACTGCCAATCAGCTTGTTCAAGCTATATCGTGTGACATGACAGATTTTGATTTGGCTTTTCAAGATTTCATTTATACAGCTAGAGAATCTGAGATGGCTTATATGTTACATCAAGCAGCTATCAACCTTTATGAAAAGAGGATTGGGCTATGCGAA

SEQ ID NO: 13722 - protein, 426 aa, Streptococcus agalactiae
MTCAQKLRQLNPNWDIVLIDKEIHPDYVPNGLNWYYRHEISGLNQAMWQTEEEQRLQNIRCLFGLKVEKINKEDRELMLSDGSSVYYDQLICAMGSQAESTYIDGADAQGVLTTKTYATSQNAKQVLDKSHKVAVVGAGIIGLDIAYSLHESGKAVTLLEAQERPDFRHTDPDMSLPLLDAMAESKLHFFQNQKVEKITVTREEKLCLRTLTGDTFTVDTVILAVNFRPDSRLLTGLVDLSVDNSVVVNDYFQTSDPNIYAIGDLIWSYFKGLNSAYYMPLINQAIRSAQMLAYHLSGHAVPKLKITRATGSKHFGYYRANIGLTELEAGLYEDTVSVTYFPKEQYDLRIKLIANQKTGHLLGAQLISKENCLATANQLVQAISCDMTDFDLAFQDFIYTARESEMAYMLHQAAINLYEKRIGLCE

SEQ ID NO: 13723 - protein, 1410 aa, Streptococcus agalactiae
ATGGAAAAAGAAAGGCGTGTTCAATATCGGCTACTTTCTTTTTTAAGAGGCTCTCCTCAGGCAATAGCACTGAAGTTAGCTTTATTAGAAACTGGTTTAAGTCGAGCAACTTTGCTTAAATATATCAATAATCTTAATAGCTACTTTGAACAAGAAAAAGTTAATTGTCGAATCGTTTATTATAAGGATAAGTTATTTTTAGAAGAGGATTATAACTTATCCAATCAAGAAGTGTTGAAAGCTCTGATGAAAGATAGTATTAAATACACTATCTTAATATCTTTATTTAATCAGCGTCAGTTCACAATCGTTGGTCTTTCTCAAGAATTGATGGTTAGTGAGGCTACTTTAAATCGTCATCTTGCTCATCTCAATGAATTGTTAGCGGAATTTGATATTGCTATTTCACAAGGAAAACAGATTGGTGATGAATTGCAATGGCGTTATTTTTATTATGAATTATTCAAGCAACTATGGTCTTATGACAAGTGCCAAAATATGATAAAGAAATTAGACTTAGACTCATTAATTCTATTAATAGAGCGCTTGGCTCAACATACTTTAACTCGAGAAGCTCAGCAAAATCTGGGGCTTTGGTTTAGTATTTGTCATCATCGTCTCCTTGCTATGGAAAAACTATCTGATAATCTCAAGCCCATTGTGGAACATTATCAATGTAATGCTTTTTATAAACGGTTAGACGCAGCCTTAGTTTTGTATATGAGTCGTTTTGCTCTTGAGTATAGGGAAGGAGAAGTTCTGGCAACTTTTGCTTTTCTACATTCACAAAATATTTTACCAATCAATACAATGGAATACATCATGGGATTTGGAGGCCCGATTATTGATTGTGTAACCGAAACAATCATCTACTTTAAAAAGGAGAGTATTTTAGCTGACGAGACATCAGATCAGGTTATTTACCAACTTGGTCAGTTATATAGCCATTATTATTTCTTTAAAGGTCATATTTTAGTTGAACAACCTGATTTAGAACAAACGTATCGACTTATTGATCATAATATGAGGGATAAGTTGCATGATATTTCAAAGAAGATTATTGCAAATGTTAATCGAATTAGACCTTTAACAGAAGATGGTTGTTCTTTGCTGACTTTACATTTGTTGGAATTGCTTATTTTCTCGAAAAATAGTCAAAAAATGCCCTTTAGGATTGGCCTAGATATGACAGGTAATGCTGTGGAACAGTCATTGTTGGAATATCGCATTCGACAACATTTCTCTGGTAATAATTCTATTCAAGTCGAACCTTATGACGAAGGAAAGGGATTTGATATGGTTATTTATCAGAGTCGCTCAAGACCTTATAAAGCCAAACTAACCTATTGCCTTAATAAAGGTGCTTCAGAGCGAGAACTACAGGAAATAGATTCACTTATTTATGACAAT

SEQ ID NO: 13724 - protein, 470 aa, Streptococcus agalactiae
MEKERRVQYRLLSFLRGSPQAIALKLALLETGLSRATLLKYINNLNSYFEQEKVNCRIVYYKDKLFLEEDYNLSNQEVLKALMKDSIKYTILISLFNQRQFTIVGLSQELMVSEATLNRHLAHLNELLAEFDIAISQGKQIGDELQWRYFYYELFKQLWSYDKCQNMIKKLDLDSLILLIERLAQHTLTREAQQNLGLWFSICHHRLLAMEKLSDNLKPIVEHYQCNAFYKRLDAALVLYMSRFALEYREGEVLATFAFLHSQNILPINTMEYIMGFGGPIIDCVTETIIYFKKESILADETSDQVIYQLGQLYSHYYFFKGHILVEQPDLEQTYRLIDHNMRDKLHDISKKIIANVNRIRPLTEDGCSLLTLHLLELLIFSKNSQKMPFRIGLDMTGNAVEQSLLEYRIRQHFSGNNSIQVEPYDEGKGFDMVIYQSRSRPYKAKLTYCLNKGASERELQEIDSLIYDN

SEQ ID NO: 13725 - protein, 1869 aa, Streptococcus agalactiae
ATGGCTTATGTGCTTTGGAATAAATTCTTAAATGTAAACCCAAAAACAAGTCGCAATTGGACAAACCGTGACCGTTTTGTACTTTCAGCTGGGCATGGTTCAGCTCTTCTTTATAGCCTACTTCATTTAGCTGGCTATGATTTATCAATTGATGATTTAAAACAATTCCGCCAATGGGGATCAAAAACACCTGGACATCCAGAAGTTAACCATACTGATGGTGTAGAAGCAACAACTGGACCTTTAGGGCAAGGTATTGCTAATGCTGTTGGTATGGCAATGGCTGAAGCTCATTTGGCTGCTAAATTTAATAAACCAGGCTTTGATTTAGTTGATCATTACACTTATACACTTCATGGTGATGGTTGTTTGATGGAGGGTGTTAGCCAAGAAGCTGCCAGTCTTGCTGGACACTTAAAACTTGGTAAATTGGTCCTTCTTTATGATTCAAATGATATCTCACTTGATGGTCCAACGTCTCAATCATTTACAGAAGATGTTAAAGGGCGTTTTGAATCATATGGTTGGCAACATATCTTAGTTAAAGATGGTAATGATTTAGAAGCGATTGCTGCAGCAATTGAAGCTGCTAAAGCTGAAACTGATAAACCAACCATTATTGAAGTTAAAACTATTATTGGATTTGGCGCAGAGAAACAGGGAACATCTTCAGTTCATGGAGCGCCACTTGGTGCAGAAGGTATTACTTTTGCCAAGAAGGCTTATGGATGGGAATATCCAGACTTTACTGTTCCTGCTGAAGTTGCAGCTCGATTTGCCTCAGATCTTCAAGCGCGTGGTGCGAAGGCAGAAGAGGCATGGAATGATCTTTTTGCTAAATATGAAGTTGAGTATCCAGAATTAGCAGCTGAATACAAAGAAGCTTTTGCTGGCCAAGCTGAGACAGTTGAATTGAAAGCTCATGACCTAGGTTCATCAGTGGCTAGTCGTGTTTCAAGCCAACAAGCTATTCAACAATTATCGACTCAATTACCGAACCTCTGGGGAGGGTCAGCAGACCTCTCAGCTTCTAATAACACAATGGTAGCAGCAGAAACAGATTTCCAAGCAAGTAACTACGCTGGGCGTAACATTTGGTTTGGTGTACGTGAATTTGCAATGGCTGCTGCAATGAATGGAATTGCGCTTCATGGTGGGACTCGTGTTTATGGGGGTACATTCTTTGTCTTCTCAAACTACTTGTTACCAGCAGTACGTATGGCTGCACTTCAAAACTTGCCAACTGTCTATGTTATGACACATGATTCTATTGCTGTTGGAGAAGATGGGCCAACTCATGAGCCAATAGAACAATTAGCATCAGTGCGCTCAATGCCTAATTTGAACGTTATCCGTCCCGCAGACGGTAATGAAACAAACGCTGCATGGCAACGAGCTGTATCAGAGACAGATCGACCAACGATGCTTGTTTTAACACGTCAAAACTTACCAGTTCTTGAAGGAACATCAGAATTAGCCCAAGAAGGGGTTAATAAAGGTGCTTATATTTTATCAGAAGCTAAAGGTGAACTTGATGGTATCATCATTGCAACAGGTTCAGAAGTTAAATTAGCTTTAGATACTCAAGACAAACTTGAGTCAGAGGGCATCCATGTTCGCGTCGTATCTATGCCAGCACAAAACATTTTTGATGAACAAGAGGCTTCATATCAAGAGCAAGTGCTTCCATCAGCTGTTACAAAACGTCTTGCTATTGAGGCAGGATCAAGCTTCGGTTGGGGTAAATATGTTGGTTTAAATGGGCTAACACTTACTATTGATACTTGGGGAGCATCAGCACCAGGTAACAGAATTTTCGAAGAGTATGGCTTTACAGTTGAGAATGCTGTATCGCTATATAAAGAACTT

SEQ ID NO: 13726 - protein, 623 aa, Streptococcus agalactiae
MAYVLWNKFLNVNPKTSRNWTNRDRFVLSAGHGSALLYSLLHLAGYDLSIDDLKQFRQWGSKTPGHPEVNHTDGVEATTGPLGQGIANAVGMAMAEAHLAAKFNKPGFDLVDHYTYTLHGDGCLMEGVSQEAASLAGHLKLGKLVLLYDSNDISLDGPTSQSFTEDVKGRFESYGWQHILVKDGNDLEAIAAAIEAAKAETDKPTIIEVKTIIGFGAEKQGTSSVHGAPLGAEGITFAKKAYGWEYPDFTVPAEVAARFASDLQARGAKAEEAWNDLFAKYEVEYPELAAEYKEAFAGQAETVELKAHDLGSSVASRVSSQQAIQQLSTQLPNLWGGSADLSASNNTMVAAETDFQASNYAGRNIWFGVREFAMAAAMNGIALHGGTRVYGGTFFVFSNYLLPAVRMAALQNLPTVYVMTHDSIAVGEDGPTHEPIEQLASVRSMPNLNVIRPADGNETNAAWQRAVSETDRPTMLVLTRQNLPVLEGTSELAQEGVNKGAYILSEAKGELDGIIIATGSEVKLALDTQDKLESEGIHVRVVSMPAQNIFDEQEASYQEQVLPSAVTKRLAIEAGSSFGWGKYVGLNGLTLTIDTWGASAPGNRIFEEYGFTVENAVSLYKEL

SEQ ID NO: 13727 - protein, 309 aa, Streptococcus agalactiae
TTGTTTATGAAGAAGGAGTGTCGTGATTTTTATCGGCAGATACAGCATACTTACAATGATATATCTGTCCGTGAAGATGCAGTGCTATCATCAATACTATTATCAGCATCGAATGGTTTGATAAAAACTAGCGATGTACCTCGTGTTGCTTATGAGTTAACTCAGCAATTGGAAAATAATGAGATAGAAAAATCTTTCGAGTCATTAGCTACAGTTAAGGAATTAAAAAAATCTGCTAAAAAATTGTCTGAGAGATATGAGCAAAATAAGGTAACAACGGGATTGCTTTCTAAAGTATTTGGAAATCAT

SEQ ID NO: 13728 - protein, 103 aa, Streptococcus agalactiae; identical to SEQ ID NO: 568

SEQ ID NO: 13729 - protein, 732 aa, Streptococcus agalactiae
ATGATTAAGTTTGAACATGTTTCGAAAGTATACGGGGAAAAAGAAGCTCTCAGTGATTTAACCCTCTCCATTAAAGATGGTGAGATTTTTGGATTAATCGGTCACAATGGAGCAGGAAAAACAACGACAATTAGTATTCTAACATCTATTATTGATGCAACTTATGGCCAAGTCTATATTGATGACCTACTTTTGACAGAACATCGTGACCAAATTAAGAAAAAAATAGGTTATGTACCGGACTCGCCAGATATTTTCTTGAATTTAACAGCAGAGGAATACTGGTACTTTTTAGCTAAAATTTATGATGTTGCCCCAGAAGATATTGAAGCACGTATCACAAAATTGGTAGACATATTTGAACTAGAGGAGCAGCGCTATAATCCTATTGAAAGTTTTTCACATGGTATGCGTCAAAAAGTCATTGTTATAGGTGCCCTTCTTCCAAATCCTGACATTTGGATTCTAGATGAGCCATTAACTGGTTTAGATCCTCAAGCTTCTTTTGATTTGAAAGAAATGATGAAAGAACATGCTAAAAATGGAAAAACAGTTATTTTTTCAACACATGTCTTAGCAGTTGCAGAACAGTTATGCGACAGAATAGGTATTTTGAAACAAGGGAAATTAATCTTTGTCGGTAGCTTAGGTGAGTTAAAAATGCAATATCCAGATAAAGATTTGGAAACTATCTATTTGGAATTAGCAGGACGTCAAGCTAATAGGGAGGGA

SEQ ID NO: 13730 - protein, 244 aa, Streptococcus agalactiae; identical to SEQ ID NO: 4920

SEQ ID NO: 13731 - DNA, 1602 bp, Streptococcus agalactiae
atgaattggtcacgtatctgggaactcgtaaaaattaatatcctttattcaaaccctcagactctatcggcactaagaaaaaagcaagaaaagcatcctaaaaaagaattttcagcttataaatccatgtttagaaatcagttatttcagattttgctcttttcaataatttatgtatttctctttgtatcacttgattttaaagaatatccgggctatttcacgttctacattggtatctttacactagtatccattatctactcttttattgcgatgtacagtgttttctatgagagtgacgatgttaaacaatatgcttatttgcctattaaatctgaagagctttatgttgctaaaatttttgcaacatttgggatgtctgtaacttttctaatgccaatcctaaccttaatgattgtggcttattggcgtataataggtggcccacttgcggtcctcctagcaatcataaattttgctattttatttttatcggtaacggtgatttcattgtatattaatagtttaataggccgtgccattattcgaagtgctaatcggaaacttatttctactatattaatttcactagctacatttggagcgatagttcccttattatttgtgaatatgaccagtcaaaagatggtacaagggaaattacaagatatcgctccaattccttatgtcagaggttattatgatattgttacagcgccgtttagtatggagagtcttctcaactattatctcccgctcttaatcattttattcttgataggtgctatttataaatgggttatgccacgctactatcaggagttgttgtatggacaggtcaagcagagaaaagtccatcgtcaaatcgattttagtaaacgtgagtcaattaataaaactcttgttaaacaccatttatcaagtttacaaaatgcgacattattgacaaatacatttttaatgccactattatatctagcaatgttcattgttccaattttgaataatggtaaagagattggtcgattttttaatgaaaattattttgggatagcttttctagcaggaatattaataggtagtttatgtgtgatgccagctagcattgtaggggtaggtatttctttagaaaaaagtaatttctactttataaaaagtttgcctatatcattttcgtatttcttaaagcataaatttgtaactttgataacattacaacttgcagttcctacttttatttatttcttggtaggattctttctacttaaactatcaatcctcgttttattgagcttcattttaggtctagtcttcatgggacttatcgaaggccagtttatttatagacgtgactataaacatttgttcttgaattggcaagaggttacgcaactatttaatagagggttaggccaatggctgttagttggttcattgtttggaatgatgataataggtagttttcttattggaataagtattttttggtcaatggtatggaatactgtagctgtcaatatcataatccttatcattgggttgctcatattatcaatttgccaatacttactgctaaaaaatttttggaagaagcttgtt

SEQ ID NO: 13732 - protein, 534 aa, Streptococcus agalactiae; identical to SEQ ID NO: 574

SEQ ID NO: 13733 - DNA, 486 bp, Streptococcus agalactiae
atgtttggtgttcatagtggaattgctgcattaggaatcacacaactagcgaaattaggggttgattctatttttggaccaggcatgctctgctcaaatatcgcacaagcaactgcaggtacagtggtgactcttataacaaaagaaaaaaagcttaaagaaattgctggacctgctgccataacagcttatatgggaatcaccgaacctatcttatatggtgtcaaccttccgaaacgttatcctctaatagcctcacttattggtggtggtcttggaggactctatgccggtataatgaacgctcaccgcttcgctgtaggctcttctggtctaccaggtctatttctttatatcagtcatacttcaacacatctttttattaccatacttattgcagttatcattactgtaagcacaactgctatattgacattcattctagcacaatattacgaaaaacaagttagcatcagacaaagagac

SEQ ID NO: 13734 - protein, 162 aa, Streptococcus agalactiae
MFGVHSGIAALGITQLAKLGVDSIFGPGMLCSNIAQATAGTVVTLITKEKKLKEIAGPAAITAYMGITEPILYGVNLPKRYPLIASLIGGGLGGLYAGIMNAHRFAVGSSGLPGLFLYISHTSTHLFITILIAVIITVSTTAILTFILAQYYEKQVSIRQRD

SEQ ID NO: 13735 - DNA, 912 bp, Streptococcus agalactiae
atgtctagagaatacatcaccttgtcaaaaaatatcatcaaacaccttggtgggcaaaataatattaacaatgtttaccattgtcaaacacgccttcgctttagtctcaatgatccgacgaaagtaaaccttgagcaattaaaaactttaaaagaggtaaaaactgtcgttatcagcggagggcaacatcagatagtgatcgggactcatgtcgcaaaagtgtttgaagaaattaactccctcattgaaactaactcaacgactaaaacagaacaaaccaaaaaagccaaagcagttagtcgaattattgattttgtttctgggactttccaaccgattttaccagctctatcaggcgctggtatgattaaggcattgctagctttattactagtattcaaaatcttgacaccgttatctcaaacatatatattactaaatctttttgcagatggtgttttctattttttacctatcttaatcgccatcacagctgctcaaaaattgaaggctaatcctattttagctttgggaactgttgtcatgctccttcaccctaattgggctaatttagtagcttctggtaaaccagtatccttattccatacgatcccattcacacttactaactatgcatcaagtgtcattcccattattctaattatttgtgttcaggcttatatagaaaaatatttaaatcaaattattcctaaatcactacgtttagtgcttgttcctatgttaatatttctcagcatgggaattttgtcgttctctatattgggaccaatgggtactatcgctggccaatatttagctgttatttttactttttttatccaaatacgccagttgggcacctgcttttctagtaggagcatttgctcctatcctaatcatgtttggtgttca

SEQ ID NO: 13736 - protein, 304 aa, Streptococcus agalactiae
MSREYITLSKNIIKHLGGQNNINNVYHCQTRLRFSLNDPTKVNLEQLKTLKEVKTVVISGGQHQIVIGTHVAKVFEEINSLIETNSTTKTEQTKKAKAVSRIIDFVSGTFQPILPALSGAGMIKALLALLLVFKILTPLSQTYILLNLFADGVFYFLPILIAITAAQKLKANPILALGTVVMLLHPNWANLVASGKPVSLFHTIPFTLTNYASSVIPIILIICVQAYIEKYLNQIIPKSLRLVLVPMLIFLSMGILSFSILGPMGTIAGQYLAVIFTFFIQIRQLGTCFSSRSICSYPNHVWCS

SEQ ID NO: 13737 - DNA, 801 bp, Streptococcus agalactiae
atgaaaagacattttgagacaactagaagaattgttattaaagtaggaaccagttccctcgtacagacaagtgggaaaattaatttaagtaaaatagaccatttagcatttgttatttctagtcttatgaataaaggtatggaggtgattttagtatcatctggagctatggggtttggtttagacattttgaaaatggataagcgtcctcaagaaatatcacaacaacaagcagtttctagcgtaggacaagtagccatgatgagtctttattctcagatattttcgcactatcaaactcatgtttcccaaattttattaacacgtgacgttgtggtttttccagagagtttgcaaaatgtaacaaactcttttgagagtctgctctctatgggaattttgccaatcgtcaatgagaatgatgctgtcagcgtggatgagatggatcataaaacgaagtttggggacaatgaccgtctctctgctgtcgttgctaaaattactaaagcagatttattaattatgctgtcagatattgatggtctttttgataaaaatcctaatatttatgatgatgctgttttacgtagtcatgtttctgagatcaccgatgacatcattaagtcagctggaggagcaggaagtaagtttggtactggtggcatgcttagtaaaattaaaagtgcacaaatggtgtttgataacaatggacaaatgatattgatgaatggcgccaatcctcgtgatattttaaaggtgttagatgggcataatattggaacttattttgctcaaggaaag

SEQ ID NO: 13738 - protein, 267 aa, Streptococcus agalactiae
MKRHFETTRRIVIKVGTSSLVQTSGKINLSKIDHLAFVISSLMNKGMEVILVSSGAMGFGLDILKMDKRPQEISQQQAVSSVGQVAMMSLYSQIFSHYQTHVSQILLTRDVVVFPESLQNVTNSFESLLSMGILPIVNENDAVSVDEMDHKTKFGDNDRLSAVVAKITKADLLIMLSDIDGLFDKNPNIYDDAVLRSHVSEITDDIIKSAGGAGSKFGTGGMLSKIKSAQMVFDNNGQMILMNGANPRDILKVLDGHNIGTYFAQGK

SEQ ID NO: 13739 - DNA, 1251 bp, Streptococcus agalactiae
atgacgtatattgaaatattagggcaaaatgctaaaaaagctagtcaatcagtagcacgattaagtacagctagtaaaaatgagatactcagggacttagcgagaaacatagtggctgatactgaaaccattttgactgagaatgctcgcgatgttgctaaggcaaaagataatggtatctcagaaattatggtggaccgtctacgactaaacaaagaccgcatacaggcgatagcaaacggtatttatcaggtagcagatttggcagatccgattggtcaagttgttagtggttatacaaatttagatggtttaaaaatccttaaaaaaagagtgcctttaggggttattgcaatgatatttgaaagtcgtcccaatgtatcggtggatgcctttagtttagcttttaaaacagggaacgctattattttacgtggtggtaaagatgctattttttcaaatactgccttggttaattgtatgcgccaaacattgcaagatacaggccacaacccagatatagtacaattagttgaagatactagtcatgttgtagcagaggagttaatgcaggcaacagactacgtggacgtcttaattccaagaggtggtacaaaattaattcaaacggtgaaggaaaagtcaaagattcctgttatcgaaacaggtgttggaaatgttcatatctatattgatgaatttgcagatttagatatggcagctaagattgttattaatgctaaaacccaacgccctagtgtctgtaatgctgctgaagggttagttgttcatcaagctattgctaagggatttttatctcaattggagaaaatgctcaaagaatcgaaccagtcagttgaatttcgtgccgatgaggaagctttacaacttttagaaaatgctgttgctgcaagtgagactgattatgctactgaatttttagactatattatgtcagtaaaagtagtagattcttttgaacaagcaattagctggattaataaatacagtagtcatcactcagaagctatcattactaataatatcagtagggcagaaatttttcaggatatggtagatgcagcggcagtttatgttaatgcttcaacacgttttacagatggtttcgtttttggactcggagcagagattggtatttcgactcaaaaattacacgcgcgtggaccgatgggattagaagctttaacaagtacaaaatactatattaatggaactggtcaagtaagggaa

SEQ ID NO: 13740 - protein, 417 aa, Streptococcus agalactiae
MTYIEILGQNAKKASQSVARLSTASKNEILRDLARNIVADTETILTENARDVAKAKDNGISEIMVDRLRLNKDRIQAIANGIYQVADLADPIGQVVSGYTNLDGLKILKKRVPLGVIAMIFESRPNVSVDAFSLAFKTGNAIILRGGKDAIFSNTALVNCMRQTLQDTGHNPDIVQLVEDTSHVVAEELMQATDYVDVLIPRGGTKLIQTVKEKSKIPVIETGVGNVHIYIDEFADLDMAAKIVINAKTQRPSVCNAAEGLVVHQAIAKGFLSQLEKMLKESNQSVEFRADEEALQLLENAVAASETDYATEFLDYIMSVKVVDSFEQAISWINKYSSHHSEAIITNNISRAEIFQDMVDAAAVYVNASTRFTDGFVFGLGAEIGISTQKLHARGPMGLEALTSTKYYINGTGQVRE

SEQ ID NO: 13741 - protein, 894 aa, Streptococcus agalactiae
ATGCTTGATATTAAGCCGGATGGTACCTATGTAGATGCTACTTTAGGTGGGGCAGGACACAGCGAATATCTTCTTTCACAATTAGGCCCAGATGGGCACCTTTACGCATTTGACCAAGACCAGAAGGCTATTGACATTGCTCATATACGTTTAAAGAAATATGTGGATACCGGTCAAGTAACCTTTATCAAAGATAATTTCAGAAATCTATCTTCTAACTTAAAAGCATTAGGAGTGTCGGAAATTAATGGTATTTGTTATGATTTAGGTGTATCAAGCCCACAGCTGGACGAGCGTGAACGCGGTTTCTCATATAAACAAGATGCCCCCCTTGATATGCGAATGAATAGAGAGCAGAGCCTTACAGCTTATGACGTTGTGAACACTTATAGTTATCATGATTTAGTAAGGATTTTCTTTAAGTATGGCGAAGATAAATTTTCAAAACAAATTGCTCGAAAAATTGAGCAAGTACGAGCTGAAAAACCAATATCTACAACAACAGAATTGGCTGAGATTATCAAATCGTCTAAATCTGCCAAAGAACTGAAGAAAAAAGGTCACCCAGCTAAACAAATTTTTCAAGCTATTCGTATTGAAGTCAATGACGAACTAGGAGCTGCAGATGAATCTATACAACAAGCAATGGACTTATTAGCTGTTGATGGTCGTATATCTGTCATCACTTTTCATTCTTTAGAAGATCGTCTTACTAAGCAACTTTTTAAAGAAGCATCAACAGTAGAAGTACCTAAAGGTCTTCCTTTTATACCAGATGATTTACAACCTAAGATGGAGCTCGTTAATCGTAAACCCATCTTACCAAGTCAAGAAGAACTAGAAGCGAACAATCGTGCCCATTCAGCGAAATTGAGAGTAGCGCGTCGTATTCGA

SEQ ID NO: 13742 - protein, 298 aa, Streptococcus agalactiae
MLDIKPDGTYVDATLGGAGHSEYLLSQLGPDGHLYAFDQDQKAIDIAHIRLKKYVDTGQVTFIKDNFRNLSSNLKALGVSEINGICYDLGVSSPQLDERERGFSYKQDAPLDMRMNREQSLTAYDVVNTYSYHDLVRIFFKYGEDKFSKQIARKIEQVRAEKPISTTTELAEIIKSSKSAKELKKKGHPAKQIFQAIRIEVNDELGAADESIQQAMDLLAVDGRISVITFHSLEDRLTKQLFKEASTVEVPKGLPFIPDDLQPKMELVNRKPILPSQEELEANNRAHSAKLRVARRIR

SEQ ID NO: 13743 - protein, 324 aa, Streptococcus agalactiae
ATGACAAATGAAAAACGAACTGAAGCAGTAACACAAACCTTACAACGTCACATCAAGACTTTCTCTCGCATTGAGAAAGCTTTTTATGGCGCTATTGTAATTACTGCTATTATCATGGCAGTCGGTATTATTTACTTGCAAAGTAATAGTTTACAAGTTAAACAAGAAGTAAATCAATTAAATAGTAAAATCAACGATAAACAGACAGAATTTGACAATGCTAAACAAGAAGTAAATGAGCTTTCTAATCGTGATCGAATTACTAAAATTGCTAAAGATGCTGGTTTAACAATTCAAAACGACAATATTTATCGGAAGGTGGAC

SEQ ID NO: 13744 - protein, 108 aa, Streptococcus agalactiae; identical to SEQ ID NO: 584

SEQ ID NO: 13745 - protein, 2256 aa, Streptococcus agalactiae
GTGACTTTTTTTAAAAAGCTAAAAAAAATCTTCCTTGATTATGTGATCCATATAAGAGATAGGCGTTCGCCGCAGAAAAATAGGGAAAGAGTAGGTCAAAATCTGATGATTTTAACCATTTTCCTATTTTTCATTTTTATCATCAACTTTGTCATCATCGTTGGTACAGATAGTAAATTTGGGGTTAATTTATCCAAGGAAGCCAAGAAAGTCTATCAACAAAGTATGACAGTACAGGCGAAGCGTGGGACAATTTACGACCGTAATGGAAATCCTATCGCTGAGGATGCTACGACCTATAGTCTCTACGCTATTATCTCAAAGAACTATACGACAGCTACAGGTCAAAAACTATATGTACAACCTTCTCAGTATGAAAAAGTAGCTAGTATCTTAGAGAATAAATTGGGCATGAAGAAAAATCTTGTCCTAAAACAACTCAATCAAAAGAAATTGTTTCAAGTTTCCTTTGGAAGTTCAGGTTCAGGATTGTCTTATACCAAGATGGCTGACATCAAGAAAACGATGGAAAAGTCAGATATCAAAGGAATTGGTTTTTCTACCAGTCCGGGGCGTATTTATCCAAATGGGATATTTGCTTCACAATTTATAGGATTTACTCTTCCTCAGGATGATGGAGATGGAAAAAAATTAGTTGGTAATACAGGCCTTGAAGCGGCACTTAACAAGGTATTATCAGGTACTGATGGCAAAGTAACATACGAAAAAGACCGTAGTGGGAATGTTCTTTTAGGTACTGCAACAACAGAACGTAGGGCGGTTAATGGTAAGGATATCTACACAACTTTATCAGAGCCTATTCAGACTGTTTTAGAGACTCAGATGGATGTTTTCGCAGAAAAAACCAAAGGAAAATTTGCGAGTGCTACAGTTGTCAACGCTAAAACGGGAGAAATTCTAGCAACGAGTCAGCGTCCTACTTATAATCCTTCTACCCTTAAAGGTTACGATAAGAAAAATTTGGGTACCTATAACACACTACTATATGATAATTTTTTTGAACCTGGTTCAACAATGAAGGTAATGACTCTAGCCTCTGCAATTGATTCTAAGCATTTTAACTCTACTGAAGTGTATAACAGTGCACAATATAAAATTGCAGATGCGGTTATTCGAGATTGGGATGTCAATGAAGGGTTATCATCTGGTAGTTATATGACTTTTCCACAAGGGTTTGCACATTCCAGTAACGTTGGTATGGTAACCTTGGAACAAAAAATGGGACGAGATAAATGGTTAAACTATCTTTCTAAGTTTAAATTTGGTTACCCAACACGTTTTGGGATGCTTCATGAAAGTGGAGGTTTGTTCCCATCTGACAATGAAGTAACTATCGCTATGAGCTCATTTGGTCAAGGTATTGGTGTAACGCAAGTTCAAATGTTGCGCGCATTTACGTCTATCTCGAATGATGGTGTTATGTTACAACCACAGTTTATTAGCAGTATTTATGATCCAAATACAGGGACTTCTCGTACAGCACGAAAAGAAGTCGTTGGAAAACCAGTTTCCAAAGAAGCAGCTAGTAAAACACGTGATTATATGGTTACTGTTGGGACAGATCCTTATTATGGTACATTATACGCAGCAGGTGCCCCAGTTATTCAGGTGGGGAATCAATCAGTTGCAGTAAAATCTGGTACTGCCCAAATCGCCCAGGAAGGTGGTGGTGGTTATCTGCAAGGAAAAAATGATACTATTAACTCAGTTGTGGCTATGGTGCCATCGGAAAATCCTGACTTCATCATGTATGTTACCATCCAACAACCCGAAAAATTTAGTATCACATTCTGGAAAGATGTTGTTAATCCTGTTTTAGAACAAGCAACAGCAATGAAAGAAACGATATTAAAACCGGTATTGAATGACTCAGAACATCAGACAAAATATAAACTATCAAAAATAGTTGGTGAAAATCCAGGTCATGTAGCGGAAGAATTACGTCGTAATCTGGTTCAGCCAATTATTTTAGGAAATGGTAGTAAAGTTTCTAAAGTATCTAAAAGACCAGGAGCTAATCTTGCTGAGAATGAACAGCTACTAGTATTAACAAATAAACTGACTGAATTACCTGATATGTATGGTTGGTCTAAAGCAAACGTTGAACAGTTTGCTAAATGGACAGGTATAAAAGTGACCTATAAAGGTTCAACCTCAGGTAAAGTAAGAAAACAAAGTATTGATGTTGGAAAATCCATCAATAAAATTAAAAAAATCAAAATTACAATAGGAGAT

SEQ ID NO: 13746 - protein, 752 aa, Streptococcus agalactiae
MTFFKKLKKIFLDYVIHIRDRRSPQKNRERVGQNLMILTIFLFFIFIINFVIIVGTDSKFGVNLSKEAKKVYQQSMTVQAKRGTIYDRNGNPIAEDATTYSLYAIISKNYTTATGQKLYVQPSQYEKVASILENKLGMKKNLVLKQLNQKKLFQVSFGSSGSGLSYTKMADIKKTMEKSDIKGIGFSTSPGRIYPNGIFASQFIGFTLPQDDGDGKKLVGNTGLEAALNKVLSGTDGKVTYEKDRSGNVLLGTATTERRAVNGKDIYTTLSEPIQTVLETQMDVFAEKTKGKFASATVVNAKTGEILATSQRPTYNPSTLKGYDKKNLGTYNTLLYDNFFEPGSTMKVMTLASAIDSKHFNSTEVYNSAQYKIADAVIRDWDVNEGLSSGSYMTFPQGFAHSSNVGMVTLEQKMGRDKWLNYLSKFKFGYPTRFGMLHESGGLFPSDNEVTIAMSSFGQGIGVTQVQMLRAFTSISNDGVMLQPQFISSIYDPNTGTSRTARKEVVGKPVSKEAASKTRDYMVTVGTDPYYGTLYAAGAPVIQVGNQSVAVKSGTAQIAQEGGGGYLQGKNDTINSVVAMVPSENPDFIMYVTIQQPEKFSITFWKDVVNPVLEQATAMKETILKPVLNDSEHQTKYKLSKIVGENPGHVAEELRRNLVQPIILGNGSKVSKVSKRPGANLAENEQLLVLTNKLTELPDMYGWSKANVEQFAKWTGIKVTYKGSTSGKVRKQSIDVGKSINKIKKIKITIGD

SEQ ID NO: 13747 - protein, 1007 aa, Streptococcus agalactiae
ATGTTTTTAAGTATAATGGCAGGTGTCATAGCATTTGTCCTGACAGTTATTGCCATTCCACGCTTCATTAAGTTTTACCAATTGAAGAAAATTGGCGGGCAACAAATGCATGAAGATGTCAAACAACATCTAGCCAAAGCAGGTACGCCGACAATGGGAGGAACGGTATTTTTGGTTGTTGCTCTTCTTGTCTCACTTATTTTTAGTATTATTTTATCTAAAGAAAATAGTGGTAATTTAGGTGCAACTTTTGGTATTTTATCTGTGTTCTCATCTATGGAATTATTGGTTTTTTAGATGATTTTTTGAAAATTTTTAAACAAATCAATGAGGGCTTGACTCCAAAGCAAAAAATGTCGCTCCAACTAATTGCGGGTCTAATTTTTTATTTTGTCCATGTGTTACCAAGTGGCACATCTGCGATAAATATTTTTGGTTTTAACCTTGAAGTAGGATACTTATACGCTTTTTTTGTTCTTTTCTGGGTTGTTGGTTTTTCAAATGCTGTGAACCTAACAGATGGAATTGATGGTCTAGCTTCTATTTCGGTTGTTATCAGTTTGATTACTTATGGAATCATTGCTTATAATCAAACGCAATTTGATATTTTATTGATTATCGTTATCATGATTGGTGCTTTACTTGGCTTTTTTGTCTTTAATCATAAACCAGCTAAAGTCTTTATGGGAGATGTTGGTTCACTTGCATTGGGTGCTATGTTAGCAGCCATTTCAATTGCCTTACGTCAGGAATGGACCTTGCTTTTTATCGGCTTTGTCTATGTTTTTGAGACGTCTTCAGTGATGTTGCAAGTAGCATACTTTAAGTATACTAAGAAGAAAACTGGTGTTGGGAAACGTATCTTCCGCATGACACCATTTCATCACCATTTAGAATTAGGTGGTGTGTCTGGCAAAGGTAATAAATGGAGCGAATGGAAAGTAGATGCTTTTTTATGGGCTATTGGTATTTTCATGAGCGCTATTACACTTGCTATTTTATATCTT

SEQ ID NO: 13748 - protein, 336 aa, Streptococcus agalactiae
MFLSIMAGVIAFVLTVIAIPRFIKFYQLKKIGGQQMHEDVKQHLAKAGTPTMGGTVFLVVALLVSLIFSIILSKENSGNLGATFGILSVVLIYGIIGFLDDFLKIFKQINEGLTPKQKMSLQLIAGLIFYFVHVLPSGTSAINIFGFNLEVGYLYAFFVLFWVVGFSNAVNLTDGIDGLASISVVISLITYGIIAYNQTQFDILLIIVIMIGALLGFFVFNHKPAKVFMGDVGSLALGAMLAAISIALRQEWTLLFIGFVYVFETSSVMLQVAYFKYTKKKTGVGKRIFRMTPFHHHLELGGVSGKGNKWSEWKVDAFLWAIGIFMSAITLAILYL

SEQ ID NO: 13749 - protein, 1341 aa, Streptococcus agalactiae
ATGTCATTTAAAGATTTTAATTTTAAACCATACATTCAGAGGGCTCTCGATGAGTTAAAATTCGTCGCTCCAACTGATGTTCAAGCTAAATTGATTCCAGTTGTTCGTTCAGGCCGCGATCTTGTGGGGGAATCGAAAACTGGTTCTGGTAAAACCCACACCTTTTTACTTCCTATTTTTGAGAAGCTAGATGAAAGTAGTGATGATGTTCAAGTTGTTATTACTGCACCAAGTAGAGAGTTGGCAACACAAATTTATCAGGCAACTAAACAAATTGCTGAGCATTCAGAGCAAGAAATACGGGTGGTTAACTATGTTGGTGGTACTGACAAATTACGTCAAATTGAAAAGTTGAAAGTAAGCCAACCTCATATTGTCATTGGAACCCCAGGACGTATTTATGATTTGGTGAAGTCAGGTGATTTAGTTATTCATAAGGCGCATACTTTTGTGGTTGATGAAGCAGATATGACTCTGGATATGGGATTCCTTGATACCGTTGATAAGATTGCAGGGTCTTTACCCAAGGATGTTCAAATTTTAGTCTTTTCAGCAACGATTCCACAAAAATTACAGCCATTTTTAAAGAAATATTTGACCAATCCAGTAATGGAAAAAATCAAAACAGCAACAGTTATCGCTGATACCATCGATAACTGGCTTTTGTCCACTAAAGGACGTGATAAAAATGCACAAATTTTGGAACTCTCTAAACTAATGCAGCCTTACCTTGCAATGATATTTGTTAATACGAAAGAGCGTGCAGACGAATTACACTCGTATCTTTCTAGTAATGGCTTAAAAGTAGCTAAAATTCATGGTGGGATTGCACCTCGTGAACGTAAACGTATTATGAATCAGGTTAAAAACCTCGAATTTGAATATATCGTTGCAACAGATTTAGCAGCGCGTGGTATTGATATTGAAGGTGTTAGCCATGTTATCAATGATGCCATCCCTCAAGACCTATCTTTCTTTGTCCACCGTGTCGGTCGCACAGGCCGTAATGGCTTATCTGGTACTGCTATAACTTTATATCAGCCAAGTGACGATTCTGATATTCGTGAACTTGAAAAACTAGGTATTAATTTTATTCCTAAAGTCATTAAAAACGGTGAATTTCAAGATACATACGACCGTGATCGTCGTAATAACCGTGAAAAGTCCTATCAAAAATTAGATACAGAAATGATTGGACTTGTGAAAAAGAAAAAGAAAAAAATAAAACCAGGTTACAAGAAAAAAATTCAATGGAAAGTTGAAGAAAAGCGTCGCAAAGAGCGTAGAGCAAGTAATCGTGCTAAGGGGCGTGCGGAGCGCAAAGCTAAAAAACAAAGTTTT

SEQ ID NO: 13750 - protein, 447 aa, Streptococcus agalactiae
MSFKDFNFKPYIQRALDELKFVAPTDVQAKLIPVVRSGRDLVGESKTGSGKTHTFLLPIFEKLDESSDDVQVVITAPSRELATQIYQATKQIAEHSEQEIRVVNYVGGTDKLRQIEKLKVSQPHIVIGTPGRIYDLVKSGDLVIHKAHTFVVDEADMTLDMGFLDTVDKIAGSLPKDVQILVFSATIPQKLQPFLKKYLTNPVMEKIKTATVIADTIDNWLLSTKGRDKNAQILELSKLMQPYLAMIFVNTKERADELHSYLSSNGLKVAKIHGGIAPRERKRIMNQVKNLEFEYIVATDLAARGIDIEGVSHVINDAIPQDLSFFVHRVGRTGRNGLSGTAITLYQPSDDSDIRELEKLGINFIPKVIKNGEFQDTYDRDRRNNREKSYQKLDTEMIGLVKKKKKKIKPGYKKKIQWKVEEKRRKERRASNRAKGRAERKAKKQSF

SEQ ID NO: 13751 - DNA, 810 bp, Streptococcus agalactiae
atgtttaaaaaaataatattatctattgcaactatagccgcaaccgccagcctagcagtatcagttcaggcgtcagagaaagtagaacttaaagtagctacagattctgacacggcaccatttacttatcaaaaagacgggaaattcaaaggttatgacgttgatgttgtcaaagctgtttttaaaggtagtaagtacaaagtaaccttcaagacagttccttttgatactatttcaacaggtattgatgcagggaaatttgatttatcagctaatgatttttcatataataaagaaagagcagaaaaatatctcttctcagatcctatatcccgttcaaattatgccgtagtagggaagaaggggagccattacaaatcattaagtgacctctctggaaaatcaacagaagttttatctggcgttaactatgcacaggttctagaaaattggaataaaaatcatcctaataaaaaaccaataaaaatcaaatatgtttctgggacaactggtgttactagcagattaaaaaatattgagagtggaaaaattgactttatcctatatgatgccatttcatctgactatattgtaaaagatcaatcattaaacttaagcgtttctcctttgaaaggtaaaattggtaataataaggatggattagaatacctccttttaccaaaagataaaaaaggtaaaactctacagaaatttataaataagcgtattaaagttttgaaagaagatggtactttggcacgtttaagtaaacaatatttcggtggagattacgtttcaaacattgataaa

SEQ ID NO: 13752 - protein, 270 aa, Streptococcus agalactiae
MFKKIILSIATIAATASLAVSVQASEKVELKVATDSDTAPFTYQKDGKFKGYDVDVVKAVFKGSKYKVTFKTVPFDTISTGIDAGKFDLSANDFSYNKERAEKYLFSDPISRSNYAVVGKKGSHYKSLSDLSGKSTEVLSGVNYAQVLENWNKNHPNKKPIKIKYVSGTTGVTSRLKNIESGKIDFILYDAISSDYIVKDQSLNLSVSPLKGKIGNNKDGLEYLLLPKDKKGKTLQKFINKRIKVLKEDGTLARLSKQYFGGDYVSNIDK

SEQ ID NO: 13753 - DNA, 801 bp, Streptococcus agalactiae
atgaatcaatttatcttgacgggtggatggtcttggtataataatttggttagtcaggttccagcggggaaattatttagttggaaggctgttttagatgcaataccctcaattttagagcgattacccataacgctattattgacagtagcaggagccttatttggactcattttagctttgatttttgcagtagtgaaaattaaccgtgtcaaaattttatatccgattcaagctttatttgttagttttttacgtgggactccaatacttgttcaattaatgctgagttattatggaattccacttttcttgaaatttttaaaccaaaaatatggttttgattggaacattaatgctataccggcttctgtatttgctattactgcatttgcttttaatgaagcggcttatacaagtgaaactatacgagcggcgattttgtcggttgatcaaggtgaaattgaggcagcacgtagtttagggatgacctcagcgcaagtttatcgtcgtgttattattccaaacgcagcagtagtcgcaacacctactttgataaacacgttaattggtctaactaagggaacctctttagcttttaatgctggtattgttgaaatgtttgcccaagcacaaattatgggtggtagcgattatcgctattttgaacgttatatctctgtggcacttgtttactgggcggttagtttcttaattgaacaattgggaaatgctattgaacgaaaaatggcaattaaggctccacaccatttaactgatgagattccaggaggagtacgc

SEQ ID NO: 13754 - protein, 267 aa, Streptococcus agalactiae
MNQFILTGGWSWYNNLVSQVPAGKLFSWKAVLDAIPSILERLPITLLLTVAGALFGLILALIFAVVKINRVKILYPIQALFVSFLRGTPILVQLMLSYYGIPLFLKFLNQKYGFDWNINAIPASVFAITAFAFNEAAYTSETIRAAILSVDQGEIEAARSLGMTSAQVYRRVIIPNAAVVATPTLINTLIGLTKGTSLAFNAGIVEMFAQAQIMGGSDYRYFERYISVALVYWAVSFLIEQLGNAIERKMAIKAPHHLTDEIPGGVR

SEQ ID NO: 13755 - DNA, 741 bp, Streptococcus agalactiae
atgataaaattgagacaattgactaaatcattttctggtcaaaaagtgttagacaaacttgatttagatattgaaaaaggtcaagttgttgctctagtaggtgcttcaggtgcaggaaaatcaacctttcttcgtagtatgaattatttagaagagcctgattatggaacaattgaaattgatgattttaaggttgattttaaatcaatcagtaaagatgacatactaacattacgccgtaagttagccatggtttttcaacaattcaatctatttgagcgtcgtacagctttggataatgtaaaagaaggtttgaaaattgtcaaaaagatgtcagatcaagaggcaacacggattgcaagagacgaactggcaaaggtcggacttgcagatcgtgaaaaatattatccaagacatttatcaggtggacagaaacaacgtgttgctttggcacgcgcattagccatgaaacctgatgttcttcttttagacgaaccgacatcagcacttgatccagaattagttggagaagttgaaaaatctattgcagatgctgctaagcaggggcaaaccatggtgcttgttagtcatgatatgaattttgtttaccaagtagcagataaagttttatttttggaaaaaggtcgtattttagagtctgggacgcctgaacaattatttaaccatcctttagaagaacgtacaaaagaattcttcgctagttataacaaatcgtaccta

SEQ ID NO: 13756 - protein, 247 aa, Streptococcus agalactiae; identical to SEQ ID NO: 598

SEQ ID NO: 13757 - DNA, 246 bp, Streptococcus agalactiae
ttgacaatcgcttgttggatagagatgtttttagaaatagcaaaagtttatttacaaggtttagggcttgccagcataactgttattttagttggtatattttgggtcttttggcgtgccaagaaaaacatagataaaacagctagagaacgccaatctgttctttatgatgtccttctgatagctcttatgacagctccaatacttgcctttgcatttgtagctatcattttaatgataaaagct

SEQ ID NO: 13758 - protein, 82 aa, Streptococcus agalactiae
MTIACWIEMFLEIAKVYLQGLGLASITVILVGIFWVFWRAKKNIDKTARERQSVLYDVLLIALMTAPILAFAFVAIILMIKA

SEQ ID NO: 13759 - DNA, 912 bp, Streptococcus agalactiae
atgtatgatactttaataataggttcaggtcctggtggtatgacagcagcgctttacgctgcacgttcaaaccttaaagttgggttaattgaacaaggtgctccaggtggacagatgaataatactgctgaaattgagaactatccaggctacgatcatatctcaggtccagaattatcaatgaagatgtatgagccgttggaaaaatttgaagtagagcatatttatggtatagttcaaagagttgagaacgatggtgatgtaaagcgtgttatcaccgaagatgaatcgtatgaagccaaaacagtaatccttgctaccggagctaaaaacagccttttaggagttccgggtgaagaggaatatactagtcgtggcgtttcttactgtgcggtttgtgatggtgcatttttccgtgatcaggatcttttagttgtgggtggcggtgattctgctgttgaagaagctgtcttcttaactcaatttgctaaaagtgttactattattcaccgacgtgatcaattgagagctcaaaaagtacttcaagaccgagcttttgctaacgaaaaaataaaatttgtatgggattcagtggtcaaagagattaaaggaaatgagattaaagtatctggtgtaactgttgaaaatctaaagactggagaaatctcagagatgactttcggaggtgttttcatttacgttggtttgaaaccacattctagcatggtctcagaattaggtattacggacgagactggctgggtcttaactgatacaaatatgaaaacatcaattccaggactatatgctattggggatgttcgtcaaaaagatctacgtcagattgcgactgctgttggtgaaggtgctatcgctggacagggtgtttataactatataactgagcatttc

SEQ ID NO: 13760 - protein, 304 aa, Streptococcus agalactiae; identical to SEQ ID NO: 602

SEQ ID NO: 13761 - protein, 1458 aa, Streptococcus agalactiae
ATGTATAAAGACGATAGTTTAACACTACATACTGATTTATATCAAATTAATATGATGCAAGTCTATTTTAATAAAGGTATTCACAATAAAAAAGCGGTGTTTGAAGCTTACTTTCGCAAGGTTCCATTTGAAAATGGTTATGCTGTTTTTGCAGGTTTAGAACGTATTGTTCGTTATTTAGAAAATCTGAGCTTTTCTGATAGTGATTTATCCTATTTAGAAGAGTTAGGTTATCCTGAAGAATTTTTAGATTACTTAAAAAATTTAAAAATGGAACTGACTGTCAAATCAGCTAAGGAAGGTGACCTTGTATTTGCTAATGAACCATTAGTTCAAATTGAAGGTCCTTTAGCACAATGTCAGTTAGTAGAGACAGCGATTTTAAATATCATCAACTACCAGACACTTGTTGCTACAAAAGCAGCTCGTATTCGTTCTGTTATTGAAGATGAACCGCTATTAGAGTTTGGGACACGACGTGCTCAAGAAATGGATGCAGCCATTTGGGGTACTAGGGCAGCGATTATTGGTGGTGCTAACGCAACGAGTAATGTTCGTGCTGGTAAAATCTTTAATATTCCAGTATCAGGAACGCATGCACATGCTTTAGTTCAAACTTATGGCGATGATTACCAGGCATTTAAAGCTTACGCAGAAACTCATAAAGATTGCGTCTTTTTAGTGGATACTTATGATACCCTTCGTGTAGGTGTGCCTAATGCTATTCGAGTTGCAAAAGAGATGGGCGAAAAGATTAATTTCTTGGGAGTTCGCCTTGATTCAGGTGATTTAGCTTATTTGTCTAAGAAAGTTCGTCAGCAGTTAGATGACGCCGGTTTTCCTAATGCAAAGATTTATGCTTCGAATGATCTAGATGAAAATACAATCCTCAACCTAAAAATGCAAAAAGCTAAAATTGATGTTTGGGGTGTCGGAACAAAATTAATTACAGCCTATGATCAGCCTGCGCTAGGTGCTGTTTATAAAATTGTTTCTATTGAGACTGACGCCGGTAGTATGCGAGATACAATTAAACTATCAAACAATGCGGAAAAAGTATCAACACCTGGGAAAAAGCAAGTTTGGCGTATCACCAGTCGAGCTAAAGGGAAATCTGAGGGTGATTACATCACATTTGCAGACACTGATGTGACACAATTAGATGAAATTGACATGTTTCATCCAACTTATACTTATATCAATAAAACAGTCCGTGATTTTGACGCAGTACCCTTACTGGTAGATATCTTTGACAAAGGGAAATTAGTTTATCAATTACCAAGCCTTCAAGAAATTCAAGAGTACGGACGCAAAGAATTTGATCAGCTTTGGGATGAGTATAAACGTGTTCTGAATCCACAGGATTACCCAGTTGATTTGGCACGCGATGTTTGGCAAAATAAAATGGACCTGATTGATCGTATCCGTAAAGAAGCTTTGGCAAAAGGAGAAGTAAGA

SEQ ID NO: 13762 - protein, 486 aa, Streptococcus agalactiae; identical to SEQ ID NO: 4958

SEQ ID NO: 13763 - protein, 819 aa, Streptococcus agalactiae
ATGACTTTGCAAGATCAAATTATCAAAGAACTCGGTGTAAAACCTGTTATTAATCCAAGTCAAGAAATCCGTCGTTCCGTAGAATTTTTAAAAGACTATCTATTAAAACATAGTTTTCTAAAGACCTATGTACTGGGTATTTCAGGGGGGCAAGATTCAACTTTAGCAGGACGTCTAGCTCAACTAGCAGTTGAAGAGTTGCGTGCTGATACAGGGGAAAACTATCAATTTATAGCTATTCGTTTACCATATGGTATTCAGGCCGATGAAGAAGATGCACAAAAAGCATTAGATTTTATCAAGCCAGATATTGCTTTGACCATTAATATTAAAGAAGCTGTTGATGGCCAAGTTAGAGCTCTTAATGCAGCAGGAGTAGAGATTACAGACTTTAATAAAGGAAATATTAAAGCTCGTCAAAGAATGATTAGTCAATATGCAGTTGCAGGTCAATATGCTGGAGCGGTTATTGGTACTGATCATGCTGCAGAAAATATTACAGGTTTTTTCACCAAATTTGGTGATGGAGGTGCGGACTTATTACCTCTCTTTAGACTTAATAAAAGTCAGGGAAAACAGTTATTAGCTGAACTTGGTGCTGATAAAGACTTGTACGAAAAGATTCCAACCGCAGATTTAGAAGAAAATAAACCAGGAATCGCTGATGAAATAGCACTTGGAGTAACCTACCAAGAAATTGATGCTTATCTTGAAGGGAAGGTAGTTTCGGACAAGTCTCGAGGTATCATTGAAAATTGGTGGTATAAGGGTCAACATAAACGTCATCTTCCAATCACAATTTTTGATGATTTCTGGAAA

SEQ ID NO: 13764 - protein, 273 aa, Streptococcus agalactiae
MTLQDQIIKELGVKPVINPSQEIRRSVEFLKDYLLKHSFLKTYVLGISGGQDSTLAGRLAQLAVEELRADTGENYQFIAIRLPYGIQADEEDAQKALDFIKPDIALTINIKEAVDGQVRALNAAGVEITDFNKGNIKARQRMISQYAVAGQYAGAVIGTDHAAENITGFFTKFGDGGADLLPLFRLNKSQGKQLLAELGADKDLYEKIPTADLEENKPGIADEIALGVTYQEIDAYLEGKVVSDKSRGIIENWWYKGQHKRHLPITIFDDFWK

SEQ ID NO: 13765 - protein, 1332 aa, Streptococcus agalactiae
ATGTCAGAATTAACTCAAACATTTACAGATAAGTTATTAGCTGATTACCAAGCAAATACAAAATTTAGCGCTATTGAAAATGCAGTAACTCACAATGGTTTATTGAAGTCTCTAGAGACTCGTCAAAGTGAGATTGAGAACGACTATGTCTTTTCAATTGATTTGACCAAAGATGAAGTCTCTAATCAGAAACAATCAGGACGTTGCTGGATGTTTGCTGCACTGAACACATTTCGTCATAAACTGATTTCAGATTTTAAACTCGAGAACTTTGAATTATCTCAGGCACATACATTTTTCTGGGATAAGTATGAAAAATCAAATTGGTTTATGGAACAAATTATTGCGACTGCAAATCAGGAATTGAGTAGTCGTAAGGTAAAATTCCTATTAGATGTACCTCAACAAGATGGCGGACAATGGGACATGGTGGTTGCTCTGTTTGAGAAATATGGTGTCGTTCCTAAAACAGTTTATCCTGAATCTGTTTCATCAAGTGCTAGTCGTGAACTAAATCAATATTTGAATAAACTTTTACGCCAAGATGCACAGATTCTACGAGAATTAATAGCGCAGGGAGCAGATGGGGCAACTGTTCAAAATAAAAAGGAAGAATTGCTTCAAGAAATTTTTAACTTTTTAGCAATGAACCTTGGCTTGCCACCGCAATCTTTTGATTTTGCTTATCGTGATAAAGACAATCATTATCAGTCTGATAAAAATATTACACCGAAAGCATTTTATCAAAAATATGTTAATCTTGACATATCAGATTATGTTTCTATTATCAATGCTCCAACTGTAGATAAGCCTTATGGACAATCCTATACAGTTGAGATGCTTGGAAATGTTGTCGGAGGCCCAGCTGTTAAATATTTAAACCTTGATATGAAACGGTTTAAAGAGTTAGCGATTGCGCAAATGAAATCAGGAGAAACTGTGTGGTTTGGTTCAGACGTAGGTCAAGTATCAAATCGTCAAAAGGGTATCCTAGCAACTACGACTTATGATTTTAATTCATCTATGGATATTAAACTTAGCCAAGACAAAGCGGGCCGCCTAGATTATAGTGAAAGTTTAATGACACATGCTATGGTCTTAACGGGAGTAGACCTTGATGAATCTGGACAACCTTTAAAATGGAAAGTTGAGAACTCTTGGGGAGAGAAAGTTGGTAAGGATGGTTATTTTGTAGCTTCAGATGCTTGGATGGATGAATATACTTACCAAATAGTCGTTCGTAAAGAATTGCTTACTAAAGAAGAATTAGAGGCTTACAACGCAGAGCCAATTACTTTAGCGCCGTGGGATCCGATGGGAGCACTAGCTAAT

SEQ ID NO: 13766 - protein, 444 aa, Streptococcus agalactiae
MSELTQTFTDKLLADYQANTKFSAIENAVTHNGLLKSLETRQSEIENDYVFSIDLTKDEVSNQKQSGRCWMFAALNTFRHKLISDFKLENFELSQAHTFFWDKYEKSNWFMEQIIATANQELSSRKVKFLLDVPQQDGGQWDMVVALFEKYGVVPKTVYPESVSSSASRELNQYLNKLLRQDAQILRELIAQGADGATVQNKKEELLQEIFNFLAMNLGLPPQSFDFAYRDKDNHYQSDKNITPKAFYQKYVNLDISDYVSIINAPTVDKPYGQSYTVEMLGNVVGGPAVKYLNLDMKRFKELAIAQMKSGETVWFGSDVGQVSNRQKGILATTTYDFNSSMDIKLSQDKAGRLDYSESLMTHAMVLTGVDLDESGQPLKWKVENSWGEKVGKDGYFVASDAWMDEYTYQIVVRKELLTKEELEAYNAEPITLAPWDPMGALAN

SEQ ID NO: 13767 - protein, 2178 aa, Streptococcus agalactiae
ATGGGATTTATTATCTTAGCTATTGTAATAGGTGGGCTCCTATTTGCATACTACGTTAGTCGTTCTCCGAAATTAACCGATCAAGCTTTAAAATCCGTTAACTCTAGTTTGGTTTATGATGGTAATAATAAACTTATTGCCGATTTAGGCTCAGAAAAGCGTGAAAGTGTTAGTGCGGATAGCATTCCACTAAATTTGGTTAACGCTATCACTTCTATAGAAGATAAACGTTTCTTTAAACATAGAGGTGTCGATATTTATCGTATTTTAGGTGCAGCTTGGCATAACCTTGTTAGTAGTAATACGCAAGGTGGTTCAACCCTTGATCAACAGTTGATTAAACTGGCTTACTTTTCTACCAATAAATCTGACCAAACGTTAAAACGTAAATCACAGGAAGTTTGGCTTGCGCTTCAAATGGAGCGTAAATACACCAAAGAAGAAATTCTTACTTTCTATATTAATAAAGTTTATATGGGAAATGGGAATTATGGTATGAGAACAACAGCTAAATCATACTTTGGTAAAGACCTAAAGGAATTATCTATTGCACAACTTGCTTTGCTCGCTGGTATTCCTCAAGCACCTACACAATATGACCCTTATAAAAACCCAGAATCTGCTCAAACAAGACGTAATACCGTTCTTCAGCAGATGTATCAAGATAAAAACATTTCTAAAAAGGAATACGACCAAGCTGTTGCAACTCCAGTAACTGATGGCTTAAAAGAATTAAAGCAAAAATCTACTTATCCAAAATATATGGATAACTACTTAAAACAAGTTATTAGTGAAGTTAAACAAAAAACTGGTAAAGATATCTTTACTGCTGGGCTAAAAGTGTATACTAATATCAACACTGATGCACAAAAACAACTATATGACATCTACAACAGTGATACTTACATCGCTTATCCAAACAATGAATTACAAATAGCATCTACCATCATGGATGCGACTAATGGTAAAGTCATTGCACAATTAGGCGGGCGTCATCAGAATGAAAATATTTCATTTGGGACAAATCAATCTGTCTTAACAGACCGCGATTGGGGTTCTACAATGAAACCTATCTCAGCTTATGCACCTGCTATTGATAGTGGTGTCTATAATTCAACAGGTCAATCATTAAACGACTCAGTTTACTACTGGCCTGGTACTTCTACTCAACTATATGACTGGGATCGTCAATATATGGGTTGGATGAGTATGCAGACCGCTATTCAACAATCACGTAACGTCCCTGCTGTCAGAGCACTTGAAGCCGCTGGATTAGACGAAGCAAAATCTTTCCTTGAAAAATTAGGCATATACTATCCAGAAATGAACTATTCAAATGCTATTTCAAGTAACAACAATAGCAGTGATGCAAAATATGGTGCAAGTAGTGAGAAAATGGCAGCGGCTTACTCGGCTTTTGCAAACGGCGGAACTTACTATAAGCCGCAATATGTTAATAAAATTGAATTTAGCGATGGAACCAATGATACTTATGCAGCGTCTGGTAGCCGTGCGATGAAAGAGACTACTGCCTACATGATGACGGATATGTTGAAAACAGTACTAACATTTGGTACTGGTACTAAAGCAGCTATCCCTGGTGTTGCACAAGCTGGTAAGACTGGTACTTCCAACTATACAGAAGATGAGTTAGCTAAAATTGAAGCAACTACTGGTATCTACAATAGCGCCGTTGGTACAATGGCTCCTGACGAAAACTTTGTCGGCTATACTTCTAAGTACACAATGGCAATTTGGACTGGTTATAAAAATCGCCTTACACCACTTTATGGTAGCCAACTGGATATTGCTACTGAGGTTTATCGTGCAATGATGTCCTACCTAACTGGCGGATACAGTGCAGATTGGACAATGCCAGAAGGGCTCTATCGAAGTGGAAGCTACTTGTATATCAATGGGACAACTACAACCGGCACTTACTCTTCTTCTGTCTATAAGAATATCTATCAAAATTCTGGACAGTCAAGTCAAAGCAGTAGTTCAACATCCTCTGAGAAACAAAAAGAGGATAAGAATACAGCAGATGATGCCAATTCATCATCCCCACAAGTCGAAACACCTAATAATGGTAATGCTACTACCCCTAATAATTCCAATCAAACTGTGCCAGGAACTGGACATGGTAATGGTAATAACAATACAGCACCTAACGGTAAT

SEQ ID NO: 13768 - protein, 726 aa, Streptococcus agalactiae
MGFIILAIVIGGLLFAYYVSRSPKLTDQALKSVNSSLVYDGNNKLIADLGSEKRESVSADSIPLNLVNAITSIEDKRFFKHRGVDIYRILGAAWHNLVSSNTQGGSTLDQQLIKLAYFSTNKSDQTLKRKSQEVWLALQMERKYTKEEILTFYINKVYMGNGNYGMRTTAKSYFGKDLKELSIAQLALLAGIPQAPTQYDPYKNPESAQTRRNTVLQQMYQDKNISKKEYDQAVATPVTDGLKELKQKSTYPKYMDNYLKQVISEVKQKTGKDIFTAGLKVYTNINTDAQKQLYDIYNSDTYIAYPNNELQIASTIMDATNGKVIAQLGGRHQNENISFGTNQSVLTDRDWGSTMKPISAYAPAIDSGVYNSTGQSLNDSVYYWPGTSTQLYDWDRQYMGWMSMQTAIQQSRNVPAVRALEAAGLDEAKSFLEKLGIYYPEMNYSNAISSNNNSSDAKYGASSEKMAAAYSAFANGGTYYKPQYVNKIEFSDGTNDTYAASGSRAMKETTAYMMTDMLKTVLTFGTGTKAAIPGVAQAGKTGTSNYTEDELAKIEATTGIYNSAVGTMAPDENFVGYTSKYTMAIWTGYKNRLTPLYGSQLDIATEVYRAMMSYLTGGYSADWTMPEGLYRSGSYLYINGTTTTGTYSSSVYKNIYQNSGQSSQSSSSTSSEKQKEDKNTADDANSSSPQVETPNNGNATTPNNSNQTVPGTGHGNGNNNTAPNGN

SEQ ID NO: 13769 - protein, 597 aa, Streptococcus agalactiae
ATGGTTAACTATCCACATCAGCTTATTCGGAAAACAACAGTTACAAAATCAAAGAAAAAGAAAATCGATTTTGCCAACCGTGGTATGTCATTTGAAGCTGCTATCAATGCAACCAATGACTACTATTTGTCTCACGAATTAGCTGTCATTCATAAGAAACCAACGCCAGTACAAATCGTCAAGGTAGATTATCCTAAACGTAGTCGTGCCAAGATTGTAGAAGCTTATTTTAGACAAGCTTCTACTACTGATTATTCTGGTGTTTACAAAGGTTACTATATTGACTTTGAAGCCAAAGAAACCCGGCAGAAAACTGCTATGCCTATGAAAAATTTTCATGCTCACCAAATAGAGCACATGGCAAATGTATTACAGCAAAAAGGGATTTGCTTTGTCTTGCTTCATTTTTCCACACTTAAGGAAACCTATCTACTCCCTGCTAATGAGTTAATTTCATTTTATCAGATTGATAAAGGCAATAAATCAATGCCTATTGATTATATCAGAAAAAATGGATTTTTCGTAAAGGAGAGTGCCTTTCCTCAAGTCCCTTACTTAGATATTATTGAAGAAAAATTATTAGGCGGTGATTACAAT

SEQ ID NO: 13770 - protein, 199 aa, Streptococcus agalactiae; identical to SEQ ID NO: 612

SEQ ID NO: 13771 - DNA, 516 bp, Streptococcus agalactiae
atgaagtcaactattcttgtaacaggttacaaaaattttgaattagggattttccaggataaggatcctcggattactattataaaaaaggctattgataaggattttagacgcttcttgraaaatggagcagactggtttatttttatgggaaatttagggtttgagtactgggctttggaagttgctcttgatttacaaaaagaatatgattttcaaattgcgacaatttttacctttgagaaccatggccaaaattggaatgaggctaataaagctaagttggcactctttaagcaagttgactttgttaaatatactttcccaagctatgaaaacccgggtcaatttaaacaatacaatcattttctcattaacaacacacaaggtgcatatcttttttatgattctgaaaatgaaactaatttaaaatttttgctagaaatgatggaaaaaaaggaagcttatgatatttctttcctaacttttgatcgcttaaatgaaatatatgaggaa

SEQ ID NO: 13772 - protein, 172 aa, Streptococcus agalactiae
  VARIANT 41: Xaa = Any Amino Acid
MKSTILVTGYKNFELGIFQDKDPRITIIKKAIDKDFRRFLXNGADWFIFMGNLGFEYWALEVALDLQKEYDFQIATIFTFENHGQNWNEANKAKLALFKQVDFVKYTFPSYENPGQFKQYNHFLINNTQGAYLFYDSENETNLKFLLEMMEKKEAYDISFLTFDRLNEIYEE

SEQ ID NO: 13773 - DNA, 120 bp, Streptococcus agalactiae; identical to SEQ ID NO: 9399

SEQ ID NO: 13774 - protein, 40 aa, Streptococcus agalactiae; identical to SEQ ID NO: 4970

SEQ ID NO: 13775 - DNA, 330 bp, Streptococcus agalactiae
atggcaagtattatttatagcccaaaagatatttttgagcaagattttaaagttagtatgcggggatatgacaagaaagaagtcgatgtatttctggatgatgtcatcaaagattacgaaaattatcttgagcaaattgagaagctccaaatggaaaatagacgtctacaacaagctttagacaaaaaagaaagcgaagcttcaaatgtaagaaattcagggacagctatgtataatcaaaaaccgattgcccaatctgcaaccaattttgatattttaaaacgcattagccgccttgagaaagaagtttttggaagacaaattagagaa

SEQ ID NO: 13776 - protein, 110 aa, Streptococcus agalactiae; identical to SEQ ID NO: 616

SEQ ID NO: 13777 - DNA, 591 bp, Streptococcus agalactiae
atgaaagaatcattcaaattaatagcaactgctgctgctggtttagaagccattgttggtagagaaatcagaaacctaggaattgactgccaagttgagaacggtagagtccgtttccacggagacatcaaaacaatcattgaaacgaacctatggctacgagctgccgatcgtataaagattattgtaggagagtttccagcacgtacttttgaggaactttttcagggtgtatatggccttgactgggaaaattatttaccgttaggggcaaaatttcctattgctaaagcaaagtgtgtcaagtcaaaattgcacaatgaamctagtgtacaagccatttctaaaaaagctgttgctaagaaacttcaaaaagtctttcaccgtcctgaaggagttcccttacaagaaaatggagctgaatttaaaatagaagtttctattttaaaagataaagcgactgtcatgattgatacgactggatcagtctcttcaaacgtggttaccgagcagaaaaaggtggtgcgccaattaaagaaaacatggcagcagctattattcaattatctaattggttccctgataagccat

SEQ ID NO: 13778 - protein, 197 aa, Streptococcus agalactiae
  VARIANT 109: Xaa = Any Amino Acid
MKESFKLIATAAAGLEAIVGREIRNLGIDCQVENGRVRFHGDIKTIIETNLWLRAADRIKIIVGEFPARTFEELFQGVYGLDWENYLPLGAKFPIAKAKCVKSKLHNEXSVQAISKKAVAKKLQKVFHRPEGVPLQENGAEFKIEVSILKDKATVMIDTTGSVSSNVVTEQKKVVRQLKKTWQQLLFNYLIGSLISH

SEQ ID NO: 13779 - DNA, 609 bp, Streptococcus agalactiae
atggcagcagctattattcaattatctaattggttccctgataagccattgattgatccaacttgtggttcaggtactttttgtattgaagccgctatgattggaatgaatatagctcctggttttaatcgtgattttgcctttgaggcgtggccatgggtagatcaaagtcaagtacaaaaggttcgcgatgaagctgagagtaaagcaaactatgatattgatttagatatttcaggttttgatttagacggtcgtatggtagaaattgctagaaaaaatgcagaagaagcaggacttggagatgttatcaaattgaaacaaatgcgtcttcaagatttaaaaacagataaaattaacggtgttattatctccaacccaccatatggtgaacgactcctggatgacaaagcagtggacattttgtataatgagatgggacaaacatttgcgcctttaaaaacttggagcaagtttatcctaactagtgacgaaggatttgaaaaaaaatacggctcacaagctgataaaaaacgtaagctttacaatggtactttaaaagttgatttgtaccaatattacggtgaacgtgtgagacgtcaagtaaaa

SEQ ID NO: 13780 - protein, 203 aa, Streptococcus agalactiae
MAAAIIQLSNWFPDKPLIDPTCGSGTFCIEAAMIGMNIAPGFNRDFAFEAWPWVDQSQVQKVRDEAESKANYDIDLDISGFDLDGRMVEIARKNAEEAGLGDVIKLKQMRLQDLKTDKINGVIISNPPYGERLLDDKAVDILYNEMGQTFAPLKTWSKFILTSDEGFEKKYGSQADKKRKLYNGTLKVDLYQYYGERVRRQVK

SEQ ID NO: 13781 - protein, 444 aa, Streptococcus agalactiae
ATGATTGCACAGATTATTGGTGCAATGCTAGGTTCACTTCTTGTTTATTTGCAATTTAGACCCCATTATGAGGCTGCAGAAAATAAAGCAGATATCCTTGGAACTTTTGCAACTGGTCCGGCTTTGAAGGATAATTTTTCCAATTTTTTAAGTGAAGTATTGGGAACACTTGTTCTTGTACTTACTATTTTTGCCATCGGAAAATACAATATGCCTCCAGGAGTTGGTACGATGAGTGTTGGTATGTTAGTGGTTGGGATTGGTCTATCGCTCGGTGGAACAACAGGTTATGCTATTAATCCTGCACGTGATTTTGGTCCTCGTTTATTGCATGCCTTGTTACCGATGAAGAACAAAGGTGATTCTGATTGGACTTATTCATGGATTCCGATAGTAGGACCTATGGTAGGAGCTATTTTAGCAGCCTTAATATTTGCTATGATG

SEQ ID NO: 13782 - protein, 148 aa, Streptococcus agalactiae
MIAQIIGAMLGSLLVYLQFRPHYEAAENKADILGTFATGPALKDNFSNFLSEVLGTLVLVLTIFAIGKYNMPPGVGTMSVGMLVVGIGLSLGGTTGYAINPARDFGPRLLHALLPMKNKGDSDWTYSWIPIVGPMVGAILAALIFAMM

SEQ ID NO: 13783 - protein, 342 aa, Streptococcus agalactiae
ATGACTTGTGCGCAGAAATTACGCCAATTAAATCCTAATTGGGATATCGTTTTGATTGATAAAGAAATTCATCCAGATTATGTTCCAAATGGCTTAAATTGGTATTATCGTCACGAAATTAGTGGTTTAAATCAGGCCATGTGGCAGACAGAAGAAGAGCAACGGTTGCAGAATATACGCTGTCTATTTGGTCTAAAAGTTGAGAAAATTAATAAAGAAGATAGGGAATTAATGTTATCAGATGGTTCTTCTGTCTATTATGATCAATTGATTTGTGCCATGGGCTCCCAAGCAGAATCAACTTATATTGATGGGGCTGATGCGCAAGNNNNNTTAATTAAT

SEQ ID NO: 13784 - protein, 114 aa, Streptococcus agalactiae
  VARIANT 110, 111: Xaa = Any Amino Acid
MTCAQKLRQLNPNWDIVLIDKEIHPDYVPNGLNWYYRHEISGLNQAMWQTEEEQRLQNIRCLFGLKVEKINKEDRELMLSDGSSVYYDQLICAMGSQAESTYIDGADAQXXLIN

SEQ ID NO: 13785 - protein, 724 aa, Streptococcus agalactiae
GTGGAACATTATCAATGTAATGCTTTTTATAAACGGTTAGACGCAGCCTTAGTTTTGTATATGAGTCGTTTTGCTCTTGAGTATAGGGAAGGAGAAGTTCTGGCAACTTTTGCTTTTCTACATTCACAAAATATTTTACCAATCAATACAATGGAATACATCATGGGATTTGGAGGCCCGATTATTGATTGTGTAACCGAAACAATCATCTACTTTAAAAAGGAGAGTATTTTAGCTGACGAGACATCAGATCAGGTTATTTACCAACTTGGTCAGTTATATAGCCATTATTATTTCTTTAAAGGTCATATTTTAGTTGAACAACCTGATTTAGAACAAACGTATCGACTTATTGATCATAATATGAGGGATAAGTTGCATGATATTTCAAAGAAGATTATTGCAAATGTTAATCGAATTAGACCTTTAACAGAAGATGGTTGTTCTTTGCTGACTTTACATTTGTTGGAATTGCTTATTTTCTCGAAAAATAGTCAAAAAATGCCCTTTAGGATTGGCCTAGATATGACAGGTAATGCTGTGGAACAGTCATTGTTGGAATATCGCATTCGACAACATTTCTCTGGTAATAATTCTATTCAAGTCGAACCTTATGACGAAGGAAAGGGATTTGATATGGTTATTTATCAGAGTCGCTCAAGACCTTATAAAGCCAAACTAACCTATTGCCTTAAAGGTGCTTCAGAGCGAGAACTACAGGAAA

SEQ ID NO: 13786 - protein, 242 aa, Streptococcus agalactiae
  VARIANT 232: Xaa = Any Amino Acid
MEHYQCNAFYKRLDAALVLYMSRFALEYREGEVLATFAFLHSQNILPINTMEYIMGFGGPIIDCVTETIIYFKKESILADETSDQVIYQLGQLYSHYYFFKGHILVEQPDLEQTYRLIDHNMRDKLHDISKKIIANVNRIRPLTEDGCSLLTLHLLELLIFSKNSQKMPFRIGLDMTGNAVEQSLLEYRIRQHFSGNNSIQVEPYDEGKGFDMVIYQSRSRPYKAKLTYCLXKVLQSENYRK

SEQ ID NO: 13787 - protein, 123 aa, Streptococcus agalactiae
ATGTTTGGTGTTCATAGTGGAATTGCTGCATTAGAATCACACAACTAGCGAAATTAGGGGTTGATTCTTTTTTGGACAGGCATGCTCTGCTCAATATCGCACAAGCAACTGCAGGTACAGTGG

SEQ ID NO: 13788 - protein, 42 aa, Streptococcus agalactiae
  VARIANT 12: Xaa = Any Amino Acid
MFGVHSGIAALXITQLAKLGVDSIFGPGMLCSISHKQLQVQW

SEQ ID NO: 13789 - protein, 912 aa, Streptococcus agalactiae
ATGTCTAGAGAATACATCACCTTGTCAAAAAATATCATCAAACACCTTGGTGGGCAAAATAATATTAACAATGTTTACCATTGTCAAACACGCCTTCGCTTTAGTCTCAATGATCCGACGAAAGTAAACCTTGAGCAATTAAAAACTTTAAAAGAGGTAAAAACTGTCGTTATCAGCGGAGGGCAACATCAGATAGTGATCGGGACTCATGTCGCAAAAGTGTTTGAAGAAATTAACTCCCTCATTGAAACTAACTCAACGACTAAAACAGAACAAACCAAAAAAGCCAAAGCAGTTAGTCGAATTATTGATTTTGTTTCTGGGACTTTCCAACCGATTTTACCAGCTCTATCAGGCGCTGGTATGATTAAGGCATTGCTAGCTTTATTACTAGTATTCAAAATCTTGACACCGTTATCTCAAACATATATATTACTAAATCTTTTTGCAGATGGTGTTTTCTATTTTTTACCTATCTTAATCGCCATCACAGCTGCTCAAAAATTGAAGGCTAATCCTATTTTAGCTTTGGGAACTGTTGTCATGCTCCTTCACCCTAATTGGGCTAATTTAGTAGCTTCTGGTAAACCAGTATCCTTATTCCATACGATCCCATTCACACTTACTAACTATGCATCAAGTGTCATTCCCATTATTCTAATTATTTGTGTTCAGGCTTATATAGAAAAATATTTAAATCAAATTATTCCTAAATCACTACGTTTAGTGCTTGTTCCTATGTTAATATTTCTCAGCATGGGAATTTTGTCGTTCTCTATATTGGGACCAATGGGTACTATCGCTGGCCAATATTTAGCTGTTATTTTTACTTTTTTTATCCAAATACGCCAGTTGGGCACCTGCTTTTCTAGTAGGAGCATTTGCTCCTATCCTAATCATGTTTGGTGTTCA

SEQ ID NO: 13790 - protein, 304 aa, Streptococcus agalactiae; identical to SEQ ID NO: 13736

SEQ ID NO: 13791 - DNA, 747 bp, Streptococcus agalactiae
  misc_feature 742, 743, 744, 745, 746: n = A,T,C or G
atgacagtacaggcgaagcgtgggacaatttacgaccgtaatggaaatcctatcgctgaggatgctacgacctatagtctctacgctattatctcaaagaactatacgacagctacaggtcaaaaactatatgtacaaccttctcagtatgaaaaagtagctagtatcttagagaataaattgggcatgaagaaaaatcttgtcctaaaacaactcaatcaaaagaaattgtttcaagtttcctttggaagttcaggttcaggattgtcttataccaagatggctgacatcaagaaaacgatggaaaagtcagatatcaaaggaattggtttttctaccagtccggggcgtatttatccaaatgggatatttgcttcacaatttataggatttactcttcctcaggatgatggagatggaaaaaaattagttggtaatacaggccttgaagcggcacttaacaaggtattatcaggtactgatggcaaagtaacatacgaaaaagaccgtagtgggaatgttcttttaggtactgcaacaacagaacgtagggcggttaatggtaaggatatctacacaactttatcagagcctattcagactgttttagagactcagatggatgttttcgcagaaaaaaccaaaggaaaatttgcgagtgctacagttgtcaacgctaaaacgggagaaattctagcaacgagtcagcgtcctacttataatccttctacccttaaaggtnnnnnt

SEQ ID NO: 13792 - protein, 249 aa, Streptococcus agalactiae
  VARIANT 248, 249: Xaa = Any Amino Acid
MTVQAKRGTIYDRNGNPIAEDATTYSLYAIISKNYTTATGQKLYVQPSQYEKVASILENKLGMKKNLVLKQLNQKKLFQVSFGSSGSGLSYTKMADIKKTMEKSDIKGIGFSTSPGRIYPNGIFASQFIGFTLPQDDGDGKKLVGNTGLEAALNKVLSGTDGKVTYEKDRSGNVLLGTATTERRAVNGKDIYTTLSEPIQTVLETQMDVFAEKTKGKFASATVVNAKTGEILATSQRPTYNPSTLKGXX

SEQ ID NO: 13793 - DNA, 393 bp, Streptococcus agalactiae
gtgtggtttggttcagacgtaggtcaagtatcaaatcgtcaaaagggtatcctagcaactacgacttatgattttaattcatctatggatattaaacttagccaagacaaagcgggccgcctagattatagtgaaagtttaatgacacatgctatggtcttaacgggagtagaccttgatgaatctggacaacctttaaaatggaaagttgagaactcttggggagagaaagttggtaaggatggttattttgtagcttcagatgcttggatggatgaatatacttaccaaatagtcgttcgtaaagaattgcttactaaagaagaattagaggcttacaacgcagagccaattactttagcgccgtgggatccgatgggagcactagctaat

SEQ ID NO: 13794 - protein, 131 aa, Streptococcus agalactiae
MWFGSDVGQVSNRQKGILATTTYDFNSSMDIKLSQDKAGRLDYSESLMTHAMVLTGVDLDESGQPLKWKVENSWGEKVGKDGYFVASDAWMDEYTYQIVVRKELLTKEELEAYNAEPITLAPWDPMGALAN

SEQ ID NO: 13795 - DNA, 1407 bp, Streptococcus agalactiae
atgacagtagaagaggctgttagaaaagattctgaaattaaggctggtattaccgaagaagatagtattcttgataaatacatcaaacaacatcgtgatgaagtagcttcacaaaagtttgagacaaaatcaagcgattttgcaaaccttgatacggcatctttagatgattttatcaagaaacagcgcgaagaattatcagcgatgttagctgcagaagagctttctaaaaagttggataattcagtctctcaagaacaagatatagaagctaatgctgtctcacctaaagaagaatcttcacaagaacaagaaaatagtgtaactccagttcctcctctgaatacggaagcagaaccaactgcaacagaaccagattcgactattgctgattcagaggagtataaatcctcttctaagaagcgtggaggtattgtaggaacattgattgctcttattttacttctaatagtaacaatctttggttacaactatttcaagaataataattcgacaaattctcaaactgcaacaagtcaaagttctagttctaaggctacgacgacttcatcagaagaagataaaaaagctagtcagaacttagataatttcaacaaagcttatgctaacttttttgttgatgataagaaaacccaactcaaaaatagcgaatttgataaattgtcagaattagaaaagaaagttgatgctttaaaaggaactaaatactacggtaaagtaaaagttaaatttgatagtctaaaacgtcaaattgatgctgttaaagctgttaacgacaagtttaagtcgcctgctgtagttgatggtaagaagagtgaaaaattagaagtaaaagatggagcgaattttgactctttagatagtaaaactcttaatactggtaatgctagtctagatagtttacttcactccatcgtttcaactggtcgtaatcaggtaaaacaatccgaagaacaggctaaaaaaactcaagaagaacagtcttcgtctaataaggtttcagacactcaaacaactgaacaaccaaacgtaactaacggtcaatcttcctcatcagctgctacaataaataatcaggcagctggcactgcatcaggtaatttggaacgtaaccgtagccgagtaccgtataataatgctgctattgcggacacaggaaatcctgcctggatatttaacccaggagtattagagaaaatcgtggccacttcacaggcgcgaggctatttctctggaaataactatattcttgaacctgtaaatattatcaatggtaatggttattacaatatgtttaaattagatggcacttatttgttctctatcaatgccaagacaggttactttgtaggtaacgctcctggaagagctgatagtttagattat

SEQ ID NO: 13796 - protein, 469 aa, Streptococcus agalactiae
MTVEEAVRKDSEIKAGITEEDSILDKYIKQHRDEVASQKFETKSSDFANLDTASLDDFIKKQREELSAMLAAEELSKKLDNSVSQEQDIEANAVSPKEESSQEQENSVTPVPPLNTEAEPTATEPDSTIADSEEYKSSSKKRGGIVGTLIALILLLIVTIFGYNYFKNNNSTNSQTATSQSSSSKATTTSSEEDKKASQNLDNFNKAYANFFVDDKKTQLKNSEFDKLSELEKKVDALKGTKYYGKVKVKFDSLKRQIDAVKAVNDKFKSPAVVDGKKSEKLEVKDGANFDSLDSKTLNTGNASLDSLLHSIVSTGRNQVKQSEEQAKKTQEEQSSSNKVSDTQTTEQPNVTNGQSSSSAATINNQAAGTASGNLERNRSRVPYNNAAIADTGNPAWIFNPGVLEKIVATSQARGYFSGNNYILEPVNIINGNGYYNMFKLDGTYLFSINAKTGYFVGNAPGRADSLDY

SEQ ID NO: 13797 - DNA, 480 bp, Streptococcus agalactiae
atgacaaaagaagttgtcgtagagagttttgaattagatcacaccatcgttaaagcaccctacgttcgtttaatttcagaagaagttggaccggtcggagacatcattactaactttgatatccgccttattcagcctaatgaaaatgctattgatactgctggtttacatactatcgagcaccttctggcgaagttaatccgccaacaaattaatggtttgattgattgttctccttttggttgtagaactggttttcacatgattatgtggggaaaacaggatgctactgaaattgctaaagtcatcaaatctagtctagaggctattgctggtggggtcacttgggaagacgttcctggaacaaccattgaatcttgtggaaattataaagaccacagtctccactctgctcaagaatgggcgaaattaattctttcccaagggatttctgacaatgcttttgagcgccacattgtc

SEQ ID NO: 13798 - protein, 160 aa, Streptococcus agalactiae
MTKEVVVESFELDHTIVKAPYVRLISEEVGPVGDIITNFDIRLIQPNENAIDTAGLHTIEHLLAKLIRQQINGLIDCSPFGCRTGFHMIMWGKQDATEIAKVIKSSLEAIAGGVTWEDVPGTTIESCGNYKDHSLHSAQEWAKLILSQGISDNAFERHIV

SEQ ID NO: 13799 - DNA, 1605 bp, Streptococcus agalactiae
atgtttaatattatattagcaatggtttgtgcactcattggtttgattattggttatgtggctatttcaatgaaaatgaaatcatcaaaagaagctgcagaactaactcttttaaatgcagaacaagatgccgttgatttacgtggtaaagcagaaattgaagcagaacacatccgtaaagcagcggaacgtgaaagtaaagctcaccaaaaagaattacttttagaagcaaaagaagaggctagaaaatatcgtgaagagatcgaaaaggaatttaaatctgatagacaagagttgaaacagatggaggcacgtttaacagatcgtgcatcatctcttgatcgtaaagatgaaaatctatctaacaaagaaaaaatgttagatagcaaagaacaaagtctaaccgataaatctagacatattaatgagcgcgaacaggaaattgctactttagaaacaaaaaaagtagaagaattgtcacgcatcgcagagcttagtcaagaagaagctaaagatatcattttagctgataccgaaaaagatttagctcatgatattgcgacacgtattaaagaagcagaacgggaagtaaaagatcgatcaaacaagatagcaaaagacttgctagcccaagctatgcaacgtttagctggtgaatatgttactgaacaaacaattacaactgttcatctccctgatgataatatgaagggacgtatcattggtcgtgaaggacgtaatattcgtactctggaaagtttgacaggtattgatgttatcatagatgatacgccagaagtcgttgtcttatcaggtttcgaccccattcgtcgtgaaattgctcgtatgactttagaatctttgattcaagatggacgtatccatccagctcgtattgaagagttggttgaaaaaaatcgtttggaaatggatcaacgtatccgtgagtatggtgaggcagcagcttatgagattggtgcaccaaatctgcatcctgatttgataaaaattatgggacgtttgcagttccgtacatcatatggtcaaaatgtacttcgtcattcagttgaagttggtaaacttgcaggtattttagctggagaactaggagaaaatgttgatttagctcgtcgggctggcttcctccatgatatggggaaagctattgatcgcgaagttgaaggcagtcacgttgaaattggtatggaatttgctcgtaagtacaaagagcatccgattgttgttaatactattgcaagccaccatggtgatgtagaacctgacagcgttattgcagtaattgttgctgctgcagacgcccttagttcagcacgaccaggtgcgcgtaatgagtcaatggaaaattatatcaaacgtctgcgtgatttagaagaaattgctaatggctttgagggagtgcaaaatgcctttgcacttcaagccggacgtgaaattcgtatcatggtacaacctggtaaagtttctgatgatcaagtagttattatgtcgcataaggtacgtgaaaaaatcgaacaaaacttggattatccaggtaatattaaggtaacagttattcgtgaaatgcgagctgttgattttgcaaaa

SEQ ID NO: 13800 - protein, 535 aa, Streptococcus agalactiae; identical to SEQ ID NO: 626

SEQ ID NO: 13801 - protein, 99 aa, Streptococcus agalactiae
TTGTCATATTTTGAAATGACAAAAATATCTAAAAAGTTTCCTTCTGATTTTTTATACTATGATTATAGTAAAGGAGAACCAAATGGCAAAAGATATAAT

SEQ ID NO: 13802 - protein, 33 aa, Streptococcus agalactiae
MSYFEMTKISKKFPSDFLYYDYSKGEPNGKRYN

SEQ ID NO: 13803 - protein, 893 aa, Streptococcus agalactiae
ATGGCAAAAGATATAATTAAGGTTGATCATATATTTAAAAGCATCGGGCAAAAAACGATTTTAGAAGATATATCATTTAGTATAGCTTCTAACCAATGTGTAGCATTGATTGGACCTAATGGTGCAGGGAAAACAACTCTGATGTCAACTTTATTAGGTGATATTAGTATTTCTTCAGGAGCATTGACTATTTTTAATCTGCCTGCACACCACAATAGGTTAAAATATAAGGTGGCCATCTTACCACAAGAAAATGTATTGCCCTCAAAGTTTACAGTGAGAGAACTCATTGATTTCCAAAGGTGTTTATTTCCAGAAGTGCTGCCAATGTCTCTGATTTTAGACTATCTACAGTGGAGTGATGCGCACTTGCAACAATTTACAGAGACTTTATCTGGAGGGCAAAAACGACTTTTAGCTTTTGTTTTAACTTTGGTTGGTAAGCCCCAATTACTATTTTTAGATGAACCTACTTCCGGAATGGATACTTCCACACGTCAACGATTTTGGGAGCTGGTTGCGACACTAAAAAAAGAAGGTGACACAATGTCTATTCTAGTCATTATATCGAAGAGGTAGAACATACAGCTGATAGGATTTTAGTACTTCATAAAGGAAAGTTATTACGCGATACAACCCCCTTTGCCATGAAGCAAGAAAAAACCGAAAAGTTATTCACCGTTCCGCTTAGTTATCAAAAATTATTACCTACCTATTTGATTACAGAGTGTGAAGCCAAGAGTGATAGTATAACGTTTGTTACTGGGGAGGCTGAAACTGTATGGAAAATACTGGCAGATAATGGTTGTCCTATTGAAGCTATTGAGATGACCAATAGAACTTTGTTAAATCGTATTTTTGAGACTACTAAGGAGGTAAAACATGAGAATCTT

SEQ ID NO: 13804 - protein, 298 aa, Streptococcus agalactiae
MAKDIIKVDHIFKSIGQKTILEDISFSIASNQCVALIGPNGAGKTTLMSTLLGDISISSGALTIFNLPAHHNRLKYKVAILPQENVLPSKFTVRELIDFQRCLFPEVLPMSLILDYLQWSDAHLQQFTETLSGGQKRLLAFVLTLVGKPQLLFLDEPTSGMDTSTRQRFWELVATLKKEGDTIVYSSHYIEEVEHTADRILVLHKGKLLRDTTPFAMKQEKTEKLFTVPLSYQKLLPTYLITECEAKSDSITFVTGEAETVWKILADNGCPIEAIEMTNRTLLNRIFETTKEVKHENL

SEQ ID NO: 13805 - protein, 734 aa, Streptococcus agalactiae
ATGAGAATCTTTAAAGCATTATTGAAAATGGAATTTCTTTTGACAAAACGTCAACTTGCCAATCTCATTATGGCTATAGGTATGCCAGTGGCTTTTTTTCTATTTTTTTCAGGATTTATGGGCGAAGGACTCACTAAAGCCATCGAAGCTATCTACGTTCGTAATTATATGATAACGATGGCAGGATTCTCAAGTCTTAGCTTTGCTTTTTTTACTTTTCCATTTTCTATGAAAGATGATCAACTCTCAAACCGAATGCAATTATTAAGACACTCACCAGTACCAATGTGGCAATATTATCTAGCAAAAATTATTCGTATTTTATTTTACTATTGCCTAGCAATAACTGTTGTTTTCCTAACAGGGCATATTTTAAGGCAAGTTAGTATGCCAATAGAACAATGGATGCAGAGCTTTTTATTGCTATTAGGAGGAGCACTGTTTATCCTTTTGGATTGCTCGTCTCCTACTTTAAAAATACTGAACTAATGTCAATGGTAGCCAATATTTGTTATATGTCATTAGCTGTTCTTGGTGGCATGTGGATGCCAATTACAATGTTCCCAAAATGGTTGCAAGGTTTATCAAAGTTAACCCCTACTTACCATTTGACTCAAGTTATCCTTAGTCCGTTTGCTAATAGTTTTGCTGTTTTTTCTCTTATTATTCTGATAGGCTATGGTATTATAATGTTAGTTATCGCTTATCTACTATCTCAGAAGAGGCATTCAATT

SEQ ID NO: 13806 - protein, 246 aa, Streptococcus agalactiae
MRIFKALLKMEFLLTKRQLANLIMAIGMPVAFFLFFSGFMGEGLTKAIEAIYVRNYMITMAGFSSLSFAFFTFPFSMKDDQLSNRMQLLRHSPVPMWQYYLAKIIRILFYYCLAITVVFLTGHILRQVSMPIEQWMQSFLLLLGGATCFIPFGLLVSYFKNTELMSMVANICYMSLAVLGGMWMPITMFPKWLQGLSKLTPTYHLTQVILSPFANSFAVFSLIILIGYGIIMLVIAYLLSQKRHSI

SEQ ID NO: 13807 - protein, 826 aa, Streptococcus agalactiae
ATGATTGCCTGGTTTACAATGTTGACATATATTTTCTACATGACAGTTTTTATAAATAGTGGTTTCATCTGGTATATTTACTTTCTGAGTAATTTACTCGTCTATCGCTTTAGAGATAAATTGAAGTCTTTTAGATTCATTAGTTTTGCTTGCACTCTAGCCACAATGGTATTTTTATGCTTCTTTAAGGCATCAGACTTTGGTGATAGAATCATGTTTCTAATTGTTCCTATTTTTTGTATCGGTTACATGTGGATTGCTATTGAAAATAGAAATAGCGAAGAACAAAGAGAAAAAATTGCAGAGCAAAATCAGTATATCAATATTTTGTCAGCTGAAAATGAACGTAACCGTATAGGGCGTGATTTGCATGATAGTTTAGGACATACATTTGCTATGATGACACTAAAGACAGAACTAGCGTTAAAGTTGTTAGAAAAAAGGAACTATGATAAGGTACAAAAAGAACTATCAGAATTAAATCATATTAGTCATCAATCGATGAGTGAGGTCCGTCAAATTGTTTCTAACCTCAAGTATCGTACAGTAGTGGAAGAAATTGATGAGTTGTACCGCTTGTTTCAATTATCTAACATCAAGTTAACAGTTGTTAATAAGTTAGAGACGTCACAACTAAGTCCAGTAACACAATCTACAATCACAATGATATTAAAGGAATTATCCAATAATATTGTTAAGCATGCTGAAGCTGATAGCGTGGAGTTGAGTTTAGTAAGGCAAGGTGCTACTATAAATATTGAGATGATTGATAATGGTTGTGGTTTTACAAACCTGACGGAGATGAGGCATAGTATTCAAGAGAGAT

SEQ ID NO: 13808 - protein, 276 aa, Streptococcus agalactiae
MIAWFTMLTYIFYMTVFINSGFIWYIYFLSNLLVYRFRDKLKSFRFISFACTLATMVFLCFFKASDFGDRIMFLIVPIFCIGYMWIAIENRNSEEQREKIAEQNQYINILSAENERNRIGRDLHDSLGHTFAMMTLKTELALKLLEKRNYDKVQKELSELNHISHQSMSEVRQIVSNLKYRTVVEEIDELYRLFQLSNIKLTVVNKLETSQLSPVTQSTITMILKELSNNIVKHAEADSVELSLVRQGATINIEMIDNGCGFTNLDGDECIVFKRD

SEQ ID NO: 13809 - protein, 588 aa, Streptococcus agalactiae
ATGAAATTACTTGTTGCTGAGGATCAGTCCATGCTACGAGACGCTATGTGCCAATTACTTTTGATGGAAGAAAGTGTTTCTACTATTGATCAAGCTGGAAATGGTGAAGAAGCTATTGCCATTTTATCCAATAAAGCCATAGATGTTGCAATATTGGATGTTGAGATGCCGATATTATCAGGTTTAGATGTCTTAGAGTGGGTTAGAAAATACCAGAATGTTAAGGTCATAATTGTAACAACCTTTAAGCGGTCAGGTTATTTCCAAAGGGCTATTCGTTCAAATGTAGATGCTTATGTTTTGAAAGACCGCTCAGTAGCTGATTTGATGAAAACGATTCAAAAAGTTTTATCTGGGGGTAAAGAATATTCGCCTGAATTAATGGAAAACGTTATATCTAATCCTTTGAGTAAGCAAGAAATAAAAATTCTTTCCCTAATTGCTCAAGGGAAGACCAGCAAAGAAATTGCATGCACTTTATTTTTATCGAATGGTACAGTTCGTAATTACACGTCAAATATTTTTGATAAATTAGGAGTTAATAATCGTTTGGAGGCACTTAAAATAGCACGAGAAAAGGATTGGCTG

SEQ ID NO: 13810 - protein, 196 aa, Streptococcus agalactiae
MKLLVAEDQSMLRDAMCQLLLMEESVSTIDQAGNGEEAIAILSNKAIDVAILDVEMPILSGLDVLEWVRKYQNVKVIIVTTFKRSGYFQRAIRSNVDAYVLKDRSVADLMKTIQKVLSGGKEYSPELMENVISNPLSKQEIKILSLIAQGKTSKEIACTLFLSNGTVRNYTSNIFDKLGVNNRLEALKIAREKDWL

SEQ ID NO: 13811 - protein, 702 aa, Streptococcus agalactiae
ATGCAAAAATTTAAAGAACGTTTTGATACGCTTAGTGATGCAATTTTGGCCATTGCTATGACGATTTTAGTTTTGGAGATAAAAACTCCGACTACGATGGGTGATATTGGTGACTTTACACGGAACATAGGTTTATTTATTGTTAGCTTTGTTGTTGTTTTTAATTTTTGGTACGAAAGGGCACAAAATAGCCTAGATGCTCAAAAGACTAATGATGAAATTATAGCTCTTGATATCATTGAACACTTAGGTATTTGTTTGATTCCTCTCTTTACTAAATTTATGATTTCTTTTGAGAATCATAATTTTGCTGTTATGGCTTATGGACTCTTAACGTTATTAGTTGGTCTCACATCAGACATTATTCGGATTCGTTTGGCAAGCTATGATTTAGTGACCATTCCTAGTGAATTGAAAGAGCGGGTTATAAAAGTCATGACAACTTTTGCCATTCGTTCAGTTGTGGTTCGCTTTATCATTATTATCCTCGCTTATTTTCTACCTGAGGTAGGGATATTTGCATATTTAGTCATACCGCTCTTTATGTTTTGGCGTCGCTCTAGAGCAGGAAAATACTATACTAAAAAGGGCATTGAGGCACCCTCTTATATCAAGCTTTTTATCCAAATTGGAGAGAGAGTTCCTGAGGATTTTACTAATTCAAGTAGTGGAATAAGTGGGGTAAAAAGACTCTATAAAAAA

SEQ ID NO: 13812 - protein, 234 aa, Streptococcus agalactiae
MQKFKERFDTLSDAILAIAMTILVLEIKTPTTMGDIGDFTRNIGLFIVSFVVVFNFWYERAQNSLDAQKTNDEIIALDIIEHLGICLIPLFTKFMISFENHNFAVMAYGLLTLLVGLTSDIIRIRLASYDLVTIPSELKERVIKVMTTFAIRSVVVRFIIIILAYFLPEVGIFAYLVIPLFMFWRRSRAGKYYTKKGIEAPSYIKLFIQIGERVPEDFTNSSSGISGVKRLYKK

SEQ ID NO: 13813 - protein, 627 aa, Streptococcus agalactiae; identical to SEQ ID NO: 4991

SEQ ID NO: 13814 - protein, 209 aa, Streptococcus agalactiae [sequence omitted]

SEQ ID NO: 13815 - protein, 312 aa, Streptococcus agalactiae; identical to SEQ ID NO: 9425

SEQ ID NO: 13816 - protein, 104 aa, Streptococcus agalactiae; identical to SEQ ID NO: 640

SEQ ID NO: 13817 - protein, 2388 aa, Streptococcus agalactiae
ATGGCAAGAAAATTAGCACAGGTTATTGTTGATATTCCTCTGATGCAGACAGATAAACCATTTTCGTATGCCATTCCTAAAGATTTGGAAGATTTGGTACAAGTAGGAGCACGCGTTCATGTTCCTTTTGGAAGAGGGAATCGTCTTTTGCAAGGCTTTGTTGTCGGTTTCAGAGATGATGATGAATTAGAGACTAAGGATATTGCGGGGGTCCTAGATTTTGAACCTGTTTTAAATCAGGAACAACTAGACTTAGCTGATCAGATGCGCCATACTGTCTTTTCTTATAAAATATCTATTTTGAAATCAATGTTACCAAGTCTTTTGAATTCGCAATATGATAAACTCTTGTTAGCAACAGACACATTACCATCAGAAGATAGAGAAGATCTATTTGGTCATAAAACGGAAATTGTCTTTTCAAGTTTGTCTTCTCAAGATGCCAAAAAAGCAGGCAGATTAATTCAAAAAGGTTTCATAGAAGTTCAATATTTAGCCAAAGATAAGAAAACAATAAAAACAGAAAAGATTTACAAAATCAACAGAACTCTGTTAGAAGAGAGTCAAATAGCAGCAAGAGCGAAAAAGAGACTGGAGTTGAAAGAATTCCTGTTAGAAAATCCTCAACCAGGGCGCCTCACAGCTTTAAACAAACAATTTTCATCTCCTGTAGTTAATTTTTTCAGAGAAGAAGGAATCATTGAGGTCATTGAAAAAGAAGCTAGTAGATCTGATAATTATTTTAAAGGAATCCTAAAAACGGATTTTTTGGATTTAAATCAGGAACAAGCTAAAGTAGTTAAAATAGTTGTTGACCGAATTGGTAAGGATCAGAATAAACCCTTCTTGTTGGAGGGGATTACAGGGTCTGGTAAGACAGAGGTATATCTTCATGTCATTGATAACGTTTTAAAGTTGGGAAAAACAGCGATTGTTCTCGTTCCAGAAATTTCTTTAACTCCCCAGATGACGAATCGTTTTATTTCCCGTTTTGGAAAGCGAGTTGCTATTATGCACTCGGGCTTGTCAGATGGTGAAAAATTTGATGAGTGGCGAAAGATAAAATCAGGTCAAGCTAAAGTTGTCGTTGGAGCTCGTTCAGCAATTTTTGCTCCTTTGGAAAATATCGGAGCCATCATTATAGATGAAGAACATGAATCAACTTATAAGCAAGAATCTAACCCAAGGTATCATGCGCGCGATGTGGCCTTGCTACGTGCAGAATATCATAAAGCTGTGTTACTAATGGGATCAGCAACTCCAAGTATCGAAAGCCGAGCTAGAGCTAGTCGGGATGTTTATAAATTTTTAGAATTAAAACATCGTGCTAATCCTAAAGCACGTATTCCTCAGGTTGAAATTATTGATTTTAGAAATTTTATTGGTCAACAAGAAGTTAGTAATTTCACACCATATTTACTAGATAAAATCCGAGATAGATTAGATAAGAAAGAGCAAGTGGTTCTTATGCTCAATCGTAGAGGTTATTCTAGTTTTATTATGTGTCGAAACTGCGGCTACGTTGATCAATGTCCTAATTGTGACATTTCTCTGACTTTACATATGGCTACAAAGACCATGAATTGTCATTATTGTGGGTTTGAAAAGCCTATTCCAAGAACATGTCCAAATTGCAATAGTAAAAGTATCTCTTACTATGGTACTGGAACCCAAAAAGCTTATGAAGAACTTTTGAAAGTTATCCCAGACGCAAAGATTTTACGGATGGATGTTGATACGACAAGGCAAAAAGGCGGTCATGAGTCTATTTTGAAGCGTTTCGGAAATCATGAAGCTGATATTTTATTGGGAACACAGATGATTGCTAAGGGATTGGATTTTCCAAATGTTACTTTAGTTGGAGTACTAAATGCAGATACTTCTCTGAATTTACCTGATTTTCGATCATCAGAGCGAACTTTTCAGCTATTAACTCAAGTGGCTGGACGTGCTGGGCGTGCTGAAAAAGAAGGAGAGGTTGTCATTCAAACTTATAATCCTAATCATTATGCTATTCAATTAGCCCAAAAGCAAGATTTTGAAGCTTTTTATCAATATGAAATGAATATCCGTCGACAACTTGGTTATCCTCCTTATTATTTTACAGTTGGTTTAACATTATCGCATAAAGATGAAGAGTGGTTAATACGAAAATCTTATGAAGTATTAAGTTTATTGAAGCAAGGCTTTAGTGATAAAGTAAAGTTGTTAGGTCCAACGCCAAAACCAATTGCAAGAACACATAACCTTTATCACTACCAAATTATTATCAAGTATCGATTTGAGGACAACCTTGAACTTGTTTTGAATCGCTTATTAGACATCACTCAAGACAAGGAGAATAGAGATCTTCGCTTAGCAATAGACCACGAACCGCAAAATATGATG

SEQ ID NO: 13818 - protein, 796 aa, Streptococcus agalactiae
MARKLAQVIVDIPLMQTDKPFSYAIPKDLEDLVQVGARVHVPFGRGNRLLQGFVVGFRDDDELETKDIAGVLDFEPVLNQEQLDLADQMRHTVFSYKISILKSMLPSLLNSQYDKLLLATDTLPSEDREDLFGHKTEIVFSSLSSQDAKKAGRLIQKGFIEVQYLAKDKKTIKTEKIYKINRTLLEESQIAARAKKRLELKEFLLENPQPGRLTALNKQFSSPVVNFFREEGIIEVIEKEASRSDNYFKGILKTDFLDLNQEQAKVVKIVVDRIGKDQNKPFLLEGITGSGKTEVYLHVIDNVLKLGKTAIVLVPEISLTPQMTNRFISRFGKRVAIMHSGLSDGEKFDEWRKIKSGQAKVVVGARSAIFAPLENIGAIIIDEEHESTYKQESNPRYHARDVALLRAEYHKAVLLMGSATPSIESRARASRDVYKFLELKHRANPKARIPQVEIIDFRNFIGQQEVSNFTPYLLDKIRDRLDKKEQVVLMLNRRGYSSFIMCRNCGYVDQCPNCDISLTLHMATKTMNCHYCGFEKPIPRTCPNCNSKSISYYGTGTQKAYEELLKVIPDAKILRMDVDTTRQKGGHESILKRFGNHEADILLGTQMIAKGLDFPNVTLVGVLNADTSLNLPDFRSSERTFQLLTQVAGRAGRAEKEGEVVIQTYNPNHYAIQLAQKQDFEAFYQYEMNIRRQLGYPPYYFTVGLTLSHKDEEWLIRKSYEVLSLLKQGFSDKVKLLGPTPKPIARTHNLYHYQIIIKYRFEDNLELVLNRLLDITQDKENRDLRLAIDHEPQNMM

SEQ ID NO: 13819 - protein, 933 aa, Streptococcus agalactiae
ATGACAAAATTATTATTCATGGGTACCCCTGATTTTTCAGCGACGGTTTTAAAAGGTATTTTAGCAGATGGTAAGTATGATGTTTTAGCTGTTGTGACGCAACCAGATCGTGCTGTAGGTCGTAAAAAAGAAATTAAAATGACCCCTGTAAAAGAAGTGGCCTTGGAAAACAACATTCCTGTGTATCAGCCGGAAAAACTATCTGGAAGTCCAGAATTAGAGCAACTAATGACCCTAGGTGCAGATGGTATTGTAACAGCTGCTTTTGGTCAATTCTTACCAACAAAGCTTTTGGAATCGGTAGGTTTTGCAATTAATGTACATGCTTCTCTATTACCAAAATATCGTGGTGGGGCACCAATTCATTATGCCATTATTAATGGCGAAAAAGAAGCTGGGGTTACCATCATGGAGATGGTTGCAAAGATGGATGCAGGGGATATGGTATCAAAAGCTTCCGTTGAGATAACTGATGAAGACAATGTAGGGACAATGTTTGATAGACTCGCCGTTGTTGGTCGTGACCTTTTATTAGATACGCTTCCAGGTTATCTATCAGGTGATATTAAGCCGATACCACAAAATGAAGAAGAGGTAAGTTTTTCTCCTAATATTAGTCCAGATGAAGAGAGAATTGATTGGAATAAATCATCGCGCGACATTTTTAACCATGTTCGAGGGATGTATCCATGGCCAGTTGCACATACCCTTTTGGAGGGAAATCGTTTTAAACTTTATGAAGTAACAATGTCAGAAGGAAAGGGCTCACCGGGTCAAGTGATCGCTAAGACAAAGAACTCATTGACAGTAGCAACTGGTGACGGAGCTATTGAACTCAAATCAGTTCAACCAGCAGGGAAACCTCGTATGGATATAAAAGACTTTTTAAATGGTGTTGGTCGTAATTTAGAAATAGGAGATAAATTTGGCGAA

SEQ ID NO: 13820 - protein, 311 aa, Streptococcus agalactiae; identical to SEQ ID NO: 644

SEQ ID NO: 13821 - protein, 1320 aa, Streptococcus agalactiae
TTGGCGAATGATTGGAAAAAGAGTGCGCGTGGTTTAGCTTTAATGACTTTAGAAGAAGTTTTTGATAAAGGAGCTTATTCTAATATCGCACTTAATAAGAGTTTAAAAAAATCTAGACTATCAGATAAAGATCGTGCCTTAGTAACAGAAATTGTCTATGGAACTGTGGCTAGAAAAATAACGCTAGAATGGTATCTATCACACTTTATAGTTGATCGTGATAAGCTTGAATTATGGGTATATCATCTCTTGCTACTGAGTCTTTATCAACTACTCTATCTGGACAACATCCCAGATCACGCTATTGTTAATGATGCTGTCACTATTGCTAAGAATCGAGGCAATAAAAAGGGTGCTGAAAAGTTAATTAATGCCGTTTTACGAAGAGTAAGTTCGGAGACGCTCCCTGAAATTGCATCAATAAAACGCCAAAACAAACGTTACTCTGTTGCTTATTCCATGCCAGTGTGGCTCGTAAAAAAATTAATTGACCAATATGGTGAGACAAGAGCTTTAGCAATTATGGAGAGTTTATTTGAGCGAAATAAAGCCAGTCTTCGTGTGACTGACTTATCGCAAAAACAAACTATTAAAGAAACTTTAAATGTTAGAGATTCACATATTGCAGAGACAGCTTTAGTTGCAGACTCAGGAAATTTTGCATCGACATCATTTTTCCAAGATGGCCTCATTACTATCCAAGATGAATCTAGTCAATTAGTTGCTCCAACACTCAAAGTCTCGGGTAATGACCAAGTATTGGATGCATGTAGTGCACCAGGAGGAAAAACAAGTCATATCGCCTCATATTTGACTACAGGGGCAGTAACTGCTTTAGATTTGTATGATCATAAATTGGAATTGGTTATGGAAAATGCAAAACGCCTAGGTCTGTCAGATAAGATAAAAACTAAAAAGTTAGATGCAAGTAAAGCTCATGAGTATTTTCCTGAGGATACTTTTGACAAAATTTTAGTAGACGCACCTTGTTCAGGTATCGGGCTAATTCGCCGTAAACCAGATATTAAGTACAATAAAGCTAATCAAGACTTTGAAGCCCTCCAAGAGATTCAATTGTCTATCCTATCTAGCGTTTGTCAAACGCTACGTAAAGGTGGTATAATAACCTATAGCACTTGTACCATTTTTGAGGAAGAAAATTTTCAAGTTATTGAAAAATTCTTAGAAAACCACCCCAATTTTGAGCAAGTAGAACTGAGTCATACACAAGAGGATATTGTAAAGAGAGGCTGTATTAGTATAAGTCCTGAACAATATCATACAGATGGCTTTTTTATTGGACAAGTCAAACGTATCTTG

SEQ ID NO: 13822 - protein, 440 aa, Streptococcus agalactiae
MANDWKKSARGLALMTLEEVFDKGAYSNIALNKSLKKSRLSDKDRALVTEIVYGTVARKITLEWYLSHFIVDRDKLELWVYHLLLLSLYQLLYLDNIPDHAIVNDAVTIAKNRGNKKGAEKLINAVLRRVSSETLPEIASIKRQNKRYSVAYSMPVWLVKKLIDQYGETRALAIMESLFERNKASLRVTDLSQKQTIKETLNVRDSHIAETALVADSGNFASTSFFQDGLITIQDESSQLVAPTLKVSGNDQVLDACSAPGGKTSHIASYLTTGAVTALDLYDHKLELVMENAKRLGLSDKIKTKKLDASKAHEYFPEDTFDKILVDAPCSGIGLIRRKPDIKYNKANQDFEALQEIQLSILSSVCQTLRKGGIITYSTCTIFEEENFQVIEKFLENHPNFEQVELSHTQEDIVKRGCISISPEQYHTDGFFIGQVKRIL

SEQ ID NO: 13823 - protein, 735 aa, Streptococcus agalactiae
ATGGAAATATCTCTTTTAACAGATATTGGGCAACGTCGTTCCAATAATCAAGATTTTATTAATCAATTTGAAAATAAAGCCGGCGTCCCACTAATCATCTTAGCAGATGGTATGGGAGGACATCGTGCAGGAAATATTGCTAGCGAGATGACTGTAACTGATCTAGGAAGTGATTGGGCGGAGACAGATTTTTCTGAGTTATCAGAAATTCGTGATTGGATGCTTGTCTCTATTGAAACTGAGAATCGCAAAATATATGAATTAGGTCAGTCAGATGATTACAAAGGTATGGGAACTACCATTGAAGCAGTTGCCATTGTAGGAGATAATATTATTTTCGCACATGTAGGAGATTCACGTATCGGTATCGTTCGTCAAGGGGAGTATCATTTATTGACGAGTGATCATTCTCTTGTTAATGAATTGGTAAAAGCCGGCCAATTAACAGAAGAAGAAGCTGCTAGTCATCCTCAAAAAAATATTATTACGCAATCAATTGGTCAAGCCAATCCAGTCGAACCTGATTTAGGAGTTCATCTACTTGAAGAAGGTGACTACCTTGTAGTTAATAGTGATGGACTAACTAATATGTTGAGTAATGCCGATATTGCTACAGTACTAACACAAGAAAAAACCTTAGATGATAAGAATCAAGATTTAATCACTCTAGCAAACCATAGAGGAGGTCTTGATAATATCACTGTGGCACTAGTTTACGTTGAAAGTGAGGCGGTT

SEQ ID NO: 13824 - protein, 245 aa, Streptococcus agalactiae; identical to SEQ ID NO: 648

SEQ ID NO: 13825 - protein, 1887 aa, Streptococcus agalactiae
ATGGCGGATGTTTATCTAGCTCGAGATCTAATTTTAGATAATGAAGAGGTCGCAATAAAAGTATTGCGAACCAATTATCAAACAGATCAGATTGCGGTTGCTCGCTTCCAGAGAGAAGCACGAGCAATGGCTGAGCTGACACATCCTAATATTGTCGCTATTCGTGATATAGGTGAAGAAGACGGACAGCAGTTCTTAGTAATGGAATATGTTGATGGATTCGATTTAAAAAAGTATATTCAAGACAATGCACCCCTATCAAATAATGAAGTTGTTCGAATCATGAATGAAGTCCTTTCAGCCATGTCACTGGCACATCAGAAAGGTATCGTACACCGTGATTTAAAACCTCAAAATATTTTATTAACTAAAAAAGGGACTGTAAAAGTTACAGATTTCGGTATTGCGGTAGCGTTTGCTGAAACTAGTTTAACGCAAACGAATTCTATGTTAGGTAGTGTTCATTATTTATCGCCAGAGCAGGCGCGTGGTTCAAAAGCGACTGTTCAGAGTGATATTTATGCCATGGGAATCATGCTTTTTGAAATGTTAACTGGCCATATTCCTTATGATGGGGATAGTGCAGTTACTATTGCCCTACAGCACTTCCAAAAACCACTACCATCAATCCTTGCAGAAAATAAAAGCGTTCCACAAGCTTTGGAAAACATTGTCATTAAAGCAACAGCTAAAAAGCTAACAGATCGCTATAAGACAACTTATGAGATGGGACGTGATTTATCAACTGCTCTAAGCTCGACACGTCACCGTGAACCAAAACTTGTTTTTAATGATACTGAGAGTACTAAGACACTACCAAAAGTAACATCTACAGTATCATCTTTAACGACAGAACAACTGTTGCGTAATCAAAAACAGGCCAAAACAACAGAAAAAATAACTCCTGATTCTGCGAGTAACGATAAAACGAAGTCTAAAAAGAAGGCTTCTCATCGACTTCTTGGTACAATCATGAAATTATTCTTTGCACTCTGTGTTGTAGGAATAATTGTATTTGCTTATAAAATTTTAGTAAGTCCTACGACTATTCGTGTTCCAGATGTTAGCAACAAAACAGTAGCTCAAGCAAAAATGACATTGGAAAATTCTGGATTGAAAGTAGGAGCTATTCGTAATATTGAGAGTGATAGTGTTTCAGAAGGCCTTGTCGTAAAAACAGACCCTGCTGCAGGACGTTCTCGTAGAGAAGGGGCTAAAGTTAATCTTTATATTGCCACTCCAAACAAGAGTTTCACTCTAGGTAATTATAAGGAACATAATTACAAAGATATCCTCAAAGATCTTCAAGGCAAAGGTGTTAAAAAATCTTTAATCAAGGTTAAGCGTAAAATTAATAATGATTATACTACTGGTACAATCTTAGCACAGTCGCTTCCAGAAGGAACATCTTTTAATCCTGATGGTAATAAGAAATTAACACTTACGGTTGCTGTTAATGATCCAATGATTATGCCTGATGTAACAGGTATGACAGTTGGAGAAGTAATAGAAACCTTGACAGACCTCGGATTAGATGCAGATAATCTTGTCTTCTATCAAATGCAAAATGGCGTTTATCAAGCAGTAGTAACACCTCCATCTTCAAGTAAGATAGCAAGTCAGGATCCTTATTACGGAGGAGAAGTTGGATTAAGGAGAGGAGATAAAGTTAAGCTGTATCTTCTTGGTTCTAAAACAACAAATAACTCATCATCTACGCCAATAGATTCTTCGGCTTCAAGCTCAACAGGAACAACTACCTCGGATTCTGTAAGCTCATCAACGGATGCTAGCACTTCTGATAGTAGTAGCACTTCTACAAGTAGTTCAACACTACCAAGTGATAGTACAACTAATACAGGAACAGCTAACAATCCATTAACTCAA

SEQ ID NO: 13826 - protein, 629 aa, Streptococcus agalactiae
MADVYLARDLILDNEEVAIKVLRTNYQTDQIAVARFQREARAMAELTHPNIVAIRDIGEEDGQQFLVMEYVDGFDLKKYIQDNAPLSNNEVVRIMNEVLSAMSLAHQKGIVHRDLKPQNILLTKKGTVKVTDFGIAVAFAETSLTQTNSMLGSVHYLSPEQARGSKATVQSDIYAMGIMLFEMLTGHIPYDGDSAVTIALQHFQKPLPSILAENKSVPQALENIVIKATAKKLTDRYKTTYEMGRDLSTALSSTRHREPKLVFNDTESTKTLPKVTSTVSSLTTEQLLRNQKQAKTTEKITPDSASNDKTKSKKKASHRLLGTIMKLFFALCVVGIIVFAYKILVSPTTIRVPDVSNKTVAQAKMTLENSGLKVGAIRNIESDSVSEGLVVKTDPAAGRSRREGAKVNLYIATPNKSFTLGNYKEHNYKDILKDLQGKGVKKSLIKVKRKINNDYTTGTILAQSLPEGTSFNPDGNKKLTLTVAVNDPMIMPDVTGMTVGEVIETLTDLGLDADNLVFYQMQNGVYQAVVTPPSSSKIASQDPYYGGEVGLRRGDKVKLYLLGSKTTNNSSSTPIDSSASSSTGTTTSDSVSSSTDASTSDSSSTSTSSSTLPSDSTTNTGTANNPLTQ

SEQ ID NO: 13827 - protein, 693 aa, Streptococcus agalactiae
ATGAAAAAATTTCAGTTTTTTCTACTTGTTGAAGCCGTTGTCTTAGTTATGGGATTAATGAAAATTTTATCAGATGACTGGACAAGTTTTATTTTTATTCTCGCTTTGATTCTTTTAGCCTTAAGATTTTATAACAACGATAGTCGTCATAATTTTCTGTTAACGACAAGTTTGTTATTACTATTTTTAATCTTTATGCTTAACCCTTACATTATTGCAGCCGTTGTTTTTGCAGTTTTGTATGTTCTAATCAATCATTTCTCGCAAGTTAAGAAAAAAAATCGTTATGCTTTGATTCAATTTAAGAACCATCAATTAGATGTTAAGACAACACGAAACCAATGGTTAGGTACTGATCAGCACGAAAGTGACTTTTATGCTTTTGAAGATATTAATATTATAAGAATCTCTGGGACTGATACAATTGATTTAACAAATGTTATTGTATCTGGGCAGGATAATGTTATTATAATTCAAAAAGTTTTTGGTGATACCAAAGTATTGGTTCCTTTAGACGTTGCCGTAAAGGCTGATATTAGTTCTGTTTACGGTAGTGTACAGTACTTTGATTTTGAGGAGTATGATCTAAGAAATGAATCTATAAAATTGTCACAAGAGGAAGAATATTACCTTTTGAAACGTGTCAAATTAGTTGTAAACACTATCGCTGGGAAAGTTGAGGTTAGTCGTAAA

SEQ ID NO: 13828 - protein, 231 aa, Streptococcus agalactiae; identical to SEQ ID NO: 652

SEQ ID NO: 13829 - protein, 1017 aa, Streptococcus agalactiae
ATGAAAAAGCACCACTACTTTTTAGCTTTCTTCTATGGAAGTGTTATTATATTTGCCATTTGTTTTGTCATTATTGATAGTTTGGGTGTTAATTTGGTGCACCTCTATCAAACGTCTCGTTTGTGGCTGATTGAACAACTGATTTTCTCTATTTTCTTTCTATCTTTAGCGGTAACTATCCTTTTATTGCTAACTTGGTTTTTATTAGACGATAATAGTAAACGTCAAATTAACCATAATTTACGTCGCATTTTAAATAACCAATCAATAAATGTTACCGATGATGGTACTGAAATATCGACCAATATTCAACGGCTCTCTAAAAAAATGAATTTAATGACAGCAAGTCTACAATCTAAGGAAAATAGTCGTATTTTAAAAAGCCAAGAAATTGTGAAACAAGAACGTAAGCGTATTGCACGTGATTTACACGACACAGTTAGTCAGGATTTGTTCGCAGCTTCCATGGTTTTGTCAGGGATTGCACAGAATGTTTCTCAGCTAGACGTTGATCAGGTTGGCTCGCAATTATTAGCAGTAGAGGAAATGCTTCAGCATGCACAAAATGATTTGAGAATTCTGCTACTTCATTTGAGGCCAGTTGAATTAGAAAATAAGACCCTATCTGAAGGATTCAAAATGATATTGAAAGAATTGACCGATAAGAGCGACATTGAAGTTGTTTATCACGAATCAATTCTAACCTTACCCAAAAAGATTGAAGACAATATTTTTAGAATTGGTCAAGAATTTATCAGTAATACTTTAAAGCATTCACAAGCCAGTCGTCTCGAAGTGTACCTCAATCAAACAGAGAATGAATTGCAGTTAAAAATGATTGATAATGGTATTGGATTTGATATGGATTCTGTCTATGATTTAAGTTATGGATTAAAAAATATTGAAGATCGAGTAGAAGATTTAGCAGGAAATTTACAGCTTCTCAGTCAGCCTGGTAAAGGAGTTGCTATGGATATAAGATTACCTTTAGTAAATCAGAGTGAGGATAAAAATGGA

SEQ ID NO: 13830 - protein, 339 aa, Streptococcus agalactiae
MKKHHYFLAFFYGSVIIFAICFVIIDSLGVNLVHLYQTSRLWLIEQLIFSIFFLSLAVTILLLLTWFLLDDNSKRQINHNLRRILNNQSINVTDDGTEISTNIQRLSKKMNLMTASLQSKENSRILKSQEIVKQERKRIARDLHDTVSQDLFAASMVLSGIAQNVSQLDVDQVGSQLLAVEEMLQHAQNDLRILLLHLRPVELENKTLSEGFKMILKELTDKSDIEVVYHESILTLPKKIEDNIFRIGQEFISNTLKHSQASRLEVYLNQTENELQLKMIDNGIGFDMDSVYDLSYGLKNIEDRVEDLAGNLQLLSQPGKGVAMDIRLPLVNQSEDKNG

SEQ ID NO: 13831 - protein, 639 aa, Streptococcus agalactiae
ATGGATAAAATAAAAATTGTACTTGTTGATGACCATGAGATGGTTCGTCTCGGTTTAAAAAGTTTTTTAAACTTACAAGCTGATGTTGAAGTAATAGGTGAAGCCTCAAATGGTTTAGAAGGCATAAAAAAAGCACTGGAGTTACGTCCAGACGTTGTTGTTATGGATTTAGTAATGCCTGAAATGGACGGTGTAGAAGCAACCTTAGCATTGTTGAAGGATTGGCCAGAAGCTGCTATTTTAGTCTTAACATCTTACTTGGACAATGAAAAAATTTACCCTGTTATTGAAGCAGGTGCCAAAGGCTATATGTTAAAGACCTCAAGTGCAGCAGAGATTCTTAATGCCATTCGTAAAGTTGCAAGGGGAGAACAAGCTATTGAAAATGAAGTAGATAAGAAAATTAAGGCTCATGATAAATGTCCAGCTTTACATGAGGGCTTAACAGCAAGGGAACGTGATATCCTTAATTTATTAGCCAAAGGTTATGACAATCAAAGGATTGCTGATGAATTATTTATCTCGTTAAAGACTGTTAAAACTCATGTTTCTAATATTTTGGGAAAACTAAATGTGGCAGATCGAACTCAAGCGGTTGTCTATGCTTTCCAACACCATTTGGTACCACAAGATGATGAA

SEQ ID NO: 13832 - protein, 213 aa, Streptococcus agalactiae; identical to SEQ ID NO: 5010

SEQ ID NO: 13833 - protein, 1398 aa, Streptococcus agalactiae
ATGGACGCAAAAACTAAATATAAAGCAAAAAAAATAAAGGCGGTGTTTTTTGATATTGATGACACGCTTCGTGTTAAAGATACAGGTTATATGCCACCATCGATCTTAAAAGTTTTTAAAGCTTTGAAAGATAAAGGAATTGTTGTAGGTATTGCTTCAGGAAGGGCACGATATGGCGTTCCAAAAGAAGTTCAAGATTTAAATGCCGATTATTGTGTAAAATTAAATGGAGCTTATGTTAAGGACAAGGATAAGAATATCATCTTCCATCGTCCTATTCCTGCTGAATATGTAGAGCAATATAAGAAATGGGCAGACACTGTTGGTATTAAGTACGGTTTAGCTGGTCGTCATGAGGCAGTTTTATCAGATCGTGATGATTTGGTAAATGATGCGATTGATATTGTGTATTCTGATCTCGAAGTTAATCCAGATTTCAATAAAGAACATGATATTTATCAGATGTGGACGTTTGAAGATAAAGGAGATAGCCTTCATCTACCTGAACCGTTAGATGAACATCTTCGCTTGATACGTTGGCATGATCATTCTTCAGATGTTGTGTTAAAAGGAACATCGAAGGCTTTAGGTGTTTCTAAAGTTGTTGAACATTTGGGCTTAAAGCCAGAGAATATCTTGGTTTTCGGAGATGAGCTCAATGATTTAGAACTCTTTGATTATGCTGGACTAGCTGTGGCGATGGGAGTGTCACACCCAGAAGCTCAAAAAAAAGCAGATTTTATCACAAAAAAAGTAGAAGAAGATGGCATTTTGTATGCCCTGGAGGAACTAGGTTTGATAGAAAAAGAATTAACATTTCCACAAGTAGATATTGAAAATACAGAAGGTCCTGTGGCTGTCATTAAAACAAATCACGGGGATATGACTGTAAAACTCTTCCCGGATCATGCTCCTAAAACGGTAGCAAACTTTATTGGTTTAGCTAAACAAGGTTATTATGATGGTATTATCTTCCATCGTATTATTCCAGATTTTATGATTCAGGGTGGTGATCCAACTGGTACAGGTATGGGTGGTGAATCTATCTATGGGGAAAGTTTTGAAGACGAATTTTCCGAAGAATTATATAATGTTCGCGGAGCTCTTTCAATGGCTAATGCTGGACCAAATACGAATGGCAGCCAATTTTTCATCGTCCAAAATACAAAAATTCCTTATGCGAAAAAGGAATTAGAGCGAGGTGGTTGGCCAACACCAATTGCTGAGTTGTATGCTGGACAAGGTGGTACACCGCATCTAGATCGTCGCCACAGTGTATTTGGACAATTAGTAAACCAAAGTTCTTTTGAGGTACTTGATGAGATTGCGGCAGTAGAGACTGGTTCTCAAGACAAACCATTGGAAGATGTTGTTATTTTAACGATTGAGGTTAAAGAA

SEQ ID NO: 13834 - protein, 466 aa, Streptococcus agalactiae; identical to SEQ ID NO: 5012

SEQ ID NO: 13835 - protein, 372 aa, Streptococcus agalactiae; identical to SEQ ID NO: 5013

SEQ ID NO: 13836 - protein, 124 aa, Streptococcus agalactiae; identical to SEQ ID NO: 660

SEQ ID NO: 13837 - protein, 774 aa, Streptococcus agalactiae
ATGACAAATGAAAAAGGTATTGTGTTCAACATTCAACATTTTAGTATTCACGATGGTCCAGGTATTCGAACAACCGTTTTCTTAAAGGGTTGTCCTCTTAGATGTCCTTGGTGTGCTAATCCCGAGTCGCAAAAAATGGTTCCAGAAACAATGAGAGATGCCATTACTAATGAAAGCGTCATCGTGGGCGAAGAAAAATCGGTTGATGATATTATTGAAGAGGTTTTAAAAGATATTGATTTTTACGAAGAATCTGGTGGGGGCATAACGCTATCTGGCGGTGAAATATTTGCACAATTTGAATTTGCCAAGGCAATTTTAAAACGTGCTAAATCACTGGGAATCCACACGGCTATTGAAACAACTGCTTATACTAGACATGAACAATTCATAGACCTTATCCAATACGTTGATTTTATTTACACCGATTTAAAACATTACAATAGCCTCAAACACCAAGAAAAGACGATGGTTAAGAATGCTTCAATCATCAAAAACATTCATTATGCTTTTGCCAACGGTAAAACGATTGTGCTACGTATTCCTGTCATACCTAATTTTAACGATTCATTAGAAGATGCTGAAGAATTTGCTTGTTTATTTGATCGCCTAGATATCCGTCAAGTGCAACTCTTACCTTTCCACCAATTTGGACAAAACAAATATCGATTACTTAATCGTCAATATGAAATGGAAGAGATCGCTGCACTACACCCAGAGGATCTACTCGATTATCAAGCTATTTTTAGCAAGTATAATATTCACTGCTACTTT

SEQ ID NO: 13838 - protein, 258 aa, Streptococcus agalactiae
MTNEKGIVFNIQHFSIHDGPGIRTTVFLKGCPLRCPWCANPESQKMVPETMRDAITNESVIVGEEKSVDDIIEEVLKDIDFYEESGGGITLSGGEIFAQFEFAKAILKRAKSLGIHTAIETTAYTRHEQFIDLIQYVDFIYTDLKHYNSLKHQEKTMVKNASIIKNIHYAFANGKTIVLRIPVIPNFNDSLEDAEEFACLFDRLDIRQVQLLPFHQFGQNKYRLLNRQYEMEEIAALHPEDLLDYQAIFSKYNIHCYF

SEQ ID NO: 13839 - protein, 753 aa, Streptococcus agalactiae
ATGAATAGATTAGAAAATATTATTAGTTTAGTATCCCAGTACCAAAAAATAGATGTTAATACACTCTCGGAGTTGTTGCAAGTTTCTAAAGTAACCATACGTAAAGATTTAGATAAACTAGAAGGCAAAGGGCTTTTGCATAGAGAGCACGGTTATGCAGTTTTAAACAGTGGGGATGATCTTAATGTTAGGTTATCTTTTAACCATAAAACTAAAAAAGAAATTGCTGCCTTAGCTGCAAATATGGTGTCTGACAATGACACTATCTTAATAGAATCAGGCTCTACTTGTGCTCTTTTAGCGGAAAATATCTGTCAGACAAAGCGAAATGTCACTATTTTGACCAACTCTTGCTTTATTGCTAACTATTTACGAGAGTATGATTCATGCCAAATTGTCTTACTTGGTGGTGAGTATCAATCAAGTTCACAGGTTACGGTAGGTCCTCTCATGAAAAAGATGATTTCACTTTTTCATGTCTCGTTAGCTTTTGTTGGGACTGATGGTTTTGATCCAAAACTAGGATTTATGGGTAGAGATTTAATGCGTTCTGAAGTTGCACAAGAGATGGCGAATGCTGCCGATGAAGTCATTATTTTAACAGATTCTAGTAAGTTTAATCAGACTGCATTGGTGGAACAGCTTCCGTTGTCAACTGTATCACAAGTTATTACAGATAAACATCCAAATTCGGATATTGCTAACTTGTTCCAAGAAGCAGAGATTACCATTCAATCTTTATTACAAGTACCA

SEQ ID NO: 13840 - protein, 251 aa, Streptococcus agalactiae
MNRLENIISLVSQYQKIDVNTLSELLQVSKVTIRKDLDKLEGKGLLHREHGYAVLNSGDDLNVRLSFNHKTKKEIAALAANMVSDNDTILIESGSTCALLAENICQTKRNVTILTNSCFIANYLREYDSCQIVLLGGEYQSSSQVTVGPLMKKMISLFHVSLAFVGTDGFDPKLGFMGRDLMRSEVAQEMANAADEVIILTDSSKFNQTALVEQLPLSTVSQVITDKHPNSDIANLFQEAEITIQSLLQVP

SEQ ID NO: 13841 - protein, 929 aa, Streptococcus agalactiae
ATGGAAGGGAAAAGCCAATCTGAGATTGCCAATGAATTAGGAATTTATCGTACAACAATAAGTCGTATGTTAGCCAAAGCGAGAGAAGAAGGTCTTGTTAGAATCGAAATTTCAGATTTTAATCCAGAAATTTTTCAGTTAGAATCCTATTTTAAAAGTAAGTATCACCTTAAAGATATTGAGATTGTTTCTTCGCGAAAAGATAGCGATACTTCAGAGATAGAGAAGGATTTAGCACATGTAGCTGCAGCTATGATTCGAAAAAAAATTAAAGAGAATGACAAGGTGGGGATTGCTTGGGGGAGGACACTTAGTAAAGTAGTTGAAGCAATGCGTCCTCATCCGGTTTCTCAAGTTTCTTTTGTTCCTTTGGCCGGAGGTCCAAGTCATATTAATGCACGCTATCACGTTAATACTCTGGTTTACGAAATGTCAAGGCGTTTCCAAGAAGTTGTACTTTCATTAATGCAACTCTAGTTCAAGAAAACGCTAATTTAGCGAAAGGAATATTAACTTCAAAATATTTTGAGGGGCTAATGGATAATTGGGAAAAACTTGATGTGGCAATTGTGGGCGTTGGTGGTAAACCTAAAAGCAATGAACAACAGTGGCTTGATCTTTTAAATCAAGAAGATTTTCAATGCTTGGATGAAGAAGCAGCTGTAGGTGAAATTACTTGTCGTTTTTTTAATCATTCAGGTGATTCTGTGAATCAACATTTAGCTAAAAGGACAATAGGAATTACCTTAGAACAACTACAGAAAGTTCCTAATAGAATAGCGGTTGCTCATGGCAATTATAAGGCTGCGGCACTCTTAGCCGTTTTAAAAAAGGGGTATATTAATCATTTAGTTACTGATTTTTCCACAGCCTTAAATATTTTAAGATTAGATAAAGACACCTTTGTGGATACTATGTATCAAAAGAGC

SEQ ID NO: 13842 - protein, 310 aa, Streptococcus agalactiae
MEGKSQSEIANELGIYRTTISRMLAKAREEGLVRIEISDFNPEIFQLESYFKSKYHLKDIEIVSSRKDSDTSEIEKDLAHVAAAMIRKKIKENDKVGIAWGRTLSKVVEAMRPHPVSQVSFVPLAGGPSHINARYHVNTLVYEMSRRFQGSCTFINATLVQENANLAKGILTSKYFEGLMDNWEKLDVAIVGVGGKPKSNEQQWLDLLNQEDFQCLDEEAAVGEITCRFFNHSGDSVNQHLAKRTIGITLEQLQKVPNRIAVAHGNYKAAALLAVLKKGYINHLVTDFSTALNILRLDKDTFVDTMYQKS

SEQ ID NO: 13843 - protein, 321 aa, Streptococcus agalactiae; identical to SEQ ID NO: 5021

SEQ ID NO: 13844 - protein, 107 aa, Streptococcus agalactiae; identical to SEQ ID NO: 668

SEQ ID NO: 13845 - protein, 318 aa, Streptococcus agalactiae; identical to SEQ ID NO: 5023

SEQ ID NO: 13846 - protein, 106 aa, Streptococcus agalactiae; identical to SEQ ID NO: 670

SEQ ID NO: 13847 - protein, 1299 aa, Streptococcus agalactiae
ATGTCAAAGTTTGATAGTCAGAAAATAATTACTCCGATTATGAAGTTTGTCAATATGCGAGGGATTATTGCACTCAAAGATGGCATGCTAGCAATTTTACCACTAACAGTTGTTGGGAGTCTCTTTTTAATATTAGGGCAGCTTCCATTTAAAGGTCTTAATCAAGCCATAGCTAATGTTTTTGGACCAGAATGGACAGAACCATTTATGCAAGTTTATTCAGGAACTTTTGCGATTATGGGCTTGATTTCCTGTTTTGCAATTGCTTATGCTTATGCTAAAAATAGTGGTGTAGAACCGTTACCTGCTGGCGTTTTATCACTTTCGTCTTTCTTTATTTTAATGAAATCATCTTATATTCCTGTAAAAGGAGAAGCAATAGCGGACGCTATTTCTAAGGTTTGGTTTGGCGGTCAGGGGATTATTGGAGCAATTATTATTGGCTTAGTAGTTGGTGCTATCTATACATGGTTTATCCAACATCATATTGTTATAAAAATGCCAGAGCAAGTACCACAGGCAATAGCAAAACAATTTGAAGCTATGATTCCAGCTTTTGTTATCTTTCTTTTATCGATGATTGTTTATTTGATTGCTAAGGTAACAACTGGAGGTACCTTTATTGAGATGATTTATGATATCATTCAAGTACCGTTGCAAGGCTTAACAGGCTCACTTTATGGAGCAATTGGGATTGCTTTCTTTATTTCATTCTTATGGTGGTTTGGTGTCCATGGCCAATCTGTGGTGAATGGTATTGTGACTGCTTTGTTACTATCCAATTTAGATGCCAATAAGTCTTTATTAGCAGCAAATCGCTTAACATTAGATAATGGCGCTCACATTGTAACACAGCAGTTTTTGGATAGTTTCTTGATTTTATCGGGCTCAGGAATAACTTTTGGACTAGTTATTGCGATGCTTTTTGCAGCAAAATCAAAACAATACAAGGCACTTGGGAAAGTGGCCGCTTTTCCCGCAATTTTCAATGTTAACGAGCCAATCGTCTTTGGCTTTCCAATCGTAATGAATCCTGTGATGTTTCTGCCTTTTATTTTAGTACCAGTTTTGGCAGCTTTAATTGTTTATGGAGCTATTGCGGTTGGTTTTATGCAACCATTCTCAGGTGTTACTTTACCATGGAGTACTCCAGCAATTATTTCTGGATTCATGGTAGGTGGTTGGCAAGGTGCACTCGTCCAAATAGTCATTTTAGCTATCTCAACTGCTGTTTACTTCCCATTCTTTAAAATCCAAGATAATATTACTTACAAAAATGAATGTGAAATGGAAAGGGGA

SEQ ID NO: 13848 - protein, 433 aa, Streptococcus agalactiae
MSKFDSQKIITPIMKFVNMRGIIALKDGMLAILPLTVVGSLFLILGQLPFKGLNQAIANVFGPEWTEPFMQVYSGTFAIMGLISCFAIAYAYAKNSGVEPLPAGVLSLSSFFILMKSSYIPVKGEAIADAISKVWFGGQGIIGAIIIGLVVGAIYTWFIQHHIVIKMPEQVPQAIAKQFEAMIPAFVIFLLSMIVYLIAKVTTGGTFIEMIYDIIQVPLQGLTGSLYGAIGIAFFISFLWWFGVHGQSVVNGIVTALLLSNLDANKSLLAANRLTLDNGAHIVTQQFLDSFLILSGSGITFGLVIAMLFAAKSKQYKALGKVAAFPAIFNVNEPIVFGFPIVMNPVMFLPFILVPVLAALIVYGAIAVGFMQPFSGVTLPWSTPAIISGFMVGGWQGALVQIVILAISTAVYFPFFKIQDNITYKNECEMERG

SEQ ID NO: 13849 - protein, 2454 aa, Streptococcus agalactiae
ATGACCAAACAATTACTCACTCAAAAATATACAAATGATGTTCAACAAAATTCTCAAAAGCATTTTGGCTATTTGACAGAGCGCATGTATTCTTATCGCGATAAGGTTCTTGATAAGAAACCATTCATAGATGCAGAACGTGCTATCTTGGTAACTGAAGCCTATCAAAAGCATCAGGAAAAACCTAATGTTTTAAAGAGAGCTTACATGTTGCAAAATATTTTGGAAAAAATGACAATCTATATTGACGATGAGACAATGATTGTCGGTAACCAAGCTTCATCTGATAAAGATGCTCCTATTTTTCCAGAATACACTCTAGAATTTGTTGTAAATGAACTAGACCTTTTTGAAAAACGAGATGGTGACGTCTTTTACATTACAGAAGAAACCAAAGAACAAATTAGAAATATTGCACCTTTCTGGGAAAATAATAATTTACGGGCTCGTGCGGGCGTTATGCTTCCAGAAGAAGTTCAAGTTTATATGGAGACAGGCTTCTTTGGGATGGAAGGTAAGATGAATTCTGGGGATGCTCACTTAGCTGTTAACTATCAGAAGTTACTAGAAGAAGGGCTTATTGGCTTTGAAAAAAAAGCAAGAAAAGCTAAAGCTGACTTAGATTTAACAAAGCCTGAGAGTATTGACAAATATCATTTCTATGATTCTATTTTAATTACAATAGAAGCTGTTAAAACCTATGCAGAGCGTTTTGCTATCCTAGCAAAAAAACAAGCTAAAACAGCAAATACTAAGAGACGTCAGGAATTGTTAGATATCGCTAGTATTTGTGAACGAGTGCCATATTACCCAGCTGAAACGTTTGCAGAAGCTGTTCAATCGGTTTGGTTTATTCAGTGTATTCTTCAAATAGAATCAAACGGTCATTCTCTATCTTATGGACGCTTTGATCAATACATGTATCCATATGTTAAAGCTGACTTAGAAGCTGGACGTGAGACTGAGGATTCGATCGTTGAGCGCCTAACTAACCTATGGATTAAAACAATAACTATTAATAAGGTTCGCAGCCAAGCTCATACGTTTTCGTCTGCTGGTAGTCCTCTTTACCAAAATGTAACGATTGGAGGACAAACCCGACATAAGGAAGATGCTGTTAATCCTTTATCATTTCTAGTACTAAAATCAGTCGCTCAGACACACTTACCACAGCCTAATCTAACGGTTCGTTATCATGCTAACCTAGACAAGTCATTCATGAACGAAGCTATTGAAGTTATGAAATTAGGTTTTGGTATGCCAGCTTTTAATAATGATGAAATTATTATTCCATCATTTATTAAAAAAGGAGTTTCCGAAGAAGATGCCTATGATTATTCAGCGATTGGTTGTGTTGAAACAGCAGTTCCTGGGAAATGGGGTTATCGTTGTACCGGCATGAGCTATATCAACTTCCCTAAAGTGTTATTAATTACAATGAATAATGGCATTGACCCGGCTTCTGGGAAGAGATTTGCGCCTTCTTATGGGCATTTCACCCAGATGACCTCATATAAAGAACTTAAAGAAGCTTGGGACAAAACACTTCGTTACTTAACTCGAATGAGTGTTATTGTTGAAAATGCTATTGATATTAGTCTCGAAAGAGAAGTACCTGATATTCTTTGTTCAGCTTTAACTGATGATTGTATTGGACGAGGTAAGCATTTAAAAGAAGGTGGTGCAGTATATGACTACATATCTGGTCTACAAGTTGGAATCGCTAATCTTTCAGACTCACTTGCTGCGCTTAAAAAATTAGTATTTGAAGAAAAACGCCTAACCACATTAGAAGTATGGCAAGCATTGCAGAGTGATTACGCAGGTCCGCGTGGTGAAGAAATTCGTCAAATGTTGATCAATGAAGCACCAAAATATGGAAATGATGATGACTACGCGGATAGTTTAGTACGTGAGTGTTATGATGTTTATGTTGAAGAAATTGCTAAATATCCCAACACACGCTATGGACGTGGACCAATCGGTGGTATTCGCTATTCAGGAACGTCCTCTATTTCAGCAAATGTAGGTCAAGGACGAGGTACTTTAGCAACTCCAGATGGTAGACATGCAGGAACTCCATTAGCTGAAGGTTGTTCACCATCTCATAATATGGACAAAAAGGGACCTACCTCTGTTTTGAAATCAGTTTCGAAGTTACCAACTGATGAGATTGTCGGCGGTGTACTCCTTAACCAAAAAGTCAACCCTCAAACCTTGGCAAAAGAAGAAGATAAACAAAAATTAATTGCCTTACTTAGAACATTCTTCAATCGCCTTCATGGTTACCATATCCAGTATAATGTTGTCTCACGTGAGACTTTGATTGATGCTCAGAAGCACCCTGAAAAACACCGCGATTTGATTGTGCGTGTAGCAGGTTATTCTGCATTCTTTAATGTCCTATCTAAGGCAACTCAAGATGATATTATTGCACGTACAGAACATGCTCTT

SEQ ID NO: 13850 - protein, 818 aa, Streptococcus agalactiae
MTKQLLTQKYTNDVQQNSQKHFGYLTERMYSYRDKVLDKKPFIDAERAILVTEAYQKHQEKPNVLKRAYMLQNILEKMTIYIDDETMIVGNQASSDKDAPIFPEYTLEFVVNELDLFEKRDGDVFYITEETKEQIRNIAPFWENNNLRARAGVMLPEEVQVYMETGFFGMEGKMNSGDAHLAVNYQKLLEEGLIGFEKKARKAKADLDLTKPESIDKYHFYDSILITIEAVKTYAERFAILAKKQAKTANTKRRQELLDIASICERVPYYPAETFAEAVQSVWFIQCILQIESNGHSLSYGRFDQYMYPYVKADLEAGRETEDSIVERLTNLWIKTITINKVRSQAHTFSSAGSPLYQNVTIGGQTRHKEDAVNPLSFLVLKSVAQTHLPQPNLTVRYHANLDKSFMNEAIEVMKLGFGMPAFNNDEIIIPSFIKKGVSEEDAYDYSAIGCVETAVPGKWGYRCTGMSYINFPKVLLITMNNGIDPASGKRFAPSYGHFTQMTSYKELKEAWDKTLRYLTRMSVIVENAIDISLEREVPDILCSALTDDCIGRGKHLKEGGAVYDYISGLQVGIANLSDSLAALKKLVFEEKRLTTLEVWQALQSDYAGPRGEEIRQMLINEAPKYGNDDDYADSLVRECYDVYVEEIAKYPNTRYGRGPIGGIRYSGTSSISANVGQGRGTLATPDGRHAGTPLAEGCSPSHNMDKKGPTSVLKSVSKLPTDEIVGGVLLNQKVNPQTLAKEEDKQKLIALLRTFFNRLHGYHIQYNVVSRETLIDAQKHPEKHRDLIVRVAGYSAFFNVLSKATQDDIIARTEHAL

SEQ ID NO: 13851 - protein, 666 aa, Streptococcus agalactiae
ATGGAATTTTTACTTGACACTTTAAATTTAGAAGCTATAAAAAAATGGCATCATATACTGCCACTAGCAGGTGTAACTTCAAATCCCACCATTGCTAAGAAAGAAGGAGATATACATTTTTTCCAACGCATTCGTGATGTTCGAGAAATTATTGGATGTGAAGCAAGTTTGCATGTTCAAGTAGTGGCCAAAGATTATCAAGGGATACTGGATGATGCTGCTAAAATACGCCAAGAAACGGATGATGACATTTATATCAAGGTTCCAGTTACGCCAGATGGATTAGCAGCAATTAAAACGTTAAAAGCAGAAGGTTATAATATTACAGCCACAGCAATATACACCAGTATGCAAGGTCTTTTGGCTATATCAGCTGGAGCAGACTACCTAGCACCTTACTTTAACCGAATGGAGAACCTTGATATTGATGCGACACAAGTTATTAAGGAATTAGCGCAAGCAATAGAGAGGACAGGTTCTTCTAGCAAAATTTTAGCAGCTAGTTTTAAAAACGCTTCACAAGTAACGAAGGCCTTATCACAGGGTGCTCAATCAATCACCGCGGGACCAGATATTTTTGAATCAGTCTTTGCGATGCCATCTATTGCAAAAGCTGTTAACGACTTTGCAGATGATTGGAAAGCCAGTCAACACTCAGAACATATT

SEQ ID NO: 13852 - protein, 222 aa, Streptococcus agalactiae
MEFLLDTLNLEAIKKWHHILPLAGVTSNPTIAKKEGDIHFFQRIRDVREIIGCEASLHVQVVAKDYQGILDDAAKIRQETDDDIYIKVPVTPDGLAAIKTLKAEGYNITATAIYTSMQGLLAISAGADYLAPYFNRMENLDIDATQVIKELAQAIERTGSSSKILAASFKNASQVTKALSQGAQSITAGPDIFESVFAMPSIAKAVNDFADDWKASQHSEHI

SEQ ID NO: 13853 - protein, 1086 aa, Streptococcus agalactiae
ATGAAAGTTTTCGCAAGTCCATCGCGCTATATACAAGGAAAGGATGCTTTATTCCAAAGTATTGAACATATCAAATCTTTAGGTCAGACTCCACTTATCCTTTGTGATGATGTTGTTTATAATATCGTTGGAGAAAGGTTTTTATCTTATCTACAAGACGATTTGTTACCACATCGTGTCTCCTTTAACGGAGAAGCATCTGATAATGAAATCAATCGTGTCGTTGCTGTTGCAAAAGAAAAGAATAGTGACCTTATTATTGGACTTGGGGGTGGAAAAACTATTGACTCTGCAAAGGCAATTGCAGATAAAGTTAATTTACCAGTGATCATTGCACCAACAGTAGCTTCAACAGATGCCCCAACATCAGCGTTATCAGTAATCTATACAGATGAAGGAGCTTTTGAAAAATATATTTTTTATTCAAAGAATCCAGACTTAGTTTTGGTCGATACTCAAGTCATTGCTCAAGCGCCAAAACGTTTACTAGCTTCTGGGATTGCAGATGGCTTAGCTACTTGGGTTGAAGCGAGAGCAGTCTTACAAAAAAATGGGATAGCGATGGCTGGCGGTAGACAGACTTTAGCGGGCGTGGCAATTGCTCAAGCATGTGAGCGTACTTTATTTAATGATAGTTTACAAGCTTTAGCGGCTTGTGATGTCAAAGTGGTTACAAAAGCTTTAGAAAATGTTATTGAAGCTAATACCTTACTTAGTGGTTTAGGTTTTGAAAGCGCAGGATTAGCTGCAGCTCATGCTATTCATAATGGTTTTACTGCCTTGAGTGGAGATATTCATCACTTAACCCATGGTGAAAAAGTTGCCTATGGAACGTTGACACAACTTTTCCTCGAAAATAGACCAAAGGAAGAAATTGATCGCTACATTAATCTTTACCAAGCGATTGGAATGCCAACTACACTTGCAGAACTCCATTTGGGTGATGCAACATATGAAGAACTTTTAAAAGTTGGTCAGCAAGCAACAATTGAAGGTGAAACAATACATGAAATGCCATTCAAAATTAGTGCAGAGGATGTCGCTGCAGCCCTGTTAGCAGTTGACCGCTATGTTTCAAATCATCAA

SEQ ID NO: 13854 - protein, 362 aa, Streptococcus agalactiae
MKVFASPSRYIQGKDALFQSIEHIKSLGQTPLILCDDVVYNIVGERFLSYLQDDLLPHRVSFNGEASDNEINRVVAVAKEKNSDLIIGLGGGKTIDSAKAIADKVNLPVIIAPTVASTDAPTSALSVIYTDEGAFEKYIFYSKNPDLVLVDTQVIAQAPKRLLASGIADGLATWVEARAVLQKNGIAMAGGRQTLAGVAIAQACERTLFNDSLQALAACDVKVVTKALENVIEANTLLSGLGFESAGLAAAHAIHNGFTALSGDIHHLTHGEKVAYGTLTQLFLENRPKEEIDRYINLYQAIGMPTTLAELHLGDATYEELLKVGQQATIEGETIHEMPFKISAEDVAAALLAVDRYVSNHQ

SEQ ID NO: 13855 - protein, 924 aa, Streptococcus agalactiae
ATGTCAAAAATTTATAATTCTATTACAGACTTAATCGGAAATACACCCATTATTCAATTACATCATATTGTTCCAGAAGGAGCTGCAGAGGTGTACGTTAAGTTAGAATCCTTTAACCCAGGTTCATCTGTCAAAGATCGTATCGCTCTAGCTATGATTGAAGATGCAGAGCAAAAAGGGATTCTTAAAGCCGGAGATACAATCGTAGAACCTACATCTGGTAATACAGGTATCGGTTTGGCTTGGGTAGGAAAAGCTAAAGGGTATAATGTTATTATTGTTATGCCAGAAACCATGTCAATTGAACGTCGTAAAATCATTCAAGCCTATGGTGCTCAATTAGTACTAACACCTGGTAGTGAAGGGATGAAGGGAGCTATTGCTAAGGCAAAAGAAATTTCTGCAGAGCAAAATGCTTGGCTACCCCTGCAATTTAATAATCAAGCCAATCCAGAAATCCACGAAAAAACGACTGGTAGGGAAATTATCGAGACTTTTGGTGAAAAAGGTTTAGATGCTTTTATCGCAGGTGTGGGAACTGGTGGGACAATTACTGGTGTCTCTCGTGCATTAAAAAAAGTCAATCCTGATGTCGCTATTTATGCTGTAGAAGCTGATGAATCTGCAATCCTTTCTGGTGAGCAACCTGGGCCTCATAAAATACAAGGGATTTCTGCAGGTTTCATTCCAGAAACATTGGCTACAGATTCTTATGATCATATCATTCGCGTTACATCTAACGATGCTATTGAAACAGGACGTATCATCGGCGGACTAGAAGGTTTCCTCGCAGGAATTTCTGCTTCAGCTGCTATTTATGCTGCTATTGAAGTGGCCAAACAACTAGGAAAAGGGAAAAAGGTTTTAGCTCTTCTCCCTGATAATGGCGAACGTTACTTATCAACAAGCCTGTATGATTTTGAA

SEQ ID NO: 13856 - protein, 308 aa, Streptococcus agalactiae
MSKIYNSITDLIGNTPIIQLHHIVPEGAAEVYVKLESFNPGSSVKDRIALAMIEDAEQKGILKAGDTIVEPTSGNTGIGLAWVGKAKGYNVIIVMPETMSIERRKIIQAYGAQLVLTPGSEGMKGAIAKAKEISAEQNAWLPLQFNNQANPEIHEKTTGREIIETFGEKGLDAFIAGVGTGGTITGVSRALKKVNPDVAIYAVEADESAILSGEQPGPHKIQGISAGFIPETLATDSYDHIIRVTSNDAIETGRIIGGLEGFLAGISASAAIYAAIEVAKQLGKGKKVLALLPDNGERYLSTSLYDFE

SEQ ID NO: 13857 - protein, 642 aa, Streptococcus agalactiae
ATGAACTATAAAACGATAAAATCAGACGGAATTGTCGAAGAAGAAATTAAAAAATCGCGATTTATTTGTCATCTAAAGCGAGTAGAGTCCGAAGAGGAGGGGCGTAATTATATTACGCAAATCAAGAAAGCGCACTACAAAGCCAATCATTCGTGTTCAGCTATGGTTATTGGCGAAAAAGGGGATATAAAACGATCTAGTGATGATGGTGAACCTAGTGGTACAGCAGGTATCCCTATGCTAACCGTACTTGAAAAGCAAGGCCTGACAAATGTTGTTGCCGTCGTTACACGGTATTTTGGAGGTATCAAATTAGGCACAGGGGGGCTTATTCGTGCCTACTCTGGTAGCGTAGCTAATGCCATCAAAGAGATCGGGGTAGTAGAAGTTAAAGAACAAATTGGTATTCGTATTCAATTAACTTATCCTCAATATCAAACTTTTGACAACTTCCTAAAAGAGCACCACCTTCAGGAGTTTGAAACAGAATTTTTAGAAGCTGTAACCTGTAAAATATACGTTGACCCTAAGGAATTTGAACACACAATAACTAATTTGACAGAGTTCTACCAAGGAAAAGCTTTGTTAACTGAAGAAGGGAGTCAAATTGTTGAAATTCCCTTTAAGGCTGAAACCGATAAA

SEQ ID NO: 13858 - protein, 214 aa, Streptococcus agalactiae
MNYKTIKSDGIVEEEIKKSRFICHLKRVESEEEGRNYITQIKKAHYKANHSCSAMVIGEKGDIKRSSDDGEPSGTAGIPMLTVLEKQGLTNVVAVVTRYFGGIKLGTGGLIRAYSGSVANAIKEIGVVEVKEQIGIRIQLTYPQYQTFDNFLKEHHLQEFETEFLEAVTCKIYVDPKEFEHTITNLTEFYQGKALLTEEGSQIVEIPFKAETDK

SEQ ID NO: 13859 - protein, 1287 aa, Streptococcus agalactiae
ATGGAAAATTATTTAGGTAGACTTTGGACAAAAGCACAATTATCTGAGCAACTTAGAAAAATTGCAATTAACTTGCCATCTTTTATAAAGAAAGGAAGCGACTATATTTGTACTCGATGCTCTAGTTCTGTTGCCAAAAATTGCCAATTACCAACTGGAAATTATTATTGTAGAGAATGTATAGTTTTTGGAAGAGTTACTAGTAATGAAAATTTATATTATTTCCCACAAAAAACATTTTCTAAAACGAATTCTTTAAAATGGAAAGGGGGACTGACACCTTATCAAAATGAGGTTTCAGAAGAGTTGTTGAAAGGTATTTCAAGTAAGGAAAATCTTCTTGTTCATGCTGTGACAGGGGCTGGTAAAACAGAAATGATATACCACTCTATCGCCAAAGTAATTGATACTGGAGGGAGCGTTTGTATTGCCAGTCCTAGAATTGATGTTTGTTTAGAATTGCATAAGCGACTTTCAAACGATTTTAGATGTGCCATAACATTAATGCATGGAGAATCTCCTTCTTATCAGAGATCCCCTTTAACTATTGCCACAACACATCAATTGTTAAAATTTTATCATGCTTTTGATTTGCTAATTGTTGATGAAGTTGATGCTTTTCCATATGTCGACAACCCGATACTATACCATGGTGTAAAACAGGCCTTAAAGAAAAACGGAACAAGTATTTTTCTGACTGCAACTTCAACGACTGAGTTAGAAAGAAAAGTTGCAAGAAAAGAACTAAAAAAATTACATCTAGCTAGGAGATTTCATGCCAATCCGTTAGTGATACCCGAGATGGTTTGGGTAAGTGGTATCCAGAAAAGCTTGCAGACACAAAAACTACCTCCCAAATTATATCAGCTGATAAATAAACAGCGACAAACGAGATATCCTTTGTTATTATTTTTCCCCCATATTGCAGAAGGTCAGGTATTCACCGAAATGTTAAGACAAGCCTTTCCTATGGAAAAAATTGGTTTTGTTTCAAGTAAGAGCACATCTAGGTTAAAGTTAGTGCAAGATTTTCGAGATAACAAATTGTCTATCCTAGTATCAACTACCATTCTAGAGAGAGGAGTAACTTTCCCTAGCGTCGACGTTTTTGTTATACAAGCAAATCATCATTTGTTTACGAAAAGTTCCTTGGTACAAATTTCAGGAAGAGTTGGAAGAGCATTAGAAAGACCCGAAGGGCTCCTTTACTTCCTTCATGATGGGAAAAGTAAATCGATGCACCAAGCCATAAAGGAGATTAAAAACATGAATCATATAGGAGGATTT

SEQ ID NO: 13860 - protein, 429 aa, Streptococcus agalactiae
MENYLGRLWTKAQLSEQLRKIAINLPSFIKKGSDYICTRCSSSVAKNCQLPTGNYYCRECIVFGRVTSNENLYYFPQKTFSKTNSLKWKGGLTPYQNEVSEELLKGISSKENLLVHAVTGAGKTEMIYHSIAKVIDTGGSVCIASPRIDVCLELHKRLSNDFRCAITLMHGESPSYQRSPLTIATTHQLLKFYHAFDLLIVDEVDAFPYVDNPILYHGVKQALKKNGTSIFLTATSTTELERKVARKELKKLHLARRFHANPLVIPEMVWVSGIQKSLQTQKLPPKLYQLINKQRQTRYPLLLFFPHIAEGQVFTEMLRQAFPMEKIGFVSSKSTSRLKLVQDFRDNKLSILVSTTILERGVTFPSVDVFVIQANHHLFTKSSLVQISGRVGRALERPEGLLYFLHDGKSKSMHQAIKEIKNMNHIGGF

SEQ ID NO: 13861 - protein, 375 aa, Streptococcus agalactiae
TTGTTGAAAGATGTTTTTACAAAAGAAATAAAGGCTGCTCTAAAAAGGTATAAGGGCTACACTATAGTGCCAGTTCCCTTGAGTCATGAAGGATACCAAAATAGGCAATTTAATCAAGTGATTGCTTTTCTACAATCGGCAAATATACCTTATAAAAATATTCTTTCTAAAAAAGATGGAGGTAAGCAATCGGCTAATAATAAAGAAGAAAGACTCAAACAAGTTCAGCAATTTACATTAAAAAATGAGGCTGAGTTAAGGGATAACCTTTTAATTGTTGATGATATTTATACAACAGGCGCAACAATAGCACAAATCAGGAAACTATTAGAAGAAAAAGGTATAAAAAATATAAAAAGTTTTTCATTAGCACGC

SEQ ID NO: 13862 - protein, 125 aa, Streptococcus agalactiae
MLKDVFTKEIKAALKRYKGYTIVPVPLSHEGYQNRQFNQVIAFLQSANIPYKNILSKKDGGKQSANNKEERLKQVQQFTLKNEAELRDNLLIVDDIYTTGATIAQIRKLLEEKGIKNIKSFSLAR

SEQ ID NO: 13863 - protein, 552 aa, Streptococcus agalactiae; identical to SEQ ID NO: 5041

SEQ ID NO: 13864 - protein, 184 aa, Streptococcus agalactiae; identical to SEQ ID NO: 5042

SEQ ID NO: 13865 - protein, 1350 aa, Streptococcus agalactiae
ATGAAAGTAGTCAAATTTGGAGGAAGCTCTTTAGCATCTTCCCAACAATTATACAAAGTACTAAATATTATCAAATCAGACTACACTAGACGGTTTATTGTCGTTTCAGCTCCAGGGAAACGCTACGAAGAAGACTTAAAAATGACAGATGCTTTGATACAATATTATCAAAATTATATTAACGGTAAAGATATTGTTAAAGACCAAACTTGGATTATCAATCGTTATCAAGAAATTATTAGTGATTTGTCTTTAGGAAGCACTATTGCAGAAGAAATTACTCGCTCTATAGAGCAGCTAGCTTCACTTCCCATAGAAAATAATCAGTTTTTATATGATTGTTTTTTAGCAGCCGGTGAAGATAACAACGCAAAGTTAGTTGCAACGTTTTTTAATCAAAATGACATTCCTGCAAGATATGTTCATCCAAACGAAGCAGGAATTATTGTAACTAAAGAACCATGTAATGCACGAATTATTCCAGGAAGTTATGATAAGATTGAGAACTTATGTCTATACAATGAGGTTCTTGTTATCCCTGGATTTTTTGGAGTCACAGAAGATAACCAAATTTGTACCTTTTCAAGAGGGGGATCTGACATTACTGGATCCCTAATTGCAGCAGGCATAAAAGCAGACCTTTATGAGAACTTCACAGATGTTGATGGTATATTTGCAGCGCATCCAGGTGTAGTTAAGAACCCTCACGCTATCCCTGAGCTTACTTATAAAGAAATGCGTGAATTAGCCTATGCGGGTTTTTCGGTTTTACATGATGAAGCTTTACTTCCTGCCTATCGTGGCAGAATCCCTCTTGTTATTAAAAATACAAATAATCCCCAACAGCCTGGTACAAAAATAGTTTTAAAGCATACTCGTAGTAACATAGCAGTAACTGGGATCGCTTCTGATAGCCGTTTTGCTAGCATAAACGTATCTAAATACTTAATGAATAGAGAAGTAGGTTTCGGCCGAAAAGTACTACAAATTTTAGAGGATTTAAATATTAGTTTTGAACATATGCCAACTGGCATAGATGATCTATCCATTGTCTTACGTGAAAAAGAATTGACACCAATCAAAGAACAAGAAATCTTAAATTACCTAACTCGTAAACTAGAAGTAGATTACGTTGACATCCAACACAATTTATCTACAATCGTAATTGTAGGTGAAAATATGAAAAGTCAGATTGGAGTCACTGCAACAGCGACACAAGCCTTATCAAGAGAAAAAATCAATATCACCATGATATCACAAGGTTCAAGCGAAGTCTCCATTATGTTCGTTATAGACAGTAAGGATGAAAAAAGAGCTATTAAAGCACTATATGAAACATTCTTCCAAAAA

SEQ ID NO: 13866 - protein, 450 aa, Streptococcus agalactiae
MKVVKFGGSSLASSQQLYKVLNIIKSDYTRRFIVVSAPGKRYEEDLKMTDALIQYYQNYINGKDIVKDQTWIINRYQEIISDLSLGSTIAEEITRSIEQLASLPIENNQFLYDCFLAAGEDNNAKLVATFFNQNDIPARYVHPNEAGIIVTKEPCNARIIPGSYDKIENLCLYNEVLVIPGFFGVTEDNQICTFSRGGSDITGSLIAAGIKADLYENFTDVDGIFAAHPGVVKNPHAIPELTYKEMRELAYAGFSVLHDEALLPAYRGRIPLVIKNTNNPQQPGTKIVLKHTRSNIAVTGIASDSRFASINVSKYLMNREVGFGRKVLQILEDLNISFEHMPTGIDDLSIVLREKELTPIKEQEILNYLTRKLEVDYVDIQHNLSTIVIVGENMKSQIGVTATATQALSREKINITMISQGSSEVSIMFVIDSKDEKRAIKALYETFFQK

SEQ ID NO: 13867 - protein, 648 aa, Streptococcus agalactiae
ATGTGTAAATATAAAGCAATAATATTTGATATGGATGGTGTTCTATTTGACACTGAATTATTTTATTATAAAAGGCGAGAGCGTTTTTTAAAACAACATGGAATTACAATTAACCATTTACCAATGAATTTTTTTATTGGAGGAAATATGAAGCAGGTTTGGAAATCTGTTTTAGGTGATCAATATGATACCTGGGATATTGATAAGCTCCAACAAGATTATAGTCGCTATAAAGAGGATAATCCCTTGCCATACAAAGATTTAATTTTTCAGGATTGTAAAAGAGTCATTGAAAAGCTTCATCACAAAGGCTATCTTTTGGGTCTAGCTTCAAGTTCTACTAGACATGATATCATGTTAGCATTAGAAAGTTTTAATCTGGATACATATTTTAAGGTAATTCTGTCTGGTGAGGAATTTTCAGAAAGTAAACCTAATCCAGCTATTTATAATAGAGCAGCAGAACTTTTAGATATTCCTAAACAGCAAATTCTTATTGTAGAAGACAGTGAGAAGGGGATTGCAGCTGGCATTGCAGCTGGTATTGATGTGTGGGCTATTGAAGACAAATACTTTGGAATGAATCAGTCGCAGGCTAATGTATTAGTGAGCGATCTGAGTCAATTTTTTGTGAAATTAGATAACTAT

SEQ ID NO: 13868 - protein, 216 aa, Streptococcus agalactiae
MCKYKAIIFDMDGVLFDTELFYYKRRERFLKQHGITINHLPMNFFIGGNMKQVWKSVLGDQYDTWDIDKLQQDYSRYKEDNPLPYKDLIFQDCKRVIEKLHHKGYLLGLASSSTRHDIMLALESFNLDTYFKVILSGEEFSESKPNPAIYNRAAELLDIPKQQILIVEDSEKGIAAGIAAGIDVWAIEDKYFGMNQSQANVLVSDLSQFFVKLDNY

SEQ ID NO: 13869 - protein, 299 aa, Streptococcus agalactiae
TTGATAATCAAATTATTTTTTATTTTTCTTTCACTCTTAAAGAGAGGAGACGTTTTGAAGTTCGAAAATATAATATATGGTATTGATGGAGCGTGGCCACTATTATGCTTAATCGACCAGATATTTCAAATGGTTTTAACATCCCAATGTGTCAAGAAATTATTGATGCAATAAGGCTTATGTCTGAAAATAAAGATGTCATGTTTTTAGTGATTGAAGCACAAGGACCAATCTTTTCAATCGGAGGAGATTTAAAAGTGATGAAAGATGCTGTTGAGAGCGATGATAGTAATCATTAC

SEQ ID NO: 13870 - protein, 100 aa, Streptococcus agalactiae
MIIKLFFIFLSLLKRGDVLKFENIIYGIDGSVATIMLNRPDISNGFNIPMCQEIIDAIRLMSENKDVMFLVIEAQGPIFSIGGDLKVMKDAVESDDSNHY

SEQ ID NO: 13871 - protein, 147 aa, Streptococcus agalactiae
ATGTTGAGTAATGCCGATATTGCTACAGTACTACCACAGGAAAAAACCTTAGATGATAAGAATCAAGATTTAATCACTCTAGCAAACCATAGAGGAGGTCTTGATAATATCACTGTGGCACTAGTTTACGTTGAAAGTGAGGCGGTT

SEQ ID NO: 13872 - protein, 49 aa, Streptococcus agalactiae
MLSNADIATVLPQEKTLDDKNQDLITLANHRGGLDNITVALVYVESEAV

SEQ ID NO: 13873 - protein, 471 aa, Streptococcus agalactiae
ATGATTCAGATTGGCAAATTATTTGCTGGTCGTTATCGGATCCTTAAATCAATCGGACGAGGTGGAATGGCGGATGTTTATCTAGCTCGAGATCTAATTTTAGATAATGAAGAGGTCGCAATAAAAGTATTGCGAACCAATTATCAAACAGATCAGATTGCGGTTGCTCGCTTCCAGAGAGAAGCACGAGCAATGGCTGAGCTGACACATCCTAATATTGTCGCTATTCGTGATATAGGTGAAGAAGACGGACAGCAGTTCTTAGTAATGGAATATGTTGATGGATTCGATTTAAAAAAGTATATTCAAGACAATGCACCCCTATCAAATAATGAAGTTGTTCGAATCATGAATGAAGTTGTTCGAATCATGAATGAAGTCCTTTCAGCCATGTCACTGGCACATCAGAAAGGTATCGTACACCGTGATTTAAAACCTCAAAATATTTTATTACTAAAAAAGGGANNNNNT

SEQ ID NO: 13874 - protein, 157 aa, Streptococcus agalactiae
  VARIANT 156, 157: Xaa = Any Amino Acid
MIQIGKLFAGRYRILKSIGRGGMADVYLARDLILDNEEVAIKVLRTNYQTDQIAVARFQREARAMAELTHPNIVAIRDIGEEDGQQFLVMEYVDGFDLKKYIQDNAPLSNNEVVRIMNEVVRIMNEVLSAMSLAHQKGIVHRDLKPQNILLLKKGXX

SEQ ID NO: 13875 - protein, 192 aa, Streptococcus agalactiae
TTGGTTCCTTTAGACGTTGTCGTAAAGGCTGATATTAGTTCTGTTTACGGTAGTGTACAGTACTTTGATTTTGAGGAGTATGATCTAAGAAATGAATCTATAAAATTGTCACAAGAGGAAGAATATTACCTTTTGAAACGTGTCAAATTAGTTGTAAACACTATCGCTGGGAAAGTTGAGGTTAGTCGTAAA

SEQ ID NO: 13876 - protein, 64 aa, Streptococcus agalactiae
MVPLDVVVKADISSVYGSVQYFDFEEYDLRNESIKLSQEEEYYLLKRVKLVVNTIAGKVEVSRK

SEQ ID NO: 13877 - protein, 327 aa, Streptococcus agalactiae
ATGAAAAAGCACCACTACTTTTTAGCTTTCTTCTATGGAAGTGTTATTATATTTGCCATTTGTTTTGTCATTATTGATAGTTTGGGTGGTAATTTGGTGCACCTCTATCAAACGTCTCGTTTGTGGCTGATTGAACAACTGATTTTCTCTATTTTCTTTCTATCTTTAGCGGTAACTATCCTTTTATTGCTAACTTGGGTTTTATTAGACGATAATAGTAAACGTCAAATTAACCATAATTTACGTCGCATTTTTAATAACCAATCAATAAATGTTACCGATGATGGTACTGGAATATCGAACCATATTCAACGGCTCTCTAAAAAA

SEQ ID NO: 13878 - protein, 109 aa, Streptococcus agalactiae
MKKHHYFLAFFYGSVIIFAICFVIIDSLGGNLVHLYQTSRLWLIEQLIFSIFFLSLAVTILLLLTWVLLDDNSKRQINHNLRRIFNNQSINVTDDGTGISNHIQRLSKK

SEQ ID NO: 13879 - protein, 117 aa, Streptococcus agalactiae
TTGTTCGCAGCTTCCATGGTTTTGTCAGGGATTGCACAGAATGGTTCTCAGCTAGACGTTGATCAGGTTGGCTCGCCATTTATAGCAGTAGAGGGAATGCTTCAGCATGCACAAAAA

SEQ ID NO: 13880 - protein, 39 aa, Streptococcus agalactiae
MFAASMVLSGIAQNGSQLDVDQVGSPFIAVEGMLQHAQK

SEQ ID NO: 13881 - protein, 700 aa, Streptococcus agalactiae
TTGCTAACTTGGTTTTTATTAGACGATAATAGTAAACGTCAAATTAACCATAATTTACGTCGCATTTTAAATAACCAATCATAAATGTTACCGATGATGGTACTGAAATATCGACCAATATTCAACGGCTCTCTAAAAAAATGAATTTAATGACAGCAAGTCTACAATCTAAGGAAAATAGTCGTATTTTAAAAAGCCAAGAAATTGTGAAACAAGAACGTAAGCGTATTGCACGTGATTTACACGACACAGTTAGTCAGGATTTGTTCGCAGCTTCCATGGTTTTGTCAGGGATTGCACAGAATGTTTCTCAGCTAGACGTTGATCAGGTTGGCTCGCAATTATTAGCAGTAGAGGAAATGCTTCAGCATGCACAAAATGATTTGAGAATTCTGCTACTTCATTTGAGGCCAGTTGAATTAGAAAATAAGACCCTATCTGAAGGATTCAAAATGATATTGAAAGAATTGACCGATAAGAGCGACATTGAAGTTGTTTATCACGAATCAATTCTAACCTTACCCAAAAAGATTGAAGACAATATTTTTAGAATTGGTCAAGAATTTATCAGTAATACTTTAAAGCATTCACAAGCCAGTCGTCTCGAAGTGTACCTCAATCAAACAGAGAATGAATTGCAGTTAAAAATGATTGATAATGTATGGATTTGATATGGATTCTGTCTATGATTAAGTATGAT

SEQ ID NO: 13882 - protein, 235 aa, Streptococcus agalactiae
MLTWFLLDDNSKRQINHNLRRILNNQSINVTDDGTEISTNIQRLSKKMNLMTASLQSKENSRILKSQEIVKQERKRIARDLHDTVSQDLFAASMVLSGIAQNVSQLDVDQVGSQLLAVEEMLQHAQNDLRILLLHLRPVELENKTLSEGFKMILKELTDKSDIEVVYHESILTLPKKIEDNIFRIGQEFISNTLKHSQASRLEVYLNQTENELQLKMIDNGIGFDMDSVYDLSMD

SEQ ID NO: 13883 - protein, 582 aa, Streptococcus agalactiae
ATGAAAGATGCTGTGGAGAGCGATGATATTAGCTCATTAACTAAAATTGCTGAGTTAGTTAATCAGATATCGTATGATCTACTACAGCTAGAGAAACCTGTTGTTATGTGTGTAGATGGGGCTGTAGCTGGTGCCGCAGCTAATATTGCATTAGCAGCTGATTTTGTTATCGCAAGCAAGAAGAGTAAATTTATCCAGGCTTTTGTGGGTGTCGGTTTAGCTCCAGATGCAGGAGGTTTATTGTTACTTAGTAAATCAATCGGTATAACTCGTGCAGTGCAACTAGCTTTAACTGGAGAAAGCTTATCTGCTGAAAAAGCTGAAGCTTTGGGAATTGTTTATAAACTTTGTGAATCAGATAAAATAGGTAAAATTAAGGATCAACTATTAAAGCGTTTAAGTAGACATTCTATAAACTCATATCAAGCCATAAAATCATTAGCTTGGGAAGCTGCTTTTAAAGATTGGGAACAATATAAAAAGCTTGAATTACAGTTACAAGAATCATTAGCCTTTAAGCAAGATTTTAAAGAGGGTGTTCGGGCACACGCTGATAGAAGGCGTCCTAATTTTTTAGGCAAA

SEQ ID NO: 13884 - protein, 194 aa, Streptococcus agalactiae
MKDAVESDDISSLTKIAELVNQISYDLLQLEKPVVMCVDGAVAGAAANIALAADFVIASKKSKFIQAFVGVGLAPDAGGLLLLSKSIGITRAVQLALTGESLSAEKAEALGIVYKLCESDKIGKIKDQLLKRLSRHSINSYQAIKSLAWEAAFKDWEQYKKLELQLQESLAFKQDFKEGVRAHADRRRPNFLGK

SEQ ID NO: 13885 - protein, 398 aa, Streptococcus agalactiae
TTGGAATACGATCAGATTAATAGTTATTTAGTTGACATTTTTAATAGAATCATGATTATTGAGGAAATGAGTTTAAAGACTAGCCAATTTAGCGATGTATCTTTAAAAGAATGCATACTATTGAAATTATTGGGAAACATTCTGAGGTAACTCCTAGCGATGTCGCTCGAGAATTAATGTTAACTTTGGGAACTGTAACAACCAGCCTTAATAAGTTAGAAAAAAAAGGCTACATTGAGCGTAAACGGTCAAGTATTGATCGTCGAGTTGTTCACTTGAGTCTTACTAAGAGAGGTAGGTTATTAGATCGATTGCATAGTAAATTTCATAAATCTATGGTATCTCATATTATTGAAGACCTAGGGAAGGTGCGAATAAGCGGGGAAATTCTTCTCGGC

SEQ ID NO: 13886 - protein, 133 aa, Streptococcus agalactiae
MEYDQINSYLVDIFNRIMIIEEMSLKTSQFSDVSLKEMHTIEIIGKHSEVTPSDVARELMLTLGTVTTSLNKLEKKGYIERKRSSIDRRVVHLSLTKRGRLLDRLHSKFHKSMVSHIIEDLGKVRISGEILLG

SEQ ID NO: 13887 - protein, 431 aa, Streptococcus agalactiae
TGGAATACGATCAGATTAATAGTTATTTAGTTGACATTTTTAATAGAATCATGATTATTGAGGAAATGAGTTTAAAGACTAGCCAATTTAGCGATGTATCTTTAAAAGAAATGCATACTATTGAAATTATTGGGAAACATTCTGAGGTAACTCCTAGCGATGTCGCTCGAGAATTAATGTTAACTTTGGGAACTGTAACAACCAGCCTTAATAAGTTAGAAAAAAAAGGCTACATTGAGCGTAAACGGTCAAGTATTGATCGTCGAGTTGTTCACTTGAGTCTTACTAAGAGAGGTAGGTTATTAGATCGATTGCATAGTAAATTTCATAAATCTATGGTATCTCATATTATTGAAGACCTAGGCGAAGAAGACATAAAAATGTTGACGAGCGCTTTAGGGAATCTTCATAAATTTTTGGAGGACTTAGTC

SEQ ID NO: 13888 - protein, 144 aa, Streptococcus agalactiae
LEYDQINSYLVDIFNRIMIIEEMSLKTSQFSDVSLKEMHTIEIIGKHSEVTPSDVARELMLTLGTVTTSLNKLEKKGYIERKRSSIDRRVVHLSLTKRGRLLDRLHSKFHKSMVSHIIEDLGEEDIKMLTSALGNLHKFLEDLV

SEQ ID NO: 13889 - protein, 691 aa, Streptococcus agalactiae
GTGGTTTTTGCTAAAATTAGTCAACTTGCACATTATGCACCTTCTCAAATCATTAAAAATGAGGATTTATCATTAATCATGGATACCAGTGATGACTGGATTTCGTCACGTACTGGTATAAAACAACGTCATATTAGTAAAAATGAAACAACAGCTGATTTGGCAAATAAGGTCGCAGAACAACTTATTGAAAAATCCGGTTATTCCGCTAGTCAAATTGACTTTATTATTGTTGCAACGATGACACCAGACTCTATGATGCCTTCTACTGCCGCAAGAGTGCAAGCTCATATTGGAGCGAGTAATGCTTTTGCCTTTGACTTGAGTGCAGCATGTAGTGGTTTTGTTTTTGCCTTGTCTACCGCCGAAAAATTGATATCATCAGGTAGCTATCAAAAAGGTTTAGTAATAGGAGCAGAAACTGTTTCTAAAGTATTAGACTGGACTGATAGAGGGACAGCAGTTTTATTTGGAGATGGAGCTGGAGGTGTCTTGCTAGAAGCTTCTAAGGAAAAACATTTTCTTGCAGAGTCTCTCAATACAGATGGTAGTCGTCAGGGACTTCAATCTAGTCAAGTCGGGTTAAATTCACCTTTCTCAGATGAAGTACTTGATGATAAATTTTTGAAAATGGATGGTAGAGCAATCTTTGATTTTGCTATCAAAGAAGTAAAAAGTATCAATCATCTTA

SEQ ID NO: 13890 - protein, 232 aa, Streptococcus agalactiae
  VARIANT 224, 226: Xaa = Any Amino Acid
MVFAKISQLAHYAPSQIIKNEDLSLIMDTSDDWISSRTGIKQRHISKNETTADLANKVAEQLIEKSGYSASQIDFIIVATMTPDSMMPSTAARVQAHIGASNAFAFDLSAACSGFVFALSTAEKLISSGSYQKGLVIGAETVSKVLDWTDRGTAVLFGDGAGGVLLEASKEKHFLAESLNTDGSRQGLQSSQVGLNSPFSDEVLDDKFLKMDGRAIFDFAIKEXSXKVSIIL

SEQ ID NO: 13891 - protein, 270 aa, Streptococcus agalactiae; identical to SEQ ID NO: 5055

SEQ ID NO: 13892 - protein, 90 aa, Streptococcus agalactiae; identical to SEQ ID NO: 700

SEQ ID NO: 13893 - protein, 957 aa, Streptococcus agalactiae
ATGAAAACACGTATAACAGAATTACTAAATATAAAATATCCAATTTTTCAAGGGGGTATGGCGTGGGTCGCTGATGGAGATCTTGCAGGAGCTGTTTCTAAGGCAGGTGGTCTAGGTATTATTGGTGGAGGAAATGCCCCTAAAGAGGTTGTCAAAGCAAATATTGATAAAATAAAATCTATGACTGATAAACCCTTTGGTGTGAATATTATGCTTTTATCACCTTTTGTAGATGATATTGTTGATTTGGTTATTGAAGAAGGTGTAAAAGTTGTAACGACTGGTGCAGGTAATCCTGGTAAGTACATGGAACGCTTTCATGAAGCAGGTATAACAGTAATCCCTGTTGTTCCTAGTGTTGCATTAGCAAAACGTATGGAGAAATTAGGGGCTGATGCTATCATTACAGAAGGAATGGAAGCGGGTGGTCACATCGGGAAGCTGACCACGATGACATTAGTGCGACAGGTTGTTGATGCTGTTACAATTCCAGTCATTGCCGCAGGTGGTATAGCAGATGGGCGTGGGGCTGCTGCGGGTTTCATGTTAGGAGCTGATGCTGTTCAGGTAGGAACTCGTTTTGTTGTTGCTAAAGAATCTAATGCTCACCCTAATTACAAAGCAAAAATTTTAAAAGCAAAAGATATCGACACTGCTGTTTCTGCTCAGGTAGTAGGTCATCCAGTTCGTGCCTTAAAAAATAAACTAGTAACAACCTATAGCCAAGCAGAAAAAGATTATTTAGCTGGCCGTATTTCAATCAATGAGATTGAAGAATTAGGAGCGGGAGCTCTTCGCAATGCAGTTGTTGATGGGGATGTTATTAATGGTTCAGTTATGGCAGGACAAATTGCAGGATTAATTAAATCAGAAGAGACTTGTCAAGAGATTCTTGAAGATATTTATTCAGGAGCGCGTCAAGTTATTCTTTCTGAGGCAAGCCGCTGGTCAGATTTA

SEQ ID NO: 13894 - protein, 319 aa, Streptococcus agalactiae; identical to SEQ ID NO: 702

SEQ ID NO: 13895 - protein, 924 aa, Streptococcus agalactiae
ATGAATAAAGTTGCATTTCTATTTGCTGGTCAAGGTGCTCAAAAGTTAGGAATGGCTAGAGATTTATATGAAACTTTCCCGATTGTTAAAGAAACTTTTGATAAGGCAAGTCATGTTTTAGGATATGATTTGAGAGAATTGATTGATAAAGACTTAGACAAATTAAATCAGACGAAATATACGCAACCAGCTATTTTAACGACTTCGACTGCTATTTATCGTTTAATTCTTAAAGAAATTGGACTTAGACCAGATATGGTTGCAGGACTTTCTTTGGGAGAATATAGTGCTTTAGTTGCTTCAGGTGCTATAAGATTTGAAGATGCTGTAGTACTTGTTTCTAGACGAGGCCAACTAATGGAAGCAGCAGCACCTGCTGGTAGTGGCAAAATGGTAGCGGTTTTAAATGCTGATCGTCAAATAATTGAAGATGCTTGTAAGAAGGCTTCTCAGTTTGGTATTGTTAGTCCTGCAAATTATAATACTCCAAAGCAAATTGTTATAGGGGGAGAGTCAATCGCTGTAAATGCAGCTGTAGAAGAACTAAAACAACAAGGAGTAAAACGTTTAATTCCTCTGAATGTTTCAGGTCCTTTTCACACTGCTTTATTGAAACCTGCAAGTCAGAAATTGAGCGATGTTTTAGATAAAGTTCATTTTTCAGTTTCTGAAATCCCTGTAATTGGAAATACAGAGGCGCAGATAATGAAAAAAGACGATATCAAATCTTTATTGGCACGCCAAGTTATGGAACCTGTACGCTTTGATGAGTCTATTGAAACCATGAAAAAAATGGGAATGACACAGGTTGTTGAAATTGGTCCAGGGAAGGTACTCTCAGGTTTCTTGAAAAAAATAGATAGCTCATTATCAGTATATTCTGTTGAAGATAAAATTGGATTTAATAATCTTAAGGAATTAAAC

SEQ ID NO: 13896 - protein, 308 aa, Streptococcus agalactiae
MNKVAFLFAGQGAQKLGMARDLYETFPIVKETFDKASHVLGYDLRELIDKDLDKLNQTKYTQPAILTTSTAIYRLILKEIGLRPDMVAGLSLGEYSALVASGAIRFEDAVVLVSRRGQLMEAAAPAGSGKMVAVLNADRQIIEDACKKASQFGIVSPANYNTPKQIVIGGESIAVNAAVEELKQQGVKRLIPLNVSGPFHTALLKPASQKLSDVLDKVHFSVSEIPVIGNTEAQIMKKDDIKSLLARQVMEPVRFDESIETMKKMGMTQVVEIGPGKVLSGFLKKIDSSLSVYSVEDKIGFNNLKELN

SEQ ID NO: 13897 - protein, 732 aa, Streptococcus agalactiae
ATGCAATTAAAAGATAAGAACATTTTTATTACGGGTTCAAGTAGAGGAATCGGCCTTGCAATTGCCCATCAATTTGCACAATTAGGTGCTAATATTGTTTTAAATGGACGTTCTGAAATATCAGAAGACTTAATAGCTGAATTTGCTGATTATGGTGTAAAAGTTATTGCTATTTCAGGAGATGTTTCTTCTTTTGAAGATGCTAATCGCATGATTAAAGAAGCTATTGCAAGTCTAGGTAGCGTGGATGTGCTTGTTAACAACGCTGGTATTACTAATGATAAATTGATGCTTAAAATGACTGTTGAAGATTTTGAGAGCGTTCTTAAAATTAATTTAACAGGTGCATTTAATATGACACAATCAGTCTTGAAACCGATGACAAAAGCGCGTCAAGGTGCTATTATTAATATCTCTAGCGTCGTTGGATTAACTGGAAATGTAGGGCAAGCTAATTACGCAGCCTCTAAAGCAGGTTTAATTGGCTTTACAAAATCAGTTGCCAGAGAAGTAGCAGCACGAGGCATTCGTGTCAATGCCATTGCTCCAGGCTTTATCGAATCTGATATGACAGATGTTATCCCAGAAAAAATGCAAGAAGCTATTTTAGCTCAAATTCCAATGAAACGTATTGGAAAAGGTAAAGAAGTAGCGCAGGTAGCGTCTTTCTTAGCAGAACAAGAATACCTTACAGGACAAGTTATTGCCATTGATGGCGGTATGACGATGCAA

SEQ ID NO: 13898 - protein, 244 aa, Streptococcus agalactiae; identical to SEQ ID NO: 706

SEQ ID NO: 13899 - protein, 1229 aa, Streptococcus agalactiae
ATGACATTACAGCGAGTAGTAGTAACAGGTTACGGTGTAACCTCACCTATTGGAAACACACCAGAAGAATTTTGGAATAGCCTTAAAGAAGGAAATGTTGGTATTGGACCTATCACTAAATTTGATTCAAGTGATTTCATGGTCAAAAATGCTGCTGAAATTCATGATTTTCCATTTGATAAATATTTTGTCAAAAAAGATCTGAACAGATTTGATATGTATTCCCTTTATGCCTTATATGCTTCAAGTGAAGCTATTCAACATGCTAATTTAAATTTAGATGAAATTGATGCAGATCGATTTGGTGTCATCGTTGCATCAGGTATTGGAGGGATTCAAGAGATTGAAGAACAAGTGATTCGTCTTCATGAAAAAGGGCCAAAACGCGTAAAACCAATGACGCTTCCAAAAGCTCTACCAAATATGGCAGCTGGAAATGTTGCGATGAGGTTAGGCGCTCATGGTGTATGTAAATCAATTAATACAGCTTGTGCTTCTTCTAATGATGCTATTGGAGATGCTTTCCGTAATATAAAATTTGGTATTCAAGATATTATGGTAGTCGGTGGTGCAGAAGCTGCTATTACAAAATTTGCCATTGCTGGATTCCAAAGTCTTACAGCATTATCAACAACTGAAGATCCATCAAGAGCATCTATTCCATTTGATAAAGATCGCAATGGATTTATCATGGGAGAAGGTTCTGGAATGTTGGTCTTAGAAAGTTTAGAACACGCTGAAAAACGAGGAGCTACTATTCTTGCAGAAGTTGTTGGTTATGGTAACACTTGTGACGCATATCATATGACTTCACCACATCCAGAAGGTTTAGGAGCCACTAAAGCTATTCAACTTGCACTGGCTGAAGCTAATATTAAACCTGAAGAAGTTAACTATGTAAATGCTCATGGAACTTCAACACCTGCTAACGAAAAAGGAGAGAGTCAAGCTGTTGTTGCTGCACTTGGGACAGACGTTCCAGTTTCTTCGACTAAATCTTTTACTGGTCATCTTTTGGGTGCCGCAGGAGCTGTTGAGGCAATTGCAACTATTGAAGCGATACGTCATAGTTATGTTCCAATGCTGCTGGAACAACAGAATTATCAGAAGATATTACAGCGAATGTTATTTTTGGTCAAGGGCAAGACGCTGATATTCGTTATGCCATTTCAAATACATTTGGTTTTGGAGGACACAATGCAGTTCTGGCCTTCAAACGCTGGGAGGAT

SEQ ID NO: 13900 - protein, 410 aa, Streptococcus agalactiae
  VARIANT 362: Xaa = Any Amino Acid
MTLQRVVVTGYGVTSPIGNTPEEFWNSLKEGNVGIGPITKFDSSDFMVKNAAEIHDFPFDKYFVKKDLNRFDMYSLYALYASSEAIQHANLNLDEIDADRFGVIVASGIGGIQEIEEQVIRLHEKGPKRVKPMTLPKALPNMAAGNVAMRLGAHGVCKSINTACASSNDAIGDAFRNIKFGIQDIMVVGGAEAAITKFAIAGFQSLTALSTTEDPSRASIPFDKDRNGFIMGEGSGMLVLESLEHAEKRGATILAEVVGYGNTCDAYHMTSPHPEGLGATKAIQLALAEANIKPEEVNYVNAHGTSTPANEKGESQAVVAALGTDVPVSSTKSFTGHLLGAAGAVEAIATIEAIRHSYVPMXAGTTELSEDITANVIFGQGQDADIRYAISNTFGFGGHNAVLAFKRWED

SEQ ID NO: 13901 - protein, 534 aa, Streptococcus agalactiae
ATGCAGTTCTGGCCTTCAAACGCTGGGAGGATTAAATTGGATATTCAAGAGATTAAGGATTTAATGACTCAATTTGATGAGTCAAGTCTGAGAGAATTTTCATTCAAAACAAGTGACGGTGAGCTGTCTTTTAGTAAAAATGAGGGAAAAGCTCCACTTGTACCAACTATGTCTCCTATGAGTCATCAACCTGAAGCGACTCCAACTATAGCAACTCCTGTCTCTAATGAAGCAGGTGAGCAAACGAAACAAGCTACTGAAGTAGTTTCAGAAATCCCAGAGTCGACTGTGACTGTTGCAGAAGGTGACGTTGTCGAAAGTCCTTTAGTTGGGGTTGCTTATTTAGCTTCTGGACCAGATAAACCTAACTTTGTTTCAGTAGGTGATAGCGTGAAGAAGGGACAAACTTTGATGATTATTGAGGCAATGAAGGTGATGAATGAAGTGCCTGCCCCTCATGATGGTGTAGTTACTGAAATTCTTGTAGCCAATGAAGAAGTTATTGAATTTGGTAAAGGATTGGTACGAATCAAA

SEQ ID NO: 13902 - protein, 178 aa, Streptococcus agalactiae; identical to SEQ ID NO: 710

SEQ ID NO: 13903 - protein, 420 aa, Streptococcus agalactiae
ATGATTGATATAAAAGAAATTCGTGAGGCTTTACCTCACCGCTATCCAATGTTATTAGTGGATCGTGTTTTAGAGGTATCAGAAGATGAGATAGTCGCTATCAAAAATGTTAGTATCAATGAGCCTTTTTTCAATGGTCATTTTCCAGAATATCCTGTAATGCCAGGCGTTTTAATTATGGAAGCTTTGGCTCAAACTGCAGGTGTTTTAGAATTATCTAAAGAAGAAAACAAAGGAAAGCTTGTTTTTTATGCAGGTATGGATAAAGTGAAATTTAAAAAGCAAGTTGTTCCAGGAGATCAATTAGTTATGACTGCTAAGTTTGTCAAACGTAGAGGAACTATAGCCGTTGTTGAAGCAATAGCAGAAGTTGATGGGAAATTAGCTGCCAGTGGAACGTTAACATTTGCAATAGGTAAT

SEQ ID NO: 13904 - protein, 140 aa, Streptococcus agalactiae; identical to SEQ ID NO: 9298

SEQ ID NO: 13905 - protein, 1368 aa, Streptococcus agalactiae
ATGTTTAAGAAAATATTGATTGCTAATCGCGGAGAAATTGCAGTACGTATCATTCGTGCAGCCCGTGAAATGGGAATTTCGACAGTTGCTATCTATTCGGAGGCTGACAAGGAATCATTGCACACAATTTTAGCAGATGAAGCTATTTGTGTTGGACCAGCCAAATCAGCAGAATCTTATTTAAACGTTAATGCTATATTATCTGCTGCTATTGTGACTGGAGCGGAAGCTGTTCATCCAGGTTTTGGGTTTTTGAGTGAAAATTCTAAATTTGCTACTATGTGTGAAGAGATGAACTTAAAATTCATTGGTCCATCTGGAGAAGTTATGGATAAAATGGGTGATAAAATCAATGCTCGTGCAGAGATGATAAAAGCTGATGTTCCGGTTATCCCAGGATCAGATGGTCAAGTTACAAGTGTAGAAGAAGCTGTATCAATTGCTGAGGAAATCGGCTATCCATTGATGTTAAAAGCCTCAGCCGGTGGCGGTGGAAAAGGAATTAGGAAGGTCAAATCAGCAGATGAATTGAAGCCTGCTTTTGAGTCTGCTTCACAGGAGGCTTTGGCTGCGTTCGGTAATGGTGCTATGTATATTGAAAAAGTTATATACCCAGCTAGACATATTGAAGTACAAATACTTGGAGATAGCTTTGGTAAGATAGTTCACCTAGGAGAACGTGATTGTTCTCTGCAGCGTAACAATCAGAAGGTATTGGAAGAAAGTCCGTCTGTGGCAATAGGTAACACTCTGCGTCAACAAATTGGTGAAGCAGCTGTTCGTGCAGCTGAGGCTGTATCTTATGAAAATGCAGGAACAATTGAGTTTTTATTAGATGAGAATAGCGGACAGTTCTATTTCATGGAAATGAATACTCGTGTTCAAGTAGAACACCCTGTTACAGAATTTGTAACGGGTGTTGACATCGTTAAAGAGCAGATTCGTATCGCTGCTGGAATTCCTTTATCAGTTTCTCAAAATGATATTAAGTTAACTGGTCATGCGATTGAATGTCGTATTAACGCAGAGAATCCACAATTTAATTTTGCGCCATGTCCAGGTACCATTAATGGGTTACATCTACCTGCTGGCGGTATGGGCTTACGTGTCGATTCAGCGGTTTACACAGGCTACACTATTCCTCCTTATTATGATAGTATGATTGCGAAAGTAATTGTTCACGGAGAAAATCGTTTTGATGCACTTATGAAAATGCAACGTGCCTTATATGAGCTTGAAATTGATGGTATTATAACAAATACAGAATTTCAAATGGATCTCATTTCTGATAAAAAAGTCTTGGCTGGAGATTATGATACTTCATTCCTGATGGAAGACTTTTTACCAAGGTATTATGGTAACAATCAA

SEQ ID NO: 13906 - protein, 456 aa, Streptococcus agalactiae
MFKKILIANRGEIAVRIIRAAREMGISTVAIYSEADKESLHTILADEAICVGPAKSAESYLNVNAILSAAIVTGAEAVHPGFGFLSENSKFATMCEEMNLKFIGPSGEVMDKMGDKINARAEMIKADVPVIPGSDGQVTSVEEAVSIAEEIGYPLMLKASAGGGGKGIRKVKSADELKPAFESASQEALAAFGNGAMYIEKVIYPARHIEVQILGDSFGKIVHLGERDCSLQRNNQKVLEESPSVAIGNTLRQQIGEAAVRAAEAVSYENAGTIEFLLDENSGQFYFMEMNTRVQVEHPVTEFVTGVDIVKEQIRIAAGIPLSVSQNDIKLTGHAIECRINAENPQFNFAPCPGTINGLHLPAGGMGLRVDSAVYTGYTIPPYYDSMIAKVIVHGENRFDALMKMQRALYELEIDGIITNTEFQMDLISDKKVLAGDYDTSFLMEDFLPRYYGNNQ

SEQ ID NO: 13907 - protein, 873 aa, Streptococcus agalactiae
ATGGCTTTATTTAGTAAAAAGGATAAATATATCCGTATTAGTCCAAACAAAGCATTAGGGTCTTCTGATAAACGTAGTCTTCCTGAGGTTCCTGATGAACTCTTTGCTAAGTGTCCTTCTTGTAAACATATGATTTATCAGAAAGATTTAGGATTAGCAAAGATTTGTCCAGCTTGTTCTTACAATTTTAGAATTTCAGCGCAAGAACGTCTGTTGCTAACAGTTGACGAAGATAGTTTTGAGGAATTATTTACAGGGATTGAAACTAAGGATCCTTTGAATTTTCCAAACTACCGTGAAAAACTGGCTGCTACACGTCAAAAGACTAACTTAGATGAAGCGGTGGTGACAGGTTTAGCTAAAATAAAAGGACAAACTACGGCCTTAGCTATTATGGATTCTCATTTTATAATGGCGTCTATGGGAACGGTTGTAGGCGAAAAGTTGACAAGATTATTTGAGCTAGCAACTGAAAAGAAATTACCTATTGTTATTTTTACAGCGTCAGGGGGCGCCAGAATGCAAGAAGGTATTATGAGTTTGATGCAAATGGCAAAAGTATCGGCAGCAGTTAAACGCCATTCTAACCAGGGATTGTTTTATTTAACAATTTTAACAGACCCAACAACCGGCGGCGTTACTGCGAGTTTTGCTATGGAAGGTGATATTATTCTGGCTGAGCCGCAAGCGTTGGTTGGTTTTGCTGGTCGTCGTGTTATCGAAACAACGGTGAGAGAAGATTTACCTGAAGGCTTTCAAAAGGCAGAGTTTTTGTTAGAACATGGTTTTATTGATGCTATTATAAATCGAACAGAATTACGCGACTGCATTGCTCAACTAATTGCTTTCCATGGAAATGAGGTTGGTCATGAA

SEQ ID NO: 13908 - protein, 291 aa, Streptococcus agalactiae
MALFSKKDKYIRISPNKALGSSDKRSLPEVPDELFAKCPSCKHMIYQKDLGLAKICPACSYNFRISAQERLLLTVDEDSFEELFTGIETKDPLNFPNYREKLAATRQKTNLDEAVVTGLAKIKGQTTALAIMDSHFIMASMGTVVGEKLTRLFELATEKKLPIVIFTASGGARMQEGIMSLMQMAKVSAAVKRHSNQGLFYLTILTDPTTGGVTASFAMEGDIILAEPQALVGFAGRRVIETTVREDLPEGFQKAEFLLEHGFIDAIINRTELRDCIAQLIAFHGNEVGHE

SEQ ID NO: 13909 - protein, 771 aa, Streptococcus agalactiae
ATGAATAATGATGTGACAAGAATTTTAAAAGATGCGCGTGATCAAGGGAGGCTAACTGCTCTTGACTACGCTGAATTGATTTTTGATAATTTTATGGAACTTCATGGTGATCGCCAGTTCGCAGATGACAAATCAATTATAGGAGGTTTGGGGTACTTGGCAGGGCGTCCTGTGACGATTGTCGGTATTCAAAAAGGTAAGAACCTTCAAGATAATTTAGACCGTCATTTTGGTCAACCACATCCTGAAGGTTATCGTAAGGCTTTACGTTTAATGAAACAAGCTGAGAAGTTTGGAAGACCTGTTATAACCTTCATCAATACTGCTGGAGCATATCCTGGGGTAGGTGCTGAGGAGCGAGGTCAGGGTGAAGCAATTGCTAGAAACCTCTTAGAAATGAGTGATTTAAAAGTCCCTATTATAGCTATTATTATTGGTGAAGGGGGTTCTGGAGGAGCATTAGCTTTAGCTGTTGCCGATAAGGTTTGGATGTTGGAACATACTGTTTATTCTATTTTAAGTCCTGAGGGCTTTGCCTCTATTTTATGGAAAGATGGTACAAGAACAACAGAAGCAGCACAATTAATGAAGATGACTGCTGGAGAACTTTACCATATGGAAGTTGTAGACAAAGTAATCCCTGAACATGGTTATTTTTCAAGTGAGATTGTCGATATGATTAAGACAAGTTTAATTTCAGAGTTAGAAATGCTCTCACAATTATCTCTTGAGGATTTATTGGAGCAACGTTACCAACGTTTTAGAAAATAT

SEQ ID NO: 13910 - protein, 257 aa, Streptococcus agalactiae; identical to SEQ ID NO: 5074

SEQ ID NO: 13911 - DNA, 630 bp, Streptococcus agalactiae
atgtatcaagaattaaatgattatttagaattccaatcaatgaagtatattatgcctgagaaggcaggccctttaaaggacgatatgcaaacttttaaggcaaagggccaacttgctaggaatagctttacagagttatcaagagccttagaacaacgtatggatggctttaaaatgcaaagagtgagtaattgggctaatcaagctcaagtagggcgtccacatttttgggtttattatcgaaaggatacagaccaattagatgatgtggctgttgcgctaagggtttatggtgtaaaagatagttttggggttagtcttgaggtaagctttgtagagaggcaaaaatctgataagacactcgagaagcaggctagagtgttatcgattccgattgcctctccattgtattttatggtccaaaggcaaggtgaaactcatcgagaggaaggcaatgaggaaaatcgtcaacgtttaatgcaagaaattaagtcagggaaggtaaggaaagtattggtaaaatatgatgttcttttgactgaaaaccagagcttagaaaatattctgcaacggttgttagaaggatttgagaaagtgctaccttactaccaagtttgtcaaactattagc

SEQ ID NO: 13912 - protein, 210 aa, Streptococcus agalactiae; identical to SEQ ID NO: 720

SEQ ID NO: 13913 - DNA, 1275 bp, Streptococcus agalactiae
atgttagacttaaaacgtattcgtacagattttgatgctgtcgctaaaaaattggccacgcgtggtgttgaccaagaaacattaacaacccttaaagaacttgatataaaacgccgtgaattacttatcaaatctgaagaggcgaaagcgcaacgtaatgttgcttctgctgccattgctcaagcaaaacgaaataaagagaatgcagacgagcaaatcacagctatgcaaacactttccgctgatatcaaagcaattgatgcggaattggcagatgtggatgctaatttacaatcaatggtgaccgtacttcctaatacaccagctgatgatgtgccgcttggagcagacgaggatgaaaatgttgaagttcgtcgctggggaactcctcgtgaatttgattttgaggccaaagctcactgggatttaggggaaagccttggaattctcgattgggaacgtggtgcaaaagttactggttctcgcttcctcttctacaaaggtctaggtgctcgtttagagcgtgctatctacagcttcatgctggatgaacacgctaaggaagggtacactgaagtgatccctccttatatggttaaccacgattcaatgttcggtacgggacaatatccaaagttcaaggaagatactttcgaattagcagatagcccattcgtacttatcccaacagctgaagttcctttaacaaactattatcgtgatgaaattatcgatgggaaagaattacctatatactttactgccatgagtccatcattccgttcagaagcaggctctgcaggacgtgacacacgtggattaattcgccttcatcaattccataaagtagaaatggtgaaatttgccaagcctgaggaatcgtaccaagaattagaaaaaatgacagcaaatgctgaaaatattcttcaaaaacttaatctcccataccgtgtcattaccttgtgtacaggagatatgggattctcagcagctaaaacgtatgacttagaggtatggattcccgctcaaaatacttatcgagaaatttcttcatgttctaatactgaagatttccaagcacgtcgtgctcaaattcgttaccgtgacgaagttgatggcaaagttaggttgcttcatactttaaatggttcaggacttgcagttggacgtactgtagcagcaatcctcgaaaattatcaaaatgaagatggttctgtgactatcccagaagttcttcgtccatatatgggtaatatcgatattattaaaccaaat

SEQ ID NO: 13914 - protein, 425 aa, Streptococcus agalactiae
MLDLKRIRTDFDAVAKKLATRGVDQETLTTLKELDIKRRELLIKSEEAKAQRNVASAAIAQAKRNKENADEQITAMQTLSADIKAIDAELADVDANLQSMVTVLPNTPADDVPLGADEDENVEVRRWGTPREFDFEAKAHWDLGESLGILDWERGAKVTGSRFLFYKGLGARLERAIYSFMLDEHAKEGYTEVIPPYMVNHDSMFGTGQYPKFKEDTFELADSPFVLIPTAEVPLTNYYRDEIIDGKELPIYFTAMSPSFRSEAGSAGRDTRGLIRLHQFHKVEMVKFAKPEESYQELEKMTANAENILQKLNLPYRVITLCTGDMGFSAAKTYDLEVWIPAQNTYREISSCSNTEDFQARRAQIRYRDEVDGKVRLLHTLNGSGLAVGRTVAAILENYQNEDGSVTIPEVLRPYMGNIDIIKPN

SEQ ID NO: 13915 - DNA, 990 bp, Streptococcus agalactiae
atgttcatgattgttattacgcatgttcttggaaaagatggtctgagatcttcggttgagggacacgcagactcctattttatagtaacgtggattatccaagtcttagtttatggggccgttaactgttacgcactaataagtggttatgtgggaattaattcgcgttatcgttactcaaaattactgtctatctggacacaggtttttttctacacctttacaataacagcactttttgcaatcacaggtcatgaagtgaccttgcttaattggagagatgcttttttccctattgtcagtgggcagtattggtacattactgcttactttggtctattggtttttatgcctgttattaataatggattaaatgccttgactgataaacaattaaaacaattggttttgttaatgtttattattttttcaattttaccagctgttttaaacaatcgtgttccagaattttcattgagcaagggttttgaaatgacttggctactgattttatatattattggtgcctatttgaaacgtattgatttaaatatatttaaaacatcatacttacttatagtttatctattatcattggttgctacttatgtcatgaagtttagtattggtgatatttggtattggtatgtttcgcctactttaactttaggggcggtaagtttgtttatattatttgctagagcaagcattaagccctcgggattcttaaagaaaataattgttgtattagccccttcaaccttgggagtttatctctgtcatctccacccactaatagtaaaatattttgtaagagattttgcagagacgtttgtttatgagtccatttatctttacccatttttaattttaggagcagggattttaatttatttgttggcttttattgtagaacgtattagattacgaatatttaaagcaatccatttttctaactttttgagatggtttgatgacaagttcccatat

SEQ ID NO: 13916 - protein, 330 aa, Streptococcus agalactiae
MFMIVITHVLGKDGLRSSVEGHADSYFIVTWIIQVLVYGAVNCYALISGYVGINSRYRYSKLLSIWTQVFFYTFTITALFAITGHEVTLLNWRDAFFPIVSGQYWYITAYFGLLVFMPVINNGLNALTDKQLKQLVLLMFIIFSILPAVLNNRVPEFSLSKGFEMTWLLILYIIGAYLKRIDLNIFKTSYLLIVYLLSLVATYVMKFSIGDIWYWYVSPTLTLGAVSLFILFARASIKPSGFLKKIIVVLAPSTLGVYLCHLHPLIVKYFVRDFAETFVYESIYLYPFLILGAGILIYLLAFIVERIRLRIFKAIHFSNFLRWFDDKFPY

SEQ ID NO: 13917 - DNA, 300 bp, Streptococcus agalactiae
atggggaataaagttggaaaatttttagttggtgaccaggcattagaattctataacgataaaaatgtcaacgactatattcaaattccatggacatcaatcaatcaaattggagctaatgttagtcgaaaaaaaattagtcgtcactttgaggtctttacagaccaaggaaaatttttatttgcctctaaagactctggaacgatattaaagcatgcgagacgacatattggagacgataaagttgttaagcttcctaccctcatccagaccattttaaaaatattcaagtttaaaaaa

SEQ ID NO: 13918 - protein, 100 aa, Streptococcus agalactiae; identical to SEQ ID NO: 738

SEQ ID NO: 13919 - DNA, 975 bp, Streptococcus agalactiae
atgactgaacaaattaaattatcaaaatcagatcgtcaaaaagtttggtggcgttcacaattccttcaaggttcttggaactatgagcgtatgcaaaatatggggtgggcctacgctcttatcccagcattgaaaaaactttacactactaaagaagatcgtgctgctgcgcttgagcgccatatggaattctttaacacacatccatacgttgctgctccaattatcggtgtaacccttgctcttgaggaagaaaaagcaagcggtacacctgtcgaagacaaagcaattcaaggggttaaaatcggtatgatgggacctcttgctggtattggtgatccagtattctggtttactgtacgtcctatcttaggtgctcttggtgcttcacttgcctctgctggtaatatcctcggaccaatcatcttctttgttggttggaacctcattcgtatgtcattcttatggtatacacaagagttaggttacaaatcaggtaaagaaattactaaagatatgtctggcggtatcctccaagatattactaaaggtgcttcaatccttggtatgttcattcttgctgtccttgttaagcgttgggtagcaattaactttactgtagaccttcctaaaaagacattgtcagaaggggcatacatcaatttccctaaagaccatgttagtggacaacaattgcatgatatcctaggacaagttcagagtggcttaagccttgataaaatgcaaccacaaacacttcaaggacaacttgactcacttattcctggtttagctggattacttcttacattcttctgtatgtggktacttaagaagaaagtatcaccaattacaattatcatcggktttgtttatcgttggtattctagctcgccttgcaggtgtgatgtaataaaactaagagatggttacaatagtattccatctcttatattttattaccaaaaatccact

SEQ ID NO: 13920 - protein, 325 aa, Streptococcus agalactiae
  VARIANT 276: Xaa = Any Amino Acid
MTEQIKLSKSDRQKVWWRSQFLQGSWNYERMQNMGWAYALIPALKKLYTTKEDRAAALERHMEFFNTHPYVAAPIIGVTLALEEEKASGTPVEDKAIQGVKIGMMGPLAGIGDPVFWFTVRPILGALGASLASAGNILGPIIFFVGWNLIRMSFLWYTQELGYKSGKEITKDMSGGILQDITKGASILGMFILAVLVKRWVAINFTVDLPKKTLSEGAYINFPKDHVSGQQLHDILGQVQSGLSLDKMQPQTLQGQLDSLIPGLAGLLLTFFCMWXLKKKVSPITIIIGFVYRWYSSSPCRCDVIKLRDGYNSIPSLIFYYQKST

SEQ ID NO: 13921 - protein, 810 aa, Streptococcus agalactiae
ATGGCGGATATTTCAATTATCTCAATGATTTTGGTCGTTATCGTTGCCTTCTTTGCTGGTCTTGAAGGTATCCTCGACCAATTCCAAATCCATCAACCTCTTGTTGCTTGTACTTTAATCGGTCTTGTAACTGGTCACCTCGAAGCGGGTATTATTCTTGGTGGTAGTCTCCAAATGATTGCTCTTGCTTGGGCAAATATCGGAGCTGCCGTAGCACCAGACGCTGCACTTGCCTCTGTTGCTGCTGCTATTATTTTGGTTAAAAGTGGCGACTTCACTCAAAAAGGTATCAACTTTGCCTTCTCTACTGCTGTACCTCTAGCTATTGCTGGACTTTTCCTTACAATGATTGTTCGTACAATCTCAACTGCACTTGTTCACGCTGGTGACAAAGCTGCTTCTGAAGGAAACTTCGCAGCAATTGAACGTTTTCACTTTATTGCCCTCCTTCTCCAAGGATTACGTATTGCATTCCCAGCTGCGCTTCTTTTAGCTATTCCATCTTCTTCAGTACAAAGTATTCTTGAAGCAATGCCTGATTGGTTAAATGGTGGTATGCAAGTTGGTGGTGCCATGGTTGTTGCCGTTGGTTACGCTATGGTTATCAATATGATGGCTACTCGCGAAGTTTGGCCTTTCTTTGCTCTTGGATTTGCTCTAGCAGCTTTGAACCAGTTAACTCTTATTGCAATGGGTACTATTGGTGTTGCTATCGCCCTCATCTACATCAGTTTATCAAAAATGGGTGGAAGCAAAGGTACTTCTAACGCAGGTTCTAACGATCCTATCGGCGATATCTTAGAGGACTAC

SEQ ID NO: 13922 - protein, 270 aa, Streptococcus agalactiae; identical to SEQ ID NO: 742

SEQ ID NO: 13923 - protein, 906 aa, Streptococcus agalactiae
ATGGGTATCGGTATTATTATTGCCAGCCATGGTAAATTTGCTGAAGGTATTCATCAATCAGGTTCAATGATCTTTGGTGAACAAGAAAAAGTTCAAGTTGTAACTTTCATGCCAAATGAAGGACCAGATGATTTGTATGGACACTTCAACAATGCTATCGCACAATTTGATGCTGATGATGAGGTGCTTGTGTTAGCTGACCTTTGGAGTGGGTCACCATTTAACCAAGCAAGCCGTGTTATGGGAGAAAATCCTGAACGTAAAATGGCTATCATCACTGGTCTCAATTTGCCAATGCTTATCCAAGCCTATACTGAGCGTATGATGGACGCTAATGCAGGTGTTGAACAAGTTGCCGCAAATATTATTAAAGAGTCTAAGGAAGGTATCAAAGCCCTTCCAGAAGAACTTAATCCTGTTGTAGAAGCTACTCCTGTAGCAGGTGTTCCTGCAGATGTTCCTGCGGAAGTTAAACAAAGTGGATCTATCCCTGAAGGAACTGTTATTGGAGATGGCAAGCTTAAAATTAATCTTGCTCGTATTGACACACGTCTTTTACATGGTCAAGTTGCAACTGCATGGACTCCAGCATCAAAAGCAAACCGTATTATCGTTGCTTCTGATGAAGTTTCTAAAGATGAACTTCGTAAACAATTGATTAAGCAAGCTGCTCCTGGAGGAGTCAAAGCAAACGTTGTCCCAATTAGTAAATTAATTGAAGTAGCTAAAGACCCACGTTTCGGAAACACACGTGCCTTGATCTTATTTGAAACTGTACAAGATGCACTCCGTGCAGTTGAAGGTGGTGTGGAAATCCCTGAATTGAACGTTGGTTCAATGGCTCACTCAACTGGTAAAACAATGGTAAACAACGTTCTTTCAATGGATAAAGACGATGTGCTGCCT

SEQ ID NO: 13924 - protein, 302 aa, Streptococcus agalactiae
MGIGIIIASHGKFAEGIHQSGSMIFGEQEKVQVVTFMPNEGPDDLYGHFNNAIAQFDADDEVLVLADLWSGSPFNQASRVMGENPERKMAIITGLNLPMLIQAYTERMMDANAGVEQVAANIIKESKEGIKALPEELNPVVEATPVAGVPADVPAEVKQSGSIPEGTVIGDGKLKINLARIDTRLLHGQVATAWTPASKANRIIVASDEVSKDELRKQLIKQAAPGGVKANVVPISKLIEVAKDPRFGNTRALILFETVQDALRAVEGGVEIPELNVGSMAHSTGKTMVNNVLSMDKDDVLP

SEQ ID NO: 13925 - protein, 800 aa, Streptococcus agalactiae
ATGACAAAGAAAATTATCGCCGTAGATTTAGACGGTACTCTATTACATAATAATAACACTATTTCTGACTACACCGCTGATACACTTCGAAAAGTTCAAGCTCAAGGACACAAAGTAATTATTACAACCGGACGCCCATACCGTATGGCACTCGCTCATTATTTACGCCTAGATTTAAAAACACCAATGATAAATTTTAACGGTGCTTTAACTCATATCCCCGAAAAAAAGTGGGCGTTTGAGCATAGTGCAACGATTGATAAAAAATTACTCCTTGAAACCTTAAATTTATCAGATGCTATCCAAGCCGATTTTATTGCTAGCGAGTACCGTAAAAATTTTTACATTACTATGGATAATCGTGATAAAATTAACCCACAATTATTCGGTGTCAATGAAATTACTGATAAAATGGCATTAGATGTTACTAAAATCACACGCAATCCAAATGCTCTATTGATGCAAACACGTCATAAAGATAAGTATGAGTTAGCTAAAGAGTTACGACAACATTTTAATCACGAACTAGAAGTAGATTCTTGGGGTGGTCCATTGAATATACTCGAATTTTCACTAAAGGTGTTAACAAAGCTTATGCTCTCAAACATTTATTAAAATCACTCAATCTTTCACAAGAAAATTTGATTGCCTTTGGAGATGAACACAATGACACCGAGATGCTGGCCTTTGCACATACAGGATATGCTATGAAAAATGCTAGTCCAACTCTACTTCCATATGCCGACCAACAAATCCAATGGACAAACGAAGAAGATGGTGTTGCTAAAACTCTAGAAAAA

SEQ ID NO: 13926 - protein, 267 aa, Streptococcus agalactiae
  VARIANT 192: Xaa = Any Amino Acid
MTKKIIAVDLDGTLLHNNNTISDYTADTLRKVQAQGHKVIITTGRPYRMALAHYLRLDLKTPMINFNGALTHIPEKKWAFEHSATIDKKLLLETLNLSDAIQADFIASEYRKNFYITMDNRDKINPQLFGVNEITDKMALDVTKITRNPNALLMQTRHKDKYELAKELRQHFNHELEVDSWGGPLNILEFSXKGVNKAYALKHLLKSLNLSQENLIAFGDEHNDTEMLAFAHTGYAMKNASPTLLPYADQQIQWTNEEDGVAKTLEK

SEQ ID NO: 13927 - protein, 582 aa, Streptococcus agalactiae
ATGAAAAAGTTAATTTGGAGTCATCTTTTTGCCATAGTCAGTATTTTAGGGATATGGTATTATCATGTAAAAATTGATCATTTGATGGTAATTCTATTGGCATCAGTCTTGTCGTTAGAGATGGGATTCATTGCTTATTATAGTCGTAATATTTTTATTCGTCTTTTAGCAAGTTTAGGCCTTTTATTTTTTTACCCACAGAGTTTAGGGATTTTTCTTAGTTTAGTGAGCTTAGAGTGGTCAACAAAAGACATTTGGCAGTCTAATCACTTTATGCAATATATGGCATACCTTCTTGCAATTCTTTTTATTATCTCTTCAGCTTTACTAAGTTTGAAGCTATTGGTAAATGCATATGATATTAGTAAAAGGTATCAATTAGCAACTGTTATACCTGTAATGCTTTTTAGTAGTTTTGCCTTTTGCTTAGAAAAATCAGGATCATTAGGTTTAGAAGGAATCATTTTAAATCCGTCAGCATTTTTTAATGGAATACAGACTAATATGGCTAACCTTGATTTTAAAGCCTTGTCTTGCCTTTTTTTAGTACAATTATTACTTTGGGGAATATTAATGGAAGAC

SEQ ID NO: 13928 - protein, 194 aa, Streptococcus agalactiae; identical to SEQ ID NO: 746

SEQ ID NO: 13929 - protein, 609 aa, Streptococcus agalactiae
ATGAAAGTAAAACTATTTGCGATACATTTATTTTTTATTGTTATTTCTTTTGGGATTAAATATTATCATTTGCAGGGACCAAATTTGATTTGGAATATGACTCTAGCCCTAATAGCGTTAGATTTTGCATACCTTACTAGTTTATTTAAGAAAAAAATTCTTATCGGTCTTTTTGCACTTGCTTGGTTTTTTTTCTATCCTAATACCTTTTATATGTTGACGGATATCATTCATATGCATTTTGTCGGAGACGTTCTTTATAATAAGACAAATTTAATACTTTATATCTTGTATGTATCTAGTATCTTGTTTGGTTTTTTATCAGGTATCGAAAGTTTTTCTGTGATTATGCGTAAATTTAGAATTAGCAATATATTTTTAAGATGGGGAATTATTGGAATTGTATCATTTGTTTCAAGTTTTGGTATTCATATTGGTCGTTATGCCCGTCTAAATTCATGGGATATCTTAACGAAGCCACAAGTGGTAATTAACGAACTTTTAGCGGTTCCGAGTAGGGATTCATTCCACTTTATTTTAGGATTTACATTTTTACAGGTATTGTGTCTTATTTTTATGGATTATTCTGCAGGGAAAAAGCTTGAAAAG

SEQ ID NO: 13930 - protein, 203 aa, Streptococcus agalactiae; identical to SEQ ID NO: 748

SEQ ID NO: 13931 - DNA, 1419 bp, Streptococcus agalactiae
atggaaaagttttttaagctaaaggaacacgggacgacaattcggactgaaatcactgctggtctaacgactttctttgcaatgtcgtacattttgtttgtaaatccagctattttatctcagactgggatgccagcacaaggagttttcttagcgacgattattggtgccgttgtagctacatctgttatggctttctatgctaaccttccctatgcacaagctcctgggatgggattaaatgctttctttacatatacagttgtctttgcattgggatatacatggcaagaagccttagctatggtatttatttgtggtttgatttctctgattattactttaacgaaagttagaaagatgattattgagtctatcccaacaactttaaaatcagccattacagcaggaatcggaacttttttagcatacgttgggattaaaaatgctggttttttgaaattttcaattgatcctgggacgtatgatgttgttggaaagggtgctgcgaaaggattggctactattacagcaaattcttcagcaacgccagggctagtgtcgtttgataatccagcaattttattatctttgattggtttaagcattaccatcttctttattgtaaaaggtatccgtggagggattattctatcgatattaacaacgaccctcttaggtattttaatgggagtggttaagttagatgctattaattgggaagcaactaacctctcggcctcttttagagatttgaagcaagtatttggagttgcattaggagagaaaggattaatttctttattttctaatccttcacgtctaccaagtgtattaatggccattcttgctttttcactgactgatatttttgataccattggaacgctcattggtaccggagaaaaagttggtatcttagcaacgactggtgataatcatgaatctaagagtttagacaaagcactctattcagacttaattgggacaacttttggtgctatttgtggaacatctaacgttacaacctatgttgagtcagcagcaggaatcggagctggtggtcgtacaggattgacagccttagtagttgctggtttgtttgctatatctagtttttttagtccactagtatctatcgttccgagtcaagctactgcaccaatattggttattgttggtattatgatgctttcaaatttaaaagatatcaaatgggatgatatgtcagaagctatcccagctttctttacttctctttttatggggtttacttatagcattacttatggtattgcagctggtttcttgacctatacactagctaaagtcatcaaaggacaagcaaaagatattcatgtggtactgtggattttagatatattatttattctaaactttatcagcttggctattttg

SEQ ID NO: 13932 - protein, 473 aa, Streptococcus agalactiae; identical to SEQ ID NO: 750

SEQ ID NO: 13933 - DNA, 507 bp, Streptococcus agalactiae
atgctatggggctgtcagaatcagcaaactgttggaagacagagatatttctggtataatatctctatgttttatactcaaaatgaagaagagcttattgccctagggcaaaaactgggtactgttttaaagtcaggagatatcgtattattgactggtaatttaggtgcaggcaaaacaactcttacaaaaggtattgcaaagggattagacataaaacaaatgattaagagcccaacttacactattgttagagaatatgaagggcgtgtaccactttaccatttggatgtttatcgtattggagatgatcctgattctattgacttagatgacttcttgtttggtcaaggagtaacagttattgaatggggagagttgcttagtgataaccttatcaataactacttagaaattgttattacgaggagcaatcaaggacgtcaagttcagttagaagcttatgggcatcgcgcaagagaaattattgaggcgattcaagatgtc

SEQ ID NO: 13934 - protein, 169 aa, Streptococcus agalactiae; identical to SEQ ID NO: 752

SEQ ID NO: 13935 - DNA, 558 bp, Streptococcus agalactiae
atgggcatcgcgcaagagaaattattgaggcgattcaagatgtctaaacaatttgctgttgattttatagaagcttcgagagaggaagcatctgcgcttcttgaatttttaaatactgttactgaggaaacagattttattttgcatacggtgagcaatcaactatctttgccagaaatggaaacgtttattgaaaataccttaataacgaaaaattgcatttgtttgattgctaaattaaaaaataaagtgatcggcttgataacaatcattagtcagtctgatattgaaattgaacacattggggatctttttattgctgttcagaaggattattgggggtatggtattggtcatattctcatggaagaagcaatagaatgggcgtcagataacgatattacacgccgcttagaactatcagtccaaggacgtaatgaacgtgctattcacctctaccaaaaattcagttttgaaatagatgggcttcaaacaagaggtattaaaagagaaaatggagaatttctagacatttacagaatgagtaagttgatagat

SEQ ID NO: 13936 - protein, 186 aa, Streptococcus agalactiae; identical to SEQ ID NO: 5126

SEQ ID NO: 13937 - DNA, 1305 bp, Streptococcus agalactiae
atgaaaatttggaaaaaaataaccttaatgttttctgcaattattttaacaacagtaattgcattgggagtctatgttgcctcagcttataatttttcgactaatgaattgtctaagacttttaaagattttaagctagctaaatcaaaaagtcatgctattgaagaaacaaagccgttttcaatactattaatgggtgtggacacaggttcagagcatcgaaaatctaagtggtcaggaaatagcgattctatgatcttagtcactataaatcctaaaactaataaaacaacgatgacaagcttagaacgtgacgtattgattaaattgagtggtcccaaaaataatggacagactggcgtagaagcaaagctaaatgcagcctatgcttctggtggtgcggaaatggcattgatgactgttcaagacttattagatattaatgttgattactttatgcaaattaatatgcaaggattagttgatttggtcaatgctgttggtggtataacagtaactaataaatttgactttccaatatcaattgctgccaatgaaccagagtacaaggctgttgttgaaccagggacacataaaataaatggagaacaagcacttgtttattctcgtatgcgctatgatgatccagagggagattatgggcgtcaaaaaagacaacgtgaagtaattcaaaaagtccttaaaaaaatattggcgttaaatagtattagttcatacaaaaaaattctttccgcagtaagtaataacatgcaaactaatattgagatatcatcaaaaacgattcctaatttgttagcttataaagattcattggaacatattaaatcttatcagttgaagggtgaagacgctactctatcagatggtggctcttatcaaattttaactaagaaacatctacttgcagttcaaaatagaattaagaaagagctggataaaaagcgtagtaaaactctgaagacaagcgcgattctatatgaagattactatggtactactgctagtaatgattcttctacttattcatcaacacaagagaataattataatacaacaccttattcagaagcaccaccaagttacagtggtaatactacttatagttctgagactaatcaaacaactcatcaaagttactataatagtagcactcctgctagtaactatagcagtaacactaacacaggtcaggctgattcaagtggaagtgttaataattataacggggctgcaacgcctaatccaaacacaggaacgcaaccagtaccaagtcaaactaatcca

SEQ ID NO: 13938 - protein, 435 aa, Streptococcus agalactiae; identical to SEQ ID NO: 5128

SEQ ID NO: 13939 - DNA, 294 bp, Streptococcus agalactiae
atgaaaataggtcgtttaattgcactaggtttagttagtttaggagcgcttgaactttacaaaaatagaaaaactatcaaggattcctatcaaaatacaaaaaatgagacagattcagctaaattaaaattagaacgtatcaaaaatgatcttgctattattagtcaggaaaaagaaaaaatcagattaatttctcaagaactcaatcataaattccaagtgtttaataaagatattcaacctcgtttagaagaaattaatcaacgcatggctaaatatcaagagaaagacgaa

SEQ ID NO: 13940 - protein, 98 aa, Streptococcus agalactiae; identical to SEQ ID NO: 758

SEQ ID NO: 13941 - protein, 417 aa, Streptococcus agalactiae
ATGGATAATTGTATTTTTTGTAAAATCATCAGTGGAGAAATCTCTTCATCAAAAGTTTATGAAGATGATGAAGTATTAGCTTTTCTCGACATTACACAAACTACGACTGGGCACACCCTTCTTATTCCTAAAAAACATGTTCGAAATGTGTTAGAGATGGATGAAAAAACTGCACAGATAACCTTTGAACGCTTGCCTAAAGTGGCGCGTGCTGTCCAAGCTGCTACAAAAGCCAAAGGAATGAATATTATTAACAACAATGAGGAAATTGCTGGACAAACTGTTTTTCATGCACACGTCCACCTTGTTCCCCGCTTTGATGAATCAGACGGTATCAAAATTCACTACACTACTCATGAACCCGACTTTGAGGCACTTGCAAAATTAGCCAAAGAAATTAGAAAAGAGATTCAATTA

SEQ ID NO: 13942 - protein, 139 aa, Streptococcus agalactiae; identical to SEQ ID NO: 5132

SEQ ID NO: 13943 - protein, 500 aa, Streptococcus agalactiae
TTGAAATTAAATAAAATCATATTATCTACTGCAGCTCTTACTGCTCTCTTTTAGGATATAATAGCGTTACTGCGGATACATATAATAACTATCAGCCACATAGATCAAATAATATGGATTTAACTGAGGAATATAACTATAATAACCAGATAGAACTTCAGGAGCGTATAAAAAACCTAAATATACCTTTTAAAGAAAAACTTGCCTTACTCAGAAAGGTTAAATCAAGACAAGATTCTTATGTATTAGACACATTAAGAAAAGAAGTTGAAAATAAAAACAGTGAGTATTCAGAACTAGAGCAAGAATACCAAAGAATTTCGGCTCTTATTAATGCTAAGTTTCCGCAAGGGAAATCTAGTTTAGCAGAAAAATTACATAAAGAACTAATTTGGGACTTGGATGGTGTCAAATATGATGAGGGGATTTCTAAGAGAACTACTCTAAAAAAATTAGAAGGTAAACTCAACGAATATACTAAAAAATACAGTTATTTATTC

SEQ ID NO: 13944 - protein, 167 aa, Streptococcus agalactiae
MKLNKIILSTAALTALFLGYNSVTADTYNNYQPHRSNNMDLTEEYNYNNQIELQERIKNLNIPFKEKLALLRKVKSRQDSYVLDTLRKEVENKNSEYSELEQEYQRISALINAKFPQGKSSLAEKLHKELIWDLDGVKYDEGISKRTTLKKLEGKLNEYTKKYSYLF

SEQ ID NO: 13945 - protein, 150 aa, Streptococcus agalactiae
TTGAAAATAACTTTAAACCTATTTTGTCCGCTTTTACATCTAATTGAAATGCCAAGCTACCCCATGCTCCCATTATGTTTACAAAAAGCACCTCCATCACTCATCGGACAAAAAAAGACACCTCAAAAAGGTGTCTTTTTAGTATCAATA

SEQ ID NO: 13946 - protein, 50 aa, Streptococcus agalactiae; identical to SEQ ID NO: 5136

SEQ ID NO: 13947 - protein, 723 aa, Streptococcus agalactiae
ATGTTAAAAATTGAAAATGTTACAGGGGGGTATGTTAATATCCCAGTTTTAAAAAATATTTCTTTTGAAGTAAATGATGGAGAGTTAGTTGGATTAATTGGGCTTAATGGTGCAGGAAAATCAACCACTATTAACGAGATTATTGGTATTTTGAGACCCTATCAAGGAGATATTACCATTGATGGCATTAGTCTTGAAGCCAACCAAGAACTTTATAGAAAGAAAATAGGCTTTATTCCTGAGACACCAAGTCTCTATGAGGAACTAACTCTCAGAGAACATTTAGAAACGGTAGCTATGGCGTATGATATTGCCACCGATGAAGTTATGGCACGTGCGCAAAAACTATTAGAGATGTTTCGTCTAACAGATAAATTAGACTGGTTTCCAATGCATTTTTCAAAGGGAATGAAACAAAAGGTTATGATTATCTGTGCTTTTGTTGTATCTCCAAGTTTATTTATTGTTGATGAACCATTTTTAGGTTTGGATCCACTAGCTATTTCAGATTTGATTAATCTTCTAGCAGAAGAAAAAGCTAAAGGGAAATCTATTTTGATGTCAACACACGTATTAGATTCTGCCGAAAAAATGTGTGATCGTTTTGTTATTTTACATAAAGGAGAAATACGGGCAGTTGGAACCCTAGAGGAATTACGGGCTATTTTTGGAGACAGTAATGCTAATTTAAATGACATCTACATAGCTCTGACAAAAGAGGTG

SEQ ID NO: 13948 - protein, 241 aa, Streptococcus agalactiae; identical to SEQ ID NO: 5138

SEQ ID NO: 13949 - protein, 1032 aa, Streptococcus agalactiae
ATGAAAAAGTTATTTAATAAACGTCGAAGTCTCTTTTTAACTCAAAATAGTAAATATTTGAGATACGTCTTTAATGATCATTTTGTATTAGTATTAATGTTTTTGTCAGGTTTTTTGTTATATCAGTATAGCCAGTTACTAAAAGACTTTCCAAAAACACATTGGCCAATTATCGTGATTGTGTCAATCATTATCTTAATGTTACTAGCGATGGGGGAAATAGCCAGCTATTTAGAACCGGCTGATAAACAATTTTTACTTATAAAAGAAGAAGCAATAAAGGAAATTATAAATTCTGCTAAAAAACGGACTTATATCTTTTGGTTGGTTGTTCAAACCTTATTTTTAGTATTAATATCACCAATTTTGATAAAGTTAGGCTTGTCAGTTTTTATGATTACATTGTTAATTTTTGGTCTAGGAATAATCAAATGGTTGGTGATAACTTACAAGGTAAAGGTCTTTTATAACAATCAAAATTTGAACTGGGATGCAGCTATAAATCATGAGCAGGAAAGAAAACAGGCTATATTAAAATTTTTCTCTTTGTTTACAAATGTTAAGGGAATTTCGACAAGTGTAAAACGTCGTTCATTTTTAGATGTTATTTTAAAACTTATTTCTAAAACGCCATCGCGTTTATGGACTAACTTATTTGTGAGGGCATTTCTAAGAAGCTCAGATTATCTTGGTTTAACCATAAGGTTGGTAACTTTAAATATCTTATCAGTCATCTTTGTTAACGAAACCTACCTCGCCCTTGCTCTGGCATTTGTATTTAACTACTTATTATTGTTCCAATTATTAGCTTTAGGTCACCATTTTGATTATCAATACATGAATCAGCTCTATCCAGTTAGATTAAATGCTAAAGCAAGTCAGCTAAAAGGTTTTCTCAGAGTGTTATCATATGCTGTGACAGTAATTGATATCATACTTATAAGAGAATTGAAACCTGTTATATTATTGATAGTTTTGATGTTAATTGTGACGGAATATTACATCCCTTACAAAATAAAGAAGATGATTGAC

SEQ ID NO: 13950 - protein, 344 aa, Streptococcus agalactiae
MKKLFNKRRSLFLTQNSKYLRYVFNDHFVLVLMFLSGFLLYQYSQLLKDFPKTHWPIIVIVSIIILMLLAMGEIASYLEPADKQFLLIKEEAIKEIINSAKKRTYIFWLVVQTLFLVLISPILIKLGLSVFMITLLIFGLGIIKWLVITYKVKVFYNNQNLNWDAAINHEQERKQAILKFFSLFTNVKGISTSVKRRSFLDVILKLISKTPSRLWTNLFVRAFLRSSDYLGLTIRLVTLNILSVIFVNETYLALALAFVFNYLLLFQLLALGHHFDYQYMNQLYPVRLNAKASQLKGFLRVLSYAVTVIDIILIRELKPVILLIVLMLIVTEYYIPYKIKKMID

SEQ ID NO: 13951 - DNA, 798 bp, Streptococcus agalactiae
gtgacaatatcaaatcaagaattgacgcttactcccttaagaggaaaaagtggcaaagcctatattggtacttatccaaatggtgaacgtgtctttgtcaaatataatacgacacctattttgccagccttagctaaggaacagattgcgccacaactactgtgggcacgccgtacaagtaatggcgatatgatgagtgctcaagaatggttagatggtcgaacattgactaaagaagatatgggtagtaaacagattattcatattttactgcgcctgcacaagtctcgtcccttagtaaatcaactgttacaattagggtataaaattgaaaacccttatgatttgttgatggattgggaaaaacaaactcctattcaaatccgagaaaacacttatttgcaatctattgtgactgagttaaagcgtagtttacctgagtttcgaacagaggttgcaacaatcgttcacggagatatcaaacatagcaactgggttattacaacaagtggtttaatttatttggttgattgggattctgttcgtttaacagatcgcatgtatgacgttgcatatattttaagtcattatattccacaaaaacactggaaagattggctgtcttactacggttataaagataatgagaaagtctggagcaaaattatttggtatgggcaattttcatatttatcacagataatcaaatgttttgataaacgagatatggagcatgtcaatcaagaaatttatgaattacgaaagtttagagagttaattaaaaagtataatgcgagt

SEQ ID NO: 13952 - protein, 266 aa, Streptococcus agalactiae
MTISNQELTLTPLRGKSGKAYIGTYPNGERVFVKYNTTPILPALAKEQIAPQLLWARRTSNGDMMSAQEWLDGRTLTKEDMGSKQIIHILLRLHKSRPLVNQLLQLGYKIENPYDLLMDWEKQTPIQIRENTYLQSIVTELKRSLPEFRTEVATIVHGDIKHSNWVITTSGLIYLVDWDSVRLTDRMYDVAYILSHYIPQKHWKDWLSYYGYKDNEKVWSKIIWYGQFSYLSQIIKCFDKRDMEHVNQEIYELRKFRELIKKYNAS

SEQ ID NO: 13953 - DNA, 633 bp, Streptococcus agalactiae
atgcgagttagaaaacgtaagggtgcagaggaacacttagaaaataatccgcactatgttatttcaaatccagaagaagccaaagggcgttggcatgagatttttggaaataataaccccattcacatagaagttggttccggaaaaggggcttttatcactggtatggcagagcaaaatccagatatcaattatattggaattgatattcaattgtcagtgctttcctatgctctggataaagttctagatagcggtgctaagaatatcaaattactattagttgatggttctagtctatcaaactactttgatactggcgaagttgatttgatgtatcttaactttagtgatccatggcctaagaaaaagcatgagaaacgtcgattgacctataagactttcttggatacctataaagacatacttcctgagcagggggaaattcattttaaaacagataatagaggtttatttgaatatagccttgctagcttttctcaatacggtatgactttaaaacaagtttggttagatttacatgcaagtgattaccagcaaaatatcatgactgagtacgaacgcaaattttcaaataaaggacaggtcatctatcgtgtagaagcacgattt

SEQ ID NO: 13954 - protein, 211 aa, Streptococcus agalactiae; identical to SEQ ID NO: 770

SEQ ID NO: 13955 - DNA, 381 bp, Streptococcus agalactiae
atgggtggcgactatgtgctcagtattttaattgataaacccggaggcattacggttgaagatacagcacaattgacagacgttgtaagtcccttacttgacacaattcaaccagatccatttccagaacagtatatgcttgaagtctcaagtcctgggttggaaaggccacttaaaacagcagaagcattatcaaatgctgttgggtcttatatcaatgtaagtctgtataaatccattgataaagttaaaatatttgaaggtgacttattatcatttgatggtgaaaccttgacaattgattatatggacaaaacacgtcataaaactgtagatattccctatcagacggttgcaaaagcccgtcttgcggttaaactt

SEQ ID NO: 13956 - protein, 127 aa, Streptococcus agalactiae; identical to SEQ ID NO: 772

SEQ ID NO: 13957 - DNA, 1137 bp, Streptococcus agalactiae
atgctagaagccttccgtattttggaagaagaaaaacacattaataaagaagatattattgatgcagttactgagtcactaaaatctgcctataagcgtcgttatggtcaatcagaatcatgcgttattgaatttaacgagaagaaagcagactttaccgtctatactgttcgtgaagttgttgatgaagtttttgatagccgtttggaaattagcctaaaagacgcacttgctattagctcagcgtatgaacttggtgataagattcgctttgaggaatctgttacagaatttggacgcgtggcagctcagtcagcaaaacaaactattatggaaaaaatgcgtcgtcaaatgcgtgaagtaaccttcaatgaatacaaacaacacgaaggtgaaattatgactggtactgttgaacgatttgaccaacgttttatctatgtcaatctcggttcactcgaggcgcaattatcgcatcaagatcagattcctggggagagctttaaatctcacgatatgattgacgtttatgtctataaagtggagaataatcctaaaggtgtcaacgtttttgttagccgtagtcatccagagtttatcaaacgcattatggagcgagaaattccagaagtatttgatggaactgttgagattatgagcgtctctcgtgaggctggagatcgtactaaagttgctgtacgcagtcataattcaaacgttgatgcgattggaacaattgttggacgcggtggaagtaacattaaaaaagttatcagtaatttccatcctaaacgcgttgatgctaaaacaggattggagatcccagttgaagaaaacattgatgttattcaatgggttgaagatccagcggaattcatttacaatgctattgcaccagccgaagttgatatggtactttttgatgatgaagatacaaaacgtgctactgtagttgttccagatagcaagttatcgctagctattggtcgccgaggacaaaatgtgcgtttagcagctcatttgactggctatcgtattgatattaaatctgcaagtgaatacgaaaaaatggaagcgcaagaacttcaaactgaggaagtagctcaagaatctgaagttatttcagataaggcagaa

SEQ ID NO: 13958 - protein, 379 aa, Streptococcus agalactiae; identical to SEQ ID NO: 774

SEQ ID NO: 13959 - DNA, 294 bp, Streptococcus agalactiae; identical to SEQ ID NO: 5153

SEQ ID NO: 13960 - protein, 98 aa, Streptococcus agalactiae; identical to SEQ ID NO: 776

SEQ ID NO: 13961 - protein, 300 aa, Streptococcus agalactiae; identical to SEQ ID NO: 9543

SEQ ID NO: 13962 - protein, 100 aa, Streptococcus agalactiae; identical to SEQ ID NO: 778

SEQ ID NO: 13963 - protein, 2724 aa, Streptococcus agalactiae
GTGGTTGAGCAAGCTCAATCGCTTGGCTTACCTGTAAAAAGTCATGCTTCTAGCGTTGAAGAAAATGATGCTACACGTATTGTTGAGAGTTTTAGCTCTTCTAAAACTAAAGCTCCAACAAATTCTGTTCAAACTAATCAAGGTGTGAAAACAGAATCTAAAACTGTTGAAACCAAACAAGGCTTGTCCGATGATAAACCTTCAACTCAACCTGTAGCTAAACCGAAACCACAAAGTCGTAACTTTAAGGCGGAGCGCGAGGCTCGTGCTAAAGCTGAAGCGGAGAAGCGTCAACATAATGGGGATCACCGTAAGAATAATCGCCATAATGATACACGCTCTGACGACAGACGCCATCAAGGTCAAAAGCGTTCAAATGGTAATCGTAATGATAACCGACAAGGTCAGCAAAATAACCGTAATAAAAATGATGGGCGTTATGCTGATTATAAACAGAAACCCCAAACGCGTCCTCAGCAACCTGCAGGCAATCGCATTGACTTTAAAGCTCGAGCAGCAGCTTTGAAAGCTGAGCAAAATGCTGAATACTCACGTCATAGTGAGCAGCGTTTCCGTGAAGAGCAAGAAGCCAAACGTCAAGCAGCTAAGGAGCAAGAACTAGCTAAAGCAGCAGCGTTAAAAGCGCAAGAAGAAGCTCAAAAAGCTAAGGAAAAACTTGCTTCTAAACCTGTTGCTAAGGTAAAAGAAATTGTCAATAAAGTAGCCGCTACGCCATCACAGACAGCAGATAGTCGTCGTAAAAAACAAACTCGTTCTGATAAGTCTCGTCAATTTTCAAATGAAAATGAAGATGGTCAAAAGCAAACAAAAAATAAGAAAAACTGGAATAATCAAAACCAAGTGAGAAATCAAAGAAATAGTAACTGGAATCATAATAAGAAAAATAAAAAAGGTAAGACTAATGGAGCTCCAAAACCAGTAACAGAGCGTAAATTCCATGAATTACCAAAAGAATTTGAATATACTGAGGGCATGACCGTTGCGGAAATTGCAAAACGTATTAAACGCGAACCAGCAGAAATTGTTAAAAAACTCTTTATGATGGGAGTTATGGCAACGCAGAATCAATCATTAGATGGAGACACTATTGAGCTATTGATGGTTGACTACGGGATTGAAGCACATGCTAAGGTTGAAGTTGATGAAGCTGATATTGAACGCTTCTTTGCAGATGAGGATTACCTTAATCCTGATAACTTAACGGAACGTCCGCCTGTTGTTACTATCATGGGACACGTTGACCATGGTAAAACAACTCTTCTTGATACTCTACGTAATTCACGTGTCGCTACTGGCGAAGCTGGTGGAATTACTCAACATATTGGTGCTTATCAGATTGAAGAAGCTGGCAAGAAAATTACTTTCTTGGATACACCAGGGCATGCGGCCTTTACTTCTATGCGTGCGCGTGGTGCATCAGTAACTGATATTACTATCCTTATCGTTGCCGCTGATGATGGTGTCATGCCGCAGACAGTTGAGGCAATTAATCACTCTAAAGCTGCGGGTGTCCCAATTATTGTTGCTATCAACAAAATTGATAAACCTGGTGCAAATCCAGAACGCGTTATCAGTGAATTAGCTGAGCATGGTGTCATCTCTACTGCATGGGGTGGTGAGTCTGAATTTGTTGAAATTTCAGCTAAGTTTGGTAAAAATATTCAAGAATTACTTGAGACAGTTCTTTTAGTTGCTGAAATGGAAGAATTAAAAGCAGATGCAGATGTTCGTGCTATTGGTACTGTTATTGAAGCCCGTCTTGATAAAGGTAAGGGAGCCGTTGCAACGCTTCTTGTCCAACAAGGTACTTTAAATGTACAAGATCCAATCGTTGTTGGTAATACATTTGGACGTGTTCGTGCGATGACTAATGATCTTGGGCGTCGTGTCAAAGTTGCGGGTCCATCTACACCAGTTTCTATTACTGGTTTGAACGAAGCTCCAATGGCTGGTGATCATTTTGCTGTTTATGCAGATGAGAAAGCTGCGCGTGCTGCAGGTGAAGAACGTGCAAAACGTGCTCTCTTAAAACAACGCCAAAACACGCAACGTGTTAGCCTCGAGAACTTATTTGATACCCTTAAAGCTGGTGAAGTTAAGTCAGTTAATGTTATTATCAAAGCTGATGTGCAAGGTTCTGTAGAAGCACTTGCAGCTTCTCTCCTTAAGATTGATGTTGAAGGAGTAAAAGTTAATGTTGTTCACTCAGCAGTTGGTGCTATTAATGAGTCTGATGTAACTCTTGCTGAAGCATCAAATGCTGTTATTATAGGATTTAACGTACGCCCTACTCCACAAGCTCGTCAACAAGCCGATGCTGATGATGTCGAAATTCGTCAACATAGCATTATCTATAAAGTTATCGAAGAAGTTGAAGAAGCGATGAAAGGTAAACTTGATCCTGAATACCAAGAAAAAATCCTTGGTGAAGCCATTATTCGTGAGACCTTTAAAGTTTCAAAAGTGGGAACTATTGGTGGATTTATGGTTATCAATGGTAAAGTTACTCGTGATTCAAGTGTTCGTGTTATCCGTGATGGTGTTGTCATTTTTGATGGTAAATTAGCAAGTCTTAAACACTATAAAGATGATGTTAAAGAAGTCGGCAATGCTCAAGAAGGTGGTCTAATGATTGAGAATTATAATGATCTCAAAGAAGATGACACTATTGAAGCATACATTATGGAAGAAATTAAACGTAAA

SEQ ID NO: 13964 - protein, 908 aa, Streptococcus agalactiae
MVEQAQSLGLPVKSHASSVEENDATRIVESFSSSKTKAPTNSVQTNQGVKTESKTVETKQGLSDDKPSTQPVAKPKPQSRNFKAEREARAKAEAEKRQHNGDHRKNNRHNDTRSDDRRHQGQKRSNGNRNDNRQGQQNNRNKNDGRYADYKQKPQTRPQQPAGNRIDFKARAAALKAEQNAEYSRHSEQRFREEQEAKRQAAKEQELAKAAALKAQEEAQKAKEKLASKPVAKVKEIVNKVAATPSQTADSRRKKQTRSDKSRQFSNENEDGQKQTKNKKNWNNQNQVRNQRNSNWNHNKKNKKGKTNGAPKPVTERKFHELPKEFEYTEGMTVAEIAKRIKREPAEIVKKLFMMGVMATQNQSLDGDTIELLMVDYGIEAHAKVEVDEADIERFFADEDYLNPDNLTERPPVVTIMGHVDHGKTTLLDTLRNSRVATGEAGGITQHIGAYQIEEAGKKITFLDTPGHAAFTSMRARGASVTDITILIVAADDGVMPQTVEAINHSKAAGVPIIVAINKIDKPGANPERVISELAEHGVISTAWGGESEFVEISAKFGKNIQELLETVLLVAEMEELKADADVRAIGTVIEARLDKGKGAVATLLVQQGTLNVQDPIVVGNTFGRVRAMTNDLGRRVKVAGPSTPVSITGLNEAPMAGDHFAVYADEKAARAAGEERAKRALLKQRQNTQRVSLENLFDTLKAGEVKSVNVIIKADVQGSVEALAASLLKIDVEGVKVNVVHSAVGAINESDVTLAEASNAVIIGFNVRPTPQARQQADADDVEIRQHSIIYKVIEEVEEAMKGKLDPEYQEKILGEAIIRETFKVSKVGTIGGFMVINGKVTRDSSVRVIRDGVVIFDGKLASLKHYKDDVKEVGNAQEGGLMIENYNDLKEDDTIEAYIMEEIKRK

SEQ ID NO: 13965 - protein, 348 aa, Streptococcus agalactiae
ATGGCTAATCATCGTATTGATCGCGTTGGAATGGAAATTAAACGTGAAGTCAATGAGATTTTGCGTCTCCGAGTTAATGATCCACGTGTACAAGATGTCACAATTACTGATGTTCAGATGTTGGGTGACCTTTCAATGGCTAAAGTATTTTATACTATTCATTCGACACTTGCTTCTGATAATCAAAAAGCACAAATTGGTTTAGAAAAAGCAACTGGTACTATTAAGCGTGAACTTGGCAAAAACCTTACTATGTATAAAATACCAGATTTACAATTTGTTAAAGATGAATCTATTGAATACGGAAATAAGATTGATGAAATGTTGCGAAATCTAGATAAAAAAGAT

SEQ ID NO: 13966 - protein, 116 aa, Streptococcus agalactiae; identical to SEQ ID NO: 786

SEQ ID NO: 13967 - protein, 1002 aa, Streptococcus agalactiae
TTGAAACCGTCCTTCAAAAAACTATTGCTACTATTTAGTATTATCACCATTTTATCCATCGCCTGTACACCACATGCAAAAGCAAGTGGGCGTTCATGGAAAAGTTGGTTTATCGAACAATACTTTTGGCTAAAGCGCGATAAAAGTTATTATAAAGTTCAAGATGAAAGCTCATTTCAAAAGTACTTAAATGCTAGCCGTGAACAATCTGATAAGGGTTATTACTTAGACCCAAACTCTGTTAATGGAGGGCTTGTTCAAGAGAGACTTTTTGATATGCAAGTCTATTCTTGGAATGACAACGGTAAAGCTAATCAAAAGACCATTTTCTATTTAGCTGGTGGCTCTTACTTAAATAATCCAACGCCTTACCATATCAGCATGCTTAAGACGCTCTCAACTAGTCTTGATGCAAAAATTATTTTACCAATTTATCCAAAAACTCCTCGTTATACCTATGATTATGCTATCCCTAGATTGGTTAACCTTTATAGACACTTTCATGAAAAAAACGCTAATCTCACTTTGATGGGTGATTCAGCTGGCGGAGGATTAGCACTAGGATTAGCGCATGCATTGTCTCACCAATCAGGGCAAGAGGCTATTCCTCAACCTAAAAATATTATCCTCTTATCTCCATGGCTAGATGTGACAATGAAACATCCAGAAATTCCCAAATACGAAGATACCGATCCTATCCTATCTGCTTGGGGTCTCGCACGTGTAGGTGAAATTTGGGCAAATGGTTCTAATAATACTAACCATACATATGTTAGTCCTAAAAATGCCCCTGCTACTAAACTCGCTCCTATTACGTTATTTACTGGAACACGAGAAATATTCTTCCCAGATATTCGCGATTATGCTGCACAACTCCAAGCAGCTAATCACCCCGTTAACTATATTGCACAAGAGGGAATGAATCATGTTTATCCAATTTACCCTATTGAAGAAGCTAAAACAGCACAGTATCAAATGATTGATATCATCAATAAAACTCCT

SEQ ID NO: 13968 - protein, 334 aa, Streptococcus agalactiae; identical to SEQ ID NO: 788

SEQ ID NO: 13969 - protein, 414 aa, Streptococcus agalactiae
ATGACTATTTCAAACGCAGAATGGGAAATTATGAGAGTGGTTTGGGCACAGCAGAATACAACCAGTAATGAGATACTAGCAGTTTTACTAGAGAAGTATGATTGGACTCCTTCAACTGTCAAAACCTTATTAAGAAGGCTCTTAGATAAAGGCTACGTGAGCAGAGAAAAAATGGGAAAAGGATTTAGCTATTCTTCTTTAATTGATGAAGATTTAGCTATGATGTCAGAGGTAGATAGTGTATTGCAGAAAGTTTGCCAGACCAAACATGTTGCTATTGTTAGACACTTATTGGAAAGTATACCAATGACAGAGAAGGATCGATTAAATTTGCAAGCATCACTAGAAGCTAAGAAAGGCAAAACACTTGAACGTGTAGCTTGTAATTGCATTCCTGGTCAGTGTCAATGCCAT

SEQ ID NO: 13970 - protein, 138 aa, Streptococcus agalactiae
MTISNAEWEIMRVVWAQQNTTSNEILAVLLEKYDWTPSTVKTLLRRLLDKGYVSREKMGKGFSYSSLIDEDLAMMSEVDSVLQKVCQTKHVAIVRHLLESIPMTEKDRLNLQASLEAKKGKTLERVACNCIPGQCQCH

SEQ ID NO: 13971 - DNA, 2232 bp, Streptococcus agalactiae
atggctaatagaaaagaaacatttttgattgatgggatgacttgtgcatcttgtgctttaacgatagaaaaagctgtcaacaagttagaccatgtggatagtgcagtagtaaatttagcaacagagaaaatgacagttacgtttgatgatacaaccttatcgccaaacgtgattgaagagtgtgtttctgagactggatacgaagcatcgcttttcaaagaggaaacttctaaaagccaatctgaacggcaccaattagcaattgaaaagatgtggcatcgcttttggatgtcagcagttgcaactatacctcttctctatatttccatggggccaatgattaacttatggttaccatcatttttgatgccagataagggacctctaaactatggtgtgatacaattattgttaacactaccggtgatgtattttgggcgtatcttttaccaaaatggttttaaagcactttttaaaaggcatcccaatatggattcattagttgctatagccacaacagcggctttcatttatagcttatatggattgtacgaaatattacagggtgacatacactacgctcaccagctttatttcgaatctgttgcagttattttaacacttattactctaggaaaatattttgaaatattatccaaagggcgtacttcggcctcaattgaaaaattattaactttatcagcaaaagaagcaagagttatcaaagatggtgaagactatatggttcctttggataaagttaaaataggtgaaacaattcttgtcaaacctggagaaaaaattcctcttgatggccatgttgtagcaggagaatcaagtattgatgaatccatgttaacaggtgaaagtattccagttgaaaaaaaggttggtagtaaggtttacggtgccagcattaatgggcaaggtagcttaacgattttcgttgaaaaagaagctggcggttcccttctatcacaaattattaacttagtagaagttgcacaggcaagtaaggctccaattgctaacttagcagacaaagtatcaggagtctttgtcccttttgttattgtcattgcaattttatcaggtttgagttggtacttaattctggggcaaagttttgccttctctctgaagattatgattgcagtcttagtgattgcttgtccatgtgctttagggttagcaactcctacagctattatggtggctagtggtaaagcagctgagaatggtattttatttaaaggtggtgaagtgttggaaaaggctcaccacattgatacaatagtttttgataaaacaggaaccttgaccaaagggaaaccagaagtagttgctatcaaaacatatggggtagataaagaggagtttttaggtcaagtagcatcagtagaaaaactttcaaatcatccacttagccaaacaattgttaacaaagcaaaagagaaagaacttcccttaagggaagtcatggcttttaaaaatattttgggttacggtttgagtgcaattattaatggtaaaactatgcttgtaggtaatgctaacttaatgactaagaacgatgttaatttagatttagcaaaggctgatatagaaatagctcaagaagaagcacaaactgtggtttacgtttccgaaaatggagtgttgagcggtttaataactttaacggaccagctaaagacagatagccaagaaacagttaagcagttacaaagattaggatttaatttagttttacttactggtgataataaggctagtgcagatgccatagcacaaaaattgggtatcacgacagttgtttcagaagttttacctgatcagaaagcaaacgttattttagaacttaaagaaaaaggcggacagattgcgatggttggtgatggcatcaatgatgctcctgcgctagctagcagtgatgtaggtatctctatgagttctggaacagatattgctattgaatcagcagatatcgtgttgatgaaacctgagttaacagatctcttaaaagcaatgactatcagtaaacaaacgattcaaattattaaggaaaatttattttgggctttcttttataacgttttagcgattccagtggcaatgggtgttttacatctttttggtggtcccttactcaatcctatgttggcaggcttagctatggcgtttagttcagtttcagtagttttaaacgcacttcgcttaaaagtcttaaaa

SEQ ID NO: 13972 - protein, 744 aa, Streptococcus agalactiae; identical to SEQ ID NO: 5170

SEQ ID NO: 13973 - DNA, 204 bp, Streptococcus agalactiae
atgaaacatacctatcgagttagtggcatgaaatgtgatggttgtgccaaaacagtttctgataagttatcaagtgtgatgggtgttgacgaggttaatgttgatttgactaaaaatcaagttgtcgtaagtggaaaaacattcaaatgtcttttaaaacgttctttaaaagacacaaagtattcactagaagaggaaataaat

SEQ ID NO: 13974 - protein, 68 aa, Streptococcus agalactiae
MKHTYRVSGMKCDGCAKTVSDKLSSVMGVDEVNVDLTKNQVVVSGKTFKCLLKRSLKDTKYSLEEEIN

SEQ ID NO: 13975 - DNA, 612 bp, Streptococcus agalactiae; identical to SEQ ID NO: 5173

SEQ ID NO: 13976 - protein, 204 aa, Streptococcus agalactiae; identical to SEQ ID NO: 5174

SEQ ID NO: 13977 - DNA, 810 bp, Streptococcus agalactiae; identical to SEQ ID NO: 5175

SEQ ID NO: 13978 - protein, 270 aa, Streptococcus agalactiae; identical to SEQ ID NO: 5176

SEQ ID NO: 13979 - DNA, 2640 bp, Streptococcus agalactiae
atgacaaacaagaataaattacttttaattgatggctcatctgtagcctttcgtgctttttttgctctttataatcaaattgaccgctttaaaaacaattctggacttcatactaatgccatatatggtttccatttgatgttgaatcatattttaggtcgtgtccagcctagtcatattttagtggcttttgatgctggaaaaactactttccgtacggaaatgtatgcagattataaaggtgggcgtgctaaaactccggatgaatttcgtgaacaatttccttatattcgtcaacaattagatgtcttaggcatcaaacattatgaattggaacattatgaagccgatgatatcattggtactcttgcaaaacaagccgaagctagtaaagagcattttgatataacggtggtttctggggataaagatttaattcaattaacagacactaacacggtagtagaaatctctaaaaagggagttgctgagtttgaagaattcacgccagcttaccttatggaaaaaatgggaattacgccgagtcaatttattgatttaaaagctttgatgggagataaatcagataatattcctggggttactaaaatcggtgaaaaaactggcttgaagttgctatcagaatatggttccttagaagggatctatgaaaatattgaggctatgaaacagtctaagatgaaagaaaaccttatcaatgataaggagcaagctttcttatcaaagaccctagctacaatcaacatagcatcacctataacaatcggcttagaagatatcctttatagtggaccgcaagatataaaagccttgtctcaattttatgatgagatggattttaaacagtttaaagcagctctgggtgaggagacaagtcaggaagattttgaggttgactttactgaagtggagcaattaaaaccagaaatgttctccgataatgatttttattactttgagatgttaggtgataactaccacgtagaagatttaattgggatagcttggggaaatagcgatacaatctacgctactagtgatgtatcgttattgcaagaagctttatttaaaaaagctttatcaaaacctatcaaaacttatgattttaaaagaagtaaggtccttttaaatcgttttaatattgatttaccagagccagcctttgatactagattggccaagtaccttttgtctactactgaggataatctagtatcaacaattgctaggttatatacaaatctgccactggatactgatgatgctgtttatgggaaaggtgctaaacgcgctataccagaaaaaacacgatttcttgagcatctagctaaaaaagtaaaagttttagtggattctgaggctaatgttatgcaacagcttaaagctaatgagcaagaagaattgctgtttgaaatggagcaacctttagcgaatgttttagctaaaatggaaattcgaggtattaaggttaagaaaaataccttgaatgaaatggctattgaaaatcaaaaagtcatcgaaaccttaacacaagagatctatgaattggctgggcaagagtttaatattaattctccaaaacagttaggaaagttgttgtttgaaacgttaggtcttcctgtagaaatgactaaaaaaacaaaaacaggttattcaactgcagtagatgtattagagcgcttagctccgatttctcctcttgtaactaaaattttagagtaccgtcaaatcactaaattgcaatcaacctatattattggtttacaagattatattttagaagatggtaaaattcatacacgttatgttcaagatttgactcagacaggtcgtctttcaagttctgacccaaaccttcaaaatataccagttagactagagcaaggacggcttatccgaaaggcttttgttccatcagaagacaatgctgttttattgagttcagattattctcaaatagaattgcgcgtgttagcacatatttcaaaagacgaacatttgatcgctgcctttaaagagggagcagatattcatacttcaacagctatgcgtgtttttggtatcgaaaaacctgagaatgtcactcccaatgatcgtcgaaatgctaaggctgttaactttggaattgtttatggtatttcagattttggtctatcgcataatttaggaatacctcgtaaactagcgaagcaatatattgacacctattttgagcgttatcctggaataaaaaactatatggaaacagttgttcgtgaagcaaaagataagggttacgttgaaacacttttccatcgtcgtcgttcactaccagatattaattctcgtaattttaacattcgccaatttgcagagcgcacagcaatcaattcaccaatccaaggaagtgcagctgatattcttaaaattgcaatgataaatttagatagggtacttgataaaggtggttataaatcaaaaatgctgttgcaagttcatgatgaaattgtacttgaagtccctaacgaggagataggagcaatcaaggagttggttacaaaaacaatggagtcagcaattagtttatcggtacctttgattgcagatgagaacgcaggtgagacttggtatgaagcgaag

SEQ ID NO: 13980 - protein, 880 aa, Streptococcus agalactiae
MTNKNKLLLIDGSSVAFRAFFALYNQIDRFKNNSGLHTNAIYGFHLMLNHILGRVQPSHILVAFDAGKTTFRTEMYADYKGGRAKTPDEFREQFPYIRQQLDVLGIKHYELEHYEADDIIGTLAKQAEASKEHFDITVVSGDKDLIQLTDTNTVVEISKKGVAEFEEFTPAYLMEKMGITPSQFIDLKALMGDKSDNIPGVTKIGEKTGLKLLSEYGSLEGIYENIEAMKQSKMKENLINDKEQAFLSKTLATINIASPITIGLEDILYSGPQDIKALSQFYDEMDFKQFKAALGEETSQEDFEVDFTEVEQLKPEMFSDNDFYYFEMLGDNYHVEDLIGIAWGNSDTIYATSDVSLLQEALFKKALSKPIKTYDFKRSKVLLNRFNIDLPEPAFDTRLAKYLLSTTEDNLVSTIARLYTNLPLDTDDAVYGKGAKRAIPEKTRFLEHLAKKVKVLVDSEANVMQQLKANEQEELLFEMEQPLANVLAKMEIRGIKVKKNTLNEMAIENQKVIETLTQEIYELAGQEFNINSPKQLGKLLFETLGLPVEMTKKTKTGYSTAVDVLERLAPISPLVTKILEYRQITKLQSTYIIGLQDYILEDGKIHTRYVQDLTQTGRLSSSDPNLQNIPVRLEQGRLIRKAFVPSEDNAVLLSSDYSQIELRVLAHISKDEHLIAAFKEGADIHTSTAMRVFGIEKPENVTPNDRRNAKAVNFGIVYGISDFGLSHNLGIPRKLAKQYIDTYFERYPGIKNYMETVVREAKDKGYVETLFHRRRSLPDINSRNFNIRQFAERTAINSPIQGSAADILKIAMINLDRVLDKGGYKSKMLLQVHDEIVLEVPNEEIGAIKELVTKTMESAISLSVPLIADENAGETWYEAK

SEQ ID NO: 13981 - protein, 438 aa, Streptococcus agalactiae
ATGGTTTATCATTTTCAAAATCTAAGTGATTTTATGTTAAAAAATTATTTAACAAAAGCAAAGACCATCGCAGTTGTAGGATTGTCAGACCGTCAAGAAACTGCAGCTTATCAAGTATCAAAAATAATGCAAGAAGCAGGTTATCAAATTATTCCAGTTAATCCTAAAAATGCAGGACAGAAAATACTTGGGCAAATGACATATGCCTCACTTAAGGATGTCACTGAACATATTGATATTGTTAATATTTTTCGACGTAGCGAGTATTTACCTGATATTGCAAGAGAATTTTTAGAAGTAGACGCTGATATTTTCTGGGCTCAGCTTGGACTTGAAAGTCAAGAAGCAGAGACAATTCTAAAGCAAGCAGGACACAAACAGATTGTCATGAATAAATGTCTGAAAGTTGAATACCAAAAATTACACTCAGAAACTAAC

SEQ ID NO: 13982 - protein, 146 aa, Streptococcus agalactiae
MVYHFQNLSDFMLKNYLTKAKTIAVVGLSDRQETAAYQVSKIMQEAGYQIIPVNPKNAGQKILGQMTYASLKDVTEHIDIVNIFRRSEYLPDIAREFLEVDADIFWAQLGLESQEAETILKQAGHKQIVMNKCLKVEYQKLHSETN

SEQ ID NO: 13983 - protein, 477 aa, Streptococcus agalactiae; identical to SEQ ID NO: 5181

SEQ ID NO: 13984 - protein, 159 aa, Streptococcus agalactiae; identical to SEQ ID NO: 804

SEQ ID NO: 13985 - protein, 1563 aa, Streptococcus agalactiae
ATGAAAATATCACAATACAATAAATGGTCAATTCGCCGATTGAAAGTTGGAGCTGCATCTGTAATGATTGCTAGTGGAAGCATTGTTGCTTTAGGGCAATCTCATATTGTTTCAGCAGATGAGATGTCCCAACCTAAAACAACCATTACAGCCCCAACAGCTAACACTTCTACAAATGTAGAAAGTAGTACTGATAAGGCATTATCAAAAGTTACTACGATGGAGACAAGTTCAGAAATGCCTAAAATGCAAAATATGGCAAAAGTTGAAAAAACGAGTGACAAACCTATGATGGTGGCTACCTCTGTTAGAAAAATGATGGCAACGCCGACACCTGTAGCGATGACCAAAACGACTAGTGTAGATGAGGTAAAGAAATCAACTGATACTGCTTTTAAACAGACAGTAGACGTTCCGGCTCATTATGTTAATGCAGCAAAAGGGAATGGCCCATTTCTAGCAGGTGTAAATCAAACGATTCCATATGAAGCGTTTGGTGGAGACGGCATGTTAACGCGTTTAATCCTTAAAGCTTCAGAGGGAGCAAAATGGTCAGACAATGGTGTTGATAAAAATAGTCCATTATTACCATTGAAAGGCTTAACTAAAGGTAAATATTTCTATCAAGTTTCTTTAAATGGTAATACGACAGGTAAAGAGGGGCAAGCTCTCTTAGATCAAATTAAAGCTAATGATAAACATAGCTACCAAGCCACAATTAGAGTTTATGGTGCTAAAGATGGTAAAGTTGATTTAAAAAACATGATTAGCCAAAAAATGGTAACCATTAACATTCCTCACATTACAACTGATATGGAAGTAAAAAATTCTCTAAAGATGGCCTTTAAAGAAAAAGTAGACGTCCCAGCAAAATATGTTAGTGCTGCAAAAGCTAAAGGTCCATTTTTAGCAGGTGTTAACGAAACGATTCCATATGAAGCGTTTGGTGGAGATGGCATGTTAACGCGTTTAATCCTTAAAGCTTCAGAGGGAGCAAAATGGTCAGACAATGGTGTTGATAAAAATAGTCCATTATTACCGTTAAAAGATTTAACTAAGGGTAAATACTTCTACCAAGTCTCTCTTAATGGCAATACAGCCGGTAAAAAAGGCCAAGCTCTCTTAGATCAAATTAAGGCAAATGGAAGCCATACTTATCAAGCAACTATTACTATTTATGGTACGAAAGATGGCAAAGTTGATATGAATACTATTTTAGGACAAAAGACAGTGATGATTCATATTAATGTCGCTAAAAAAGATATGAATAGCACATCAATGATGATGAAAAAAGATAAGATGACAATGCCTATGAAGAAAGAAATGACTTCATCTAAAATAAATACCGGTATGATGATGTCTAACAACAAGATGTCAGCTAATATGCAAATGTCATCACAAGCCAAATCAAATGATAAAGCTGGTAAAAAAATGTCTATGATGTCTAAAAATTTACCTAATACAGGTGAAACAAAGCAACAAAATGTAGGTGTGCTAGGTATGCTTAGTCTAGCCTTTGCGACAGGTCTAACTGCGCTAGGCCTTAAAAAATCTAAACAAAGA

SEQ ID NO: 13986 - protein, 521 aa, Streptococcus agalactiae; identical to SEQ ID NO: 5184

SEQ ID NO: 13987 - protein, 684 aa, Streptococcus agalactiae; identical to SEQ ID NO: 5185

SEQ ID NO: 13988 - protein, 228 aa, Streptococcus agalactiae; identical to SEQ ID NO: 808

SEQ ID NO: 13989 - protein, 839 aa, Streptococcus agalactiae
ATGAAATTAAAATATTATATTGTTATTGGTTACCTTATTTCTATGTTAATAACTGTAGCAGGTGTTTTCTTTGGGCTTAATCATATGCTGATTGAGACTCGAGGTGTTTACTACATCCTTTCAGTTACAATTATTGCCTGTATCGTAGGTGGTATAGTTAATTTGTTCTTATTATCAAGTGTATTTACATCTTTGAAAAAGTTAAAACAAAAAATGAAGGATATTTCTCAAAGACGTTTTGATACAAAAGCACAAATTTGTTCACCACAAGAATTCAAGGATTTAGAGACAGCCTTTAACCAAATGTCTTCAGAGTTAGAGTCAACGTTTAAATCTCTAAACGAGAGTGAACGCGAAAAAACAATGATGATTGCACAACTTTCACATGATATCAAGACTCCAATTACCTCTATACAATCAACAGTAGAAGGTATTTTAGATGGTATTATATCTGAAGAAGAAGTTAACTATTATCTCAATACCATTTCTCGTCAAACAAACCGTCTTAACCATCTAGTTGAAGAATTAAGTTTTATTACATTAGAGACTATGTCAGACACGGCTGAACCTCATAAAGAAGAAACAATTTATCTGGATAAACTACTGATTGATATTTTATCTGAATTTCAATTGGTGTTTGAAAAAGAAAATCGGCAAGTAATGATTGATGTTGCGCCAGATGTTTCGAAATTATCTAGTCAATATGATAAATTATCACGAATTTTATTGAATTTGATTAGCAATGCAGTCAAATATTCTGATCCTGGAAGTCCCTTGACTATCAAGGCCTATTCAAATCGTCAAGATATCGTTATCGATAATTGACCAAGGCTATGGGA

SEQ ID NO: 13990 - protein, 280 aa, Streptococcus agalactiae
MKLKYYIVIGYLISMLITVAGVFFGLNHMLIETRGVYYILSVTIIACIVGGIVNLFLLSSVFTSLKKLKQKMKDISQRRFDTKAQICSPQEFKDLETAFNQMSSELESTFKSLNESEREKTMMIAQLSHDIKTPITSIQSTVEGILDGIISEEEVNYYLNTISRQTNRLNHLVEELSFITLETMSDTAEPHKEETIYLDKLLIDILSEFQLVFEKENRQVMIDVAPDVSKLSSQYDKLSRILLNLISNAVKYSDPGSPLTIKAYSNRQDIVIDILTKAMG

SEQ ID NO: 13991 - DNA, 132 bp, Streptococcus agalactiae
atgaagacaggaggacatggcctaggtctttatattgcgcgacaacttgcacatcaactgaatggtgatattttggtcgaaagtcagtatcaaaaaggcagtaagttctctttagtacttaaattacaaaaa

SEQ ID NO: 13992 - protein, 44 aa, Streptococcus agalactiae
MKTGGHGLGLYIARQLAHQLNGDILVESQYQKGSKFSLVLKLQK

SEQ ID NO: 13993 - DNA, 738 bp, Streptococcus agalactiae
atgacgaattcagaaattaaaaatgaggcaaaaactatattaagcaatcttcaaggtaagaatcaactttttttactcccgawtcttcttagkattattacgttatatatatcattttattatcaatataataatatgacactacttgatttttttgtacctcttccagtttatttcttttacacactttttattatttcagtcagttttgtaatgttagatgtcgtcaaaaatcagaaactaaacgttagattctcggacaatacttatgtattttcaagccatattttctggaaattactctcagtacttgttctaaaaggactaattttatctttcttttatctactaagtacttttggtctactaatcatcatttcaagttttaggctacttttgagtggtaaccttatccttgcccctgttttaatagttgttagtagcctaattactactaaggcagttataaaactcgttcaacaatattactcctatagtatctcaactttagtattttacactcaattagaaagtggaaactatgagggaccatctaaagtactagttgctagtcgagaactaatgaatggtaataaacttagactcttccttttagacttaagttttattggttggcatttccttacaatcttcagtttcggattagtctatatctatctccttccttaccaaactactgcgcgcttaatcttttatagaaacattacaaaaaatagc

SEQ ID NO: 13994 - protein, 246 aa, Streptococcus agalactiae
  VARIANT 28, 31: Xaa = Any Amino Acid
MTNSEIKNEAKTILSNLQGKNQLFLLPXLLXIITLYISFYYQYNNMTLLDFFVPLPVYFFYTLFIISVSFVMLDVVKNQKLNVRFSDNTYVFSSHIFWKLLSVLVLKGLILSFFYLLSTFGLLIIISSFRLLLSGNLILAPVLIVVSSLITTKAVIKLVQQYYSYSISTLVFYTQLESGNYEGPSKVLVASRELMNGNKLRLFLLDLSFIGWHFLTIFSFGLVYIYLLPYQTTARLIFYRNITKNS

SEQ ID NO: 13995 - DNA, 1140 bp, Streptococcus agalactiae; identical to SEQ ID NO: 5191

SEQ ID NO: 13996 - protein, 380 aa, Streptococcus agalactiae; identical to SEQ ID NO: 5192

SEQ ID NO: 13997 - DNA, 309 bp, Streptococcus agalactiae; identical to SEQ ID NO: 5193

SEQ ID NO: 13998 - protein, 103 aa, Streptococcus agalactiae; identical to SEQ ID NO: 5194

SEQ ID NO: 13999 - DNA, 537 bp, Streptococcus agalactiae
atgtttcacacaaaaagcctaatccagatggctatgatggctactttattggtggtacttggtttcattcctgctctaccacttggtttcattccggtccctatcgtcttacaaaacctaggggttatgatggctggtgttattttgggcggaagaaaagggagtttatctattttgctcttctttcttgtcggtttagttattcctgtattctcaggtttacgttcgactatacctgtattgacaggaccaacagctggttatgttattgcttggttgtttgttcctttgcttatctcatatggtgtaaaattagtaaataaaaagaattttatagctattttccttattgtatggctagcaggggtcctttttgtagatgtagcaggagcagtttggctggcatcttatatgaacatcccattagataaatcacttcttcaaaacttagtatttctcccaggagatacaataaaagccattatagctgctgttgttgctgttaaatataaagatagttttttcttgactgaaaaa

SEQ ID NO: 14000 - protein, 179 aa, Streptococcus agalactiae
MFHTKSLIQMAMMATLLVVLGFIPALPLGFIPVPIVLQNLGVMMAGVILGGRKGSLSILLFFLVGLVIPVFSGLRSTIPVLTGPTAGYVIAWLFVPLLISYGVKLVNKKNFIAIFLIVWLAGVLFVDVAGAVWLASYMNIPLDKSLLQNLVFLPGDTIKAIIAAVVAVKYKDSFFLTEK

SEQ ID NO: 14001 - protein, 305 aa, Streptococcus agalactiae
ATGAAATTAACAACGTTAGGTTGTTGGGGTGGTTATCCTTATAAAGATGGAGGAACCACAAGTTTTCTATTAACTGGAGAAAATAATTTTCACTTATTAATAGATGCGGGAAGTCGTTCAATCAATGAGTTAGAAAAAGAAATAAGCCCGTTGGATTTGGATGCAGTTATCATCAGTCATTATCATCCAGATCATGTAGCAGATTTGGGTGTGTTGTATCATTATCGTTTGCTATACCCTAAAGATAAATGGGAACCCAAAGTATTGCCAGTTTATGGACATAATGAGGATGATTATGAGTTTTC

SEQ ID NO: 14002 - protein, 102 aa, Streptococcus agalactiae
MKLTTLGCWGGYPYKDGGTTSFLLTGENNFHLLIDAGSRSINELEKEISPLDLDAVIISHYHPDHVADLGVLYHYRLLYPKDKWEPKVLPVYGHNEDDYEFS

SEQ ID NO: 14003 - protein, 457 aa, Streptococcus agalactiae
TTGACATTACCTAACGTTGCTCAAGGATTGCTTATCATACCAATGAGTGAGCAAGTTGGTCCCTTCAATATTACGTTTATCAAAACAGTCCACCCAGTCGTCTGCTATGCCATGAGGATTACAGAAAGAGAAACTGGTCAAGTATTAGTCTTTACAGGAGATTCTGGGTATTTTGCTGACCTTGTACCTTTTACAAAAGGCGCAGATTTATTTTTAGCAGACGTTTATCTTTACGAGGGAAATGAAAATCATATTGCACATTGATAGTAAAGAAGAGGTGAGATTGCTTATAACGCTAAAGTTAAGAAATTAGTTTTAACACATGTTCCGCAGTTTCCGGGAGAAGGAATAAACCCCGAAAATCATTGGAAGACTTCGACTACAGTCTGAAAAGTATGCAGGTGGCATCTCTGTTGATTTAGCTCAGCCACATAAATCTTGGGACTTAGGAAAACTA

SEQ ID NO: 14004 - protein, 155 aa, Streptococcus agalactiae
MTLPNVAQGIAYHTNGVEQVGPFNITFIKTVHPVVCYAMRITERETGQVLVFTGDSGYFADLVPFTKGADLFLADVYLYEGNENHIAHLTSKEAGEIAYNAKVKKLVLTHVPQFPGEGINPENHLEELRLQSEKYAGGISVDLAQPHKSWDLGKL

SEQ ID NO: 14005 - protein, 504 aa, Streptococcus agalactiae
ATGCAGAAATTTACCCAAGAAGAAAAAGAATGGTTTATGACAGAAGCTCTAAAGGAGGCAAAATCCTCCTTAGAGAAAGAAGAAATTCCTATAGGTTGTGTCATTGTAAAAGATGGTCATATTATTGGAAGAGGACATAATGCTCGTGAAGAGTTTAATAAAGCTATTTTACATGCTGAAATCATGGCTATTAACAATGCAAATGAGAAGGTAGGGAATTGGCGCTTATTAGATACTACTTTATTTGTTACTGTAGAACCTTGTGTAATGTGTAGTGGAGCTATTGGCTTAGCTAGAATTCCCCACGTTATATATGGCGCTAAGAATACGAAATTTGGAGCAGCGGGAAGTCTCTATGATATTTTAAGTGATAGCCGACTTAATCATAGAGTTGAAGTTGAAACCGGCATTTTAGAAGATCAATGCGCTAAAATAATGCAGGATTTCTTTCGAAAAGGACGACAACGCAAGAAAGAAGCTAAACTAAGTGAAAAAACTAAGATT

SEQ ID NO: 14006 - protein, 168 aa, Streptococcus agalactiae; identical to SEQ ID NO: 5200

SEQ ID NO: 14007 - protein, 1342 aa, Streptococcus agalactiae
ATGACACATATTACATTTGACTATTCAAAAGTCTTGGGTCAATTTGTAGGCGAACACGAGTTAGACTACCTACAACCACAAGTAAGTGCAGCAGATGCTTTCCTTCGTCAAGGGACTGGTCCTGGATCAGATTTTCTCGGATGGATGGACCTCCCAGAAAACTATGACAAAGAAGAATTTTCTCGCATTCAAAAAGCCGCTGAAAAGATTAAATCAGATAGCGAAGTACTCGTGGTTATTGGTATTGGTGGTTCGTACCTTGGTGCAAAAGCAGCAATTGACTTTTTGAATAATCATTTTGCTAATTTGCAAACCGCAGAAGAACGTAAAGCGCCTCAGATTCTTTATGCTGGAAATTCTATTTCATCTACTTACCTTGCCGATTTAGTTGAATACGTCCAAGATAAAGAATTCTCAGTAAATGTCATTTCAAAATCAGGTACAACAACTGAACCAGCGATTGCTTTCCGTGTATTTAAAGAACTTCTAGTTAAAAAGTACGGTCAAGAAGAAGCTAATAAACGTATCTACGCTACAACTGATAAAGTTAAAGGTGCCGTAAAAGTTGAAGCAGATGCTAACAATTGGGAAACATTTGTAGTTCCTGATAATGTTGGTGGTCGTTTCTCAGTACTGACAGCTGTAGTCTTCTTCCAATTGCTGCTTCAGGAGCAGATATACTGCTCTTATGGAAGCGCAAATGCTGCTCGTAAAGATTATCTTCAGATAAATCTCTGAAAACATTGCTTATCAGTACGCTGCAGTTCGTAATGTTCTTTATCGCAAAGGTTATATCACAGAGATTTTAGCTAACTACGAACCATCATTACAATACTTTGGTGAATGGTGGAAACAATTAGCAGGTGAATCAGAAGGTAAAGATCAAAAAGGTATCTATCCTACATCAGCAAACTTCTCAACTGATCTTCACTCACTTGGTCAATTTATTCAAGAAGGTTACCGTAACCTCTTTGAGACAGTTGTTCGCGTTGAGAAACCTCGTAAAAATGTGACTATTCCTGAATTAACCGAAGATTTAGATGGTCTTGGTTATCTTCAAGGAAAAGATGTAGATTTTGTTAATAAAAAAGCAACAGATGGTGTGCTTCTTGCTCATACAGATGGTGGGGTTCCAAATATGTTTGTAACGCTTCCTACACAAGACGCTTACACTCTTGGTTACACTATTTACTTCTTTGAGTTAGCAATTGGCCTTTCAGGTTATCTTAACTCAGTAAATCCATTTGATCAACCGGGGGTAGAAGCATATAAACGTAATATGTTTGCTCTTCTAGGTAAACCTGGATTCGAAGAGCTTAGCGCTGAATTGAATGCACGTCTT

SEQ ID NO: 14008 - protein, 449 aa, Streptococcus agalactiae
  VARIANT 216: Xaa = Any Amino Acid
MTHITFDYSKVLGQFVGEHELDYLQPQVSAADAFLRQGTGPGSDFLGWMDLPENYDKEEFSRIQKAAEKIKSDSEVLVVIGIGGSYLGAKAAIDFLNNHFANLQTAEERKAPQILYAGNSISSTYLADLVEYVQDKEFSVNVISKSGTTTEPAIAFRVFKELLVKKYGQEEANKRIYATTDKVKGAVKVEADANNWETFVVPDNVGGRFSVLTAVXLLPIAASGADITALMEGANAARKDLSSDKISENIAYQYAAVRNVLYRKGYITEILANYEPSLQYFGEWWKQLAGESEGKDQKGIYPTSANFSTDLHSLGQFIQEGYRNLFETVVRVEKPRKNVTIPELTEDLDGLGYLQGKDVDFVNKKATDGVLLAHTDGGVPNMFVTLPTQDAYTLGYTIYFFELAIGLSGYLNSVNPFDQPGVEAYKRNMFALLGKPGFEELSAELNARL

SEQ ID NO: 14009 - protein, 450 aa, Streptococcus agalactiae
ATGGAAAAGAATTATTAAGAAAAGAAGTTTTGATAACCTTAAAATCTCAACCTCAAGCTTACAAATCAGAAGTTGACTCTAAACTTTTAGAGGCTTTTATAAAAACTAAAGCTTATCAAAATAGTTGTGTAATTGCTACTTACCTATCTTTTGACTACGAATACATACACACTTCTTATTAAACAAGCTTTATGTGATGGCAAACGTGTCCTTGTTCCCAAAACTTATCCAAAAGGTAAAATGATTTTTGTGGACTATCAAAAAGATAACTTGAGGGCAACACCGTTTGGCTTATTAGAACCTGTTAATGATAGAGCTGTTGAAAAAGCTAGTATAGACTTAATTCATGTGCCCGGACTTATCTTTAACAATAAAGGTTTTCGTATAGGTTATGGTGCAGGGTATTTTGATCGCTATTTGAGTGATTTTGAAGGTGNNNNNTTAATTAAT

SEQ ID NO: 14010 - protein, 151 aa, Streptococcus agalactiae
  VARIANT 56, 58, 147, 148: Xaa = Any Amino Acid
MEKKLLRKEVLITLKSQPQAYKSEVDSKLLEAFIKTKAYQNSCVIATYLSFDYEYXTXLLIKQALCDGKRVLVPKTYPKGKMIFVDYQKDNLRATPFGLLEPVNDRAVEKASIDLIHVPGLIFNNKGFRIGYGAGYFDRYLSDFEGXXLIN

SEQ ID NO: 14011 - protein, 375 aa, Streptococcus agalactiae
ATGATTGATGTTGCGCCAGATGTTTCGAAATTATCTAGTCAATATGATAAATTATCACGAATTTTATTGAATTTGATTAGCAATGCAGTCAAATATTCTGATCCTGGAAGTCCCTTGACTATCAAGGCCTATTCAAATCGTCAAGATATCGTTATCGATATTATTGACCAAGGCTATGGGATAAAAGATGAAGATCTTGCTTCTATTTTTAATCGTTTTTATCGTGTAGAATCTTCACGAAATATGAAGACAGGAGGACATGGCCTAGGTCTTTATATTGCGCGACAACTTGCACATCAACTGAATGGTGATATTTTGGTCGAAAGTCAGTATCAAAAAGGCAGTAAGTTCTCTTTAGTACTTAAATTACAAAAA

SEQ ID NO: 14012 - protein, 125 aa, Streptococcus agalactiae
MIDVAPDVSKLSSQYDKLSRILLNLISNAVKYSDPGSPLTIKAYSNRQDIVIDIIDQGYGIKDEDLASIFNRFYRVESSRNMKTGGHGLGLYIARQLAHQLNGDILVESQYQKGSKFSLVLKLQK

SEQ ID NO: 14013 - protein, 423 aa, Streptococcus agalactiae
GTGGGACAAATGGGGGAAAGTATTTGGGGAAGTTTGAGATTTCTAATTCTCTATATTTTATCTGGCTTAATGGGTAATATTTTTACGCTATTTTTTACTCCACACGTGGTGGCAGCAGGAGCCTCAACGTCTTTATTTGGTGTTTTTTCTGCTATAGCAATCGCAGGTTATTTTGGAAAAAATCCTTATTTAAAACAAGTTGGAAAATCATATCAAGTGATGATCTTGTTAAATTTATTTTTTAATATCTTCACACCCGGAGTGAGTTTAGCAGGCCATGTTGGTGGTTTAGTTGGTGGAGTATTGGTGGCTATTTTTTTGACAAAACAAAATGGTTCTTTATTATTTAAAACTTGGCAAAGTATTTTAGCTTTAATGATATTTATTATTGTATCGATCAGTTTAATAGGTCTATCGTTGGTA

SEQ ID NO: 14014 - protein, 141 aa, Streptococcus agalactiae
MGQMGESIWGSLRFLILYILSGLMGNIFTLFFTPHVVAAGASTSLFGVFSAIAIAGYFGKNPYLKQVGKSYQVMILLNLFFNIFTPGVSLAGHVGGLVGGVLVAIFLTKQNGSLLFKTWQSILALMIFIIVSISLIGLSLV

SEQ ID NO: 14015 - protein, 942 aa, Streptococcus agalactiae
GTGAACAGAAAAATTATTGGCTTAACTCTACTATCTTTATCTGTACTAACATTAACAGCATGTGGTAATCGTTCAGATAAGTCTGCAAATAAATCAGATATCAAAGTTGCGATGGTAACTAATCAAGGTGGAGTAGACGATAAATCGTTTAATCAATCAGCTTGGGAAGGGCTACAAAAGTGGGGAAAAAAGAAGGGGTTAACAAAAGGTAATGGCTTTGATTATTTCCAGTCATCTAATGAATCAGATCATGCTAATAACCTTGATACGGCAGCCTCTAGTGGCTATAATTTAATTTTTGGTATTGGATTTGGTATTCATGATACTATTGAAAAAGTATCAGAAAATAATAAAGATGTTAAATACGTTATTGTAGATGATATCATTAAAGGTAAAGAAAATGTAGCTAGTGTTACTTTTGCAGACAATGAAGCTGCTTACTTAGCTGGAGTAAAATCAATTGATCCGGCTATTAAAGTTGCGGTATCTTATGCAGGCTCATTTACAGATGCAGCTAAAGGTAAAACGATTGCTGCCACACAGTATGCAACAGGTGTTGATGTTATTTACCAGGCTGCTGGTGGTACAGGAGCAGGAATTTTTAGTGAGGCTAAAACTGAAAATGAGACCCGCAAGGAATCTAACAAAGTCTGGGTAATTGGTGTTGACAGAGATCAAAGTCAAGAAGGCAATTATGTTTCAAAAGATGGTAAGAAAGCAAACTTTGTTCTGGCATCTACTATAAAAGAGGTGGGGAAATCTCTCCAATCTGTAGCAGAATTAACAGAGAAAAAACAATATCCAGGAGGGAAAGTAACAGTTTTTGGTCTAAAGGATAGTGGTGTAGATATTAAAGAGCATCAATTGTCTAGTGAGGGATCTGTTGCTGTCAAAAAAGCTAAAGAGGGGATTGTTTCAGGGAAAATACAAGTTCCTATGAAA

SEQ ID NO: 14016 - protein, 314 aa, Streptococcus agalactiae
MNRKIIGLTLLSLSVLTLTACGNRSDKSANKSDIKVAMVTNQGGVDDKSFNQSAWEGLQKWGKKKGLTKGNGFDYFQSSNESDHANNLDTAASSGYNLIFGIGFGIHDTIEKVSENNKDVKYVIVDDIIKGKENVASVTFADNEAAYLAGVKSIDPAIKVAVSYAGSFTDAAKGKTIAATQYATGVDVIYQAAGGTGAGIFSEAKTENETRKESNKVWVIGVDRDQSQEGNYVSKDGKKANFVLASTIKEVGKSLQSVAELTEKKQYPGGKVTVFGLKDSGVDIKEHQLSSEGSVAVKKAKEGIVSGKIQVPMK

SEQ ID NO: 14017 - protein, 897 aa, Streptococcus agalactiae
ATGAAAGTCAGAAAAGCAGTTATCCCTGCCGCTGGTTTAGGAACACGTTTTTTACCTGCTACTAAAGCTTTAGCTAAAGAAATGCTTCCAATCGTTGATAAACCAACTATTCAATTTATTGTTGAAGAAGCACTAAAATCTGGAATTGAAGATATTTTAGTTGTAACTGGTAAATCAAAACGTTCTATAGAAGACCACTTTGATTCAAATTTTGAATTAGAATATAACCTAAAAGAGAAAGGGAAAAACGAACTTCTCAAACTTGTTGATGAAACAACTGGCATTCGACTCCATTTTATTCGACAAAGTCATCCTCGTGGGCTTGGAGATGCTGTGCTACAAGCAAAAGCCTTCGTTGGTAATGAACCTTTTGTTGTTATGCTAGGTGATGATCTAATGGATATTACCAATAATAAAGTTATTCCTCTCACCAAACAATTAATTAATGACTTTGAAGCTACTCATGCATCAACAATTGCTGTTATGGAAGTTCCACATGAAGATGTTTCTGCTTATGGTGTTATTGCTCCACAAGGAGAAGGAGTTAATGGTCTATATAGCGTTAACACTTTCGTTGAAAAACCTTCTCCCGAAGAGGCTCCAAGTAATTTGGCAATCATTGGTCGCTACTTGTTAACTCCAGAAATTTTTAATATTTTAGAAACTCAAAAACCTGGTGCAGGAAATGAGATTCAACTAACCGATGCTATCGATACTTTAAATAAAACGCAACGTGTTTTTGCTAGAAAATTTACAGGGGACCGTTATGACGTTGGTGACAAGTTTGGTTTTATGAAAACTTCTATTGATTATGCTCTTCAACACCCACAAGTTAAAGATGACTTGAAGAAATATATCATTGATTTAGGAAAATCTCTAGAAAAAACATCTAAGAAA

SEQ ID NO: 14018 - protein, 299 aa, Streptococcus agalactiae; identical to SEQ ID NO: 5216

SEQ ID NO: 14019 - protein, 1014 aa, Streptococcus agalactiae
ATGACAAAACAAAAAATTGCCGTTCTTGGACCTGGTTCATGGGGGACTGCTCTTGCACAAGTATTAAATGACAATGGACATGAGGTACGCTTATGGGGAAACGTGGTTGAACAAATAGAAGAGATTAATACTAACCATACTAATCAACGTTACTTCAAAGATATTACCTTAGATTCCAAAATAAAAGCCTACACTAATCTTGAGGAAGCGATTAATAATGTTGACAGCATTCTATTCGTCGTCCCAACTAAAGTTACAAGACTTGTTGCTAAACAAGTGGCTAGTCTTTTAAAGCATAAAGTTGTAATTATGCATGCTTCTAAGGGGCTAGAACCTGGCACTCATGAACGACTTTCTACAATTTTAGAAGAAGAAATCTCTGAACAATATCGTAGTGATATCGTTGTTGTTTCAGGTCCCAGTCATGCTGAAGAAGCCATCGTTCGTGATATTACTTTGATTACTGCTGCTTCAAAAGATATTGAAGCAGCTAAGTATGTCCAAAAATTGTTTAGTAATCATTATTTTAGACTTTATACTAACACTGATGTCGTAGGAGTAGAAACAGCTGGTGCTCTAAAAAATATTATTGCTGTTGGTGCTGGAGCACTACACGGTCTTGGTTATGGTGATAATGCTAAAGCAGCTATTATTACGCGTGGTTTAGCTGAGATAACACGCCTTGGTGTACAATTAGGGGCCGACCCTCTCACTTTCAGTGGTTTATCCGGAGTTGGAGATTTAATTGTGACTGGTACATCTGTTCATTCTCGCAACTGGAGAGCGGGAGATGCTTTAGGACGTGGTGAGAAACTTGAAGATATTGAAAAAAATATGGGGATGGTTATTGAAGGTATCTCAACAACTAAGGTTGCTTACGAAATCGCCCAAAACTTAAATGTTTACATGCCCATTACAGAAGCTATTTATAAATCAATATATGAAGGGGCTAATATCAAAGATAGCATTTTAGATATGATGTCCAATGAATTTCGTTCAGAGAATGAATGGCAC

SEQ ID NO: 14020 - protein, 338 aa, Streptococcus agalactiae
MTKQKIAVLGPGSWGTALAQVLNDNGHEVRLWGNVVEQIEEINTNHTNQRYFKDITLDSKIKAYTNLEEAINNVDSILFVVPTKVTRLVAKQVASLLKHKVVIMHASKGLEPGTHERLSTILEEEISEQYRSDIVVVSGPSHAEEAIVRDITLITAASKDIEAAKYVQKLFSNHYFRLYTNTDVVGVETAGALKNIIAVGAGALHGLGYGDNAKAAIITRGLAEITRLGVQLGADPLTFSGLSGVGDLIVTGTSVHSRNWRAGDALGRGEKLEDIEKNMGMVIEGISTTKVAYEIAQNLNVYMPITEAIYKSIYEGANIKDSILDMMSNEFRSENEWH

SEQ ID NO: 14021 - protein, 327 aa, Streptococcus agalactiae
TTGAAAAAAACCTATCGGGTAAAAAGTGATAAGGATTTTCAAATGATTTTCAGCAGAGGTAAAAATGTTGCTAATCGAAAATTTGTTATCTACTATTTAGAAAAAGAACAAAAACACTTTCGTGTGGGAATCTCTGTTAGTAAGAAATTAGGAAATGCTGTTGTTCGTAACGCTGTTAAAAGAAAAATTAGGCATGTTTTACTCTCTCAGAAAACAGCGCTGCAAGATTATGATTTTGTCGTGATTGCGCGTAAAGGTGTAGAGGAATTAGACTATCAAGCATTAGAAAAAAATCTTATACACGTTTTAAAAATAGCAGGACTCATC

SEQ ID NO: 14022 - protein, 109 aa, Streptococcus agalactiae
MKKTYRVKSDKDFQMIFSRGKNVANRKFVIYYLEKEQKHFRVGISVSKKLGNAVVRNAVKRKIRHVLLSQKTALQDYDFVVIARKGVEELDYQALEKNLIHVLKIAGLI

SEQ ID NO: 14023 - protein, 249 aa, Streptococcus agalactiae
TTGAAGAAAAAACTTAAAACATTTAGCTTAATATTGCTGACAGGTTCTTTATTGGTTGCTTGCGGACGAGAGAAGTATCTAGTCATTCAGCTACATTATGGGAGCAATAGTTTATGCATTTGCTAAATCAATACAATGGCTCTCCTTTAACCATTATTGGTTTGGGATAACTTATTCACTCTAATAATCAGAGCGATTATGATGCCGCTTTATAATATGCAAATGAAATCCAGCCNNNNNTTAATTAAT

SEQ ID NO: 14024 - protein, 85 aa, Streptococcus agalactiae
  VARIANT 24, 81, 82: Xaa = Any Amino Acid
MKKKLKTFSLILLTGSLLVACGRXEVSSHSATLWEQIVYAFAKSIQWLSFNHSIGLGIILFTLIIRAIMMPLYNMQMKSSXXLIN

SEQ ID NO: 14025 - protein, 587 aa, Streptococcus agalactiae
ATGCAAATGAAATCCAGCCAAAAGATGCAGGAAATTCAGCCAAGGCTCAAGGAATTACAAAAAAAATATCCAGGGAAAGATCCTGATAGCCGTTTAAAGCTAAATGATGAAATGCAATCTATGTATAAAGCTGAGGGAGTTAACCCATATGCAAGTGTATTACCTCTTCTAATTCAGTTACCTGTCCTAGGGCTCTTTTCCAAGCTTGACTAGGGTTTTTTCTTAAAAGTAGGAACGTTTTGAGCCTAGAATTATCACAGCCGGACCCATATTATATTTTACCTGTACTGGCGGCCTTATTTACCTTTTTATCAACTTGGTTAACTAACAAAGCAGCTGTTGAAAAAAATATTGCTTTAACTCTTATGACTTATGTTATGCCGTTTATCATATTGGTAACAAGTTTTAACTTTGCTAGTGGTGTTGTTTTATACTGGACGGTGTCTAATGCTTTTCAAGTATTTCAAATTCTATTATTGAACAACCCATACAAGATTATAAAGGTTCGAGAAGAAGCAGTAAGAGTGGCACACGAAAAAGAACAAAGAGTTAAACGTGCTAAGAGAAAAGCAAGTAAGAAAAGAAAG

SEQ ID NO: 14026 - protein, 197 aa, Streptococcus agalactiae
  VARIANT 74: Xaa = Any Amino Acid
MQMKSSQKMQEIQPRLKELQKKYPGKDPDSRLKLNDEMQSMYKAEGVNPYASVLPLLIQLPVLWALFQALTRVXFLKVGTFLSLELSQPDPYYILPVLAALFTFLSTWLTNKAAVEKNIALTLMTYVMPFIILVTSFNFASGVVLYWTVSNAFQVFQILLLNNPYKIIKVREEAVRVAHEKEQRVKRAKRKASKKRK

SEQ ID NO: 14027 - protein, 819 aa, Streptococcus agalactiae
ATGGTATTATTTACAGGAGCGACTGTAGAAGAAGCTATTGAAAAAGGACTACAAGAGTTAAACATTTCACGATTGAGGGCACATATAAAAGTTGTATCACGTGAGAAAAAAGGTTTTTTGGGCTTTGGTAAAAAGCCAGCAAAAGTTGAAATAGAAGGTATCACCGACGAAGTAACTGATATTAATGAATCGGTAGCGTTAAAAAATATTAAGAATGTACCGTCTAGCGTAGATGTGGTGGAAGAATATATAGAGGAGGTTGATGAAACGCTTGAAAAAGAAGACGTATCACAACCAGAACTTCCAAAAATTGATGATAAAAACGTTGTAACTACAAGTGAAGCTATTGAAAAAATTGACCTACTTCCTAATATTGAAGTAGCAGCTGCTCAGGTGACTAAATACGTTGAAAATATCATCTATGAGATGGATTTAGATGCAACAATAGAAACTACGACAAGTAAGCGACAAATAAATCTCCAAATAGAAACGCCAGAAGCTGGGCGCATCATTGGTTATCATGGGAAAGTATTAAAATCGTTGCAGTTGTTAGCACAAAATTATCTTCATGACCGCTTTTCTAAGAGTTTTTCAGTATCTATTAATGTCCATGACTACGTTGAGCATCGTATAGAAACTTTAATTGATTTTTCTAAAAAAATAGCTAGACGTGTTTTAGAGACTAATGAGCCTTACCATATGGATCCTATGAGTAACAGTGAGCGAAAAACTGTTCATAAAACAATTGCAACTATAGAGGGTGTTGAAAGTTATTCTGAAGGTAACGATCCTAATAGATTTGTAGTAGTTACTAAGAAG

SEQ ID NO: 14028 - protein, 273 aa, Streptococcus agalactiae
MVLFTGATVEEAIEKGLQELNISRLRAHIKVVSREKKGFLGFGKKPAKVEIEGITDEVTDINESVALKNIKNVPSSVDVVEEYIEEVDETLEKEDVSQPELPKIDDKNVVTTSEAIEKIDLLPNIEVAAAQVTKYVENIIYEMDLDATIETTTSKRQINLQIETPEAGRIIGYHGKVLKSLQLLAQNYLHDRFSKSFSVSINVHDYVEHRIETLIDFSKKIARRVLETNEPYHMDPMSNSERKTVHKTIATIEGVESYSEGNDPNRFVVVTKK

SEQ ID NO: 14029 - protein, 351 aa, Streptococcus agalactiae
ATGGATTATAAATTATTTGATGAATATATTACTTTACAATCACTTCTAAAAGAGATTGGTATCATTCAAAGTGGCGGAGCCATTAAAAAATTTTTAGCGGATAATCAAGTATTGTTTAACGGTGACCTTGAAAATAGGCGTGGAAAGAAACTCCGCCTGGGGGATATTATTACTATTCCTGATCAAAATATCGAGATCATTATAAGGAAGCCATCAGATCAAGAAATTGAAGAACGTAATGTAGAAATAGCTGAAAAACAGCGTGTTTCAGCAATCGTTAAAGAAATGAATAAAAACACCAACAAAGATAAATCAAAAACTAGCAAAAAACCAGTTCGCTTTCCAGGGACA

SEQ ID NO: 14030 - protein, 117 aa, Streptococcus agalactiae
MDYKLFDEYITLQSLLKEIGIIQSGGAIKKFLADNQVLFNGDLENRRGKKLRLGDIITIPDQNIEIIIRKPSDQEIEERNVEIAEKQRVSAIVKEMNKNTNKDKSKTSKKPVRFPGT

SEQ ID NO: 14031 - protein, 1107 aa, Streptococcus agalactiae
ATGTGGATAAAAAATATTTCTTTAAAACATTATCGTAATTATGAAGAAGCACAAGTAGATTTTTCACCCAACCTCAATATTTTCATTGGCCGCAATGCTCAAGGAAAGACAAATTTTTTAGAAGCAATCTACTTCTTGGCTTTGACTCGAAGTCACCGTACCCGTTCTGATAAAGAACTTGTACATTTTAAACACCATGATGTACAAATTACAGGTGAGGTAATCCGCAAAAGTGGCCATCTTAACTTAGATATTCAATTATCTGAAAAAGGAAGAATCACTAAAGTTAACCATCTTAAACAGGCAAAATTATCTGATTATATTGGGGCTATGACTGTCGTACTTTTTGCCCCTGAAGATCTTCAATTAGTTAAAGGTGCACCTAGTCTAAGACGAAAATTTTTAGATATAGATATTGGACAAATTAAGTCAACGTACTTAGCTGAACTTTCAAATTACAATCATGTATTAAAACAAAGAAACACTTATCTAAAAACTACTAATAACGTCGACAAAACTTTTTTAACAGTCCTTGATGAACAATTAGCTGATTATGGAAGTCGTGTCATTGAACACCGTTTTGATTTTATCCAAGCCCTAAATGATGAAGCGGACAAACATCACTACATTATCAGTACTGAGTTAGAACATTTATCTATTCACTACAAATCGTCAATAGAGTTTACAGATAAGTCAAGTATTAGGGAACATTTTTTAAACCAATTATCTAAAAGCCACTCAAGAGACATCTTTAAGAAAAACACAAGCATCGGACCTCATCGTGATGATATTACTTTCTTTATTAATGATATCAATGCTACTTTTGGTAGCCAAGGGCAACAAAGAAGCCTTATTTTATCATTGAAATTAGCAGAAATTGAGCTAATAAAAACCGTTACCAACGATTATCCGATTCTCTTACTTGACGACGTCATGAGTGAACTTGACAACCATCGTCAACTAAAACTCTTAGAGGGAATCAAAGAGAATGTTCAAACATTTATTACTACAACAAGTTTAGAACATTTAAGTGCTTTACCTGATCAACTCAAAATCTTTAACGTTAGTGATGGTACTATTAGTATTAATGAAAAAAAAGCAACAGAT

SEQ ID NO: 14032 - protein, 369 aa, Streptococcus agalactiae
MWIKNISLKHYRNYEEAQVDFSPNLNIFIGRNAQGKTNFLEAIYFLALTRSHRTRSDKELVHFKHHDVQITGEVIRKSGHLNLDIQLSEKGRITKVNHLKQAKLSDYIGAMTVVLFAPEDLQLVKGAPSLRRKFLDIDIGQIKSTYLAELSNYNHVLKQRNTYLKTTNNVDKTFLTVLDEQLADYGSRVIEHRFDFIQALNDEADKHHYIISTELEHLSIHYKSSIEFTDKSSIREHFLNQLSKSHSRDIFKKNTSIGPHRDDITFFINDINATFGSQGQQRSLILSLKLAEIELIKTVTNDYPILLLDDVMSELDNHRQLKLLEGIKENVQTFITTTSLEHLSALPDQLKIFNVSDGTISINEKKATD

SEQ ID NO: 14033 - protein, 705 aa, Streptococcus agalactiae
ATGACTGCCTCATTGTGGATTTTTGGTATCTTAGGTGGTATCCTATGGTCAGTCGGCCAAAATGGTCAATTTCAAGCAATGAAATATATGGGAGTCTCTGTTGCTAATCCACTGTCAAGTGGTGCACAATTAGTAGGTGGAAGCCTAGTTGGTGCTTTAGTCTTTCATGAATGGACTAAGCCAATCCAATTTATTTTAGGATTGACAGCGTTGACATTATTAGTTATCGGCTTCTATTTCTCAAGTAAACGTGATGTTTCAGAACAAGCTTTGGCAACACATCAAGAGTTTTCAAAAGGATTTGCTACAATTGCTTATTCAACTGTAGGTTACATCTCGTACGCAGTTTTATTTAACAACATTATGAAGTTCGACGCTATGGCCGTCATTTTACCCATGGCTGTTGGAATGTGTCTAGGTGCAATTTGTTTCATGAAGTTTCGTGTTAACTTTGAGGCTGTTGTTGTTAAAAATATGATTACAGGTCTCATGTGGGGCGTTGGTAATGTCTTCATGTTATTGGCAGCAGCTAAAGCAGGGCTAGCAATTGCTTTTAGTTTTTCTCAACTTGGAGTAATTATCTCTATTATTGGTGGTATTTTATTTTTAGGTGAGACAAAAACGAAGAAAGAGCAGAAATGGGTTGTCATGGGTATCCTTTGTTTTGTTATGGGTGCTATATTACTTGGTATTGTTAAATCTTAT

SEQ ID NO: 14034 - protein, 235 aa, Streptococcus agalactiae; identical to SEQ ID NO: 3892

SEQ ID NO: 14035 - protein, 660 aa, Streptococcus agalactiae
ATGAAAAATTATGGAAAAATTTTAAAAGAGTTGAGAGAAGACAAAGGTATATCCCTAAGTTCTCTAGCCAAAAGTGCTCAATTATCAAAATCAACTCTATCACGTTTTGAAAATGGTGAGACACAAATAGGTATTGATAAATTTATTAAAGCTTTACAAACGTTGGAGGTTGGGGTAACTATCAATGAAGTATCCATTCTAGATTCAAAAGTTAAGGCTGGAACTTCTAATACTGATTTAGAGCAATTAACTTTACTGGAATCTTATCGAGATAATGAAGATATCATGAGAATTTTCAGTTTCCAAGAACAACAATCCTGTGATAGAATAGAAAGCAATGTTCTCAAAATATTGGCTAAACTTTTTATTTCAAATTTAGGGTTAAATATGAGGCTGCCTCAAGATGAGATTAACCTGGTAGTTACTTATCTGAATGGTGTGACACAGTACAATGATTTTTATTTCAAAGTCATCTGCTATTTTCAAGATATTTTACCTGAAGATGTTATTTTAAATAAGATTAGTAATATGACTAAAGAACAGTTACCTTATTCTAAATCACTGGTCAATTTATTGATAAAACAAGTCATTATAGCTTTGGAAAAAGATAGTGTTGATAAAGCTATAGTATTTGCTGATCTTGCTAATAAAGTTAGTCAA

SEQ ID NO: 14036 - protein, 220 aa, Streptococcus agalactiae
MKNYGKILKELREDKGISLSSLAKSAQLSKSTLSRFENGETQIGIDKFIKALQTLEVGVTINEVSILDSKVKAGTSNTDLEQLTLLESYRDNEDIMRIFSFQEQQSCDRIESNVLKILAKLFISNLGLNMRLPQDEINLVVTYLNGVTQYNDFYFKVICYFQDILPEDVILNKISNMTKEQLPYSKSLVNLLIKQVIIALEKDSVDKAIVFADLANKVSQ

SEQ ID NO: 14037 - protein, 1479 aa, Streptococcus agalactiae
ATGTCAAATTGGGATACTAAGTTTTTGAAAAAAGGTTTTACTTTTGATGATGTTCTGCTTATTCCTGCTGAAAGCCATGTTTTACCAAATGAAGTTGATATGAATACAAAGTTGGCTGATAATTTGACATTAAACATTCCAATCATTACAGCTGCAATGGATACAGTTACAGATAGTAAGATGGCTATTGCTATTGCACGTGCTGGTGGGCTTGGTATCATTCATAAAAATATGTCAATAGTTGATCAAGCAGAAGAAGTTCGTAAAGTTAAACGCTCAGAAAATGGTGTTATTATTGACCCATTCTTCTTGACACCAGATAATACTGTCTCTGAAGCTGAGGAATTGATGCAAAACTATCGCATTAGTGGAGTTCCTATTGTAGAGACACTCGAGAATCGTAAATTAGTTGGAATTATTACTAACCGTGATATGCGTTTCATTTCTGATTATAAACAACTAATCTCAGAGCACATGACAAGTCAAAATCTTGTAACAGCTCCTATTGGTACAGATCTTGAAACTGCGGAGCGTATTCTTCATGAGCATCGTATTGAAAAGCTACCTTTAGTAGATGATGAGGGACGTCTTTCAGGACTTATTACTATTAAGGATATCGAAAAAGTTATTGAATTTCCTAAGGCAGCAAAAGATGAATTTGGACGTCTCTTAGTTGCAGGTGCAGTAGGTGTAACCTCTGATACTTTTGAACGTGCAGAAGCTTTGTTTGAAGCAGGTGCAGATGCTATTGTCATTGATACAGCACATGGACATTCAGCTGGTGTGCTCCGTAAAATTGCTGAAATTCGTGCTCACTTCCCTAATCGCACATTGATTGCGGGAAATATTGCTACAGCAGAAGGAGCGCGTGCACTTTATGATGCAGGTGTGGATGTCGTTAAAGTTGGTATTGGTCCAGGTTCAATTTGTACGACTCGTGTCGTTGCTGGGGTAGGTGTTCCTCAGATTACAGCTATTTACGATGCAGCGGCTGTTGCGCGTGAGTACGGTAAGACTATCATTGCTGATGGTGGTATTAAATATTCAGGTGATATTGTAAAAGCACTTGCAGCAGGTGGAAATGCAGTTATGCTAGGTTCAATGTTTGCAGGAACAGATGAAGCGCCAGGAGAAACAGAAATTTTCCAAGGGCGTAAGTTCAAGACATACCGTGGTATGGGCTCAATTGCAGCAATGAAAAAAGGTTCAAGCGATCGTTATTTCCAAGGTTCTGTAAACGAGGCTAACAAATTGGTTCCAGAAGGTATTGAAGGTCGTGTAGCATACAAAGGTTCAGTAGCCGATATTGTTTTCCAAATGCTTGGTGGCATTCGTTCTGGTATGGGATATGTAGGTGCAGCGAACATAAAAGAACTTCATGATAATGCTCAATTTGTTGAAATGTCAGGAGCTGGTTTGAAAGAAAGCCATCCCCATGATGTTCAAATTACAAATGAGGCACCAAATTATTCAGTACAC

SEQ ID NO: 14038 - protein, 493 aa, Streptococcus agalactiae
MSNWDTKFLKKGFTFDDVLLIPAESHVLPNEVDMNTKLADNLTLNIPIITAAMDTVTDSKMAIAIARAGGLGIIHKNMSIVDQAEEVRKVKRSENGVIIDPFFLTPDNTVSEAEELMQNYRISGVPIVETLENRKLVGIITNRDMRFISDYKQLISEHMTSQNLVTAPIGTDLETAERILHEHRIEKLPLVDDEGRLSGLITIKDIEKVIEFPKAAKDEFGRLLVAGAVGVTSDTFERAEALFEAGADAIVIDTAHGHSAGVLRKIAEIRAHFPNRTLIAGNIATAEGARALYDAGVDVVKVGIGPGSICTTRVVAGVGVPQITAIYDAAAVAREYGKTIIADGGIKYSGDIVKALAAGGNAVMLGSMFAGTDEAPGETEIFQGRKFKTYRGMGSIAAMKKGSSDRYFQGSVNEANKLVPEGIEGRVAYKGSVADIVFQMLGGIRSGMGYVGAANIKELHDNAQFVEMSGAGLKESHPHDVQITNEAPNYSVH

SEQ ID NO: 14039 - protein, 483 aa, Streptococcus agalactiae; identical to SEQ ID NO: 8595

SEQ ID NO: 14040 - protein, 161 aa, Streptococcus agalactiae; identical to SEQ ID NO: 8596

SEQ ID NO: 14041 - protein, 678 aa, Streptococcus agalactiae
GTGATTACAAAAGAACAATATTTTTATTTCAGACAACTAGATGATTTTAAACACTTTACTATTGAACAATTTGACCATATTGTGAGCCACATTAAACATCGTACAGCTCTAAAAAATCATACCTTATTTTTTGAAGGTGATTACCGTGAAAAACTGTTTTTAATCCAGTCAGGACATGTAAAAATTGAACAATCAGACGCTTCTGGTTCTTTTATTTATACAGATTATGTTAGACAAGATACAGTTTTTCCTTATGGAGGTCTCTTTTTGGATGATGATTACCATTTTTCAGCAGTAGCTATTACGGATATTGAGTATTTTTCTCTGCCAATGGCTTTATACGAAGAATACTCTCTTCAAAATATCAATCAAATGAAGCATCTTTGTCGGAAATATTCTAAGCTATTACGAGTTCATGAAATACGACTTCGTAATATGGTGACTTCAAGTGCCAGTATGAGAGTTATCCAATCGCTTGCAACTCTACTTTTGCAAGTTCCTACAGAAAGGGGACATTTACCTTTTCCTATTACAACGATTGAAATTGCCAATATGAGCGGAACTACTCGCGAGACAGTTAGTCATGTTTTAAAGGAATTACGCCAAAAAGATATCGTTGAAATGAAAGGAAAGAAGCTTCTCTATAATAATAAAAATTATTTCAAGAAATTCATTGAA

SEQ ID NO: 14042 - protein, 226 aa, Streptococcus agalactiae; identical to SEQ ID NO: 12892

SEQ ID NO: 14043 - protein, 702 aa, Streptococcus agalactiae
ATGACTAAATTTATTGTTGATTCATCGTACTGGAATTTGTTTCCAACTTCTAAAATTGGAGTAATCTTAATCAAAGATTATCACATGGACAGGAACCTTGAAACAGAACTTAAACAGTTACTGTCTGATAGTCATTCTTTAGCAAAAAAATATTTGCAAGAGAAAGAATTCAGTCAAAACAAAGTTATCCAAACTTATCGCAAAGCATATCAAACCTTTAAAACTAAAAAAGGTGCACGTTCAAGTATCGAAGCATTATTGAAGCGAATTAATTCAGGAAACGAAATTACTAGTATAAATCCTCTAGTTGATATCTATAATGCCGCTAGCCTTAGGTTTGGATTACCTATTGGTGCTGAGGATAGTGATACATTTAGAGGTGATTTAAAACTAACTATTACCAATGGTGGTGATGAATTTTACTTGATTGGCGAAGATTTTAACATACCAACTCTTTCAGGTGAGCTTGCCTATGTTGATGATGTTGGAGCAGTTTGCCGCTGTTTTAATTGGCGTGATGGAAAACGTACTATGATTACCGATAATACTCAGAACGCTTTTTTAGTTATCGAATTAATTGATAATAGAAGAGAAATTATTTTTAAAGAAGCGTTGGACTTTATCGCCACCAATACAAATCGCTTTCTAAAAGCTAAAACACAGACCATCATATTAGATAAAGAACACAGTGAAATAACGCTA

SEQ ID NO: 14044 - protein, 234 aa, Streptococcus agalactiae
MTKFIVDSSYWNLFPTSKIGVILIKDYHMDRNLETELKQLLSDSHSLAKKYLQEKEFSQNKVIQTYRKAYQTFKTKKGARSSIEALLKRINSGNEITSINPLVDIYNAASLRFGLPIGAEDSDTFRGDLKLTITNGGDEFYLIGEDFNIPTLSGELAYVDDVGAVCRCFNWRDGKRTMITDNTQNAFLVIELIDNRREIIFKEALDFIATNTNRFLKAKTQTIILDKEHSEITL

SEQ ID NO: 14045 - protein, 1230 aa, Streptococcus agalactiae
ATGACTCAAACACATCCAATTCATGTTTTCTCAGAAATTGGAAAACTTAAAAAAGTTATGCTACACCGTCCAGGTAAAGAAATAGAAAATCTGATGCCTGATTATTTAGAGAGACTCTTGTTTGATGATATCCCATTTTTGGAAGATGCACAAAAAGAACACGATGCGTTTGCACAAGCACTTCGCAACGAAGGAGTCGAAGTACTTTACCTTGAAAATCTTGCTGCCGAGTCGCTAACAAACCAAGAAATTCGTGAACAGTTTATCGATGAGTACATTGGCGAAGCAAATGTTCGCGGTCGTGCTACTAAAAAAGCTATTCGAGAATTATTACTCAATATCAAAGATAATAAAGAACTTATCGAAAAAACTATGGCAGGTATCCAAAAGTCTGAGCTACCTGAAATCCCATCTTCTGAAAAAGGTCTAACTGATCTTGTCGAATCTAATTATCCATTTGCCATAGATCCGATGCCAAATCTTTACTTTACACGTGATCCATTTGCAACTATTGGGAATGGAGTTTCATTAAACCATATGTTCTCTGAAACACGTAATCGCGAAACTTTATACGGTAAATATATCTTTACACATCACCCAGAGTACGGTGGAAAAGTCCCTATGGTCTATGATCGTGAAGAAACAACTCGTATTGAAGGTGGAGATGAGCTCGTCCTTTCTAAAGATGTCCTTGCCGTGGGTATCTCTCAACGTACTGATGCTGCCTCTATTGAAAAACTCTTAGTCAATATTTTTAAACAAAATTTAGGTTTTAAAAAGGTTTTAGCATTTGAATTTGCAAATAATCGTAAATTTATGCACCTTGACACAGTCTTTACAATGGTTGACTATGACAAGTTTACAATTCACCCAGAAATTGAAGGCGATCTTCGCGTTTACTCTGTAACTTACGAAAACCAAGATCTTCATATTGAAGAAGAAAAAGGTGATTTGGCAGATCTTCTAGCGAAAAACCTAGGAGTTGAGAAAGTGGAATTGATTCGTTGCGGGGGTGACAACTTAGTCGCTGCTGGACGTGAACAATGGAATGATGGTTCAAATACATTAACTATAGCACCAGGTGTCGTTGTCGTTTACAACAGAAATACAATCACAAATGCAATCTTAGAGTCCAAAGGATTGAAATTAATTAAGATTAATGGAAGTGAATTAGTTCGTGGGCGTGGTGGACCACGCTGCATGTCAATGCCATTTGAACGTGAAGACCTT

SEQ ID NO: 14046 - protein, 410 aa, Streptococcus agalactiae
MTQTHPIHVFSEIGKLKKVMLHRPGKEIENLMPDYLERLLFDDIPFLEDAQKEHDAFAQALRNEGVEVLYLENLAAESLTNQEIREQFIDEYIGEANVRGRATKKAIRELLLNIKDNKELIEKTMAGIQKSELPEIPSSEKGLTDLVESNYPFAIDPMPNLYFTRDPFATIGNGVSLNHMFSETRNRETLYGKYIFTHHPEYGGKVPMVYDREETTRIEGGDELVLSKDVLAVGISQRTDAASIEKLLVNIFKQNLGFKKVLAFEFANNRKFMHLDTVFTMVDYDKFTIHPEIEGDLRVYSVTYENQDLHIEEEKGDLADLLAKNLGVEKVELIRCGGDNLVAAGREQWNDGSNTLTIAPGVVVVYNRNTITNAILESKGLKLIKINGSELVRGRGGPRCMSMPFEREDL

SEQ ID NO: 14047 - protein, 207 aa, Streptococcus agalactiae
ATGAAGCTATTAGTCAATCACTTGCCTTACCAAAGAGCTGCAAGCCTATATATTCGCTTTTCTGTTTTCGTTATCGAAAGAAATATAAAAATGAAAGAAGAATTCGATGATAATGACGAGCAAGATACTATTTATGCTGTTCTTTATGATGGAAACAGCCAGTTTCAACAGGACGCTTTCTTCCTGAAACTCAAACAGAAGCTCGTT

SEQ ID NO: 14048 - protein, 69 aa, Streptococcus agalactiae
MKLLVNHLPYQRAASLYIRFSVFVIERNIKMKEEFDDNDEQDTIYAVLYDGNSQFQQDAFFLKLKQKLV

SEQ ID NO: 14049 - protein, 222 aa, Streptococcus agalactiae
TTGACTCGAATTGCGACTTTAAAAGGTTATCGTGGTAACGGCTATGGTACCAAAATTATTATAGCACTAGAAAATTATGCAAAAGAAAATGGTTATCACTATCTAACTATACATGCTGAATTGACAGCAAAAGATTTCTACCAGACACTTGGGTATCAAGCTACTGGGAATATTTATATGGAAGACGGGGAAGCCTGTCAAACACTCGAAAAATATTTAATT

SEQ ID NO: 14050 - protein, 74 aa, Streptococcus agalactiae
MTRIATLKGYRGNGYGTKIIIALENYAKENGYHYLTIHAELTAKDFYQTLGYQATGNIYMEDGEACQTLEKYLI

SEQ ID NO: 14051 - protein, 1011 aa, Streptococcus agalactiae
ATGACACAAGTATTTCAAGGACGTAGTTTCTTAGCAGAAAAAGATTTTTCTCGTGAGGAATTTGAATATCTTATTGATTTTTCAGCTCATTTAAAAGACCTTAAAAAACGTGGTGTTCCTCATCATTATCTTGAAGGTAAAAATATTGCTCTCTTATTTGAAAAAACATCTACTCGTACTCGCGCAGCCTTTACAACTGCAGCAATTGACCTAGGCGCTCATCCGGAATACCTTGGTGCAAATGATATTCAACTTGGTAAAAAAGAATCAACAGAAGATACTGCTAAGGTTTTAGGACGTATGTTTGATGGTATTGAATTCCGTGGTTTTAGCCAAAGAATGGTTGAAGAGCTTGCTGAATTTTCTGGAGTACCTGTCTGGAATGGTTTAACAGATGAATGGCATCCAACACAAATGCTAGCTGACTACCTTACTATCAAAGAAAACTTCGGTAAACTTGAAGGTATTACTCTTGTTTACTGTGGTGACGGACGTAACAATGTTGCCAACTCGCTTTTAGTGGCTGGGACTTTGATGGGGGTCAATGTACACATCTTTTCTCCAAAAGAACTTTTCCCTGCTGAAGAGATTGTTAAATTGGCTGAAGGATATGCCAAAGAATCTGGGGCTCACGTTCTCGTTACTGATAATGTAGACGAAGCTGTAAAGGGAGCAGACGTCTTTTACACTGATGTCTGGGTATCGATGGGAGAAGAAGATAAGTTCAAAGAACGCGTTGAACTTCTTCAACCATATCAAGTAAACATGGAACTGATTAAAAAAGCTAATAATGATAATCTTATCTTCTTACACTGCTTACCTGCATTCCATGATACAAATACCGTTTATGGCAAAGACGTCGCTGAAAAATTTGGGGTCAAGGAAATGGAAGTTACTGATGAAGTCTTCCGTAGCAAATATGCTCGTCATTTCGACCAAGCTGAAAATCGTATGCACACTATTAAAGCTGTAATGGCTGCAACCCTTGGAAATCTTTTCATTCCAAAAGTT

SEQ ID NO: 14052 - protein, 337 aa, Streptococcus agalactiae
MTQVFQGRSFLAEKDFSREEFEYLIDFSAHLKDLKKRGVPHHYLEGKNIALLFEKTSTRTRAAFTTAAIDLGAHPEYLGANDIQLGKKESTEDTAKVLGRMFDGIEFRGFSQRMVEELAEFSGVPVWNGLTDEWHPTQMLADYLTIKENFGKLEGITLVYCGDGRNNVANSLLVAGTLMGVNVHIFSPKELFPAEEIVKLAEGYAKESGAHVLVTDNVDEAVKGADVFYTDVWVSMGEEDKFKERVELLQPYQVNMELIKKANNDNLIFLHCLPAFHDTNTVYGKDVAEKFGVKEMEVTDEVFRSKYARHFDQAENRMHTIKAVMAATLGNLFIPKV

SEQ ID NO: 14053 - protein, 1425 aa, Streptococcus agalactiae
ATGGAAAAAGAAAAAAAATTAGGTCTTTTACCACTAACAATGCTTGTCATTGGCTCTCTTATCGGTGGCGGAATCTTTGATTTAATGCAAAATATGAGTTCCAGAGCCGGTTTGGTACCAATGCTTATTGCTTGGGTAATTACTGCTATCGGGATGGGAACTTTCGTTTTAAGTTTTCAAAATTTATCTGAAAAAAGGCCGGACCTAACAGCTGGAATCTTTAGTTACGCTAAAGAGGGGTTTGGAAACTTTATGGGATTTAACTCTGCATGGGGTTATTGGTTATCAGCTTGGCTTGGAAATGTTGCCTACGCTGCACTCTTATTCAGTTCACTCGGTTATTTCTTTAAATTCTTTGGTAATGGAAATAATATCATCTCAATTATTGGAGCAAGTATAGTTATTTGGGTTGTCCATTTCTTAATTTTAAGAGGTGTTAATACAGCTGCATTTATTAATACCGTAGTTACCTTTGCAAAATTAGTACCTGTTATTATTTTCTTAATTTCAGCGTTATTAGCTTTCAAATTTAACATTTTTAGTCTTGATATCTGGGGAAATGGATTACATCAATCAATTTTCAACCAAGTCAATTCAACTATGAAAACCGCTGTTTGGGTATTTATTGGTATTGAGGGCGCCGTTGTCTTCTCAGGTCGTGCTAAAAAACACTCTGATATTGGTAAAGCAAGTATCCTAGCATTATTCACTATGATTTCACTTTATGTATTGATTTCTGTTTTATCACTTGGTATCATGTCACGTCCAGAACTTGCAAACTTAAAAACACCAGCTATGGCTTACGTTCTAGAAAAAGCTGTTGGTCACTGGGGTGCTATCTTAGTTAACCTTGGTGTTATCATTTCAGTATTTGGCGCTATTCTTGCTTGGACTTTATTTGCAGCAGAATTACCATATCAAGCTGCTAAAGAAGGTGCTTTTCCTAAATTTTTTGCAAAAGAAAATAAAAACAAAGCTCCAATCAACTCACTCTTAGTCACTAATCTTTGTGTACAAGCATTCTTAATCACGTTCTTATTCACACAAAGTGCTTATCGTTTTGGTTTCGCATTAGCATCATCTGCTATCTTAATTCCTTATGCTTTTACAGCACTATATCAATTACAATTCACACTCCGTGAGGATAAGTCAACTCCAGGACATCAAAAGAATTTAATTATCGGTATCCTCGCTACAATCTATGCTGTTTACCTTATCTACGCTGGTGGTTTTGATTACTTACTTTTGACAATGATTGCTTATACTCTAGGTATGATTCTCTATATTAAAATGAGAAAAGATGACAAGCTTCCTATCTTTGTGAGATATGAAAAAATTAGTGCCATTGTCATTCTAGCGCTTTGCTTACTATGTATTATTGAAATTATGACTGGACAAATTGACATTGCTGCAATCCTAGCAGGT

SEQ ID NO: 14054 - protein, 475 aa, Streptococcus agalactiae
MEKEKKLGLLPLTMLVIGSLIGGGIFDLMQNMSSRAGLVPMLIAWVITAIGMGTFVLSFQNLSEKRPDLTAGIFSYAKEGFGNFMGFNSAWGYWLSAWLGNVAYAALLFSSLGYFFKFFGNGNNIISIIGASIVIWVVHFLILRGVNTAAFINTVVTFAKLVPVIIFLISALLAFKFNIFSLDIWGNGLHQSIFNQVNSTMKTAVWVFIGIEGAVVFSGRAKKHSDIGKASILALFTMISLYVLISVLSLGIMSRPELANLKTPAMAYVLEKAVGHWGAILVNLGVIISVFGAILAWTLFAAELPYQAAKEGAFPKFFAKENKNKAPINSLLVTNLCVQAFLITFLFTQSAYRFGFALASSAILIPYAFTALYQLQFTLREDKSTPGHQKNLIIGILATIYAVYLIYAGGFDYLLLTMIAYTLGMILYIKMRKDDKLPIFVRYEKISAIVILALCLLCIIEIMTGQIDIAAILAG

SEQ ID NO: 14055 - protein, 954 aa, Streptococcus agalactiae
TTGGTAAAAGAACATCAAAAAATCGTAGTTGCCTTAGGTGGTAACGCTATTCTATCAACAGATGCTTCAGCAAAAGCACAACAAGAAGCATTAATCAACACATCAAAATCACTGGTCAAACTGATTAAAGAAGGCCATGATGTCATTGTTACTCATGGAAATGGTCCCCAAGTTGGTAACTTATTGCTACAGCAAGCAGATTCAGATTCTGAAAAGAATCCAGCAATGCCTTTGGATACTTGTGTTGCCATGACAGAAGGAAGTATTGGTTTTTGGTTACAAAATGCTCTTAACAATGAATTACAAGAACAAGGCATTGACAAAGAGGTTGCAACAGTGGTAACTCAAGTTATTGTAGATGAAAAAGATCAAGCTTTCACTAATCCAACAAAACCTATTGGCCCATTCTTATCTGAAGAAGATGCCAAGAAACAAGCCCAAGAAACAGGTTCAAAATTTAAAGAAGATGCTGGTCGTGGATGGCGTAAAGTCGTTCCTTCACCAAAACCGGTTGGTATCAAAGAAGCTTCTGTTATTAGACGGTTAGTGGACTCTGGTGTGGTTGTTATTAGCGCAGGTGGCGGAGGTGTACCAGTTATTGAAGATGCTAATACAAAAGCATTAAAAGGGGTTGAAGCTGTTATTGACAAAGACTTTGCCAGTCAAACTTTATCAGAACTTGTTGATGCCGACTTATTCATCGTCTTAACTGGCGTTGACAACGTTTTTGTTAATTTTAATAAACCTAATCAAGAAAAATTAGAGGAAGTTACTGTTTCACAAATGAAACAATATATCACTGAAAATCAATTTGCCCCTGGCAGTATGCTACCAAAGGTAGAAGCTGCGATTGCTTTTGTTGAAAATAAACCAGAAGCGCGTGCTATCATTACTTCACTTGAAAATATTGATAATGTCTTAGCAGAAAATGCAGGGACACAAATTGTTGTAAAT

SEQ ID NO: 14056 - protein, 318 aa, Streptococcus agalactiae
MVKEHQKIVVALGGNAILSTDASAKAQQEALINTSKSLVKLIKEGHDVIVTHGNGPQVGNLLLQQADSDSEKNPAMPLDTCVAMTEGSIGFWLQNALNNELQEQGIDKEVATVVTQVIVDEKDQAFTNPTKPIGPFLSEEDAKKQAQETGSKFKEDAGRGWRKVVPSPKPVGIKEASVIRRLVDSGVVVISAGGGGVPVIEDANTKALKGVEAVIDKDFASQTLSELVDADLFIVLTGVDNVFVNFNKPNQEKLEEVTVSQMKQYITENQFAPGSMLPKVEAAIAFVENKPEARAIITSLENIDNVLAENAGTQIVVN

SEQ ID NO: 14057 - protein, 1023 aa, Streptococcus agalactiae
ATGACAAAACCAATTATCTTAACAGGTGATAGACCGACAGGAAAGTTGCATATTGGACATTATGTAGGTAGCTTAAAAAATAGAGTTCTACTTCAAAATGAGGGTAGCTATACTTTATTTGTCTTTTTAGCAGACCAACAAGCACTGACAGACCATGCTAAAGATCCGCAAACTATTGTTGAATCAATTGGTAATGTTGCACTTGATTATTTAGCTGTTGGGCTGGATCCAAACAAGTCGACTTTATTCATTCAAAGTCAAATTCCTGAGTTAGCAGAATTAAGTATGTATTATATGAACTTGGTTTCACTTGCACGTTTGGAACGTAATCCAACTGTAAAAACAGAAATTGCTCAAAAAGGTTTTGGTGAGTCTATTCCAGCAGGATTCTTAGTTTATCCTGTTGCACAAGCAGCTGATATAACCGCTTTTAAAGCTAACCTTGTTCCTGTAGGGACTGACCAAAAACCAATGATTGAACAAACACGTGAAATAGTTAGATCTTTCAATCATGCTTATAATTGTCAGGTTTTAGTTGAACCAGAGGGAATCTATCCAGAAAATGATGCAGCAGGTCGTCTGCCAGGGTTAGATGGTAATGCAAAAATGTCTAAGTCATTAAATAATGGAATCTTTTTAGCAGATGATATGGATACAGTTAAGAAAAAAGTTATGAGCATGTATACTGATCCAAACCATATTAAAGTAGAAGAACCAGGACAAATCGAAGGTAATATGGTATTCCATTACCTTGATGTTTTTGGAAGAGATGAAGACCAAAAAGAGATTACTGCTATGAAAGAACACTATCAAAAAGGTGGACTTGGAGATGTTAAAACAAAACGTTATCTACTTGATATCTTAGAGCGTGAATTATCACCTATTAGAGAACGTCGCCTTGAATATGCTAAAGATATGGGACAAGTTTATCAAATGTTACAAAAAGGTAGTGAGAAAGCTCAAGCTGTTGCAGCCTCTACTTTGGATGAGGTTAAATCAGCCATGGGTTTGAACTATTTTAAA

SEQ ID NO: 14058 - protein, 341 aa, Streptococcus agalactiae; identical to SEQ ID NO: 3914

SEQ ID NO: 14059 - protein, 669 aa, Streptococcus agalactiae
ATGCCACAAGATGGAAGAAAAATGGCTGTATTATTGGGTTTTATTGGTGGTTTTATTGACGTTTATAGTCACATGCAGTTTCACTCCCTTGTTGCAACACAGACAGGTAATATTATCTTGATGGTGGCAAATCTCGGACAAAATGATTTTCACTTTTTTATCACTAAATTATTTTCTATTTTCTTTTTTTCAATTGGTTTTTTGGTTGGTATTGTGATTAAAGAACGTGCAGTAACAGCTTTTTGGCGTCTATATGCATTATGTCCCCTTTTACTTTCTACGATGTTTATTCCTTTTGTTGAAAATGTAAACCACAATATCTGGGTAGCTTTATTAGCCTTTAGCACAGGTATTTTAATGTTGACATTTTCAGGAAGTCGCATTGAATCTGAACCATACACTATCTTAATGACTTCTGGTAATTATCGGAAAATGCTACAATTTTGGTATGAGTATATTGTTAATCGTCAGAGAACGGCTATGCAAAAAAGACGAGCTATCAATTATTCACTGGTAGTTCTAGCATTTATTATTGGAGCATTGGTAGCTGCAATAGTTTACGATATCTTTGCATATAGAGCTATTTTAGGTGTGACGATAACGCTTTTAATTATTATGATTCATTATACGATTGAAATTATTAAGAACGATTTAACGTTACATAATGTT

SEQ ID NO: 14060 - protein, 223 aa, Streptococcus agalactiae
MPQDGRKMAVLLGFIGGFIDVYSHMQFHSLVATQTGNIILMVANLGQNDFHFFITKLFSIFFFSIGFLVGIVIKERAVTAFWRLYALCPLLLSTMFIPFVENVNHNIWVALLAFSTGILMLTFSGSRIESEPYTILMTSGNYRKMLQFWYEYIVNRQRTAMQKRRAINYSLVVLAFIIGALVAAIVYDIFAYRAILGVTITLLIIMIHYTIEIIKNDLTLHNV

SEQ ID NO: 14061 - protein, 870 aa, Streptococcus agalactiae; identical to SEQ ID NO: 8615

SEQ ID NO: 14062 - protein, 290 aa, Streptococcus agalactiae; identical to SEQ ID NO: 2

SEQ ID NO: 14063 - protein, 1617 aa, Streptococcus agalactiae
TTGCTTACAGTTTCAGATGTTTCACTACGTTTTAGTGATCGCAAATTATTTGATGAAGTTAACATTAACTTTACAGCAGGAAATACCTATGGTCTTATCGGAGCAAATGGCGCTGGTAAATCAACTTTCCTTAAAATTTTAGCTGGTGATATTGAACCAACAACGGGACATATTGCACTTGGCCCAGATGAACGCCTTTCTGTACTTCGCCAAAATCATTTTGATTATGAAGATGAGCGCGTCATTGATGTCGTTATCATGGGTAATGAAACACTTTATAGTATCATGAAAGAAAAGGATGCTATCTACATGAAAGAAGATTTTTCTGATGAAGATGGTGTTCGCGCTGCGGAATTAGAAGGAGAATTTGCTGAACTCGGTGGATGGGAGGCTGAAAGTGAGGCTTCTCAATTACTCCAAAATCTAAATATTTCAGAAGAGCTTCATTATCAAAATATGAGTGAATTAGCTAATGGAGACAAAGTTAAAGTTCTCCTTGCAAAAGCTCTCTTTGGTAAACCAGATGTACTTCTCCTTGACGAGCCTACCAATGGACTTGATATCCAGTCTATTACTTGGTTAGAAGATTTCTTGATTGACTTTGAAAATACAGTTATTGTAGTTTCCCACGACCGTCATTTCTTGAATAAAGTATGTACACATATGGCTGACCTTGATTTTGGAAAAATTAAACTGTTCGTCGGCAACTATGATTTCTGGAAAGAATCATCAGAATTAGCAGCTCGTTTACAAGCTGATCGTAATGCTAAAGCAGAAGAAAAAATTAAACAACTTCAAGAATTCGTTGCACGATTTTCAGCGAATGCTTCAAAATCAAAACAAGCAACTTCTCGTAAAAAAATGCTTGATAAAATTGAACTTGAAGAGATTGTACCATCAAGCCGTAAATACCCATTCGTTAACTTTAAAGCCGAACGCGAAATGGGAAATGATTTATTGACCGTTGAAAATCTCTCTGTCACTATTGATGGGGAAAAAATCCTTGATAATATCAGTTTCATTCTTCGTCCTGGTGATAAAACTGCACTTATTGGACAAAATGATATCCAAACTACTGCACTTATTCGAGCATTGATGGGGGATATCGAATATGAAGGAACAATCAAATGGGGAGTAACAACTAGTCGTTCTTACCTTCCAAAAGACAATTCACGAGACTTTGCTTCTGGCGAGTCAATCTTAGAATGGCTTCGTCAATTTGCTAGTAAAGAAGAAGACGATAATACCTTCTTACGTGGCTTCCTAGGTCGTATGCTTTTCTCTGGAGATGAGGTTAACAAATCTGTTAATGTCTTATCTGGGGGTGAAAAAGTACGCGTTATGCTTTCGAAATTAATGCTATTAAAATCTAATGTTCTTGTTCTTGATGATCCAACAAACCACTTAGATTTGGAATCTATTTCAAGTCTCAATGATGGACTAAAAGATTTCAAAGAATCTATTATTTTTGCAAGTCATGACCACGAGTTTATTCAAACTTTAGCGAACCATATTATTATTCTTTCTAAAAACGGAGTTATCGATCGTATCGATGAAACTTACGATGAATTTCTTGAAAATACCGAAGTACAAGCTAAGGTCGCTCAACTCTGGAAA

SEQ ID NO: 14064 - protein, 539 aa, Streptococcus agalactiae
MLTVSDVSLRFSDRKLFDEVNINFTAGNTYGLIGANGAGKSTFLKILAGDIEPTTGHIALGPDERLSVLRQNHFDYEDERVIDVVIMGNETLYSIMKEKDAIYMKEDFSDEDGVRAAELEGEFAELGGWEAESEASQLLQNLNISEELHYQNMSELANGDKVKVLLAKALFGKPDVLLLDEPTNGLDIQSITWLEDFLIDFENTVIVVSHDRHFLNKVCTHMADLDFGKIKLFVGNYDFWKESSELAARLQADRNAKAEEKIKQLQEFVARFSANASKSKQATSRKKMLDKIELEEIVPSSRKYPFVNFKAEREMGNDLLTVENLSVTIDGEKILDNISFILRPGDKTALIGQNDIQTTALIRALMGDIEYEGTIKWGVTTSRSYLPKDNSRDFASGESILEWLRQFASKEEDDNTFLRGFLGRMLFSGDEVNKSVNVLSGGEKVRVMLSKLMLLKSNVLVLDDPTNHLDLESISSLNDGLKDFKESIIFASHDHEFIQTLANHIIILSKNGVIDRIDETYDEFLENTEVQAKVAQLWK

SEQ ID NO: 14065 - protein, 2577 aa, Streptococcus agalactiae
ATGACAATTAACCACTATAAGCTTCGTATACCTTACTATACAATAAGCTTTCTACTTCCCTTCATAATCATAGTCTGTATCCTCTTTACTAAGAATATTTATTGGGGAAGTCCAACAACCATATTAGCAAGCGATAGCTTTCATCAATATGTTATCTTTAATCAAGCATTAAGAAATATTCTTCATGGTTCAAACAGCTTATTCTATACCTTTACAAGCGGTTTAGGTTTAAATTTTTATGCTCTGAGTAGTTACTATTTGGGAAGTTTTTTATCCCCAATAGTTTATTTCTTTAACCTAAAAAATATGCCTGATGCTATCTACCTTTTAACAATATGTAAAGTAGGGTTGATAGGTTTGTCAATGTTTGTCACTCTTTGTAAACGTCATTGTAAAGTTAATCGTGTCTTACTTTTAGTAATTTCTACTTGCTATAGCTTAATGAGTTTCTCAATTAGCCAAATTGAAATTAATATGTGGCTAGATGTATTTATTCTAATTCCCCTTGTTGTTTTAGGAGTTGATCAGCTACTATGGGAAAGAAAACCTATACTTCATTTTCTCTCTCTGACAGCCTTATTCATCCAAAACTATTATTTTGGTTTTATGACTACCATCTTTACTAGCCTTTACTTCATCGTACAAATAACCCGTAATACTGATAGTAAGGTTGCATTTAAACAATTTCTTCATTTTACCTTTTTATCTCTTTTAGCTGGTATGACTAGTAGCATTATGATTTTGCCAACTTATTTTGATTTAACTACTCATGGTGAAAAGTTGACAAAGGTATCGAAGATGTTTACAGAAAATTCTTGGTACATGGATTTGTTTGCTAAAAATATGATTGGAGCCTATGATACAACAAAATTTGGCTCTATTCCTATGATTTATGTAGGTTTACTTCCTTTACTCCTTTCTTTACTTTACTTTACAATAAAGGAAATTCCTCGAAGGACTAGATTAGCATATGGATTTTCACTAATATTTGTTATTGCTAGTTTTTATATAACACCTCTAGATTTATTTTGGCAAGGGATGCATGCTCCAAATATGTTTCTTCATCGCTACTCTTGGGTACTTTCAGTACTTATCTGTCTACTAGCTGCTGAATGCCTTGAGTATTTAGACAACATTTCTTGGAAAAAGATTTTAGGGGTCAATTTAATTTTAATAAGTGGTTTCATAATCACGTTTTTATTTAAAAAGCACTATCATTACCTTAATCTTGAATTACTTCTTTTAACCTTAACATTCCTCTCAGCTTATATTATTCTAACTATTAGTTTTGTCAGTAAGCAAATCCCTAAATTAGTTTTTTATCCCTTTCTTATTGGTTTTGTTGTGTTAGAGATGACATTAAACACCTTTTACCAACTAAATAGTCTTAACGATGAGTGGGTATTTCCATCTAGGCAAGGATATGCTAAATATAATCACAGCATTAGCAAACTTGTCAGAAAGACTGAGAGAAATAACTCTACATTCTTCCGTACAGAGCGCTGGTTAGGACAAACCGGCAACGACTCTATGAAATATAATTATAATGGTATTTCACAATTTTCATCTATTAGAAATCGTTCTTCAAGTCAAGTGCTTGATAGACTTGGCTTTAAATCAGATGGTACAAATTTAAATTTACGTTATCAAAATAATACTTTGATCGCAGATAGTCTATTTGGTGTAAAGTACAACCTTACAGAATATCCTTTTGATAAATTTGGTTTTATCAGAAAAGCTCAAGATAAACAAACCATTCTTTACGAAAATCAGTTTGCCAGTCAATTAGCTATACTAACGAATCAAGTATATCAAGATAAACCATTTACTGTGAATACTTTGGATAATCAGACAACTCTTTTAAATCAATTAAGTGGTTTGAAAGAGACGTATTTTGAGCATCTTATTCCAAATAGCGTTTCTGGGCAAACTACTCTTAATAAACAAGTATTTGTTAGAAAGAATAAACAAGGGAATACTGAAATTACCTATAACATAACTATCCCTAAAAACAGTCAGTTATATGTTAGTATGCCGTTTATAAATTTTAATAATGAGGAAAATAAAATTGTTCAAATATCCGTTAATAATGGACCATTTGTACCTAATACTCTTGATAATGCTTATTCATTTTTTAATATTGGTTCCTTTGCTGAAAACAGTCGTATCAAAGTAAAATTTCAATTTCCACACAATGATCAAGTTTCTTTCCCAATTCCCCACTTTTATGGGCTCAAGTTAGAAGCTTATCAAAAAGCTATGACTGTTATTAATAAACGAAAAGTAAAAGTAAGAACTGATCACAATAAAGTTATTGCTAATTATACAAGTCCTAATAGAAGTTCTCTTTTCTTCACTATTCCCTATGATAGAGGTTGGAAAGCTTATCAAAATAATAAAGGAATAAAAATTTTCAAAGCTCAGAAAGGTTTTATGAAAATAAATATTCCTAAAGGAAAAGGCAAAGTAACATTAATTTTTATCCCTTACGGCTTTAAATTTGGGGTAGGCCTATCTATTACTGGAATAGTATTATTTACTGTCTATTATTTAAAATTTGGAAAAAATAAAATAGGA

SEQ ID NO: 14066 - protein, 859 aa, Streptococcus agalactiae
MTINHYKLRIPYYTISFLLPFIIIVCILFTKNIYWGSPTTILASDSFHQYVIFNQALRNILHGSNSLFYTFTSGLGLNFYALSSYYLGSFLSPIVYFFNLKNMPDAIYLLTICKVGLIGLSMFVTLCKRHCKVNRVLLLVISTCYSLMSFSISQIEINMWLDVFILIPLVVLGVDQLLWERKPILHFLSLTALFIQNYYFGFMTTIFTSLYFIVQITRNTDSKVAFKQFLHFTFLSLLAGMTSSIMILPTYFDLTTHGEKLTKVSKMFTENSWYMDLFAKNMIGAYDTTKFGSIPMIYVGLLPLLLSLLYFTIKEIPRRTRLAYGFSLIFVIASFYITPLDLFWQGMHAPNMFLHRYSWVLSVLICLLAAECLEYLDNISWKKILGVNLILISGFIITFLFKKHYHYLNLELLLLTLTFLSAYIILTISFVSKQIPKLVFYPFLIGFVVLEMTLNTFYQLNSLNDEWVFPSRQGYAKYNHSISKLVRKTERNNSTFFRTERWLGQTGNDSMKYNYNGISQFSSIRNRSSSQVLDRLGFKSDGTNLNLRYQNNTLIADSLFGVKYNLTEYPFDKFGFIRKAQDKQTILYENQFASQLAILTNQVYQDKPFTVNTLDNQTTLLNQLSGLKETYFEHLIPNSVSGQTTLNKQVFVRKNKQGNTEITYNITIPKNSQLYVSMPFINFNNEENKIVQISVNNGPFVPNTLDNAYSFFNIGSFAENSRIKVKFQFPHNDQVSFPIPHFYGLKLEAYQKAMTVINKRKVKVRTDHNKVIANYTSPNRSSLFFTIPYDRGWKAYQNNKGIKIFKAQKGFMKINIPKGKGKVTLIFIPYGFKFGVGLSITGIVLFTVYYLKFGKNKIG

SEQ ID NO: 14067 - protein, 477 aa, Streptococcus agalactiae
ATGAAATTAAAAATAATTACAGTTGGAAAATTGAAAGAGAAATACCTTAAAGAAGGTGTTGCAGAGTATCAGAAACGTCTGAATCGCTTTTCTAAAATTGAGACAATTGAGCTAGCTGATGAAAAGACACCTGATAAAGCTAGTATATCTGAAAATCAAAGAATTTTAGATATAGAAGGGGAACGTATTTTGAGTAAAATAGGTGAGAGGGATTATGTCATTGGTTTGGCTATAGAAGGGAAACAATTGCCATCTGAATCATTTAGCCATCTAATCGATCAAAAAATGATATCCGGCTACTCTACTATTACTTTTGTTATTGGTGGTAGTTTGGGTTTATCTCAAAAAGTGAAAAAACGTGCTGATTATTTAATGAGTTTTGGACTGTTAACCTTACCTCATCAACTTATGAAATTAGTCTTGATGGAACAAATTTATCGTGCTTTTATGATTCGTCAAGGCACTCCTTACCACAAA

SEQ ID NO: 14068 - protein, 159 aa, Streptococcus agalactiae; identical to SEQ ID NO: 8

SEQ ID NO: 14069 - protein, 1227 aa, Streptococcus agalactiae
GTGAAAAAAAAATTAGTCTCATCACTTCTAAAGTGTTCTCTAATCATTATTGTTAGCTTTGCTGGTGGAGCATTTGCTAGTTTTGTCATGAATCATAATGACAATATTCCAAATGGTGGTGTCACTAAAACTAGTAAAGTAAATTATAATAACATAACGCCTACAACAAAAGCTGTTAAAAAGGTACAAAATAGTGTTGTTTCTGTTATCAATTATAAACAACAAGAGAGTCGTTCTGACCTATCAGACTTCTATAGTCATTTTTTTGGTAATCAGGGGGGCAACACTGATAAGGGCTTACAAGTTTACGGTGAAGGCTCTGGAGTCATCTATAAAAAAGATGGTAAAAATGCCTATGTTGTCACTAATAACCACGTCATTGATGGGGCTAAACAAATTGAAATTCAACTAGCTGATGGCTCAAAAGCAGTTGGGAAACTTGTTGGGTCAGATACCTACTCTGATTTAGCCGTCGTCAAAATTCCATCAGATAAAGTTTCAAATATTGCAGAATTTGCTAATTCATCAAAACTCAACATTGGTGAAACTGCTATAGCGATCGGAAGCCCTCTTGGAACTGAGTATGCAAATTCTGTAACTCAAGGTATTGTATCTAGTTTAAAAAGAACTGTAACAATGACTAATGAAGAAGGACAAACAGTTTCTACAAATGCTATCCAGACGGATGCTGCTATCAATCCTGGTAATTCAGGTGGAGCACTTATCAATATTGAAGGACAGGTTATTGGAATTAATTCTAGTAAAATTTCTTCTACATCAAATCAAACCTCAGGACAATCGTCAGGAAATAGCGTTGAAGGTATGGGATTTGCCATTCCTTCAAATGATGTTGTTAAGATTATCAATCAACTTGAGAGTAACGGACAAGTAGAGAGACCTGCTCTAGGTATTTCTATGGCTGGATTAAGTAATTTACCATCCGATGTTATTAGTAAACTGAAAATCCCAAGTAATGTTACTAATGGTATTGTAGTAGCATCTATCCAATCTGGCATGCCAGCTCAAGGCAAACTAAAGAAATACGATGTCATTACTAAAGTTGACGATAAAGAAGTAGCATCTCCAAGTGATTTACAAAGTTTACTCTATGGCCACCAGGTAGGGGATTCCATAACAGTAACCTTTTATCGTGGTGAAAATAAACAAACAGTCACTATAAAACTTACTAAAACTAGTAAAGATTTAGCTAAACAACGAGCAAATAAC

SEQ ID NO: 14070 - protein, 409 aa, Streptococcus agalactiae
MKKKLVSSLLKCSLIIIVSFAGGAFASFVMNHNDNIPNGGVTKTSKVNYNNITPTTKAVKKVQNSVVSVINYKQQESRSDLSDFYSHFFGNQGGNTDKGLQVYGEGSGVIYKKDGKNAYVVTNNHVIDGAKQIEIQLADGSKAVGKLVGSDTYSDLAVVKIPSDKVSNIAEFANSSKLNIGETAIAIGSPLGTEYANSVTQGIVSSLKRTVTMTNEEGQTVSTNAIQTDAAINPGNSGGALINIEGQVIGINSSKISSTSNQTSGQSSGNSVEGMGFAIPSNDVVKIINQLESNGQVERPALGISMAGLSNLPSDVISKLKIPSNVTNGIVVASIQSGMPAQGKLKKYDVITKVDDKEVASPSDLQSLLYGHQVGDSITVTFYRGENKQTVTIKLTKTSKDLAKQRANN

SEQ ID NO: 14071 - protein, 771 aa, Streptococcus agalactiae
ATGGAATATTTAGAAACGATCAACATCAATCATATTGCTCCAAATCCGTATCAACCTCGCCTAGAATTTAATACAAAAGAACTAGAAGAATTAGCCGACTCTATTAAAATTAATGGCCTTATTCAACCCATTATTGTAAGACCGTCAGCAGTCTTTGGTTACGAACTGGTAGCCGGAGAACGACGGTTAAGAGCCGCAAAGTTAGCTAAATTGGAAAGTATACCTGCAATTATAAAATCCTATAATAATGATGATAGTATGCAATTAGCTATTGTCGAAAATTTACAACGATCTAATTTGTCACCCATTGAAGAGGCTAAAGCCTACTCTCAACTTCTACAAAAGAAAAGTATGACACATGAAGAGTTAGCAAAATATATGGGAAAATCTCGTCCCTATATATCAAATACGATACGACTACTAAATTTACCGCCACTAATTACTTCAGCTATTGAAGAAGGAAAACTTTCCTCTGGTCATGCGCGTGCACTACTCAGTCTACCAGATGCTAGTCAACAAAAAGATTGGTATCAGAGAATCCTCACTGAAGATATTAGTGTAAGACGACTAGAGAAGTTATTAAAACAAGAAAAGAAAACAAATCATAAGTCACTTCAAAATAAAGATGTCTTTCTAAAACATCAAGAAAATGAGTTAGCTCAATTTCTAGGTAGCAAAGTGAAACTTACTATTAATAAAGATGGTGCTGGCAATATAAAGATTGCTTTCAATAACCAAGAAGAATTAAACAGAATTATCAACACTCTAAAA

SEQ ID NO: 14072 - protein, 257 aa, Streptococcus agalactiae
MEYLETININHIAPNPYQPRLEFNTKELEELADSIKINGLIQPIIVRPSAVFGYELVAGERRLRAAKLAKLESIPAIIKSYNNDDSMQLAIVENLQRSNLSPIEEAKAYSQLLQKKSMTHEELAKYMGKSRPYISNTIRLLNLPPLITSAIEEGKLSSGHARALLSLPDASQQKDWYQRILTEDISVRRLEKLLKQEKKTNHKSLQNKDVFLKHQENELAQFLGSKVKLTINKDGAGNIKIAFNNQEELNRIINTLK

SEQ ID NO: 14073 - protein, 1359 aa, Streptococcus agalactiae
ATGACGGAAAACGAACAACTATTTTGGAATAGAGTACTAGAGCTATCTCGTTCTCAAATAGCACCAGCAGCTTATGAATTTTTTGTTCTAGAGGCTAGACTCCTCAAAATTGAACATCAAACTGCAGTTATTACTTTAGATAACATTGAAATGAAAAAGCTATTCTGGGAACAAAATTTGGGGCCTGTTATCCTAACAGCTGGTTTTGAAATTTTCAATGCTGAAATTACAGCTAACTATGTCTCAAACGATTTACATTTACAAGAAACTAGTTTTTCTAACTACCAGCAATCTAGCAACGAAGTAAATACTTTACCAATTAGAAAAATCGACTCTAACCTTAAAGAGAAATATACTTTTGCTAATTTTGTTCAAGGAGATGAAAATAGATGGGCTGTTTCAGCATCAATTGCTGTAGCTGATAGTCCTGGCACGACTTATAATCCTCTATTTATCTGGGGGGGACCTGGTCTAGGAAAGACGCATCTACTAAATGCTATTGGAAATCAAGTTTTAAGAGATAATCCAAACGCGAGGGTTTTATACATCACTGCTGAGAATTTTATTAATGAATTTGTCAGTCATATTCGTTTAGATTCGATGGAAGAATTAAAAGAAAAGTTTCGCAACTTGGACTTACTCCTGATTGATGATATTCAGTCGCTTGCTAAGAAAACCTTAGGGGGGACCCAAGAGGAGTTCTTCAATACTTTCAATGCTTTACATACAAACGATAAACAAATCGTATTGACCAGTGACCGAAATCCAAATCAATTAAATGATCTAGAAGAACGTCTAGTCACGCGCTTTAGTTGGGGACTCCCAGTAAATATCACACCACCTGATTTTGAAACACGAGTTGCTATTTTAACCAATAAAATTCAAGAATATCCTTATGATTTTCCTCAAGATACCATTGAATACTTAGCAGGAGAATTTGATTCCAACGTACGTGAATTAGAAGGAGCCTTGAAAAATATTAGTCTAGTTGCTGACTTTAAGCATGCTAAAACTATTACAGTAGATATAGCTGCAGAAGCTATCAGAGCACGTAAAAATGACGGTCCTATTGTTACTGTTATTCCTATAGAAGAAATTCAAATACAAGTTGGTAAATTCTATGGCGTAACTGTAAAAGAGATAAAAGCAACTAAAAGAACACAAGATATTGTCCTTGCAAGACAGGTAGCCATGTACTTAGCTCGTGAGATGACAGATAACAGTCTCCCCAAAATAGGTAAAGAATTTGGGGGACGAGATCACTCAACTGTTCTCCACGCTTATAATAAAATAAAAAATATGGTTGCTCAAGATGACAACTTACGAATTGAGATAGAAACTATCAAAAATAAAATCAGG

SEQ ID NO: 14074 - protein, 453 aa, Streptococcus agalactiae; identical to SEQ ID NO: 14

SEQ ID NO: 14075 - protein, 1134 aa, Streptococcus agalactiae
ATGATTCATTTTTCAATAAATAAAAATTTCTTCTTGCATGCTCTAACAGTAACCAAACGAGCTATTAGTCATAAAAATGCGATTCCAATCCTTTCAACTGTTAAAATAGAAGTGACTAGAGATGCTATCATTTTAACGGGGTCAAATGGACAAATTTCAATTGAAAATACTATTCCTGCTTCAAATGAAAATGCAGGTTTACTAGTAACGAATCCAGGCTCTATTTTGTTAGAAGCTGGTTTCTTTATTAATATTATTTCAAGTTTACCAGATGTAACTTTAGAATTTACAGAGATTGAACAACATCAAATTGTTCTTACTAGTGGAAAATCAGAGATTACTTTGAAAGGTAAGGATGTCGATCAATACCCTCGTCTGCAGGAAATGACAACAGATACTCCATTAACATTAGAAACTAAACTGTTAAAATCAATTATTAATGAAACTGCTTTTGCTGCTAGCCAACAAGAAAGCCGTCCAATCTTAACAGGTGTTCATTTGGTTATCAGTCAAAATAAATACTTTAAGGCTGTTGCGACAGATTCACACCGTATGAGTCAACGCACTTTCCAATTAGAGAAATCGGCTAATAATTTTGATTTGGTTGTTCCAAGTAAATCCCTTCGAGAATTTTCGGCTGTTTTTACAGATGATATTGAAACTGTAGAGGTTTTCTTCTCAGATAGTCAAATGTTATTTAGAAGTGAAAATATCAGCTTCTATACACGTTTGCTTGAAGGAAACTACCCTGATACTGATCGCCTCCTAACTAATCAGTTTGAAACCGAAATTATCTTTAATACAAATGCTTTACGCCATGCTATGGAACGTGCTTATTTAATTTCGAATGCAACTCAGAACGGTACTGTTCGTTTAGAAATTCAAAATGAAACAGTCTCAGCTCATGTAAACTCTCCAGAAGTTGGTAAAGTTAATGAGGAATTGGATACTGTTAGCCTTAAAGGTGATAGTTTAAATATTAGTTTTAATCCAACTTACCTAATTGAATCTTTAAAAGCAGTAAAAAGCGAAACAGTTACGATTCGATTTATTTCTCCAGTACGTCCATTTACTTTGACCCCTGGTGAAGATACTGAAGATTTCATCCAATTAATAACTCCTGTTCGTACTAAC

SEQ ID NO: 14076 - protein, 378 aa, Streptococcus agalactiae; identical to SEQ ID NO: 16

SEQ ID NO: 14077 - protein, 879 aa, Streptococcus agalactiae
ATGACTCTATATATAATAGCTAACCCCCATGCTGGTAATAAAAATGCCTCCACTATTGTTGGTAAAATTCAGGAGCTTTATCATACTGAAGATATTTCTGTGTTCTATACAGAACAGAAAGATGATGAAAAAAAACAAGTCATTAATATACTAAGGTCTTTTAAAGAAAGTGATCATCTAATGATTATAGGAGGAGATGGTACCTTATCAAAAGTAATGACTTATCTCCCCCAACATATTCCGTGCGCTTATTATCCTGTTGGTTCAGGAAATGATTTTGCCAGGGCTTTGAAAATTCCTAACCTCAAAGAAACCCTTACCGCTATTCAGACAGAAAGATTAAAGGAAATTAATTGCTTTATTTATGATAAAGGGCTGATTTTGAATAGTTTAGATTTAGGTTTTGCAGCCTATGTCGTTTGGAAAGCATCTAACTCTAAAATAAAAAATATTTTGAATAGATATCGTCTAGGAAAAATAACTTACATTGTTATAGCTATCAAATCATTATTACATTCTTCTAAAGTACAAGTATTAGTGGAAGGAGAGACAGGACAGCGGATAAAACTAAATGACCTTTATTTTTTCGCATTAGCAAATAACACTTATTTTGGAGGTGGCATTACTATTTGGCCTAAAGCAAGTGCTTTAACTGCAGAGTTAGATATGGTTTACGCTAAAGGGCATACTTTTCTAAAACGATTAAGTATTTTATTATCTTTGGTTTTTAAAAGGCATACTACCTCTAAAAGTATAAAACACCAGACTTTCAAAGCTATGACCGTATATTTTCCTAAAAATAGTTTGATTGAAATAGATGGCGAAATAGTTGAGTTAGATCAGATTAGTTTAAAATGTCAAAAAAGGTATTTATATATG

SEQ ID NO: 14078 - protein, 293 aa, Streptococcus agalactiae
MTLYIIANPHAGNKNASTIVGKIQELYHTEDISVFYTEQKDDEKKQVINILRSFKESDHLMIIGGDGTLSKVMTYLPQHIPCAYYPVGSGNDFARALKIPNLKETLTAIQTERLKEINCFIYDKGLILNSLDLGFAAYVVWKASNSKIKNILNRYRLGKITYIVIAIKSLLHSSKVQVLVEGETGQRIKLNDLYFFALANNTYFGGGITIWPKASALTAELDMVYAKGHTFLKRLSILLSLVFKRHTTSKSIKHQTFKAMTVYFPKNSLIEIDGEIVELDQISLKCQKRYLYM

SEQ ID NO: 14079 - protein, 195 aa, Streptococcus agalactiae
ATGTATCAAGTTGGATCACTTATTGAAATGAAAAAACCTCATGCTTGTGTAATTAAAGAAACTGGTAAAAAGGCTAATCAATGGAAGGTACTGAGAGTAGGAGCTGATATTAAAATTCAGTGTACTAACTGTCAGCATGTGATTATGATGAGTCGTTATGATTTTGAGCGAAAATTAAAAAAAGTACTGCAACCA

SEQ ID NO: 14080 - protein, 65 aa, Streptococcus agalactiae
MYQVGSLIEMKKPHACVIKETGKKANQWKVLRVGADIKIQCTNCQHVIMMSRYDFERKLKKVLQP

SEQ ID NO: 14081 - protein, 114 aa, Streptococcus agalactiae; identical to SEQ ID NO: 9607

SEQ ID NO: 14082 - protein, 38 aa, Streptococcus agalactiae; identical to SEQ ID NO: 9608

SEQ ID NO: 14083 - protein, 1113 aa, Streptococcus agalactiae
ATGGCTTTAACAGCAGGTATTGTAGGCTTACCAAATGTTGGTAAATCAACTTTATTTAACGCAATTACAAAAGCAGGAGCAGAAGCTGCTAACTATCCTTTTGCGACTATTGATCCCAATGTTGGTATGGTAGAGGTACCAGATGAGCGTCTGCAAAAATTGACAGAATTGATTACGCCTAAAAAAACAGTTCCGACAACCTTTGAATTTACTGATATTGCAGGTATTGTTAAAGGTGCTTCGAAGGGGGAAGGTCTAGGAAATAAATTTTTAGCTAATATTCGTGAAGTGGATGCTATTGTTCATGTGGTACGTGCTTTTGATGATGAAAATGTTATGCGTGAACAAGGTCGTGAGGATGCCTTCGTTGATCCTATAGCAGATATTGATACTATTAATCTTGAATTAATCTTAGCTGATTTAGAGTCAATCAATAAACGTTATGCGCGTGTTGAAAAAATGGCACGAACTCAAAAAGATAAAGAATCAGTAGCAGAGTTCAATGTTTTACAAAAGATTAAACCTGTTTTGGAAGATGGGAAATCAGCTCGTACCATTGAGTTTACAGAAGAGGAAGCAAAAGTTGTTAAAGGTCTCTTTTTATTAACAACTAAACCTGTTTTATATGTTGCTAATGTTGATGAGGACAAAGTAGCTGATCCTGATGATATCGACTATGTTAATCAAATTCGTGCATTTGCAGAAACAGAGAGTGCAGAAGTAGTTGTGATTTCTGCTCGAGCTGAAGAAGAAATATCTGAACTTGATGATGAAGATAAGTTAGAATTTTTAGAAGCTATTGGATTAACAGAATCTGGTGTTGATAAATTAACACGAGCTGCTTATCATCTTTTAGGCCTTGGAACTTACTTTACTGCTGGTGAAAAAGAGGTTCGCGCTTGGACATTTAAGCGTGGTATAAAAGCTCCACAAGCTGCGGGTATTATCCATTCAGATTTTGAAAGAGGTTTTATTCGTGCAGTAACGATGTCATATGATGACCTTATTCAATATGGATCTGAAAAAGCAGTAAAAGAAGCTGGCCGGTTACGTGAAGAAGGAAAAGAGTATATTGTTCAAGATGGCGATATCATGGAATTCCGTTTCAATGTC

SEQ ID NO: 14084 - protein, 371 aa, Streptococcus agalactiae; identical to SEQ ID NO: 9610

SEQ ID NO: 14085 - protein, 573 aa, Streptococcus agalactiae
ATGGTAAAAATGATTGTTGGATTAGGAAATCCAGGAAGTAAATATAATGATACAAAACATAATATTGGATTTATGGCTGTTGACAGAATTGTAAAAAAACTTGACGTCAACTTTACAGAAGATAAAAATTTTAAAGCAGAGATAGGTAGTGATTTTATCAACGGTGAAAAAATTTATTTTATCAAACCAACTACTTTTATGAATAACAGTGGTATTGCGGTAAAAGCCCTGCTTACTTACTACAACATTTCTATTAAGGATATGATTATCATATATGATGATTTAGACATGGAAGTCGGTAAAATACGTTTTCGTCAAAAAGGATCTGCTGGGGGACATAATGGTATCAAGTCTATTATTGCTCATTTAGGTACTCAAGAATTTGATCGTATTAAAGTAGGTATAGGACGTCCGAATGGACGTATGACAGTTATTAATCATGTTCTAGGGAAGTTTGATAAAAATGATGAAATTATGATATCAAATACTCTTGATAAGGTTGACAATGCTGTCAATTATTATTTACAGACGAATGATTTTCAAAAAACAATGCAGAAATACAACGGTTTAAAA

SEQ ID NO: 14086 - protein, 191 aa, Streptococcus agalactiae
MVKMIVGLGNPGSKYNDTKHNIGFMAVDRIVKKLDVNFTEDKNFKAEIGSDFINGEKIYFIKPTTFMNNSGIAVKALLTYYNISIKDMIIIYDDLDMEVGKIRFRQKGSAGGHNGIKSIIAHLGTQEFDRIKVGIGRPNGRMTVINHVLGKFDKNDEIMISNTLDKVDNAVNYYLQTNDFQKTMQKYNGLK

SEQ ID NO: 14087 - protein, 3495 aa, Streptococcus agalactiae
ATGAATATTATAGAATTATTTAGCCAAAATAAAGTGGTGCGGACATGGCACTCTGGATTAGTAACTAATAGTCGCCAATTAGTTATGGGGTTTTCAGGAGCAAGTAAAGCTATTGCTATAGCATCAGCCTACGAGAAGTTATCTAAAAAAATTATGGTAGTCACTGCCACTCAAAACGATTCTGATAAATTATCAAGTGATATATCAAGTTTAATTGGAGAAGATAACGTTTATCAATTTTTTGCTGATGACGTTCCTGCAGCAGAGTTTATTTTCTCTTCATTAGACAAATCAATTTCACGACTCAGTGCCTTGAGGTTTCTAAAAGATCCAGAAAAAAACGGTGTTTTGATTACTAGTATCAGTGGTTTAAGGTTACTATTACCAAATCCGGAAGTTTTCTCGAAAAGTCAATATAAGTTTGAAATCGGTCAAGAATGTTATTTAGATAAATTGAGTAAGAACTTAGTCAATTTAGGTTATCAGAAAGTTTCTCAAGTATTTAGTCCTGGTGAATTTAGCCAAAGAGGAGATATTTTAGATATTTTTGAGATGACACAAGAATATCCTTATCGCTTGGAATTCTTCGGAGATGAAATAGATGGCATCAGGCAGTTTGATATTGACACTCAAAAGTCTCTTAAACAATTAGAGTCAGTACAGATTTCGCCAGCAGATGATATTATTTTACAAGATGCAGATTTCGAGCGTGCAAAGAAAAAACTTGAGGGCTATCTAGTAACAGCTAGTGAGGAACAACGCGCCTATTTGAGCGAGGTTTTATCTACAACCGAGAATCATTTTAAGCACTCAAATATTCGTCGTTTTCTAAGTATCTTTTATGAAAAAGAATGGGGAATATTAGACTATATTCCTGAGGGAACTCCACTTTTTGTTGATGATTTTCAAAAAATTGTAGATCGAAATGCTAAGTTAGATTTAGAAATAGCTAGCCTTCTGACGGAAGATTTACAACAAGGCAAGTCTCATTCTAGTTTGAACTATTTTTCAGATCCTTATAAGCAATTAAGACAATACCAACCAGCAACCTTCTTTTCAAATTTCCACAAAGGATTAGGAAATCTGAAATTTGATAAACTTCATCATTTTACTCAATATGGAATGCAAGAATTTTTTAATCAATTTCCATTGTTGGTCGATGAAATCAATCGTTATAAGAAATCTGGAGCGACAGTACTGTTGCAAGTAGATTCTCAAAAAGGTTTAAATCTCCTTCAAGAAAACTTAAAAGAATATGGGTTAGATTTAATCATTTCAGATAAAAACGATATCGTTCCAAAGGAGTCACAACTTATTGTTGGGCATCTTTCAAATGGTTTTTATTTTGCAGATGAGAAAATTGTTCTGATTACTGAACGTGAGATTTATCATAGGCGTGTTAAAAGGAAAATTAGACGCAGTAATATTAGTAATGCAGAACGTCTAAAAGATTATAATGAACTTTCAGTTGGCGATTATGTTGTTCATAATGTTCATGGCGTAGGAAAATTTTTAGGTATTGAAACAATTGAGATACAAGGTATTCATCGTGATTATCTGACTATTCAATATCAAAATGCTGATCGGATCTCTATCCCCGTAGAACAAATTGAACTTCTAACAAAATATGTCTCTGCAGATGGCAAAGAGCCTAAAATTAATACGTTAAATGATGGTCGCTTCAAAAAAGCAAAACAGAGAGTTGCAAAGCAAGTAGAAGATATTGCTGATGATTTGTTGAAACTTTATGCAGAGCGTAGTCAATTACAAGGATTTGCATTTTCTCCTGACGATAATATGCAAAATGACTTTGATAATGATTTTGCATATGTAGAGACAGAGGATCAATTGCGGTCGATAAAAGAAATTAAACAGGATATGGAAGGTAATCGTCCGATGGATCGATTATTGGTTGGAGACGTTGGTTTTGGTAAGACAGAGGTTGCTATGCGTGCGGCTTTCAAAGCTGTCAATGACCATAAACAAGTTGCTGTTTTAGTCCCAACAACAGTTCTAGCTCAGCAGCATTTTGAAAATTTTAAAGAACGTTTTAGTAATTATCCTGTTACAGTTGATGTACTTAGTCGTTTTCGTAGCAAAAAAGAACAAACAGATACACTAAAAAGATTATCTAAGGGCCAAGTTGATATTATTATTGGAACACATCGGCTTCTCTCTCAAGATGTTGTATTTTCGGATTTAGGGTTAATAGTTATTGATGAGGAACAGCGATTTGGTGTAAAGCATAAAGAAAAGTTAAAAGAATTAAAAACAAAAGTTGATGTCTTAACTTTGACAGCGACCCCAATACCTAGAACATTACATATGTCAATGCTTGGCATTAGAGACTTATCAGTCATTGAAACACCTCCAACTAATCGTTATCCTGTGCAGACTTACGTTTTGGAGACAAATCCTGGTTTAGTTAGAGAAGCTATTATTCGTGAGATAGACAGAGGAGGACAGGTTTTTTATGTTTACAATAAAGTTGACACTATTGAACAGAAAGTTTCAGAACTTCAGGAGTTAGTACCAGAAGCTAGTATTGGTTTTGTTCATGGTCAAATGTCTGAAATTCAATTAGAAAATACATTAATAGACTTTATCAATGGAGATTACGATGTTTTAGTTGCAACGACAATAATTGAGACAGGAGTCGATATTTCAAATGTTAATACCCTCTTTGTTGAAAATGCAGATCATATGGGCTTGTCAACCCTTTATCAATTAAGAGGCCGTGTGGGTAGAAGTAATCGCATTGCTTATGCTTACCTTATGTACAGACCTGATAAAGTTTTAACAGAAATTTCTGAGAAAAGACTAGATGCAATCAAAGGGTTTACAGAATTGGGATCTGGTTTTAAAATAGCGATGCGTGATTTATCTATACGTGGTGCAGGAAATATTTTAGGAGCTTCACAAAGTGGTTTTATTGATTCGGTTGGATTCGAGATGTATTCACAGCTTCTAGAGCAAGCGATTGCCACCAAACAAGGAAAATCATTAATTCGTCAAAAAGGTAATGTTGAATTAGCCTTACAAATTGACGCCTATTTACCAGCAGAATATATATCAGATGAGCGCCAAAAAATAGAAATATATAAGCGTATTCGTGAATTAGAAACTAGGGCTGATTATGAAGCCTTACAAGATGAGTTAATAGATCGTTTTGGAGAATATCCTGATCAAGTTGCATACCTTTTAGAAATAGGACTTTTAAAAGCTTATCTGGATCTTGCCTTTACTGAATTAGTAGAAAGAAAAGGTAATGAAATAAGCATCATATTTGAAAAAGCATCTTTGAAATATTTTTTAACTCAAGATTATTTTGAAGCACTATCAAAAACTCAACTTAAGGCTAGAATTAGCGAAACAAATGGTAAGATGGAAGTTGTTTTTAATATCAAACATAAGAAAAATTATGAAATTATTGAAGAACTTCTAAAATTTGCCGAATGTTTTATCGAGATTAAGTCACGTAAACCAGTAGAAGAA

SEQ ID NO: 14088 - protein, 1165 aa, Streptococcus agalactiae
MNIIELFSQNKVVRTWHSGLVTNSRQLVMGFSGASKAIAIASAYEKLSKKIMVVTATQNDSDKLSSDISSLIGEDNVYQFFADDVPAAEFIFSSLDKSISRLSALRFLKDPEKNGVLITSISGLRLLLPNPEVFSKSQYKFEIGQECYLDKLSKNLVNLGYQKVSQVFSPGEFSQRGDILDIFEMTQEYPYRLEFFGDEIDGIRQFDIDTQKSLKQLESVQISPADDIILQDADFERAKKKLEGYLVTASEEQRAYLSEVLSTTENHFKHSNIRRFLSIFYEKEWGILDYIPEGTPLFVDDFQKIVDRNAKLDLEIASLLTEDLQQGKSHSSLNYFSDPYKQLRQYQPATFFSNFHKGLGNLKFDKLHHFTQYGMQEFFNQFPLLVDEINRYKKSGATVLLQVDSQKGLNLLQENLKEYGLDLIISDKNDIVPKESQLIVGHLSNGFYFADEKIVLITEREIYHRRVKRKIRRSNISNAERLKDYNELSVGDYVVHNVHGVGKFLGIETIEIQGIHRDYLTIQYQNADRISIPVEQIELLTKYVSADGKEPKINTLNDGRFKKAKQRVAKQVEDIADDLLKLYAERSQLQGFAFSPDDNMQNDFDNDFAYVETEDQLRSIKEIKQDMEGNRPMDRLLVGDVGFGKTEVAMRAAFKAVNDHKQVAVLVPTTVLAQQHFENFKERFSNYPVTVDVLSRFRSKKEQTDTLKRLSKGQVDIIIGTHRLLSQDVVFSDLGLIVIDEEQRFGVKHKEKLKELKTKVDVLTLTATPIPRTLHMSMLGIRDLSVIETPPTNRYPVQTYVLETNPGLVREAIIREIDRGGQVFYVYNKVDTIEQKVSELQELVPEASIGFVHGQMSEIQLENTLIDFINGDYDVLVATTIIETGVDISNVNTLFVENADHMGLSTLYQLRGRVGRSNRIAYAYLMYRPDKVLTEISEKRLDAIKGFTELGSGFKIAMRDLSIRGAGNILGASQSGFIDSVGFEMYSQLLEQAIATKQGKSLIRQKGNVELALQIDAYLPAEYISDERQKIEIYKRIRELETRADYEALQDELIDRFGEYPDQVAYLLEIGLLKAYLDLAFTELVERKGNEISIIFEKASLKYFLTQDYFEALSKTQLKARISETNGKMEVVFNIKHKKNYEIIEELLKFAECFIEIKSRKPVEE

SEQ ID NO: 14089 - protein, 270 aa, Streptococcus agalactiae; identical to SEQ ID NO: 4317

SEQ ID NO: 14090 - protein, 90 aa, Streptococcus agalactiae; identical to SEQ ID NO: 32

SEQ ID NO: 14091 - protein, 369 aa, Streptococcus agalactiae
ATGAGCAAGCCTAATGTTGTTCAGTTAAATAATCAATATATTAACGATGAGAATCTAAAAAAACGTTACGAAGCTGAGGAGTTACGCCGAAAAAATCGTTTAATGGGTTGGGTTCTTATTTTTGTCATGCTTTTATTTATTTTACCCACTTATAATTTAGTTAAGAGTTACAGAACTTTACAAGAACGTCGTCAAGAAGTTGTAAAATTAACGAAAGACTATCAGACATTAACTAATAGAACTGAGAACCAGAAGTTACTAGCAAAACAACTAAAAAATCCAGATTACGTTCAAAAATATGCTCGAGCGAAGTATTATTTCTCTAAGACCGGCGAAATGATTTACCCATTACCAGACCTTTTACCAAAA

SEQ ID NO: 14092 - protein, 123 aa, Streptococcus agalactiae; identical to SEQ ID NO: 34

SEQ ID NO: 14093 - protein, 132 aa, Streptococcus agalactiae
ATGAATAATTTAATTGAAACAATAGAACATTTTCTAGCCTACTCGGATGACAAACTAGAAGAGTTAGCTGATAAGAACTATCAACTTAGGCAAACAATTGTAGAAAAAGAAAAGATTGAGAGCAGAGAAAAG

SEQ ID NO: 14094 - protein, 44 aa, Streptococcus agalactiae; identical to SEQ ID NO: 36

SEQ ID NO: 14095 - protein, 1284 aa, Streptococcus agalactiae
ATGAAGAAAGTTTTAACCTTCTTATTATGTAGCTTATATTTTGTATCAATCCCAGCTATAAGTACCGAGGAGCCATTAACGCTTTCTCAAAATAGACGATACGCCTTAACTCAGACAGTTGTGGATAAGGAAATGTATTTTGATGCTATTCCAGAGAGACCAACTACAAAAATTGAAATAAGCAGTTTTCAAGATGAAGCTTTAACCATAACAGGAGAGACTTTAGTTCCAAATACTTTATTGTCGATTATTTCCCTTACAATTAATTCAAATGGAATTCCAGTATTTACTTTGTCCAATGGACAGTTCATAAAGGCTAGTCGTGAAGCTATTTTTAATGATTTAGTTTCTAAGCAGCAATCTGTCTCATTGGATTATTGGTTAAAACCTTCTTTTGTGACTTATGAAGCACCTTACACAAATGGTGTTAGTGAAGTTAAAAATAATTTAAAACCTTATTCCAGAGTGCATTTAGTAGAACAAGCAGAAACAGAACATGGTATTTATTATAAAACGGACAGTGGTTTTTGGATATCAGTAGAAGATCTATCGGTTGCTGATAATCGTATGGCTAAGGTTCAAGAAGTATTATTGGAAAAATATAATAAAGATAAATATGGTATATACATCAAACAATTAAATACACAGACAGTAGCTGGTATTAATATTGATAGGTCAATGTACTCTGCAAGTATTGCAAAATTAGCAACACTTTATGCTAGCCAAGAGCAAGTAAAATTAGGAAAACTGTCATTGGACAGCAAATTTGAATACAAAGATAATGTTAATCAATTTCCTAATAGCTATGATCCAAGTGGTAGTGGGAAATTAGAGAAAAAAGCTGATCATAAATTATATACAGTTAAGGAGTTACTTGAAGCAACTGCCAAGGAATCAGATAATGTTGCAACAAATATGCTAGGTTATTATGTCAATAATCAATACGATTCAATGTTTCAAACACAAGTAGACACAATTTCTGGTATGCACTGGGATATGAAGAAACGCCAGATTTCTCCACAAGCTGCGGGTAAAATGATGGAAGCAATTTATTATCAAAATGGAGATATTGTTAATTACCTATCAAAGACTGATTTTGATAATACAAGAATCCCTAAAAATATACCAGTTAAAGTAGCACATAAAATTGGAGATGCTTATGACTACAAACATGATGCGGCTATTGTTTATGCAGAACAACCTTTTATTATGATTATTTTTACAGATAAATCATCTTACGATGATATCACTAAGATTGCTGACGACGTTTACCAGGTTTTAAAG

SEQ ID NO: 14096 - protein, 428 aa, Streptococcus agalactiae
MKKVLTFLLCSLYFVSIPAISTEEPLTLSQNRRYALTQTVVDKEMYFDAIPERPTTKIEISSFQDEALTITGETLVPNTLLSIISLTINSNGIPVFTLSNGQFIKASREAIFNDLVSKQQSVSLDYWLKPSFVTYEAPYTNGVSEVKNNLKPYSRVHLVEQAETEHGIYYKTDSGFWISVEDLSVADNRMAKVQEVLLEKYNKDKYGIYIKQLNTQTVAGINIDRSMYSASIAKLATLYASQEQVKLGKLSLDSKFEYKDNVNQFPNSYDPSGSGKLEKKADHKLYTVKELLEATAKESDNVATNMLGYYVNNQYDSMFQTQVDTISGMHWDMKKRQISPQAAGKMMEAIYYQNGDIVNYLSKTDFDNTRIPKNIPVKVAHKIGDAYDYKHDAAIVYAEQPFIMIIFTDKSSYDDITKIADDVYQVLK

SEQ ID NO: 14097 - protein, 1272 aa, Streptococcus agalactiae
ATGTATAACACTATTTTGAAAGATACCTTATCCAAAGGGTTATTTACCGCTCATCAGAAAGTTCTAATTGCTGTTTCTGGTGGCATTGATTCAATAAATTTGTTGCAATTTTTATACCAGTATCAAAAAGAGTTATCAATTAGTATTGGTATTGCACACATAAATCATGGACAGCGAAAAGAATCAGAAAAAGAAGAAGAATATATCAGACAGTGGGGACAGATACATGATGTCCCTGTCTTTATCTCTTATTTTCAAGGAATATTTTCAGAAGATAGAGCACGTAACCATCGCTACAATTTTTTTTCAAAAGTTATGCGTGAAGAAGGTTACACGGCTTTAGTAACAGCTCACCATGCTGATGATCAAGCTGAAACTGTATTTATGAGAATTTTAAGAGGAAGCAGGCTACGCTATTTATCAGGGATTAAGCAAGTGAGTGCTTTTGCAAATGGTCAATTGATTAGACCATTTCTTCCATATAAAAAGGAGTTATTACCAAATATTTTTCATTTTGAAGATGCTAGCAATGCTTCGTCTGATTATTTGAGAAATCGAATAAGAAACATCTACTTTCCTACTTTGGAAAGAGAAAATAATCAATTGAAAGATTCTCTCATAACTCTCTCTGAGGAAACAGAGTGTTTATTCACGGCTTTAACAGACCTAACAAGGAGCATCGAAGTAACAAACTGCTATGATTTTTTAAGGCAAACTCATTCCGTCCAAGAATTTTTATTGCAAGATTACATTAGCAAATTTCCAGATTTACAAGTGAGTAAAGAACAGTTCAGAGTAATATTAAAATTGATTAGAACTAAAGCCAATATTGACTATACTATTAAATCGGGCTATTTTCTTCATAAGGATTACGAGAGTTTTCATATTACAAAAATCCATCCTAAGACGGATAGTTTTAAGGTTGAAAAAAGATTAGAATTGCATAATATACAAATATTCTCACAATATTTATTTTCCTATGGAAAATTCATTTCTCAAGCAGACATTACTATTCCTATTTATGATACTTCTCCGATTATTTTAAGAAGAAGAAAAGAAGGGGATAGGATATTTTTAGGAAATCACACTAAAAAAATTCGCCGTCTATTTATTGATGAGAAAATAACTCTAAAAGACAGAGAAGAAGCTGTTATTGGGGAGCAAAATAAAGAGTTGATATTTGTGATTGTTGCAGGTAGAACATATTTGAGAAAACCTTCTGAACATGATATAATGAAGGGCAAACTTTATATTGAAAATTTAGAAAAAAGG

SEQ ID NO: 14098 - protein, 424 aa, Streptococcus agalactiae
MYNTILKDTLSKGLFTAHQKVLIAVSGGIDSINLLQFLYQYQKELSISIGIAHINHGQRKESEKEEEYIRQWGQIHDVPVFISYFQGIFSEDRARNHRYNFFSKVMREEGYTALVTAHHADDQAETVFMRILRGSRLRYLSGIKQVSAFANGQLIRPFLPYKKELLPNIFHFEDASNASSDYLRNRIRNIYFPTLERENNQLKDSLITLSEETECLFTALTDLTRSIEVTNCYDFLRQTHSVQEFLLQDYISKFPDLQVSKEQFRVILKLIRTKANIDYTIKSGYFLHKDYESFHITKIHPKTDSFKVEKRLELHNIQIFSQYLFSYGKFISQADITIPIYDTSPIILRRRKEGDRIFLGNHTKKIRRLFIDEKITLKDREEAVIGEQNKELIFVIVAGRTYLRKPSEHDIMKGKLYIENLEKR

SEQ ID NO: 14099 - protein, 540 aa, Streptococcus agalactiae
ATGCTTGAAAATGATATAAAAAAAGTTTTATATTCAGAAGAAGATATTATTCTGAAAACGAAAGAATTAGGAGCTAAATTAACTGCAGATTATGCAGGTAAGAATCCATTATTAGTAGGTGTATTAAAGGGGTCAGTGCCTTTTATGGCTGAACTATTAAAGCATATTGATACACATGTTGAAATTGATTTTATGGTTGTTTCAAGCTATCATGGTGGTACAACTAGTAGTGGAGAAGTTAAAATTTTAAAAGATGTTGATACTAACATTGAAGGAAGAGATGTAATCTTTATTGAAGACATCATTGATACTGGACGTACATTAAAATACCTTCGAGATATGTTTAAGTATCGTCAAGCTAACTCTGTCAAAGTTGCAACCCTTTTTGATAAGCCAGAAGGGCGATTGGTAGATATTGATGCTGATTACGTTTGTTACGATATCCCAAATGAATTTATTGTGGGATTCGGTTTAGACTATGCTGAAAACTATCGTAACCTACCTTATGTCGGTGTGTTAAAAGAAGAAATTTACTCAAAA

SEQ ID NO: 14100 - protein, 180 aa, Streptococcus agalactiae; identical to SEQ ID NO: 42

SEQ ID NO: 14101 - protein, 1974 aa, Streptococcus agalactiae
ATGAAAAATAATAAAAATAATGGTTTTCTGAAAAATTCCTTTATTTACATATTATTGATTATTGCGGTTATTACAACCTTTCAATACTATTTAAAAGGAACTAGCTCTCAAAACCAGCAAATTTCTTATACAAAACTTGTTAAACAATTAAAAGCTGGAGAAATTAAGTCTATTTCATACCAGCCAAGTGGTGGTGTTGTTGAAGTTAGTGGGACATATAAGAAAGCCAAAACAATTAAATCAGCTAATAGTTTTACTTTTTTAGGTGGTAGTGTTGCTACTAAAGTTACAGGATTTAATTCTGTTATACTACCAAATGACTCTTCAATAAAATCTCTTGTTAGCGCTGCTGAAGAAAATAACACTAATATTCAGGTCAAACATGAAAGTTCAAGTGGGACATGGATTTCTTATATTGCCAGTTTTTTACCTTTAGTTATCATGATTGGTTTCTTTATGATGATGATGAACCAAGGCGGTGGCGGTGGCGCTCGTGGTGCCATGAGCTTTGGTAAAAATAAAGCAAGATCATCTAGTAAAGATGAGGTTAAAGTTCGATTTTCGGATGTTGCTGGAGCAGAGGAAGAAAAGCAAGAATTAATAGAAGTCGTTGACTTCCTTAAAGATCCTAAACGATATAAATCTCTAGGTGCCCGAATTCCAGCAGGGGTTCTATTAGAAGGACCTCCAGGGACAGGTAAAACCCTATTAGCAAAAGCTGTTGCCGGTGAAGCAGGGGTTCCATTCTTTAGTATTTCCGGTTCAGATTTTGTTGAAATGTTTGTCGGTGTTGGAGCTAGTCGAGTACGCTCTTTGTTTGAAGATGCTAAAAAAGCTGAACGTGCTATTATTTTCATTGATGAAATTGATGCTGTTGGACGTCGACGTGGAGCTGGTATGGGTGGCGGAAACGATGAACGTGAACAAACGCTCAACCAACTTTTAATTGAAATGGATGGTTTTGAAGGAAACGAAAGTATTATCGTTATCGCTGCTACCAACCGTAGTGACGTGTTAGATCCCGCATTACTGCGTCCAGGACGTTTTGATAGAAAAGTTCTAGTTGGACAACCTGATGTAAAAGGTCGTGAAGCAATTCTGAGAGTACATGCTAAAAATAAACCATTAGCAGATAATGTTGACTTAAAAGTAGTAGCTCAACAAACCCCAGGATTTGTTGGTGCTGATTTGGAGAATGTTCTCAATGAAGCTGCTTTAGTTGCTGCGCGACGAAATAAAAAAGTTATTGATGCTTCAGATATTGATGAAGCAGAAGACCGTGTAATTGCTGGTCCTTCTAAAAAAGATCGTACTATTTCTGAAAGAGAAAGAGCTATGGTTGCTTACCATGAAGCTGGGCACACAATTGTCGGTTTGATTCTTTCAAATGCGCGAGTTGTTCATAAAGTTACTATCGTACCACGTGGTCGTGCAGGTGGATATATGATTGCTTTACCTAAAGAAGATCAAATGCTTCTTTCAAAAGATGATATGAAAGAGCAATTAGCAGGTCTTATGGGAGGACGTGTAGCGGAAGAAATTATTTTCAACGCTCAGACAACAGGTGCCTCAAATGACTTTGAACAAGCCACTGCCATGGCCCGCGCTATGGTAACTGAATATGGTATGAGTGAGAAACTTGGCCCAGTTCAATACGAAGGTAACCATGCAATGATGGCTGGCCAAATGTCACCTGAAAAATCATATTCTGCTCAAACTGCACAACTTATTGATGATGAAGTTCGTCACCTTCTTAATGAAGCACGTAATAAGGCAGCTGATATTATCAACGAAAACCGTGATACTCATAAATTAATTGCAGAAGCCCTCTTAAAATATGAGACTCTTGATGCTGCTCAGATTAAATCGATTTTCGAGACAGGTAAAATGCCTGAGACAGAAAATGATGAAGATAAAGCGAGAGCGTTATCATACGATGAAATCAAAGAAAAAATGCAAGAAGAAGATAAAAAA

SEQ ID NO: 14102 - protein, 658 aa, Streptococcus agalactiae; identical to SEQ ID NO: 44

SEQ ID NO: 14103 - protein, 531 aa, Streptococcus agalactiae
ATGAGATTACCTAAAGAAGGCGACTTTATTACAATTCAAAGTTACAAACATGATGGTAGTTTACACCGAACTTGGCGTGACACCATGGTATTAAAAACAACCGAAAATGCCCTCATTGGTGTTAATGATCATACTTTAGTAACAGAAAATGATGGTCGACGCTGGGTGACACGAGAGCCTGCAATAGTATACTTTCATAAAAAATATTGGTTTAACATTATCGCTATGATACGTGAAACTGGTGTCTCCTACTATTGTAATCTAGCAAGTCCGTATATCTTGGATCCTGAAGCACTCAAGTACATCGACTACGACCTTGATGTCAAAGTATTTGCAGATGGTGAAAAAAGACTACTGGATGTGGACGAATATGAACAGCATAAAGCTCAGATGAACTATCCTACCGATATTGATTATATATTAAAGGAAAATGTAAAAATATTGGTAGAATGGATAAATGAGAATAAAGGCCCCTTTTCATCATCATATATCAATATCTGGTATAAACGGTACCTTGAATTGAAAAAGCGC

SEQ ID NO: 14104 - protein, 177 aa, Streptococcus agalactiae; identical to SEQ ID NO: 838

SEQ ID NO: 14105 - protein, 774 aa, Streptococcus agalactiae
ATGAAAATAACCAAAATCGAAAAGAAAAAAAGACTTTACACTCTAGAGCTAGACAATACCGAAAATTTATATATAACAGAAGATACTATCGTTCATTTTATGTTAAGTAAAGGGATGATAATTAATGCCGAGAAACTTGAAAATATTAAAAAATTTGCCCAACTATCATACGGTAAAAATCTAGGTCTTTATTATATTTCTTTCAAGCAGAGAACCGAGAAAGAAGTTATTAAATATCTTCAAGAACATGATATTGATTCTAAAATTATTCCACAAATTATTGATAATCTAAAAAGTGAGAATTGGATAAACGATAAAAACTACGTGCAATCTTTCATACAGCAAAATCTAAATAATGGCGATAAGGGGCCATACGTGATAAAACAAAAATTATTGCAAAAAGGTATCAAAAGTAAAATAATTGAATCTGAACTTAAAGCTATAAACTTTCAAGACTTAGCATCCAAAATAAGCCAAAAACTCTATAAAAAATATCAAAACAAACTTCCACTAAAAGCATTAAAAGATAAATTGATGCAGAGCTTAACTACAAAAGGATTTGATTATCAGATAGGGCATACCGTAATTCAAAACCTTGAAATTGAAAAAGATCAAGAACTTGAAGATGACCTCATTTATAAAGAATTAGATAAACAATACCAAAAATTATCAAAAAAACATGACCAGTATGAATTAAAGCAACGTATAATCAATGTCTTAATGCGTAAAGGATACCAGTACGAAGATATCAAAAGTGCTTTAAGAGAATATTTA

SEQ ID NO: 14106 - protein, 258 aa, Streptococcus agalactiae
MKITKIEKKKRLYTLELDNTENLYITEDTIVHFMLSKGMIINAEKLENIKKFAQLSYGKNLGLYYISFKQRTEKEVIKYLQEHDIDSKIIPQIIDNLKSENWINDKNYVQSFIQQNLNNGDKGPYVIKQKLLQKGIKSKIIESELKAINFQDLASKISQKLYKKYQNKLPLKALKDKLMQSLTTKGFDYQIGHTVIQNLEIEKDQELEDDLIYKELDKQYQKLSKKHDQYELKQRIINVLMRKGYQYEDIKSALREYL

SEQ ID NO: 14107 - protein, 1353 aa, Streptococcus agalactiae
ATGAATGTGGTTTTAAAACAGCGAATTCCTTTAAAAATTAAACGAATGGGAATTAATGGTGAAGGAATAGGTTTTTATAAAAAAACACTAATCTTTGTTCCAGGGGCTCTCAAGGGAGAAGAGGTGTTTTGTCAGATTTCTTCTGTTAGACGTAATTTTGCAGAAGCTAAACTGTTAAAGATAAATAAAAAGTCTAAAAATAGGGTAGATCCCGCTTGTTCTATTTATAAAGAATGTGGGGGATGCCAAATAATGCACCTTCAATATGATAAGCAGCTAGAGTTTAAAACGGATATTATTCGACAGGCTCTAATGAAATTTAAACCAGAGGGATATGAGAATTATGAAATCCGTAAAACGATAGGTATGTCGGAACCTGAACACTATCGTGCTAAATTACAATTTCAAGTGCGTTCGTTTGGAGGGAATGTAAAGGCAGGTTTATATGCACAAGGGACACATCGATTGATTGATATCAAAGATTGTTTAGTGCAAGATAGGCTTACTCAGGAAATGATAAATCGAGTTGCAGAACTTTTAGGAAAATATAAATTGCCTATTTATAATGAACGTAAAATAGCTGGTGTTCGTACTGTTATGATTCGACGAGCACAAGCGAGTGGAGAGGTTCAACTGATTTTTATCACAAGTAAAAGACTTGATTTTGATGATGTTGTTATTGAATTAGTTCGAGAGTTTCCTGAGTTAAAGACAGTTGCTGTAAATATCAACGCTAGTAAAACAAGTGATATCTATGGTCAAATAACAGAAGTTATTTGGGGTCAAGAATCCATCAATGAAGAAGTATTAGATTATGGTTTTTCGTTATCACCACGTGCTTTTTATCAACTTAATCCTAAACAAACACAAATTTTATATAGTGAGGCAGTCAAGGCCTTAGATGTGAAGGAAGATGATGATTTAATTGACGCTTATTGTGGAGTAGGAACGATTGGACTTGCTTTTGCTGGAAAAGTTAAAAGTGTTCGTGGAATGGATATTATCCCTGAGGCTATTCAGGATGCTAAAGAGAACGCACTTCATATGGGTTTTACTAATACACATTACGAAGCTGGAAAGGCAGAGGATATTATCCCTAGGTGGTATAGTGAGGGATTTCGCGCTAATGCGTTAATCGTGGATCCTCCTCGCACAGGCTTAGATGATAAATTGCTAAATACTATACTAAAAATGCCTCCAGAAAAAATGGTTTACGTTTCTTGTAATACATCTACGCTTGCTAGAGACTTAGTAACATTAACAAAAGTATACCATGTTCACTACATCCAATCTGTTGACATGTTTCCACATACAGCAAGGACCGAGGCTGTAGTGAAACTACAACGTAAGGTA

SEQ ID NO: 14108 - protein, 451 aa, Streptococcus agalactiae
MNVVLKQRIPLKIKRMGINGEGIGFYKKTLIFVPGALKGEEVFCQISSVRRNFAEAKLLKINKKSKNRVDPACSIYKECGGCQIMHLQYDKQLEFKTDIIRQALMKFKPEGYENYEIRKTIGMSEPEHYRAKLQFQVRSFGGNVKAGLYAQGTHRLIDIKDCLVQDRLTQEMINRVAELLGKYKLPIYNERKIAGVRTVMIRRAQASGEVQLIFITSKRLDFDDVVIELVREFPELKTVAVNINASKTSDIYGQITEVIWGQESINEEVLDYGFSLSPRAFYQLNPKQTQILYSEAVKALDVKEDDDLIDAYCGVGTIGLAFAGKVKSVRGMDIIPEAIQDAKENALHMGFTNTHYEAGKAEDIIPRWYSEGFRANALIVDPPRTGLDDKLLNTILKMPPEKMVYVSCNTSTLARDLVTLTKVYHVHYIQSVDMFPHTARTEAVVKLQRKV

SEQ ID NO: 14109 - protein, 249 aa, Streptococcus agalactiae
ATGATAATAAATTCATTCGATAATAGTAGAAAAGCGACTATTAATCCTGAAGATATTAATTCACCAATAAAAGGTTTTCCAAAGACTGTTATTACCTGTTTTGCGCGGGAGACTTTCAATCGCATTTTAGAAGAATTGCCTCATCGTGAAATTGCTAGAACTAGTGTAGCAAACTTAGAAATTCCCATTTATGAATTAGAATTTAAAGGACAAAAGATTGTCCTTATCAAGAGGTTGGTGATGAAGATT

SEQ ID NO: 14110 - protein, 83 aa, Streptococcus agalactiae
MIINSFDNSRKATINPEDINSPIKGFPKTVITCFARETFNRILEELPHREIARTSVANLEIPIYELEFKGQKIVLIKRLVMKI

SEQ ID NO: 14111 - protein, 294 aa, Streptococcus agalactiae
TTGCATGGGATGAATTGGGTAGATGGTCAATTGGCAGCTTATTATAGATTGATACCAGAAGATGATAAGGTGCATTTGGGACGTGTGATTGTTAATCCAGACTTTAGAAAAAAGGGATTAGGAAATCAATTAGTGGAATATGAGATTAAATTTAGCGAGGCAAATTACCCTAATAAACCTATTTATGCTCAGACCCAAGCTTATTTACAAGATTTTTATCAATCTTTCGGATTTCAACCTATCTCAGATATCTATCTAGAAGATAATATTCCTCATCTTGATATGGTTTTATCA

SEQ ID NO: 14112 - protein, 98 aa, Streptococcus agalactiae
MHGMNWVDGQLAAYYRLIPEDDKVHLGRVIVNPDFRKKGLGNQLVEYEIKFSEANYPNKPIYAQTQAYLQDFYQSFGFQPISDIYLEDNIPHLDMVLS

SEQ ID NO: 14113 - protein, 1368 aa, Streptococcus agalactiae
GTGGATAAACATCACTCAAAAAAGGCTATTTTAAAGTTAACACTTATAACAACTAGTATTTTATTAATGCATAGCAATCAAGTGAATGCAGAGGAGCAAGAATTAAAAAACCAAGAGCAATCACCTGTAATTGCTAATGTTGCTCAACAGCCATCGCCATCGGTAACTACTAATATTGTTGAAAAAACATCTGTAACAGCTGCTTCTGCTAGTAATACAGTGAAAGAAATGGGTGATACATCTGTAAAAAATGACAAAACAGAAGATGAATTATTAGAAGAGTTATCTAAAAACCTTGATACGTCTAATTTGGGGGCTGATCTTGAAGAAGAATATCCCTCTAAACCAGAGACAACCAACAATAAAGAAAGCAATGTAGTAACAAATGCTTCAACTGCAATAGCACAGAAAGTTCCCTCAGCATATGAAGAGGTGAAGTCAGAAAGCAAGTCATCGCTTGCTGTTCTTGATACATCTAAAATAACAAAATTACAAGCCACAACCCAAAGAGGAAAGGGAAATGTAGTAGCTATTATTGATACTGGCTTTGATATTAACCATGATATTTTTCGTTTAGATAGCCCAAAAGATGATAAGCACAGCTTTAAAACTAAGGCAGAATTTGAGGAATTAAAAGCAAAACATAATATCACTTATGGGAAATGGGTTAACGATAAGATTGTTTTTGCACATAACTACGCCAACAATACAGAAACGGTGGCTGATATTGCAGCAGCTATGAAAGATGGTTATGGGTCAGAAGCAAAGAATATTTTGCATGGTACACACGTTGCTGGTATTTTTGTAGGTAATAGTAAACGTCCAGCAATCAATAGTCTTCTTTTAGAAGGTGCAGCGCCAAATGCTCAAGTCTTATTAATGCGTATTCCAGATAAAATTGATTCGGACAAATTTGGAGAAGCATATGCTAAAGCAATCATAGACGCTGTTAATCTAGGAGCAAAAACGATTAATATGAGCCTGGGAAAAACGGCTGATTCTTTAATTGCTCTCAATGATAAAGTTAAATTAGCACTTAAATTAGCTTCTGAGAAGGGCGTTGCAGTTGTTGTGGCTGCCGGAAATGAAGGTGCATTTGGTATGGATTATAGCAAACCATTATCAACTAATCCTGACTACGGTACGGTTAATAGTCCAGCTATTTCTGAAGATACTTTGAGTGTTGCTAGCTATGAATCACTTAAAACTATCAGTGAGGTCGTTGAAACAACTATTGAAGGTAAGTTAGTTAAGTTGCCGATTGTGACTTCTAAACCTTTTGACAAAGGTAAGGCCTACGATGTGGTTTATGCCAATTATGGTGCAAAAAAGATTTTGAAGGTAAGGACTTTAAAGGTAAGATTGCAT

SEQ ID NO: 14114 - protein, 456 aa, Streptococcus agalactiae
MDKHHSKKAILKLTLITTSILLMHSNQVNAEEQELKNQEQSPVIANVAQQPSPSVTTNIVEKTSVTAASASNTVKEMGDTSVKNDKTEDELLEELSKNLDTSNLGADLEEEYPSKPETTNNKESNVVTNASTAIAQKVPSAYEEVKSESKSSLAVLDTSKITKLQATTQRGKGNVVAIIDTGFDINHDIFRLDSPKDDKHSFKTKAEFEELKAKHNITYGKWVNDKIVFAHNYANNTETVADIAAAMKDGYGSEAKNILHGTHVAGIFVGNSKRPAINSLLLEGAAPNAQVLLMRIPDKIDSDKFGEAYAKAIIDAVNLGAKTINMSLGKTADSLIALNDKVKLALKLASEKGVAVVVAAGNEGAFGMDYSKPLSTNPDYGTVNSPAISEDTLSVASYESLKTISEVVETTIEGKLVKLPIVTSKPFDKGKAYDVVYANYGAKKILKVRTLKVRLH

SEQ ID NO: 14115 - protein, 315 aa, Streptococcus agalactiae
ATGACTAAAATCACTCATGCTACAAATGCAGGTGTTGTTGGTATCGTTATTTTTAACGATCAAGAAAAACGTGGAAATTTTCTAATTCCTTACCGTGAATTACCTGTGGGGGTTATTAGTAAAGTAGATGGCGAGCGTATAAAAAATACTTCAAGTCAGTTAACATTTAACCAGAGTTTTGAAGTAGTTGATAGCCAAGGTGGCAATCGTATGCTGGAACAATCAAGTTGGGGCGTGACAGCTGAAGGAGCAATCAAGCCTGATGTAACAGCTTCTGGCTTTGAAATTTATTCTTCAACCTATAATAATCAATAC

SEQ ID NO: 14116 - protein, 105 aa, Streptococcus agalactiae
MTKITHATNAGVVGIVIFNDQEKRGNFLIPYRELPVGVISKVDGERIKNTSSQLTFNQSFEVVDSQGGNRMLEQSSWGVTAEGAIKPDVTASGFEIYSSTYNNQY

SEQ ID NO: 14117 - protein, 1932 aa, Streptococcus agalactiae
ATGCTTCAAAGTCATTTGGCTGAGAAATATAAAGGGATGAATTTAGATTCTAAAAAATTGCTAGAATTGTCTAAAAACATCCTCATGAGCTCAGCAACAGCATTATATAGTGAAGAGGATAAGGCGTTTTATTCACCACGTCAGCAAGGTGCAGGTGTAGTTGATGCTGAAAAAGCTATCCAAGCTCAATATTATGTTACTGGAAACGATGGCAAAGTTAAAATTAATCTCAAACGAGAGGGAGATAAATTTGATATCACAGTTACAATTCATAAACTTGTAGAAGGTGTCAAAGAATTGTATTATCAAGCTAATGTAGCAACAGAACAAGTAAATAAAGGTAAATTTGCCCTTAAACCACAAGCCTTGCTAGATACTAATTGGCAGAAAGTAATTCTTCGTGATAAAGAAACACAAGTTCGATTTACTATTGATGCTAGTCAATTTAGTCAGAAATTAAAAGAACAGATGGCAAATGGTTATTTCTTAGAAGGTTTTGTACGTTTTAAAGAAGCCAAGGATAGTAATCAGGAGTTAATGAGTATTCCTTTTGTAGGATTTAATGGTGATTTTGCGAACTTACAAGCACTTGAAACACCGATTTATAAGACGCTTTCTAAAGGTAGTTTCTACTATAAACCAAATGATACAACTCATAAAGACCAATTGGAGTACAATGAATCAGCTCCTTTTGAAAGCAACAACTATACTGCCTTGTTAACACAATCAGCGTCTTGGGGCTATGTTGATTATGTCAAAAATGGTGGGGAGTTAGAATTAGCACCGGAGAGTCCAAAAAGAATTATTTTAGGAACTTTTGAGAATAAGGTTGAGGATAAAACAATTCATCTTTTGGAAAGAGATGCAGCGAATAATCCATATTTTGCCATTTCTCCAAATAAAGATGGAAATAGGGACGAAATCACTCCCCAGGCAACTTTCTTAAGAAATGTTAAGGATATTTCTGCTCAAGTTCTAGATCAAAATGGAAATGTTATTTGGCAAAGTAAGGTTTTACCATCTTATCGTAAAAATTTCCATAATAATCCAAAGCAAAGTGATGGTCATTATCGTATGGATGCTCTTCAGTGGAGTGGTTTAGATAAGGATGGCAAAGTTGTAGCAGATGGTTTTTATACTTATCGCTTACGTTACACACCAGTAGCAGAAGGAGCAAATAGTCAGGAGTCAGACTTTAAAGTTCAAGTAAGTACTAAGTCACCAAATCTTCCTTCACGAGCTCAGTTTGATGAAACTAATCGAACATTAAGCTTAGCCATGCCTAAGGAAAGTAGTTATGTTCCTACATATCGTTTACAATTAGTTTTATCTCATGTTGTAAAAGATGAAGAATATGGGGATGAGACTTCTTACCATTATTTCCATATAGATCAAGAAGGTAAAGTGACACTTCCTAAAACGGTTAAGATAGGAGAGAGTGAGGTTGCGGTAGACCCTAAGGCCTTGACACTTGTTGTGGAAGATAAAGCTGGTAATTTTGCAACGGTAAAATTGTCTGACCTCTTGAATAAGGCAGTAGTATCAGAGAAAGAAAACGCTATAGTAATTTCTAACAGTTTCAAATATTTTGATAACTTGAAGAAAGAACCTATGTTTATTTCTAAAGAAGGAAAAGTAGTAAACAAGAATCTAGAAGAAATAACATTAGTTAAGCCTCAAACTACAGTTACTACTCAATCATTGTCTAAAGAAATAACTAAATCAGGAAATGAGAAAGTCCTCACTTCTACAAACAATAATAGTAGCAGAGTAGCTAAGATCATATCACCTAAACATAACGGGGATTCTGTTAACCATACCTTACCTAGTACATCAGATAGAGCAACGAATGGTCTATTTGTTGGCACTTTGGCATTGTTATCTAGTTTACTTCTTTACTTGAAACCCAAAAAGACTAAAAATAATAGTAAA

SEQ ID NO: 14118 - protein, 644 aa, Streptococcus agalactiae
MLQSHLAEKYKGMNLDSKKLLELSKNILMSSATALYSEEDKAFYSPRQQGAGVVDAEKAIQAQYYVTGNDGKVKINLKREGDKFDITVTIHKLVEGVKELYYQANVATEQVNKGKFALKPQALLDTNWQKVILRDKETQVRFTIDASQFSQKLKEQMANGYFLEGFVRFKEAKDSNQELMSIPFVGFNGDFANLQALETPIYKTLSKGSFYYKPNDTTHKDQLEYNESAPFESNNYTALLTQSASWGYVDYVKNGGELELAPESPKRIILGTFENKVEDKTIHLLERDAANNPYFAISPNKDGNRDEITPQATFLRNVKDISAQVLDQNGNVIWQSKVLPSYRKNFHNNPKQSDGHYRMDALQWSGLDKDGKVVADGFYTYRLRYTPVAEGANSQESDFKVQVSTKSPNLPSRAQFDETNRTLSLAMPKESSYVPTYRLQLVLSHVVKDEEYGDETSYHYFHIDQEGKVTLPKTVKIGESEVAVDPKALTLVVEDKAGNFATVKLSDLLNKAVVSEKENAIVISNSFKYFDNLKKEPMFISKEGKVVNKNLEEITLVKPQTTVTTQSLSKEITKSGNEKVLTSTNNNSSRVAKIISPKHNGDSVNHTLPSTSDRATNGLFVGTLALLSSLLLYLKPKKTKNNSK

SEQ ID NO: 14119 - protein, 906 aa, Streptococcus agalactiae
ATGAAAACGATAAAAGATTGGCAAATAAATATTTGCTTAGCGACCTATAATGGTCAAAAATACCTTCGCCAGCAATTAGATAGCATAATACAACAAGGTTATACTGACTGGATTTGTTTAATAAGGGACGATGGATCTACTGATGATACAGTAGCTATTATTAAAGAATATGTTAATAGAGATTCACGTTTTATATTTATTAATTCTAACGATGATAGAAAGTTAGGAAGTCACCGCAGTTTTTACGAGTTGGTTAACTATAAAAAAGCAGATTTTTATGTTTTCTCAGACCAGGATGATGTTTGGAAAGAAAATCGTTTAGAACGTTACCTTGAAGAAGCAGAGAAATTTAACCAAGAATTACCATTGCTTGTTTATTCGAACTGGACTTCTGTAGATGAAAAATTAACAGTATTGAAAGAACATAATCCAGCAACAGTTATTCAAGAACAAATTGCCTTTAACCAAATAAATGGTATGGTTATCATGATGAATCATGAGTTAGCAAAGCTTTGGGAATACCGTCAAATTGGCGCCCATGATTCTTATGTTGGAACTCTGGCTTACGCCGTTGGAAATGTGGCTTATATTTCTGACAGTACAGTCCTTTGGCGTAGACAAGTAGGGGCAGAGTCGCTAAATAATTACGGGAGACAATATGGGGTGGCTACGTTTTGGCAGATGATAAATACTTCTTTTGATCGTGCTTCGCTTATTTTTGCTCAAGTATCCGATAAAATGTCCCTGGAGCGTAAACTCTTCTTTAGTCGTTTTATAGAATTAAAAAATGCCAATCTAATAAGAAGGATTTATCTTTTATCAAAATTAAAACTTCGTCGGAAATCATTGAAAGAAACAGTTGCTATGACTATCCTACTTTTAACAGGTTACGGTAAACCAAAAGCA

SEQ ID NO: 14120 - protein, 302 aa, Streptococcus agalactiae
MKTIKDWQINICLATYNGQKYLRQQLDSIIQQGYTDWICLIRDDGSTDDTVAIIKEYVNRDSRFIFINSNDDRKLGSHRSFYELVNYKKADFYVFSDQDDVWKENRLERYLEEAEKFNQELPLLVYSNWTSVDEKLTVLKEHNPATVIQEQIAFNQINGMVIMMNHELAKLWEYRQIGAHDSYVGTLAYAVGNVAYISDSTVLWRRQVGAESLNNYGRQYGVATFWQMINTSFDRASLIFAQVSDKMSLERKLFFSRFIELKNANLIRRIYLLSKLKLRRKSLKETVAMTILLLTGYGKPKA

SEQ ID NO: 14121 - protein, 1008 aa, Streptococcus agalactiae
ATGCAATCATACTATGATCGTTCTCAATCACCACTTGACTATGCCTTGTCAGAAAAAGCTTTTCCTATGCGTTCTGTTAATTGGAATAAGCTAAACGATGACAAAGACTTAGAGGTATGGAACAGAGTAACTCAAAATTTCTGGTTACCTGAAAAGATCCCAGTTTCTAATGACCTTAATTCTTGGAGAACATTGGATGCTGATTGGCAGCAATTAATTACTCGGACTTTTACTGGTCTAACCTTATTAGATTCTGTGCAGGCTACTGTTGGTGATATTGCTCAGATTAAGCATTCTCAGACAGATCATGAACAAGTTATTTATGCTAACTTTGCCTTTATGGTAGCTATTCATGCGCGATCTTATGGAACGATTTTTTCAACCTTATGCACTAGCCAACAAATTGAGGAAGCACATGAATGGGTAGTGGATACTGAAAGTCTACAAGCTCGATCACGTATACTTATTCCTTTTTATACTGGTGACGATCCTTTGAAATCTAAGGTTGCTGCAGCCATGATGCCAGGATTTTTGTTATATGGTGGCTTTTACCTTCCTTTTTACCTTTCAGCCAGAGGAAAATTACCAAATACGTCTGATATTATTCGTTTAATTTTACGAGATAAGGTAATTCATAACTATTACAGTGGCTATAAGTATCAACAGAAAGTTGCTAAATTATCTGTAGAAAAGCAAGCCGAAATGAAGACATTTGTCTTTGACCTCCTCTATCAGTTGATTGATTTAGAAAAAGCCTATCTTTACGAACTATATGATGGTTTTGATTTGGCTGAAGATGCAATCAGATTTAGCATTTACAATGCTGGTAAATTTTTACAAAATTTAGGATATGATTCTCCATTTACAGAAGAAGAGACTCGTATATCTCCTGAGGTTTTTGCACAACTTTCGGCGCGTGCAGATGAAAATCATGATTTCTTCTCAGGAAACGGCTCTTCATATATTATGGGGATTACAGAAGAAACATTGGATGAAGATTGGGAGTTT

SEQ ID NO: 14122 - protein, 336 aa, Streptococcus agalactiae; identical to SEQ ID NO: 854

SEQ ID NO: 14123 - protein, 411 aa, Streptococcus agalactiae
ATGGATAGTACAGTGAAGGTGGTCTATTTTTCATCGAAATCTAACAATACCCATCGTTTTGTTCAAAAGTTGGCTTGTTCTAACCAGCGTATTCCATCAGATGGTAGTAGTATATTGGTTACTGAGGATTATATTTTGATTGTGCCTACTTACGCTGGAGGAGGAGATGATACCAAAGGCGCAGTTCCAAAACAAGTTGTACAGTTTTTAAATGTTCGACAAAATCGGGAACATTGCCAAGGGGTTATTTCTTCTGGAAATACCAATTTTGGTGACACTTATGCCATTGCTGGACCTATTATTGCTCGAAAATTAAATGTTCCTTTGCTTCATCAATTTGAATTACTGGGAACACAAGAAGATGTTACAAGGGTAAAGGAGTTACTTTGCCAATTCACTAGAAAGGATAAA

SEQ ID NO: 14124 - protein, 137 aa, Streptococcus agalactiae; identical to SEQ ID NO: 856

SEQ ID NO: 14125 - protein, 2163 aa, Streptococcus agalactiae
ATGACACAATCAGATGCATATCTCTCGTTGAACGCGAAGACACGCTTTAGAGATCGCACAGGTAATTATCATTTTACTTCGGATAAAGAGGCTGTTGAACAATATATGATAGAACATGTTGAACCTAATACGATGGTGTTCACATCACTAATTGAAAAGCTAGATTATTTGGTTTCTAATAACTACTATGAATCGGACCTTCTAAAACAATATAACCTTGAGTTTATTTGCCAAATTTTTGAGCATGCATACGCTAAGAAATTTGCTTTTCTAAATTTTATGGGGGCTTTAAAATTTTATAATGCTTATGCTCTTAAAACAGAAGACAATCGTTATTATTTGGAACACTATGAAGATCGTGTTGTAATGAATGCTCTGTTTTTAGCTGCTGGTGATGAAAAAGCTGCCTATGACCTAGTAGATGACATGCTAGCAAATCGCTTTCAACCAGCAACACCTACCTTTTTAAATGCAGGGAAAAAACGTCGTGGTGAATATATCTCTTGCTATTTGTTGCGCATTGAAGACAATATGGAATCTATTTCTCGTGCTATTAGTACAAGCCTTCAGTTATCAAAACGAGGTGGTGGGGTAGCACTTTGCTTAACCAACTTACGGGAATTTGGTGCTCCAATAAAAGGTATTAAAAATCAAGCTACTGGTATTGTACCTGTCATGAAATTACTAGAAGATTCGTTTTCTTACGCCAATCAATTAGGACAAAGACAAGGAGCTGGTGCAGTTTACTTACACGCTCACCATCCTGAAGTATTAACGTTTTTAGATACTAAACGTGAGAATGCCGATGAGAAAATTCGAATTAAATCTCTTTCCCTAGGACTTGTTATTCCTGATATTACTTTTGAATTGGCTAAGGCAAATAAAGATATGGCCTTGTTTTCACCGTATGACATTGAGCGAGTATATGGTAAACCAATGTCTGATATCTCTATCACAGAAGAATATGAAACTTTATTAGCCAATGCGGATATTCGTAAAACCTTTATTAGTGCACGAAAACTATTTCAAACGATAGCAGAGCTTCATTTTGAATCTGGTTATCCTTATATCTTATTTGAAGATACTGTAAATGCTAAAAACCCTCACAAAAAAGAGGGACGAATTGTTATGTCTAATTTATGTTCTGAGATTGCACAAGTTAATACAGCTAGTCAATTTTCAGAAGACCTGACTTTCACTAAGGTTGGACATGATGTTTGTTGTAATTTAGGTTCTATTAATATTGCGCGTGCTATGGATCAAGCGGCGGATTTTGAAAAATTAATTGCTAATAGCATTAGAGCCCTTGATCGTGTATCTCGAACTTCTGATTTAGATAGTGCTCCATCTATTAAAAAAGGTAATGCAGCTAATCATGCTGTTGGTTTAGGTGCTATGAATTTGCATGGATTTTTGGCGACTAACCATATTTATTACGATTCTCAAGAGGCTATTGATTTTACAGATTGCTTCTTTTACGCTATGGCTTATTATGCCTTTAAAGCTTCTAACCATTTAGCAAAAGAAAAAGGAACCTTTGAGGGCTTCTCGGAATCAAGTTATGCTGATGGCAGTTATTTCTATCAATATACCGAACAAAACTTTGAGCCAAAAACACAGCGTGTTAAAAATCTACTAGCTGAGTATGGTCTGACTCTACCAAGCCAAGAGGATTGGAGAAAGCTTGTGCAAAGTATTAAAGAGATAGGATTAGCTAATGCGCATTTATTAGCTGTTGCTCCGACAGGGTCAATCAGTTATCTTTCTTCTTGTACTCCGAGCCTTCAACCGGTTGTATCACCTGTCGAAGTACGCAAGGAAGGAGCACTGGGGAGGGTTTATGTACCTGCTTATAAGATTGATGCAGATAATTATGTCTACTACAAAAAAGGAGCTTATGAAGTGGGATCTGAGGCGATTATCAATATTGCAGCTGCCGCTCAAAAACACATTGATCAAGCTATTTCGTTAACGCTTTTCATGACAGATCAAGCAACTACGCGAGATTTAAATAAAGCCTATATTCAAGCATTTAAACAAAAATGTGCCTCTATTTATTATGTACGAGTGAGACAGGACATCCTAGAAGGTAGCGAGAGTTATGATGATATGCTGGATGATTTCACTTCATCGGACTTAGAAGACTGTCAATCCTGCATGATT

SEQ ID NO: 14126 - protein, 721 aa, Streptococcus agalactiae; identical to SEQ ID NO: 858

SEQ ID NO: 14127 - protein, 3165 aa, Streptococcus agalactiae
ATGACAAAAAAACATCTTAAAACGCTTGCCTTGGCACTTACTACAGTATCAGTAGTGACATACAGCCAGGAGGTATATGGATTAGAAAGAGAGGAATCGGTCAAACAAGAACAAACCCAGTCAGCTTCAGAAGATGATTGGTTCGAAGAAGATAATGAGAGGAAAACAAATGTTTCTAAAGAGAATTCTACTGTTGATGAAACAGTTAGTGATTTATTTTCTGATGGAAATAGTAATAACTCTAGTTCTAAAACCGAGTCAGTGGTAAGTGACCCTAAACAAGTCCCCAAAGCAAAACCAGAGGTTACACAAGAAGCAAGCAATTCTAGTAATGATGCTAGCAAAGTAGAAGTACCAAAACAGGATACAGCTTCAAAAAAGGAAACTCTAGAAACATCAACTTGGGAGGCAAAAGATTTCGTAACTAGAGGGGATACTTTAGTAGGTTTTTCAAAATCTGGAATTAATAAGTTATCTCAAACATCACACTTGGTTTTACCAAGTCATGCAGCAGATGGAACTCAATTGACACAAGTAGCTAGCTTTGCTTTTACTCCAGATAAAAAGACGGCCATTGCAGAATATACAAGTAGGCTAGGAGAAAATGGGAAACCGAGTCGTTTAGATATTGATCAGAAGGAAATTATTGATGAGGGAGAAATATTTAATGCTTACCAGTTGACTAAGCTTACTATTCCAAATGGTTATAAGTCTATTGGTCAAGATGCTTTTGTGGACAATAAGAATATTGCTGAGGTTAACCTTCCTGAGAGTCTCGAGACTATTTCAGACTATGCTTTTGCTCACATGTCTTTAAAACAAGTAAAGTTACCAGATAACCTAAAGGTCATTGGAGAATTAGCTTTTTTTGATAATCAGATTGGTGGTAAGCTTTACTTGCCACGTCACTTGATAAAATTAGCAGAACGCGCTTTCAAATCTAATCGTATTCAAACAGTTGAATTTTTGGGAAGTAAGCTTAAGGTTATAGGAGAAGCAAGTTTTCAAGATAATAATCTGAGGAATGTTATGCTTCCGGATGGACTTGAAAAAATAGAATCAGAAGCTTTTACAGGAAATCCAGGAGATGAACATTACAACAATCAGGTTGTATTGCGCACAAGGACAGGCCAAAATCCACATCAACTTGCGACTGAGAATACTTACGTCAATCCGGACAAATCATTGTGGCGTGCAACACCTGATATGGATTATACCAAATGGTTAGAGGAAGATTTTACCTATCAAAAAAATAGTGTTACAGGTTTTTCAAATAAAGGCTTACAAAAGGTAAGACGTAATAAAAACTTAGAAATTCCAAAACAACACAATGGTATTACTATTACTGAAATTGGTGATAACGCTTTTCGCAATGTTGATTTTCAAAGTAAAACTTTACGTAAATATGATTTGGAAGAAATAAAGCTCCCCTCAACTATTCGGAAAATAGGTGCTTTTGCTTTTCAATCTAATAACTTGAAATCCTTTGAAGCAAGTGAAGATTTAGAAGAGATTAAAGAGGGAGCCTTTATGAATAATCGTATTGGAACTCTAGACTTGAAAGACAAACTTATCAAAATAGGTGATGCTGCTTTCCATATTAATCATATTTATGCCATTGTTCTTCCAGAATCTGTACAAGAAATAGGACGTTCAGCTTTTCGACAAAATGGTGCGCTTCACCTTATGTTTATCGGAAATAAGGTTAAAACAATTGGTGAAATGGCTTTTTTATCCAATAAACTGGAAAGTGTAAATCTCTCTGAGCAAAAACAATTAAAGACAATTGAGGTCCAAGCTTTTTCGGATAATGCCCTTAGTGAAGTAGTCTTACCGCCAAATTTACAGACTATTCGTGAAGAGGCTTTCAAAAGGAATCATTTGAAAGAAGTGAAGGGTTCATCTACATTATCTCAGATTACTTTTAATGCTTTTGATCAAAATGATGGGGACAAACGCTTTGGTAAGAAAGTGGTTGTTAGGACACATAATAATTCTCATATGTTAGCAGATGGTGAGCGTTTTATCATTGATCCAGATAAGCTATCTTCTACAATGGTAGACCTTGAAAAGGTTTTAAAAATAATCGAAGGTTTAGATTACTCTACATTACGTCAGACTACTCAAACTCAGTTTAGAGAAATGACTACTGCAGGTAAAGCGTTGTTATCAAAATCTAACCTCCGACAAGGAGAAAAACAAAAATTCCTTCAAGAAGCACAATTTTTCCTTGGTCGCGTTGATTTGGATAAAGCCATAGCTAAAGCTGAGAAGGCTTTAGTGACCAAGAAGGCAACAAAGAATGGTCATTTGCTTGAGAGGAGTATTAACAAAGCGGTATTAGCTTATAATAATAGTGCTATTAAAAAAGCTAATGTTAAGCGCTTGGAAAAAGAGTTAGACTTGCTGACAGATTTAGTCGAGGGAAAAGGACCATTAGCGCAAGCTACAATGGTACAAGGAGTTTATTTATTAAAGACGCCTTTACCATTGCCAGAATATTATATCGGATTGAACGTTTATTTTGACAAGTCTGGAAAATTGATTTATGCACTTGATATGAGTGATACTATTGGCGAGGGACAAAAAGATGCATATGGTAATCCTATATTAAATGTTGACGAGGATAATGAAGGTTATCATACCTTGGCAGTTGCCACTTTAGCTGATTATGAAGGTCTTTATATTAAAGATATTTTAAATAGTTCCCTTGATAAGATTAAAGCAATACGCCAGATTCCTTTGGCAAAATATCATAGATTAGGAATTTTCCAAGCTATCCGAAATGCAGCGGCAGAAGCAGACCGATTGCTTCCTAAGACACCTAAGGGGTACCTAAATGAAGTCCCAAATTATCGTAAAAAACAAATGGAGAAAAATTTAAAACCAGTTGATTATAAAACGCCGATTTTTAATAAGGCTTTACCTAATGAAAAGGTAGACGGTGATAGAGCGGCTAAAGGTCATAATATAAATGCGGAGACTAATAATTCTGTAGCTGTAACACCAATAAGGTCCGAGCAGCAATTACATAAGTCACAGTCTGATGTAAATTTACCTCAAACAAGTTCTAAAAATAATTTTATATACGAGATTCTAGGATACGTTAGTTTATGTTTGCTTTTCCTAGTAACTGCTGGGAAAAAAGGAAAACGAGCAAGAAAA

SEQ ID NO: 14128 - protein, 1055 aa, Streptococcus agalactiae
MTKKHLKTLALALTTVSVVTYSQEVYGLEREESVKQEQTQSASEDDWFEEDNERKTNVSKENSTVDETVSDLFSDGNSNNSSSKTESVVSDPKQVPKAKPEVTQEASNSSNDASKVEVPKQDTASKKETLETSTWEAKDFVTRGDTLVGFSKSGINKLSQTSHLVLPSHAADGTQLTQVASFAFTPDKKTAIAEYTSRLGENGKPSRLDIDQKEIIDEGEIFNAYQLTKLTIPNGYKSIGQDAFVDNKNIAEVNLPESLETISDYAFAHMSLKQVKLPDNLKVIGELAFFDNQIGGKLYLPRHLIKLAERAFKSNRIQTVEFLGSKLKVIGEASFQDNNLRNVMLPDGLEKIESEAFTGNPGDEHYNNQVVLRTRTGQNPHQLATENTYVNPDKSLWRATPDMDYTKWLEEDFTYQKNSVTGFSNKGLQKVRRNKNLEIPKQHNGITITEIGDNAFRNVDFQSKTLRKYDLEEIKLPSTIRKIGAFAFQSNNLKSFEASEDLEEIKEGAFMNNRIGTLDLKDKLIKIGDAAFHINHIYAIVLPESVQEIGRSAFRQNGALHLMFIGNKVKTIGEMAFLSNKLESVNLSEQKQLKTIEVQAFSDNALSEVVLPPNLQTIREEAFKRNHLKEVKGSSTLSQITFNAFDQNDGDKRFGKKVVVRTHNNSHMLADGERFIIDPDKLSSTMVDLEKVLKIIEGLDYSTLRQTTQTQFREMTTAGKALLSKSNLRQGEKQKFLQEAQFFLGRVDLDKAIAKAEKALVTKKATKNGHLLERSINKAVLAYNNSAIKKANVKRLEKELDLLTDLVEGKGPLAQATMVQGVYLLKTPLPLPEYYIGLNVYFDKSGKLIYALDMSDTIGEGQKDAYGNPILNVDEDNEGYHTLAVATLADYEGLYIKDILNSSLDKIKAIRQIPLAKYHRLGIFQAIRNAAAEADRLLPKTPKGYLNEVPNYRKKQMEKNLKPVDYKTPIFNKALPNEKVDGDRAAKGHNINAETNNSVAVTPIRSEQQLHKSQSDVNLPQTSSKNNFIYEILGYVSLCLLFLVTAGKKGKRARK

SEQ ID NO: 14129 - protein, 387 aa, Streptococcus agalactiae
ATGATTACACAAGAAATGAAAGAGATTATTAATAGTCAGTTAGCAATGGTCGCGACGGTTGATGCTAAAGGTCAACCCAATATTGGCCCAAAACGTTCTATGCGTCTCTGGGATGATAAAACGTTTATTTATAATGAAAATACAGATGGTCAAACTCGTATTAACATTGAAGATAATGGGAAAATTGAAATTGCCTTTGTTGATCGTGAACGTCTTTTAGGTTACAGGTTTGTGGGAACTGCTGAAATTCAAACAGAAGGTACTTATTACGAAGCAGCGAAAAAATGGGCAGAAGGACGCATGGGGGTTCCGAAAGCAGTTGGTATTATTCATGTCGAGCGTATTTTTAATTTACAATCTGGTGCTAATGCAGGTAAAGAAATCACT

SEQ ID NO: 14130 - protein, 129 aa, Streptococcus agalactiae; identical to SEQ ID NO: 862

SEQ ID NO: 14131 - protein, 831 aa, Streptococcus agalactiae
ATGGTCACAGGAGGATTCCGACTAGACCTCTTACTTGAGATAACTAAGATAGCTCGTGCAACTTACTATTATCAACTAAAGAAACTGAATAAACCAGATAAAGACAAAGCAATCAAATCTGACATTCAATCCATTTATGATGAACATAGAGGAAACTATGGCTATCGTCGGATTTATTTAGAACTGCGAAATCGTGGCTTTGTCATCAACCACAAAAGGGTGCAAGGCTTGATGAAAAGTATGGGCTTGACTGCTCGTATTCGTCGTAAGCGCAAGTATGCCTCTTACAAAGGTGAGGTTGGTAAGAAGGCTGATAACCTGATTCAACGCCAGTTTGAGGGGTCGAAGCCCTATGAGAAGTGCTATACCGATGTGACGGAGTTTGCTTTACCTGAAGGGAAACTTTATCTATCGCCTGTTCTTGATGGCTATAACAGTGAGATAATTGATTTTACCCTGTCTCGGTCTCCTGCCTTGAAACAGGTTCAAACCATGCTTGAGAGGGCTTTTCCTGCGGCTTCATACAGCGAAACCATTCTCCACAGCGACCAAGGCTGGCAGTACCAGCACAAGTCCTACCATCAATTTCTGGAGGACAAAGGCATTCGTCCTTCTATGTCACGGAAGGGGAACAGTCCTGACAACGGTATGATGGAATCTTTCTTTGGGATTCTAAAATCTGAGATGTTCTATGGCTTGGAGAAGTCTTACAAATCACTTGATGACCTTGAGCAAGCTATCACAGATTACATTTTTTACTACAACAACAAGCGAATCAAAGCAAAACTAAAAGGACTTAGTCCTGTGCAATACAGAACTAAATCCTTCACT

SEQ ID NO: 14132 - protein, 277 aa, Streptococcus agalactiae
MVTGGFRLDLLLEITKIARATYYYQLKKLNKPDKDKAIKSDIQSIYDEHRGNYGYRRIYLELRNRGFVINHKRVQGLMKSMGLTARIRRKRKYASYKGEVGKKADNLIQRQFEGSKPYEKCYTDVTEFALPEGKLYLSPVLDGYNSEIIDFTLSRSPALKQVQTMLERAFPAASYSETILHSDQGWQYQHKSYHQFLEDKGIRPSMSRKGNSPDNGMMESFFGILKSEMFYGLEKSYKSLDDLEQAITDYIFYYNNKRIKAKLKGLSPVQYRTKSFT

SEQ ID NO: 14133 - protein, 534 aa, Streptococcus agalactiae
ATGAAATTAAGTTATGAAGATAAACTAGAAATATACGAGTTAAGAAAGATCGGGATGTCCTGGTCTCAGATTAGTCAACGATATGATGTTCGTATCTCGAATCTTAAATACATGATAAAACTCATGGATCGGTATGGTGTAGAAATCGTCGAAAAAGGTAGAAATGAGTATTATCCACCTGAATTAAAGCAGGAAATGATAGATAAAGTCTTGATTCATGGTTGTTCTCAACTCTCTGTTTCTCTTGATTATGCTCTCTCTAATTGTTCTATACTCACAAATTGGCTTTCCCAATTTAAGAAAAATGGTTATACTATTGTTGAGAAAACAAGAGGGAGACCGAGTAAAATGGGACGTAAGCGTAAGAAAACTTGGGAAGAAATGACAGAGCTCGAGCGACTTCAGGAAGAAAATGAGCGCTTGAGAACGGAGAATGCCTTTCTAAAAAAGTTGAGGGATTTGCGCTTGAGGGACGAAGCCTTACAGAGCGAACGGCAGAAACAATTAGAGAAATGGTCACAGGAGGATTCCGAC

SEQ ID NO: 14134 - protein, 178 aa, Streptococcus agalactiae; identical to SEQ ID NO: 2808

SEQ ID NO: 14135 - protein, 489 aa, Streptococcus agalactiae
ATGCTATCATTTCAAATTGTTGAAAAGCCAGCAATGATACTTGCTGGAGTAACTTTAGAAAATGTAAAGTCAAATCAAGAATGTCCTAAACTTTGGGAAAAATTACATAAACAATATAATCCATCAAAACTAAAAGAAAAAGGTATCCAGCAAGCCATTGGCATTTGTAAAACACAACCTGATTTTCGTTTCGATTACAGTGCCACTTATCAAGTAGAGACAAGTGTCCAAGCCCCAAAAGGGTTAGAAATTATTAGGATCCCAAGCGCTACCTATGCAGTCATTTCTGTTAAAGGTCCAATGCCATCGAGTCTTCAAGAAACATGGCGAAAAATAATACAAGGATTTTTTCAAGAGAATAATCTAAAACCAGCTAACTCGCCAAACTTAGAAATTTATTCATCTCAACATCCACAAGATACTGATTATCAAATGGAAATTTGGCTTGCTATCGCAGATATTACTAATAACTCGAAAACAAACTTAATC

SEQ ID NO: 14136 - protein, 163 aa, Streptococcus agalactiae
MLSFQIVEKPAMILAGVTLENVKSNQECPKLWEKLHKQYNPSKLKEKGIQQAIGICKTQPDFRFDYSATYQVETSVQAPKGLEIIRIPSATYAVISVKGPMPSSLQETWRKIIQGFFQENNLKPANSPNLEIYSSQHPQDTDYQMEIWLAIADITNNSKTNLI

SEQ ID NO: 14137 - protein, 282 aa, Streptococcus agalactiae
ATGCTTACTATTCAAGAAATGAAAGATACAACCTTTGAATTACAAGAAAATTTTAGAAGGTTAAATTATCCTATTAAACAAGTTGCTAAAGACTTGCAACTTAATATCAGTGAAGTTGAATCTCTTTTAAGTCTTGATGTTACTTATCCTGGAGATGTTTGTATGCTGAGAGATTATCTAGAAGATATGTTGAAAAAAGAGGGTAAAGAAGTTTATCCATTTTCTAGATTAGCATCTCATTCAGCAAATCGTTGGTACCCTTATGAGACACCATGGCGTTAT

SEQ ID NO: 14138 - protein, 94 aa, Streptococcus agalactiae; identical to SEQ ID NO: 866

SEQ ID NO: 14139 - protein, 159 aa, Streptococcus agalactiae; identical to SEQ ID NO: 9659

SEQ ID NO: 14140 - protein, 53 aa, Streptococcus agalactiae; identical to SEQ ID NO: 9660

SEQ ID NO: 14141 - protein, 393 aa, Streptococcus agalactiae
ATGCAAGAAACAACTAAGTCTATCTTTCCTAAGGGTGAAAAAAATCCATATGGTGAATTCTTTATTAGGCAATCCTATCTCGCAGCATTAGCAAAATCTCCAGATGGGAATGTTTCAGTTGGAAATGTAACCTTTGAAGCTGGCTGTCGTAATAATTGGCATGTTCATTTGGACGGTTATCAAATCCTCCTCGTTACAGAAGGTTCAGGTTGGTACCAAGAAGAGAATAAAAAGGCAGTTTCATTAGAACCAGGTAACGTGATTGTAACTGATAAAGGCGTTAAACATTGGCATGGTGCTAAAAAAGATTCTGAATTTGCACATATTGCGATTACAGCTGGTAAGAGTGAGTTTTATGAAGCTGTTAGTCTTGAAGAATATTCAAGACTAGGT

SEQ ID NO: 14142 - protein, 131 aa, Streptococcus agalactiae
MQETTKSIFPKGEKNPYGEFFIRQSYLAALAKSPDGNVSVGNVTFEAGCRNNWHVHLDGYQILLVTEGSGWYQEENKKAVSLEPGNVIVTDKGVKHWHGAKKDSEFAHIAITAGKSEFYEAVSLEEYSRLG

SEQ ID NO: 14143 - protein, 396 aa, Streptococcus agalactiae; identical to SEQ ID NO: 9665

SEQ ID NO: 14144 - protein, 132 aa, Streptococcus agalactiae; identical to SEQ ID NO: 9666

SEQ ID NO: 14145 - protein, 570 aa, Streptococcus agalactiae; identical to SEQ ID NO: 9667

SEQ ID NO: 14146 - protein, 190 aa, Streptococcus agalactiae; identical to SEQ ID NO: 9668

SEQ ID NO: 14147 - protein, 453 aa, Streptococcus agalactiae
ATGAAAGTAGCTACATTTATTGAACCTGGCAAAATGGTTATAACTGATACACCAAAACCAGTCATTGAACAAGAGACAGATGCTGTTATCAAAATTGTTAGAGCCTGTGTTTGTGGTTCAGACTTGTGGTGGTATCGTGGTATTTCAAAACGTGAAAGTGGTTCTTTTGCAGGTCATGAGGCTATTGGTATCGTTGAGGAAGTTGGTACTAAAGTAACTGACGTGTCAAAAGGTGATTTTGTTATTGTTCCCTTTACACATGGCTGTGGCCAATGTCCGTCTTGTAAGGCTGGATTTGATGGAAATTGTACAAATCATCAAGCTGAAAAAAATGTAGATACCAAGGTCAATATCTACGTTATACTAATGCAAACTGGGCATTGGTTAAAATTCCTGGTCAACCTTCTGACTATGATAATGAGACACTTAACTCTCTTCTCACCTTATCAGATG

SEQ ID NO: 14148 - protein, 151 aa, Streptococcus agalactiae
MKVATFIEPGKMVITDTPKPVIEQETDAVIKIVRACVCGSDLWWYRGISKRESGSFAGHEAIGIVEEVGTKVTDVSKGDFVIVPFTHGCGQCPSCKAGFDGNCTNHQAEKNVDTKVNIYVILMQTGHWLKFLVNLLTMIMRHLTLFSPYQM

SEQ ID NO: 14149 - protein, 851 aa, Streptococcus agalactiae
ATGACAGATACAATGATATTAAATGACAATCATAAAATACCAACTTTAGTTTAGGTACGTGGATGATAGATAATGATAGGGTAGCTCAAGTTGTTAAAGATGCTATCGAATTAGGCTACCGCCATATTGATACTGCACAAGCATACAACAATGAAAAAGGGGTCGGTGTAGGGATTAAAGAATCTGGTATTACACGTGAATCTTTATTTGTTACGACTAAAATTGCCGCTGAACATAAAGATTATGAAAGTGCTACAAAATCAATTGATCGATCACTAGAAGCTTTAGGGCTTGATTATATTGATTTAATGATTATTCATAGTCCACAGCCTTGGAAGGAATGGCGTGAAATAGATAAACATTTTGACCAAGGAAATTTAGAAGCTTGGAGAGCTTTAGAGGATGCTCAAAAATCTGGTAAGGTAAAATCCATCGGTGTCTCAAACTTTTTAGAAAAAGACTTAGAAAATATCTTAAAAAATGGTTATGTTAAACCTGCTATCAATCAAATCTTAGCTCACATCGGAAATACACCTTTCGACTTGATTGATTACTGTCAAAGTAAAGGTATTCAAGTTGAAGCTTATTCACCAATTGCACATGGACAAGCATTGAAATCTGATGGTATTCAAAAAATGGCTGAAAAATATGGGGTTAGTGTTGCTCAATTATGTATTCAATATTTACTACAATTAAACCTGATCGTTTTACCAAAGGCTTCTAGTAAAGAACATTTACAGTCTAATCTAGACTTTGACTTTGTAATTAGTGACGAAGATATGTCGATATTAAAATCACTTATGTTTGACGATTATGGGGAATTTTCTAACTTCCCTGTTTTTAGTGGAAAA

SEQ ID NO: 14150 - protein, 284 aa, Streptococcus agalactiae
MTDTMILNDNHKIPTLGLGTWMIDNDRVAQVVKDAIELGYRHIDTAQAYNNEKGVGVGIKESGITRESLFVTTKIAAEHKDYESATKSIDRSLEALGLDYIDLMIIHSPQPWKEWREIDKHFDQGNLEAWRALEDAQKSGKVKSIGVSNFLEKDLENILKNGYVKPAINQILAHIGNTPFDLIDYCQSKGIQVEAYSPIAHGQALKSDGIQKMAEKYGVSVAQLCIQYLLQLNLIVLPKASSKEHLQSNLDFDFVISDEDMSILKSLMFDDYGEFSNFPVFSGK

SEQ ID NO: 14151 - protein, 861 aa, Streptococcus agalactiae
ATGACATCAAACAAAAAAGTGGCTATCGCTTTTATATTAAATATCAGCTTTTCCGTCCTTGAATTCATCTTTGGAAGTCTATTCTTCTCAGGAGCTATCTTAGCCGATGCTGTTCATGATTTTGGTGATGCAATAGCTATTGGCATCTCAGCTACTTTAGAAAAAAAATCTAAGAAAGATGAAGATACGATATTTTCATTAGGTTATAAACGTTTTAGCCTTTTAGGAGCTCTTATCACAAGTCTAATTCTTATAAGTGGATCTATCTTAGTCATGATAGAAAATATTCCAAAATTGTGGCATCCTACTCCTGTTAATTATCACGGCATGTTTATTCTAGCTGTCATCGCTATTATCATTAATGGTCTAGCTAGTTTTATTCTCCATTCTGGTCAAAGTAAACATGAGGAAATATTAAGCCTTCATTTTTTGGAAGATATTCTAGGGTGGTTAGCTATTATTGTTATATCTCTTATCTTAAATTGGAAACCGTTGTATATCCTTGATCCATTATTATCAGTTGCCATATCTACTTTCATCTTATCTAAAGCACTTCCTAAATTACTATCAACCCTGAAACTTTTTTTAGATGGTGTTCCAGATTCCATAGATTACGCTGCATTACATGATGAACTTAAGGGACTTTCGCAAGTAAGATCTATCAATCAACTCAATATCTGGTCAATGGATGGTATTGATAATCGAGCAATCATTCACTGTTGCTTAAATCAATTGATATCTGAAAAAGATTGTAAAAGAGCTATTCGAACGATTTGCCAACATTATAAGATAAACGATGTTACTGTTGAAATCGATTATTCTTTAAGAGAACATCAAAATCATTGCAAACCATTAAAAAAC

SEQ ID NO: 14152 - protein, 287 aa, Streptococcus agalactiae
MTSNKKVAIAFILNISFSVLEFIFGSLFFSGAILADAVHDFGDAIAIGISATLEKKSKKDEDTIFSLGYKRFSLLGALITSLILISGSILVMIENIPKLWHPTPVNYHGMFILAVIAIIINGLASFILHSGQSKHEEILSLHFLEDILGWLAIIVISLILNWKPLYILDPLLSVAISTFILSKALPKLLSTLKLFLDGVPDSIDYAALHDELKGLSQVRSINQLNIWSMDGIDNRAIIHCCLNQLISEKDCKRAIRTICQHYKINDVTVEIDYSLREHQNHCKPLKN

SEQ ID NO: 14153 - protein, 522 aa, Streptococcus agalactiae; identical to SEQ ID NO: 5259

SEQ ID NO: 14154 - protein, 174 aa, Streptococcus agalactiae; identical to SEQ ID NO: 886

SEQ ID NO: 14155 - protein, 1191 aa, Streptococcus agalactiae
ATGATTGATTTTCTACTGTTGAAATCATTACACAGTCTTCTAGGTCTAACTATTACTGTTTGTGATCAAAATTTTTCTGTTATCAGAGAGTATAAATCCGAGAAAACTATTTCACTTTTTTACAATCATTACCTTATTTTAAGTAACTTTAGTAAAACTCAACATGATTTTTTATTTCATTATGGCTCTTTAGGAGAACTTTTTCTTGTCCACCATATTCAACAATATTATATTATCATCGGTCCCTGGCGTAGCAATGTTATTGACCCTTTACTTCTTAAGAAAAAGCTGACTGAAACACAAATCAATGCTAGTGAACAAGACTACTTTATTGATAGACTATCCCAATTACCTTTCTTCTCACTTAGTCAAATCCGAGAATTACTAATAGTAACCAATTATTGTCTAACTGGGGTTGTGAAAGATAAATTATCAGAGCCCTTACATTACTACACGAAAGGGTGGAGCAACTCCTTTGATCTAGATAAAATTAAGCAATTTTCTAAACAGAATATGAGTTCTTACAAATATCAGTATCATTTTGAAAATAATATTCTAAAAGCTGTTAAATCAGGTAGTGAATTTCTTTTGAAAGAAACAGTGGAACAATTTAGCAATTCTATCGTACCTATAATCAGTGGAGATGAATTGCGATCTGAAAAAAACTACTCCATCATGATTTATGATCGTCTCTCACAGGCTACCATCCAAGCAGGACTTGATATCGAAACAGCTTATCGAGCACGAGATCGTTTTATAAAAGAAAACGAGTCAACTATAAGTCTAAATGAAGTTTTAAAATTACGTGATACTGCTATCTTATTCTATACTCAACAAGTTCATTCTTTAAAAAAACATCTCGAAACCCCTCATTCTCAAACTATTGTCGCAGTGATTCGATATCTTGAAAATAATCTAAATCGCTTTATTAAAACAGAAGAAATAGCTAAAGAATGTCACATGAGTGAATCGAAGTTACGAAAACTATTTAAGCAAGAAAAACACATCACTATTCAACAATATTTTCTAAACTTAAAAATCGAAGCTGCTAAGCAATTACTAGATGAAAATAAGAAAGTAGAAGAAGTTTCCAATTTACTTGGATTTTCCACTTCTTCTAATTTTTCAAGGACATTTAAAAAAATAGTGGGAATTAGCCCACTAGAATATAAGCAAAAGCCTAAGACAATA

SEQ ID NO: 14156 - protein, 397 aa, Streptococcus agalactiae
MIDFLLLKSLHSLLGLTITVCDQNFSVIREYKSEKTISLFYNHYLILSNFSKTQHDFLFHYGSLGELFLVHHIQQYYIIIGPWRSNVIDPLLLKKKLTETQINASEQDYFIDRLSQLPFFSLSQIRELLIVTNYCLTGVVKDKLSEPLHYYTKGWSNSFDLDKIKQFSKQNMSSYKYQYHFENNILKAVKSGSEFLLKETVEQFSNSIVPIISGDELRSEKNYSIMIYDRLSQATIQAGLDIETAYRARDRFIKENESTISLNEVLKLRDTAILFYTQQVHSLKKHLETPHSQTIVAVIRYLENNLNRFIKTEEIAKECHMSESKLRKLFKQEKHITIQQYFLNLKIEAAKQLLDENKKVEEVSNLLGFSTSSNFSRTFKKIVGISPLEYKQKPKTI

SEQ ID NO: 14157 - protein, 2128 aa, Streptococcus agalactiae
ATGTTTAGAAGGTCTAAAAATAACAGTTATGATACTTTACAGACGAAACAACGGTTTTCAATTAAGAAGTTTAAGTTTGGTGCAGCTTCTGTACTAATTGGTATTAGTTTTTTAGGAGGTTTTACTCAAGGGCAATTTAATATTTCTACAGATACTGTGTTTGCAGCTGAAGTAATTTCAGGAAGTGCTGTTACGTTAAACACAAATATGACTAAAAATGTTCAGAATGGTAGAGCATATATAGATTTATATGATGTGAAAAATGGGAAAATAGATCCATTACAATTAATTACGTTAAATTCACCTGATTTAAAAGCTCAGTATGTCATTAGGCAAGGCGGCAATTATTTCACACAACCTTCTGAATTGACTACTGTTGGTGCAGCTAGTATTAATTATACAGTATTGAAGACAGATGGAAGTCCTCATACGAAGCCTGATGGACAAGTGGATATTATAAACGTTTCATTGACTATTTACAATTCTTCAGCTTTGAGAGATAAAATAGATGAAGTTAAAAAGAAAGCGGAAGACCCTAAATGGGACGAGGGAAGTCGCGATAAAGTTTTGATAAGTTTAGATGATATCAAAACAGATATTGATAATAATCCTAAGACGCAATCAGACATTGCCAATAAAATAACTGAAGTTACTAATTTAGAAAAAATACTAGTACCTCGAATCCCAGATGCCGATAAGAATGATCCAGCAGGTAAAGATCAGCAAGTCAATGTAGGTGAGACACCGAAGGCAGAAGATTCTATTGGTAACTTACCAGATCTTCCGAAAGGTACAACAGTAGCCTTTGAAACTCCAGTTGATACGGCAACACCGGGAGACAAACCAGCAAAAGTTGTTGTGACTTACCCAGATGGTTCAAAAGATACTGTAGATGTGACTGTTAAGGTTGTCGATCCACGTACAGATGCCGATAAGAATGATCCAGCAGGTAAAGATCAGCAAGTCAATGTAGGTGAGACACCGAAGGCAGAAGATTCTATTGGTAACTTACCAGATCTTCCGAAAGGTACAACAGTAGCCTTTGAAACTCCAGTTGATACGGCAACACCGGGAGACAAACCAGCAAAAGTTGTTGTGACTTACCCAGATGGTTCAAAAGATACTGTAGATGTGACTGTTAAGGTTGTCGATCCACGTACAGATGCCGATAAGAATGATCCAGCAGGTAAAGATCAGCAAGTCAATGTAGGTGAGACACCGAAGGCAGAAGATTCTATTGGTAACTTACCAGATCTTCCGAAAGGTACAACAGTAGCCTTTGAAACTCCAGTTGATACGGCAACACCGGGAGACAAACCAGCAAAAGTTGTTGTGACTTACCCAGATGGTTCAAAAGATACTGTAGATGTGACTGTTAAGGTTGTCGATCCACGTACAGATGCCGATAAGAATGATCCAGCAGGTAAAGATCAGCAAGTCAATGTAGGTGAGACACCGAAGGCAGAAGATTCTATTGGTAACTTACCAGATCTTCCGAAAGGTACAACAGTAGCCTTTGAAACTCCAGTTGATACGGCAACACCGGGAGACAAACCAGCAAAAGTTGTTGTGACTTACCCAGATGGTTCAAAAGATACTGTAGATGTGACTGTTAAGGTTGTCGATCCACGTACAGATGCCGATAAGAATGATCCAGCAGGTAAAGATCAGCAAGTCAATGTAGGTGAGACACCGAAGGCAGAAGATTCTATTGGTAACTTACCAGATCTTCCGAAAGGTACAACAGTAGCCTTTGAAACTCCAGTTGATACGGCAACACCGGGAGACAAACCAGCAAAAGTTGTTGTGACTTACCCAGATGGTTCAAAAGATACTGTAGATGTGACTGTTAAGGTTGTCGATCCACGTACAGATGCCGATAAGAATGATCCAGCAGGTAAAGATCAGCAAGTCAATGTAGGTGAGACACCGAAGGCAGAAGATTCTATTGGTAACTTACCAGATCTTCCGAAAGGTACAACAGTAGCCTTTGAAACTCCAGTTGATACGGCAACACCGGGAGACAAACCGCAAAGTTGTTGTGACTTACCCAGATGGTTCAAAAGATACTGTAGATGTGACTGTAGGTTCGATCCACGTACAGATGCCCGATANNNNNTTAATTAAT

SEQ ID NO: 14158 - protein, 711 aa, Streptococcus agalactiae
  VARIANT 697, 707, 708: Xaa = Any Amino Acid
MFRRSKNNSYDTLQTKQRFSIKKFKFGAASVLIGISFLGGFTQGQFNISTDTVFAAEVISGSAVTLNTNMTKNVQNGRAYIDLYDVKNGKIDPLQLITLNSPDLKAQYVIRQGGNYFTQPSELTTVGAASINYTVLKTDGSPHTKPDGQVDIINVSLTIYNSSALRDKIDEVKKKAEDPKWDEGSRDKVLISLDDIKTDIDNNPKTQSDIANKITEVTNLEKILVPRIPDADKNDPAGKDQQVNVGETPKAEDSIGNLPDLPKGTTVAFETPVDTATPGDKPAKVVVTYPDGSKDTVDVTVKVVDPRTDADKNDPAGKDQQVNVGETPKAEDSIGNLPDLPKGTTVAFETPVDTATPGDKPAKVVVTYPDGSKDTVDVTVKVVDPRTDADKNDPAGKDQQVNVGETPKAEDSIGNLPDLPKGTTVAFETPVDTATPGDKPAKVVVTYPDGSKDTVDVTVKVVDPRTDADKNDPAGKDQQVNVGETPKAEDSIGNLPDLPKGTTVAFETPVDTATPGDKPAKVVVTYPDGSKDTVDVTVKVVDPRTDADKNDPAGKDQQVNVGETPKAEDSIGNLPDLPKGTTVAFETPVDTATPGDKPAKVVVTYPDGSKDTVDVTVKVVDPRTDADKNDPAGKDQQVNVGETPKAEDSIGNLPDLPKGTTVAFETPVDTATPGDKPAKVVVTYPDGSKDTVDVTVXVSIHVQMPDXXLIN

SEQ ID NO: 14159 - protein, 282 aa, Streptococcus agalactiae
ATGACTAAAATCACTCATGCTACAAATGCAGGTGTTGTTGGTATCGTTATTTTTAACGATCAAGAAAAACGTGGAAATTTTCTAATTCCTTACCGTGAATTACCTGTGGGGGTTATTAGTAAAGTAGATGGCGAGCGTATAAAAAATACTTCAAGTCAGTTAACATTTAACCAGAGTTTTGAAGTAGTTGATAGCCAAGGTGGCAATCGTATGCTGGAACAATCAAGTTGGGGCGTGACAGCTGAAGGAGCAATCAAGCCTGATGTAACCAGCTTCTGGCTT

SEQ ID NO: 14160 - protein, 94 aa, Streptococcus agalactiae
MTKITHATNAGVVGIVIFNDQEKRGNFLIPYRELPVGVISKVDGERIKNTSSQLTFNQSFEVVDSQGGNRMLEQSSWGVTAEGAIKPDVTSFWL

SEQ ID NO: 14161 - protein, 486 aa, Streptococcus agalactiae
ATGCTTCAAAGTCATTTGGCTGAGAAATATAAAGGGATGAATTTAGATTCTAAAAAATTGCTAGAATTGTCTAAAAACATCCTCATGAGCTCAGCAACAGCATTATATAGTGAAGAGGATAAGGCGTTTTATTCACCACGTCAGCAAGGTGCAGGTGTAGTTGATGCTGAAAAAGCTATCCAAGCTCAATATTATGTTACTGGAAACGATGGCAAAGTTAAAATTAATCTCAAACGAGAGGGAGATAAATTTGATATCACAGTTACAATTCATAAACTTGTAGAAGGTGTCAAAGAATTGTATTATCAAGCTAATGTAGCAACAGAACAAGTAAATAAAGGTAAATTTGCCCTTAAACCACAAGCCTTGCTAGATACTAATTGGCAGAAAGTAATTCTTCGTGATAAAGAAACACAAGTTCGATTTACTATTGATGCTAGTCAATTTAGTCAGAAATTAAAAGAACAGATGGCAAATGGTTATTCT

SEQ ID NO: 14162 - protein, 162 aa, Streptococcus agalactiae
MLQSHLAEKYKGMNLDSKKLLELSKNILMSSATALYSEEDKAFYSPRQQGAGVVDAEKAIQAQYYVTGNDGKVKINLKREGDKFDITVTIHKLVEGVKELYYQANVATEQVNKGKFALKPQALLDTNWQKVILRDKETQVRFTIDASQFSQKLKEQMANGYS

SEQ ID NO: 14163 - protein, 111 aa, Streptococcus agalactiae
ATGAATCATGAGTTACAAAGCTTTGGGAATACCGCAATTGGCGCCCATGATTCTTATGTTGGAACTCTGGCTTACGCCGTTGGAAATGTGGCTTATATTTCTGACNNNNNT

SEQ ID NO: 14164 - protein, 37 aa, Streptococcus agalactiae
  VARIANT 36, 37: Xaa = Any Amino Acid
MNHELQSFGNTAIGAHDSYVGTLAYAVGNVAYISDXX

SEQ ID NO: 14165 - protein, 702 aa, Streptococcus agalactiae
GTGACTTACCCAGATGGTTCAAAAGATACTGTAGATGTGACTGTTAAGGTTGTCGATCCACGTACAGATGCCGATAAGAATGATCCAGCAGGTAAAGATCAGCAAGTCAATGTAGGTGAGACACCGAAGGCAGAAGATTCTATTGGTAACTTACCAGATCTTCCGAAAGGTACAACAGTAGCCTTTGAAACTCCAGTTGATACGGCAACACCGGGAGACAAACCAGCAAAAGTTGTTGTGACTTACCCAGATGGTTCAAAAGATACTGTAGATGTGACTGTTAAGGTTGTCGATCCACGTACAGATGCCGATAAGAATGATCCAGCAGGTAAAGATCAGCAAGTCAATGTAGGTGAGACACCGAAGGCAGAAGATTCTATTGGTAACTTACCAGATCTTCCGAAAGGTACAACAGTAGCCTTTGAAACTCCAGTTGATACGGCAACACCGGGAGACAAACCAGCAAAAGTTGTTGTGACTTACCCAGATGGTTCAAAAGATACTGTAGATGTGACTGTTAAGGTTGTCGATCCACGTACAGATGCCGATAAGAATGATCCAGCAGGTAAAGATCAGCAAGTCAATGGTAAAGGAAATAAACTACCAGCAACAGGTGAGAATGCAACTCCATTCTTTAATGTTGTAGCTTTGACAATTATGTCATCAGTTGGTTTATTATCTGTTTCTAAGAAAAAAGAGGAT

SEQ ID NO: 14166 - protein, 234 aa, Streptococcus agalactiae
MTYPDGSKDTVDVTVKVVDPRTDADKNDPAGKDQQVNVGETPKAEDSIGNLPDLPKGTTVAFETPVDTATPGDKPAKVVVTYPDGSKDTVDVTVKVVDPRTDADKNDPAGKDQQVNVGETPKAEDSIGNLPDLPKGTTVAFETPVDTATPGDKPAKVVVTYPDGSKDTVDVTVKVVDPRTDADKNDPAGKDQQVNGKGNKLPATGENATPFFNVVALTIMSSVGLLSVSKKKED

SEQ ID NO: 14167 - protein, 291 aa, Streptococcus agalactiae
ATGTCAACAGTAGCAGTAAGAGTTGATGATCAATTAAAAGATGATGCTACAGAACTTTTTCAATCCTTAGGGTTGGATATGAGCACAGCAGTAAAAATGTTTTTGATTCAATCTGTTAAAACTCAAAGTATTCCTTTTGAAATAAAAAATAAATCATCTGTTTCTGATGAAGAATTTCAAAATTTGGTAGAAACAAAATTAAAGGGAATACGAGTTAAGGCTAGTGATCCAGAAAGTGTAAATGCGTTTTTTGGAGATGAAGATTTTTCAGAATATGAGGAATATTTTAAA

SEQ ID NO: 14168 - protein, 97 aa, Streptococcus agalactiae; identical to SEQ ID NO: 892

SEQ ID NO: 14169 - protein, 186 aa, Streptococcus agalactiae
ATGAGTGATATTGAGGTATATTCTGTATTAGTTTCTCGTATTGAATATTCTGATGGTACAGGTTCAAAGGTTCGTCCTGCTGTAGTAGTCAAATTTAATGATGAAGTAATAAAAACTTTAAGATTTACTACTAAATATGAAAATAAGTCTGACAATATAAGAAGTCAGTATTTAGAAGTTATTGAT

SEQ ID NO: 14170 - protein, 62 aa, Streptococcus agalactiae; identical to SEQ ID NO: 894

SEQ ID NO: 14171 - protein, 369 aa, Streptococcus agalactiae
ATGAAAAAGAAATTATTAGGATTGATGATTTTAGCTATATCTACAGTATTTTTAGTTGCTTGTTCGACTAATTCGTTAAATGTAAAGTATTATAAAGTATATGATGGTGAAAAAATGTTAGTTTTAGAAATTAATGATGAATCAGGAATTTATCATAATGAAGGAAACTTTGTAGTAACTAATATTGATACTAAAAGTAAAAGTTTTGTACTTAAAGGTGGGTCTGCTAAGTATACTGTTTTATATGATGTTAAAAGTGATGGTAAATTGAATGTTGATTTAGGGAACTTTTATTATAATGCTTCTGGTAAGGAGACATATTATAAAGAAGGTAGCAAGGCTTTAGAAAAAGCATTAAGAGATAAAGAA

SEQ ID NO: 14172 - protein, 123 aa, Streptococcus agalactiae
MKKKLLGLMILAISTVFLVACSTNSLNVKYYKVYDGEKMLVLEINDESGIYHNEGNFVVTNIDTKSKSFVLKGGSAKYTVLYDVKSDGKLNVDLGNFYYNASGKETYYKEGSKALEKALRDKE

SEQ ID NO: 14173 - protein, 297 aa, Streptococcus agalactiae
TTGCTTGAACTAAAATTTCAACAAGAAAGAATGCTGAAAGGTTTGCATATAAAAAATACAGATCAATTGATTTTTTATGACTATAGGTTTGGTATGATATCAAATGATGCTGTTAACAAATTCTTGGCAAGCTCATTGGAAAAATTAGAAATAGAATCTAAGATGTCATCAACAGGTGCTAGACATACTTATGGAAGTTATTTGTTGGCTAACGGAGTAGATATTTGGGCGGTTGCAAAATTAATGGGGCATAAAGATATCAAACAATTAATAGAAACATATGGTCATTTGCTTCTG

SEQ ID NO: 14174 - protein, 99 aa, Streptococcus agalactiae; identical to SEQ ID NO: 898

SEQ ID NO: 14175 - protein, 245 aa, Streptococcus agalactiae
ATGTCCCCGTTAGGAATGATTAAAGATGAAGGTTTATTCAATACCATTAAAATCATCAGCCGGGGACTGAAAAATGAACGATGCCCTCATCCAAAATTAATAAATGTTTTGGAAAGAAAACTTGAAATTATCCTTGGTGATCAGAAACATATCCTTGAAAAAGATAGCCTTATTAGCCTCTCTCCACAAGAAACACACCATTTAAGAGCTATTGAAAATAGTAAATTTCTCCAATAGAATTAGAC

SEQ ID NO: 14176 - protein, 82 aa, Streptococcus agalactiae
  VARIANT 78: Xaa = Any Amino Acid
MSPLGMIKDEGLFNTIKIISRGLKNERCPHPKLINVLERKLEIILGDQKHILEKDSLISLSPQETHHLRAIENSKFLXIELD

SEQ ID NO: 14177 - protein, 213 aa, Streptococcus agalactiae; identical to SEQ ID NO: 5277

SEQ ID NO: 14178 - protein, 71 aa, Streptococcus agalactiae; identical to SEQ ID NO: 902

SEQ ID NO: 14179 - protein, 167 aa, Streptococcus agalactiae
ATGTCATACGAACAAGAATTTTTAAAAGACTTTGAAGAGTGGTTACAATCGCAAATAAGTATCAACCAAATGGCAATGGACAGTGCAAAGAAAGTTTAGAGGAAGATAAGGATGAGCGAGCAGCAGATGCGTATAATCGTTATGAGAGTAAGTTAGACGCCNNNNNT

SEQ ID NO: 14180 - protein, 56 aa, Streptococcus agalactiae
  VARIANT 55, 56: Xaa = Any Amino Acid
MSYEQEFLKDFEEWLQSQISINQMAMDSAKKVLEEDKDERAADAYNRYESKLDAXX

SEQ ID NO: 14181 - protein, 567 aa, Streptococcus agalactiae
ATGCAGATTCTAGAAGATTTCGATGGCAAAGCATTACCAAAACTAGAAACGGATCGACTTATCTTGCGTCAGCGAACGGTGGGGGATGTCCCAGCCATGTTTGATTACGTTTGCTTGGAAGAGGTTGCCTATCCAGCAGGGCTCAGTCCAATAGCTTCTTTAGAAGATGAGTATGATTATTTTGAAAATCGTTACTATCAAAATCTGGAAAAGGCAAAATTACCATCTGGTTATGGTATTACCGTTAAAGGAAGTGACCGGATTATCGGCTCTTGCGACTTTAACCACCGCCATGAAGACGATGTTTTCGAGATTGGCTACATGCTTCATCCTGACTATTGGGGTCATGGTTATATGACAGAAGCTGTCGCAGCCTTGATTGAAGTCGGTTTTACCCTCCTCAATCTCCACAAAATCGAAATCCGCTGCTATGATTACAATAAGCAAAGCCGGCGCGTGGCAGAAAAACTAGGCTTCACCCTTGAAGCCACCATCCGTGATCGTAAGGATAATCAAGGTAATCGCTGTGTCAATTTGATATATGGTTTGCTGAGGAGTGAGTGGGAG

SEQ ID NO: 14182 - protein, 189 aa, Streptococcus agalactiae
MQILEDFDGKALPKLETDRLILRQRTVGDVPAMFDYVCLEEVAYPAGLSPIASLEDEYDYFENRYYQNLEKAKLPSGYGITVKGSDRIIGSCDFNHRHEDDVFEIGYMLHPDYWGHGYMTEAVAALIEVGFTLLNLHKIEIRCYDYNKQSRRVAEKLGFTLEATIRDRKDNQGNRCVNLIYGLLRSEWE

SEQ ID NO: 14183 - protein, 582 aa, Streptococcus agalactiae
ATGATTAAGATACTTGGAGAAATCGTAGATAACCAGCTACCTGTTGTGGAAACGAATCGTCTGTTGTTGCGTCAACGCAAGTTAGAAGATGCTAAGGAGATATTTGAATTTGTCAAACTTGATGAGGTGACTTATCCAGCAGGTTTTCCGGCTGTTAAAAGCTTGGAAGAAGAGATAACCTATATTCAAGAGATTTATCCAACTAATCTTGAAAAAGAAAAGTTACCCTCTGGTTATGCTATTACTCTAAAAGGCGATGATAAGGTAATTGGTTCAGTAGATTTTAACCATCGCCACGAAGACGACATTTTTGAAATTGGCTACCTGCTCCACCCTGATTATTGGGGACAAGGCATTGTGCCAGAAGCAGCTTCAGTCCTTGTGGAGATAGGTTTCACACTGCTAGGACTACATAAGATTGAGCTGGGATGCTATGACTATAATAAGCAAAGTCAGGCGGTTGCGCGCAAATTAGGTTTTACTTTAGAGGCTAATATTCGTGATCGAAGAGATGCCCAGGGGCAACGTTGTGGCGATATGCGCTTTGGTTTACTGCGAAGCGAGTGGGAGAAAAAAAGAAGA

SEQ ID NO: 14184 - protein, 194 aa, Streptococcus agalactiae
MIKILGEIVDNQLPVVETNRLLLRQRKLEDAKEIFEFVKLDEVTYPAGFPAVKSLEEEITYIQEIYPTNLEKEKLPSGYAITLKGDDKVIGSVDFNHRHEDDIFEIGYLLHPDYWGQGIVPEAASVLVEIGFTLLGLHKIELGCYDYNKQSQAVARKLGFTLEANIRDRRDAQGQRCGDMRFGLLRSEWEKKRR

SEQ ID NO: 14185 - protein, 564 aa, Streptococcus agalactiae
ATGAATATTATTATCATCGGAGCACAAGCTTCTGGGAAAATGACAATTGGTCAGGAAATCGCAAAACAGACAGGCATGACCTTATTCCTTAACCATGATTCTATAGATTTTGTTTTACGCTTCATGCCATGGTCTCCAGATAGTATTGCTCTAACGGAGTCTATTCGCTTTAAATTTTTTGAAACGTTTGCTAAGACTGGTCAAGAAATGATTTTTACTATTGTAATTGATTTCAATGATTCAAGAGATGTAGCATTTCTAGAAAAGATTCAAACAGTTTTTCAATCTCACAACCAAGAGGTATTATTTGTAGAATTGGAAACAGAGCTAAGTGAGCGTCTCAAACGAAATCGCACAGAAAATCACCTCAAGCATAAGCCTTCAAAACGTGATATCAAATGGTCAGAGAACGATATTTGTTCAACCATGGATTACGCTATCTTTAATCCTGAAGTAGCCCCAGAAGCGCTTACATATTATTATAAAATCAATAATACTTGCTTAACTGCTACTGAAACAGCATATCTTATTATTCAAAAAATAAATCAAATCAAGGAGAAAAAC

SEQ ID NO: 14186 - protein, 188 aa, Streptococcus agalactiae
MNIIIIGAQASGKMTIGQEIAKQTGMTLFLNHDSIDFVLRFMPWSPDSIALTESIRFKFFETFAKTGQEMIFTIVIDFNDSRDVAFLEKIQTVFQSHNQEVLFVELETELSERLKRNRTENHLKHKPSKRDIKWSENDICSTMDYAIFNPEVAPEALTYYYKINNTCLTATETAYLIIQKINQIKEKN

SEQ ID NO: 14187 - protein, 1970 aa, Streptococcus agalactiae
ATGTCAAAAGAACTATCACCAAAATACAATCCTGCCGAGGTTGAGGCAGGCCGTTATCAAACTTGGCTTGACCAAGATGTTTTCAAGCCATCAGGGGATGCTGAGGCTAAGCCTTATTCTATTGTGATTCCACCACCAAACGTTACGGGTAAATTGCACTTGGGTCACGCTTGGGATACAACTCTACAAGATATCATTATTCGTCAAAAGCGTATGCAGGGCTTTGATACACTCTGGCTTCCAGGTATGGACCACGCTGGTATAGCCACTCAAGCTAAAGTTGAGGAGCGCCTTCGTGAGCAAGGCATTTCACGTTATGATCTTGGTCGTGAAAAATTCCTAGATAAAGTTTGGGAATGGAAAGACGAGTATGCAGCAACTATTAAATCTCAGTGGGGGAAAATGGGTCTTTCGGTTGATTATAGCCGTGAGCGTTTTACCCTTGATGAGGGACTTTCAAAAGCGGTAAGAAAAGTCTTTGTTGATTTGTACAATAAAGGTTGGATCTATCGTGGGGAGTTCATCATTAACTGGGATCCAGCAGCTCGTACAGCCCTTTCAGATATTGAAGTTATTCACAAGGATGTTGAGGGTGCTTTCTATCATATGAATTATATGCTGGAAGATGGCTCACGCGCCCTAGAAGTAGCAACAACTCGTCCTGAGACTATGTTTGGAGATGTGGCTGTAGCGGTAAATCCAGAAGATCCACGTTACAAGGATTTGATTGGTCAAAATGTTATCCTTCCTATCATCAATAAACCTATTCCAATCGTCGCTGATGAACACGCTGATCCAGAATTTGGAACAGGTGTGGTTAAGATTACGCCGGCTCACGACCCTAATGACTTCGCTGTAGGTCAACGCCACAACTTACCACAAGTTAACGTTATGAACGATGATGGGACTATGAATGAACTTGCGGATGAATTTAATGGTATGGATCGTTTCGAAGCTCGTAAGGCAGTAGTCGCTAAATTAGAATCGTTAGGAAACTTAGTAAAAATTGAAAAAATGACTCATTCTGTTGGTCATTCAGAACGAACAGGCGTTGTGGTTGAACCACGTTTATCTACTCAATGGTTCGTCAAGATGGATCAATTGGCTAAGAATGCCATTGCCAACCAAGATACAGAAGACAAGGTAGAGTTTTATCCACCACGATTTAACGATACTTTTATGAGCTGGATGGAAAATGTCCATGACTGGGTTATCTCTCGTCAATTATGGTGGGGACACCAAATTCCTGCATGGTACAACGTCAATGGTGAGATGTATGTTGGAGAAGATGCCCCAGAGGGTGACGGATGGACACAGGATGAAGACGTTCTAGACACATGGTTTAGTTCTGCTTTATGGCCGTTTTCAACAATGGGATGGCCAGACACCGAAGCAGCTGACTTCAAACGCTACTTCCCAACGTCAACCTTGGTAACTGGATACGATATCATCTTCTTCTGGGTATCGCGCATGATTTTCCAATCTCTTGAATTTACAGGACGCCAACCATTCTCAAATGTTCTTATTCATGGACTCATCCGTGATGAAGAAGGACGTAAAATGTCTAAATCACTTGGCAATGGGATTGATCCGATGGATGTCATTGAGAAATATGGTGCGGATGCTCTTCGTTGGTTCCTCTCAAATGGTTCAGCCCCTGGTCAAGATGTGCGTTTTTCATACGAAAAAATGGATGCTTCGTGGAATTTCATTAATAAGATTTGGAACATTTCACGCTATATCCTTATGAATAACGAAGGTTTAACGTTGGATCAAGCCAGAGAAAATGTGGAAAAAGTTGTTAATAGTCAAGTTGGAAATGTAACAGACCGTTGGATTCTCCACAATTTAAATGAGACTGTGGGTAAAGTTACTGAAAACTTGACAAGTTTGAATTTGGTGTTGCTGGTCACATCCTTTACAACTTTATCTGGGAAGAGTTTGCTAATTGGTACGTTGAGTTANNNNNT

SEQ ID NO: 14188 - protein, 657 aa, Streptococcus agalactiae
  VARIANT 656, 657: Xaa = Any Amino Acid
MSKELSPKYNPAEVEAGRYQTWLDQDVFKPSGDAEAKPYSIVIPPPNVTGKLHLGHAWDTTLQDIIIRQKRMQGFDTLWLPGMDHAGIATQAKVEERLREQGISRYDLGREKFLDKVWEWKDEYAATIKSQWGKMGLSVDYSRERFTLDEGLSKAVRKVFVDLYNKGWIYRGEFIINWDPAARTALSDIEVIHKDVEGAFYHMNYMLEDGSRALEVATTRPETMFGDVAVAVNPEDPRYKDLIGQNVILPIINKPIPIVADEHADPEFGTGVVKITPAHDPNDFAVGQRHNLPQVNVMNDDGTMNELADEFNGMDRFEARKAVVAKLESLGNLVKIEKMTHSVGHSERTGVVVEPRLSTQWFVKMDQLAKNAIANQDTEDKVEFYPPRFNDTFMSWMENVHDWVISRQLWWGHQIPAWYNVNGEMYVGEDAPEGDGWTQDEDVLDTWFSSALWPFSTMGWPDTEAADFKRYFPTSTLVTGYDIIFFWVSRMIFQSLEFTGRQPFSNVLIHGLIRDEEGRKMSKSLGNGIDPMDVIEKYGADALRWFLSNGSAPGQDVRFSYEKMDASWNFINKIWNISRYILMNNEGLTLDQARENVEKVVNSQVGNVTDRWILHNLNETVGKVTENFDKFEFGVAGHILYNFIWEEFANWYVELXX

SEQ ID NO: 14189 - protein, 538 aa, Streptococcus agalactiae
GTGGAAGCTCGTTTTGATATTGAATCCATTTTACCAAAGCGTATTACCTTTATTCATACAGAAGAATTGGTAGAAAAATACCCAGACTTAAGCCCTAAAGAGCGTGAAAACGCCATCGCTAAGGAGTATGGCGCAGTCTTTTTGATTGATTGGTGGAGAGTTAGCAGATGGTAAACCACATGATGGTCGTGCACCGGACTATGATGACTGGACAACACCATCAGAAAATGGTTTTAAAGGTCTCAATGGTGATATTTTAGTATGGAACGAACAGCTTGGAACTGCCTTTGAACTATCATCAATGGGAATTCGAGTTGATGAAGATGCTCTTAAACGTCAAGTTGTTCTCACCGGTGATGAAGATCGTTTAGAGTTTGAGTGGCATAAGACGCTATTACGTGGTTTCTTCCCTCTGACTATTGGTGGGGGAATTGGTCAATCACGATTAGCTATGTTCTTGCTTCGTAAAAAACATATTGGAGAAGTACAGTCAAGTGTCTGGCCAAAAGAAGTCAAAGATACCTTCGAAAATATATTA

SEQ ID NO: 14190 - protein, 180 aa, Streptococcus agalactiae
  VARIANT 50: Xaa = Any Amino Acid
MEARFDIESILPKRITFIHTEELVEKYPDLSPKERENAIAKEYGAVFLIXIGGELADGKPHDGRAPDYDDWTTPSENGFKGLNGDILVWNEQLGTAFELSSMGIRVDEDALKRQVVLTGDEDRLEFEWHKTLLRGFFPLTIGGGIGQSRLAMFLLRKKHIGEVQSSVWPKEVKDTFENIL

SEQ ID NO: 14191 - protein, 366 aa, Streptococcus agalactiae
ATGACTATTTCTCAACAACAATACCAACACATGATAACAAATAGTGACTTAATCGCCATCACAGATAAGGCCTTAGTAAGCAAAAGTCAACAATCTGAAGCGACTATTTTTATAGGACGTCCAACTTGCCAATATTGTAGAGCTTTCTTACCAAAATTATTAAAATCTCAAGCCACACTTCATTCAAAAATTTACTACCTTGATAGTCAAAAATACAAAGGGAAACGATTGAAGAGTTTTTTCAAAAAGCATCATATTACCACTGTTCCAAATTTAGCACATTATCAACGAGGAAAAATGACTAAATATCTTGTTCAAGGAAGCCAAGCTACACCTCAACAAATCCAAACTTTCTTAAGCCAAAAA

SEQ ID NO: 14192 - protein, 122 aa, Streptococcus agalactiae
MTISQQQYQHMITNSDLIAITDKALVSKSQQSEATIFIGRPTCQYCRAFLPKLLKSQATLHSKIYYLDSQKYKGKRLKSFFKKHHITTVPNLAHYQRGKMTKYLVQGSQATPQQIQTFLSQK

SEQ ID NO: 14193 - protein, 749 aa, Streptococcus agalactiae
ATGGTGTCAGCGCTACTTAAGTTTGATTTTAGCGTTGTAAGGCATAATATGGCTATTAAAGTAATAATAATTTTTTAATCATTATGGGAACCTCGTTTCTCTTACTGCTAGCTTATCATATCAAAAAAGAAGGAAAAGAGATACTATCTTCTCTGTTTGTTATAAGCAATTTTTTTGATAACTCTACCTTATTTTTTGTTATAATAGTGGTTATGAGAGTAGTAGCAGGAACATTTGGAGGGCGTCCTTTAAAAACGCTTGATGGAAAAACAACTCGTCCAACAACTGATAAGGTTAAAGGCGCTATTTTTAATATGATTGGTCCTTTTTTTGAAGGTGGTCGTGTTTTAGACCTTTTTTCTGGCAGTGGTAGCTTAGCTATTGAGGCGATCTCAAGGGGAATGGACCAAGCTGTCCTAGTTGAAAAAGATAGGCGTGCGCAGGTCGTTATTCAAGAAAATATTGCAATGACTAAGAGTCCGGAGCAATTTCAATTATTAAAAATAGAAGCCAACCGTGCTTTAGAACAATTAACGGGACAATTTGATTTGGTCTTGTTGGACCCGCCATATGCTAAGGAAGAAATTGTAAAGCAAATCCAAATCATGGATAGCAAGGGTTTATTAGGCGATGATATCATGATTGTTTGTGAAACGGACAAATCAGTTGATTTACCTGAAGAAATTGCTTCTTTTGGGATATGGAAACAGAAAATTTATGGCATTTCTAAAGTAACGGTCTACGTTCGT

SEQ ID NO: 14194 - protein, 250 aa, Streptococcus agalactiae
MVSALLKFDFSVVRHNMAIKVNNNFLIIMGTSFLLLLAYHIKKEGKEILSSLFVISNFFDNSTLFFVIIVVMRVVAGTFGGRPLKTLDGKTTRPTTDKVKGAIFNMIGPFFEGGRVLDLFSGSGSLAIEAISRGMDQAVLVEKDRRAQVVIQENIAMTKSPEQFQLLKIEANRALEQLTGQFDLVLLDPPYAKEEIVKQIQIMDSKGLLGDDIMIVCETDKSVDLPEEIASFGIWKQKIYGISKVTVYVR

SEQ ID NO: 14195 - protein, 288 aa, Streptococcus agalactiae
ATGGATTACAAGTTAGTGATGATTATTCTCATCTTAGTCATATTGATTTATTTGTTGTTGCGCCTTCACTATTTAGAAGAGTTGCTAAAACATTATCACTTCAAAAATGATGAAGGAGTTTGTTCATTATCAAGAACAAAAAATCCATTGTATCTATTAATGGCAATGATTACTTTTTTGCCAAATCTTATCAATTGGATAGCTAACGGTTTTGAGGCAATAGACATTGTTCGCCTGATTCCTGTGGTAGTCTTTTTATGGTTGTATTATTGTGGAGATGACGACGAA

SEQ ID NO: 14196 - protein, 96 aa, Streptococcus agalactiae; identical to SEQ ID NO: 930

SEQ ID NO: 14197 - protein, 483 aa, Streptococcus agalactiae
ATGACAAAGAAAGCTTTATTTACAGGTTCATTTGATCCTGTTACTAATGGACATTTAGATATTATTGAGCGCGCCAGCTATCTATTTGATCATGTTTACATTGGGTTATTTCATAACCTTGAGAAGCAAGGTTACTTTTCGATTGAGTGCCGTAAAAAAATGTTAGAAGAAGCTATCCGTCAGTTTAAGAATGTTTCAGTTTTAGTGGCGCAAGATAGACTAGCTGTTGACTTAGCAAGGGAAGTGGGAGCAAAATATTTTGTTCGAGGTCTGCGTAATAGCCAGGATTTTGATTATGAAGCCAATTTGGAATTTTTTAATAAACAGTTGGCAGATGGTATTGAGACAGTTTATTTATCAACGTCGCCATCTTTGAGTCCGATATCATCTAGTCGCATCCGTGAATTGATACATTTTAAGGCTTCTGTGAAGCCTTTTGTTCCAAAGAGTGTTTTTAGAGAAGTGGAGAAAATGAGTGAAGAA

SEQ ID NO: 14198 - protein, 161 aa, Streptococcus agalactiae
MTKKALFTGSFDPVTNGHLDIIERASYLFDHVYIGLFHNLEKQGYFSIECRKKMLEEAIRQFKNVSVLVAQDRLAVDLAREVGAKYFVRGLRNSQDFDYEANLEFFNKQLADGIETVYLSTSPSLSPISSSRIRELIHFKASVKPFVPKSVFREVEKMSEE

SEQ ID NO: 14199 - protein, 1071 aa, Streptococcus agalactiae
GTGAAGAATAAAGATCCAAAAAGAAAACATAAAAGTTTGCTAGGTCTGCTTAAATGGTGGATTATAGGTTTTGCTTTTTTATTGTTAGTATTAGCAAGCCTTGTGGTGAGGCTACCTTATTATTTGGAAATGCCAGGTGGAGCTTATGATATCCGTTCGGTATTGAAAGTGAATAAAAAGGCTGATAAAGCTAAGGGTTCGTACAATTTTGTAGCGGTATCTGTCAGTCAAGCAACGCCAGCTCAGGTTCTTTATGCTTGGTTAACTCCTTTTACAGAATTATCTAGTAAAGAGGAGACAACAGGTGGCTTTAGTAATGACGATTATCTCAGAATTAATCAATTCTACATGGAGACTTCTCAAAATGAGTCCATCTATCAAGCTTTAAAGTTAGCTAATAAGCAAGTATCTCTTACTTATAAAGGAGTTTATGTGCTTAACTTAGCTAAAAATTCGACATTTAAAGATAGATTACATTTAGCTGATACAGTCACAGGAGTTAATGGCAAAAGTTTCAAAAATTCTTCTCAACTTATCAAATATGTTGCAGCTCTTCATCTAGGTGATAAAGTAAAGGTACAATACACAAGTCAAGGTAAAAAGAAAGAATCAGTTGGTAAAGTTATTAAACTATCAAACGGTAAAAATGGTATTGGTATCGGTTTGACAGACCATACAGAAGTATCATCTGATGTTCCTGTGGACTTTAATACTGAAGGTGTTGGAGGACCAAGTGCAGGTTTAATGTTTACTTTAGCGATTTACGACCAATTAGTTAAAGAAGATTTACGTAAAGGACGTAAGATTGCAGGCACTGGTACTATTGAGCAAAATGGGCATGTTGGCGATATTGGTGGAGCAGGTTTGAAAGTTGTTTCAGCGGCTAAAAAAGGAATGGATATTTTCTTTGTTCCTAATAATCCGATCGATAAAAATGCTAAAAAAGGCAAAACAAAGGTTCAGACGAATTATCAAGAGGCAAAAGCAGCAGCTAAGCGATTAGGTACGAAGATGAAAATTGTACCAGTTCAAAATGTTCAGCAAGCTATTGATTATTTGAAAAAAACAAAA

SEQ ID NO: 14200 - protein, 357 aa, Streptococcus agalactiae
MKNKDPKRKHKSLLGLLKWWIIGFAFLLLVLASLVVRLPYYLEMPGGAYDIRSVLKVNKKADKAKGSYNFVAVSVSQATPAQVLYAWLTPFTELSSKEETTGGFSNDDYLRINQFYMETSQNESIYQALKLANKQVSLTYKGVYVLNLAKNSTFKDRLHLADTVTGVNGKSFKNSSQLIKYVAALHLGDKVKVQYTSQGKKKESVGKVIKLSNGKNGIGIGLTDHTEVSSDVPVDFNTEGVGGPSAGLMFTLAIYDQLVKEDLRKGRKIAGTGTIEQNGHVGDIGGAGLKVVSAAKKGMDIFFVPNNPIDKNAKKGKTKVQTNYQEAKAAAKRLGTKMKIVPVQNVQQAIDYLKKTK

SEQ ID NO: 14201 - protein, 1332 aa, Streptococcus agalactiae
ATGACAGAGCTTATAAGAATACTACATTTAAATGATCTGCACTCTCATTTTGAGAATTTTCCTAAGGTAAAACGATTTTTTCATAACAATCAAGCGCAGCCAATAGAGACGATTTCACTTGACTTGGGGGATAATATTGATAAAAGCCATCCTTTGACAGAAGCAAGCTCGGGCAAGGCTAATGTCCAATTGATGAATGAACTGGGTATTGAGCTTGCTACTATTGGTAATAATGAAGGAGTTGGTTTATCCAAAAAAGACTTGGACCAAGTCTACAAAGATTCAGATTTTACGGTTATTGTTGGTAATCTAAAAGATAACATAATCGAACCGAGTTGGGCAAAACCTTACATTATTTATGAGACACAGCAAGGAACTAAGCTTGCTTTTTTAGCTTATACTTTTCCTTATTATAAAACCTATGAACCTAATGGATGGACGATAGAAGATCCAATTGACTGTCTTAAATGCCATTTACAAATAAATGAGATAAAAGAGGCAAATTGTCGTATTTTGATGAGTCATTTAGGTATTCGTTTTGATACAAGGATTGCTCAAGAATTTTCAGAAATTGACCTTATTATAGGTGCACATACACACCATTTATTTGAGGAAGGGGAGCTAATTACCGGTACATATCTTGCAGCAGCTGGTAAATATGGTCGCTTTGTTGGGAGTATTGATATAACTTTTGATAATCATACACTAAAAGATATTTTAATCTCAACATATGATACAAAACAACTAACTGGTTATCCTTCGGACAGTGATTGGGCTAAGGAGATTGAGTCAGAAGGTAAAGAACAGCTTAGAAAAGAAAGTTTAATATCCTTTCCAGCACCATTATCATTAGAAGAATCGTGTCAACTAGTCATGGATGCGATGCTGTTTTACGCAGGTGCAGATGTTGCTATTATCAATTCTGGCTTAATTGTTCAGCCATTTGAAAAAGACTTTTCGAGGAAAAATCTGCATGAATCATTACCTCATCAAATGCGTCTCGCTAAATTGACAGTGAGTAGTCAAGAACTTTTAGAGATTTATGAAACTATTTATCAACAAGGTCAATTTTTAGCGCAACAAAAGATTCATGGTATGGGCTTTCGTGGCAAGTACTTTGGAGAAGTTTTACATTCGGGATTTGATTACAAAAATGGAAAAATAGTGTATAATGAGAAAGATATTGATGCCAAAGAAGAAGTGATTCTTGTAATCGTTGATCAGTATTATTTTGCATCGTATTTTGAGTGTTTAAAAACAAAAAAAGTAGACTTGCTTTTTCCTGAATTACTCAGAGATGTGGTAGCAGATTATTTAATAAATATGACACTA

SEQ ID NO: 14202 - protein, 444 aa, Streptococcus agalactiae
MTELIRILHLNDLHSHFENFPKVKRFFHNNQAQPIETISLDLGDNIDKSHPLTEASSGKANVQLMNELGIELATIGNNEGVGLSKKDLDQVYKDSDFTVIVGNLKDNIIEPSWAKPYIIYETQQGTKLAFLAYTFPYYKTYEPNGWTIEDPIDCLKCHLQINEIKEANCRILMSHLGIRFDTRIAQEFSEIDLIIGAHTHHLFEEGELITGTYLAAAGKYGRFVGSIDITFDNHTLKDILISTYDTKQLTGYPSDSDWAKEIESEGKEQLRKESLISFPAPLSLEESCQLVMDAMLFYAGADVAIINSGLIVQPFEKDFSRKNLHESLPHQMRLAKLTVSSQELLEIYETIYQQGQFLAQQKIHGMGFRGKYFGEVLHSGFDYKNGKIVYNEKDIDAKEEVILVIVDQYYFASYFECLKTKKVDLLFPELLRDVVADYLINMTL

SEQ ID NO: 14203 - protein, 576 aa, Streptococcus agalactiae
ATGCGAAAAGAAGTGACACCAGAGATGCTTAACTATAATAAGTATCCTGGCCCACAGTTTATTCACTTTGAAAATATCGTTAAAAGTGATGATATTGAATTTCAACTTGTTATTAATGAAAAATCAGCTTTTGATGTGACTGTCTTTGGACAACGTTTTTCTGAGATTTTATTAAAATATGATTTTATCGTTGGCGATTGGGGTAACGAGCAGTTGAGGCTAAGAGGCTTTTACAAAGATGCTAGTACGATTAGAAAAAATAGCCGGATTTCACGTTTAGAAGATTATATTAAAGAGTATTGTAACTTTGGTTGTGCTTATTTTGTGTTGGAGAATCCAAATCCTAGAGATATTAAATTTGATGATGAAAGACCTCATAAGCGTCGTAAGTCAAGATCCAAATCACAATCATCAAAGTCACAAACTAGAAATAATCGTTCCCAGTCAAATGCCAATGCTCATTTTACAAGTAAAAAGCGTAAAGACACAAAACGCCGTCAAGAACGTCATATTAAAGAAGAGCAAGATAAGGAAATGACCTCTGCAAAGCAGCATTTTGTTATTCGTAAGAAAAAA

SEQ ID NO: 14204 - protein, 192 aa, Streptococcus agalactiae; identical to SEQ ID NO: 940

SEQ ID NO: 14205 - protein, 1104 aa, Streptococcus agalactiae
ATGCCTAAAAAAACTGATACACCCGACTATAAACCCTCTATTTATAGCTTAACTCGCGATGAACTAATAGCTTGGGCTATTGAACATGGAGAAAAGAAATTCCGTGCTTCACAAATCTGGGACTGGCTCTATAAAAAGCGTGTGCAAAGCTTCGATGAAATGACTAACATTTCCAAAGATTTTATTGCACTTTTGAATGAGAATTTTGTTGTCAATCCTCTAAAACAACGTATTGTTCAAGAATCTGCTGATGGAACTGTTAAATACCTTTTTGAATTACCTGATGGCATGCTGATTGAGACGGTTTTGATGCGTCAATATTATGGTTTATCAGTATGTGTAACGACTCAAGTTGGTTGTAACATTGGTTGCACTTTCTGTGCAAGTGGTTTAATAAAGAAACAACGTGATCTTAACAATGGCGAAATCACTGCTCAAATTATGCTTGTTCAAAAATATTTTGATGAACGTGGACAAGGTGAGCGCGTTAGTCACATTGTGGTCATGGGAATAGGTGAACCCTTTGATAACTATACCAATGTATTAAAATTCTTGCGTACAGTTAATGATGATAATGGATTAGCTATTGGTGCACGTCACATTACAGTGTCTACTTCAGGTTTAGCACATAAAATTCGTGAATTTGCAAATGAAGGTGTACAAGTTAACTTAGCAGTATCTCTTCATGCTCCAAATAATGAATTACGATCAAGTATCATGCGTATTAATCGTTCTTTCCCTCTTGAAAAGTTGTTTGCGGCTATTGAATATTATATTGAGACGACTAACCGTCGTGTAACATTTGAGTATATTATGTTAAATGGTGTCAACGATACCCCAGAAAATGCTCAAGAGTTAGCAGATTTAACGAAAAAGATTCGCAAATTATCTTATGTCAATTTAATTCCTTACAATCCTGTCTCAGAACATGACCAGTATAGTCGTAGTCCTAAAGAGCGTGTGGAAGCTTTCTATGACGTTTTGAAGAAAAATGGAGTTAATTGTGTTGTTCGTCAAGAACATGGTACGGACATTGATGCAGCTTGCGGACAATTACGTTCAAACACAATGAAACGCGATCGTCAAAAAGCGAAGGTAGGGCGG

SEQ ID NO: 14206 - protein, 368 aa, Streptococcus agalactiae
MPKKTDTPDYKPSIYSLTRDELIAWAIEHGEKKFRASQIWDWLYKKRVQSFDEMTNISKDFIALLNENFVVNPLKQRIVQESADGTVKYLFELPDGMLIETVLMRQYYGLSVCVTTQVGCNIGCTFCASGLIKKQRDLNNGEITAQIMLVQKYFDERGQGERVSHIVVMGIGEPFDNYTNVLKFLRTVNDDNGLAIGARHITVSTSGLAHKIREFANEGVQVNLAVSLHAPNNELRSSIMRINRSFPLEKLFAAIEYYIETTNRRVTFEYIMLNGVNDTPENAQELADLTKKIRKLSYVNLIPYNPVSEHDQYSRSPKERVEAFYDVLKKNGVNCVVRQEHGTDIDAACGQLRSNTMKRDRQKAKVGR

SEQ ID NO: 14207 - protein, 513 aa, Streptococcus agalactiae
ATGCTTAAAAGATTATTTACTGAAGATGGGGAATTGACAAAGATTAGTCGTCGTTTCGTTTGGATGTTAGTGGTTATCTATTGTCTTATTATTGTCAGGATGTGTTTTGGGCCTCAAATTATGATTGAGGGGGTATCAACTCCGAATGTTCAGCGCTTCGGAAGAATTGTAGCTCTTTTAGTACCATTTAATTCTTTTCGTAGTTTAGATCAGCTAACTAGCTTTAAAGAGATTTTTTGGGTTATTGGTCAAAATGTAGTGAATATTTTACTGCTGTTTCCTCTCATTATAGGGTTACTATCCCTAAAGCCAAGTTTACGGAAATATAAAAGCGTTATATTACTTGCTTTCTTGATGTCTCTTTTCATAGAGTGTACTCAAGTTGTTTTAGATATTTTAATAGATGCTAATCGGGTTTTTGAAATCGACGATCTATGGACAAATACCTTAGGCGGTCCTTTCGCCCTATGGAGTTATCGAAACATAAAAGGTTGGCTTCTAACTATTAGAAAA

SEQ ID NO: 14208 - protein, 171 aa, Streptococcus agalactiae
MLKRLFTEDGELTKISRRFVWMLVVIYCLIIVRMCFGPQIMIEGVSTPNVQRFGRIVALLVPFNSFRSLDQLTSFKEIFWVIGQNVVNILLLFPLIIGLLSLKPSLRKYKSVILLAFLMSLFIECTQVVLDILIDANRVFEIDDLWTNTLGGPFALWSYRNIKGWLLTIRK

SEQ ID NO: 14209 - protein, 1743 aa, Streptococcus agalactiae
ATGTCTATTATAAAAAATTTGTGGTGGTTTTTTAAGGAAGAAAAGAAGCGCTATCTTATTGGGATTTTGTCATTAAGTTTGGTTGCAGTGTTAAATCTTATCCCTCCTAAAATCATGGGATCAGTTATTGATGCTATTACAACTGGAAAATTAACAAGACCACAATTACTATGGAATTTATTAGGTTTGGTTTTGTCAGCTTTAGCTATGTATGGGCTGCGTTATATTTGGCGTATGTATATTTTAGGGACTTCTTACAAATTAGGCCAAGTTGTCAGATACCGTTTATTTGAACATTTTACAAAAATGTCTCCTTCTTTTTATCAGAAATATCGTACAGGTGATTTAATGGCGCACGCGACCAACGACATCAATTCTCTAACACGTCTTGCAGGAGGAGGAGTTATGTCAGCAGTGGATGCCTCTATCACAGCATTAGTAACGCTTATCACCATGTTCTTTACTATTTCGTGGCAAATGACATTAATTGCGGTTATCCCTTTGCCCTTAATGGCCTTAGCAACTAGTAAATTGGGGCGAAAAACCCATGAAACCTTCAAAGAATCTCAGGCAGCCTTTTCAGAATTAAATAATAAAGTGCAAGAAAGTGTCTCTGGCGTCAAAGTGACTAAATCATTTGGTTATCAAGAACAAGAAATTGCTTCTTTTCAAGAGATTAATCAGATGACTTTCGTGAAGAACATGCGGACCATGACTTATGATGTCATGTTTGATCCTTTAGTTCTTCTTTTTATAGGTGCCTCCTACGTATTAACATTGGCTATGGGAGCTTTTATGATTTCAAAAGGTCAAGTTACTGTTGGTGACTTGGTAACATTTGTGACGTATTTAGATATGTTGGTATGGCCCTTGATGGCGATTGGTTTCTTGTTCAATATGGTACAGCGTGGTAGTGTTTCTTATAACCGTATTAATAGTCTACTTGAGCAAGAATCGGATATAACTGATCCTTTAAATCCTATCAAACCTGTTGTCAATGGAACATTAAGATATGATATTGATTTCTTTAGATACGACAATGAGGAAACCTTAGCCGATATTCATTTCACCTTAGAAAAAGGTCAAACCTTAGGTTTGGTAGGTCAAACGGGATCAGGGAAGACAAGTCTTATTAAGTTATTGCTACGTGAACATGATGTGACTCAGGGGAAAATTACTTTAAATAAACATGATATACGTGATTATCGATTGTCTGAGTTACGTCAACTAATCGGTTATGTTCCTCAAGATCAGTTTTTATTTGCTACCAGTATTTTAGAAAATGTTCGCTTTGGAAATCCAACTCTATCTATCAATGCTGTCAAAGAAGCAACTAAATTGGCACATGTTTACGATGACATTGAACAGATGCCAGCAGGATTTGAGACTCTAATTGGAGAAAAAGGAGTCTCATTATCTGGTGGACAAAAACAAAGGATTGCGATGAGTCGTGCCATGATTTTAGATCCAGATATTCTTATTTTGGATGATTCTCTATCAGCAGTGGACGCTAAAACGGAACATGCTATTGTTGAGAATCTTAAAACGAATCGTCAAGGGAAATCGACTATTATTTCAGCACATCGTTTATCAGCTGTTGTGCACGCAGACCTTATCTTAGTTATGCGAGACGGCAGAGTCATTGAGCGAGGTCAACATCAAGAGTTGCTAAATAAAGGTGGTTGGTATGCTGAAACGTATGCCTCACAGCAATTAGAAATGGAGGAAGCATTTGATGAAGTC

SEQ ID NO: 14210 - protein, 581 aa, Streptococcus agalactiae
MSIIKNLWWFFKEEKKRYLIGILSLSLVAVLNLIPPKIMGSVIDAITTGKLTRPQLLWNLLGLVLSALAMYGLRYIWRMYILGTSYKLGQVVRYRLFEHFTKMSPSFYQKYRTGDLMAHATNDINSLTRLAGGGVMSAVDASITALVTLITMFFTISWQMTLIAVIPLPLMALATSKLGRKTHETFKESQAAFSELNNKVQESVSGVKVTKSFGYQEQEIASFQEINQMTFVKNMRTMTYDVMFDPLVLLFIGASYVLTLAMGAFMISKGQVTVGDLVTFVTYLDMLVWPLMAIGFLFNMVQRGSVSYNRINSLLEQESDITDPLNPIKPVVNGTLRYDIDFFRYDNEETLADIHFTLEKGQTLGLVGQTGSGKTSLIKLLLREHDVTQGKITLNKHDIRDYRLSELRQLIGYVPQDQFLFATSILENVRFGNPTLSINAVKEATKLAHVYDDIEQMPAGFETLIGEKGVSLSGGQKQRIAMSRAMILDPDILILDDSLSAVDAKTEHAIVENLKTNRQGKSTIISAHRLSAVVHADLILVMRDGRVIERGQHQELLNKGGWYAETYASQQLEMEEAFDEV

SEQ ID NO: 14211 - protein, 1737 aa, Streptococcus agalactiae; identical to SEQ ID NO: 5325

SEQ ID NO: 14212 - protein, 579 aa, Streptococcus agalactiae; identical to SEQ ID NO: 5326

SEQ ID NO: 14213 - protein, 564 aa, Streptococcus agalactiae
ATGTTACTATTGGTAGATAATTACGATTCTTTTACCTATAATTTAAAGCAATATTTAAGTGTCTATAAAGAAATATTCGTCATAAAAAATGATGATCCTAACCTTTTTTTATTAGCTGAGAGCGCAGAAGCTATCGTCTTATCACCTGGACCAGGACACCCAAAGGATGCTGGGAAAATATTAGAATTAATCAATCAGTTTATAGGACAGAAACCTATTCTAGGTATCTGTTTGGGGCATCAAGCGCTTGCTGAGTGCTTGGGTGGGCGATTAAATTTAGCAAATCACGTTATGCATGGTAAACAAAGTTGGGTAACAATAAACGACCATACTAGTTTGTTTAAGGGAATTGATAGTCCAACCCAAGTTATGCGTTATCACTCATTGGTAGTGACTGATTTACCAGAGAATATTGCTATTATTGCACGATCAAATGAGGATAATGAAATCATGGCATTCCATTGCCCCAGCTTAAAGGTATATGCGATGCAGTTTCATCCTGAGTCAATCGGGAGTATTGATGGAATGAAAATGATTGAAAACTTTTTGACGTTAATTAATGAC

SEQ ID NO: 14214 - protein, 188 aa, Streptococcus agalactiae; identical to SEQ ID NO: 5328

SEQ ID NO: 14215 - protein, 234 aa, Streptococcus agalactiae
ATGAAAACAAGAACAACTACCTATATTGCACTCATGGTTGCACTACTCATTGTTTTAGGTTTTATCCCAGGGATCCCATTAGGTTTCATTCCAGTCCCAATTGTCTTACAAAATCTTGGTGTTATGCTGGCAGGTGCTCTGCTTGGTAGTAGGAAAGGTTTCCTAGCTGTGGCTATTTTCTTGCTCTTAGTTGCTATTGGTGCACCATTTTACCAGGAGGGCGGTCAGGTCTCG

SEQ ID NO: 14216 - protein, 78 aa, Streptococcus agalactiae
MKTRTTTYIALMVALLIVLGFIPGIPLGFIPVPIVLQNLGVMLAGALLGSRKGFLAVAIFLLLVAIGAPFYQEGGQVS

SEQ ID NO: 14217 - protein, 990 aa, Streptococcus agalactiae
ATGTCATTTCAAACAAATTATATCCATTTGGCTGACGAAATATTATCTGGAAAGACTAGCATTTCTTATGAACAAGCGCTGGAAATTCTAAATAGCGATGAGAACTGGTGGGAAATCTACGCTGCTGCCTTATACCTTAAAAATCAAGTTAGCCGAAATAATATTCGCCTTAACGTTTTATTAAGTGCTAAGCAAGGACTTTGTGCAGAAAATTGTGGTTACTGTTCTCAATCTAAAGAAAGCACTGCTGACATTGATAAATTTGGTCTGCTTCCTCAAAATGTCATTCTAAAACAGGCTATTGTCGCTCATCAAAATGGTGCTAGCGTCTTTTGTATTGCGATGAGTGGAACTAAGCCTAGCAAGAGAGAAATTGAGCAGTTATGTCAAGTCATCCCTGAAATCAAAAAAAGCCTTCCTCTAGAAATATGCCTTACCGCTGGTTTTTTGGATAGAGAACAACTTCATCAGCTAAAACAAGCAGGAATTGACCGTATCAATCATAACCTCAACACCCCCGAAGAAAACTACCCCAACATTGCAACGACGCATAGCTTCAAAGATCGTTGTGATACTTTAGAAAGAATTCACAATGAAGACATTGATGTTTGTTCTGGATTCATTTGTGGTATGGGAGAGAGCGATGAGGGGCTCATCACATTAGCTTTCAGACTAAAAGAACTGAACCCCTATTCTATCCCTGTCAATTTTTTACTTGCTGTTGAAGGAACACCTCTTGGAAAATATAACTATTTGACTCCCATTAAATGCTTAAAAATTATGGCCATGTTGCGTTTTGTTTTTCCTTTCAAGGAATTAAGATTAAGTGCTGGACGGGAGGTCCATTTTGAGAATTTTGAATCATTAGTCACCTTACTTGTTGACTCAACTTTTTTGGGAAATTACCTAACAGAGGGGGGTCGCAATCAACATACCGATATTGAATTCTTGGAAAAATTACAACTAAATCATACTAAAAAGGAATTAATT

SEQ ID NO: 14218 - protein, 330 aa, Streptococcus agalactiae; identical to SEQ ID NO: 5332

SEQ ID NO: 14219 - protein, 513 aa, Streptococcus agalactiae
ATGAAAAAACTATTTAAAAAAGCGATAGCTATGTGCCGAGATTTGCCGCTTAATTTTGTAATTGTTGAACTTAGTTTGTATCAAAGAGAGGATGGCTCATCTGATAATATTAAATGGATTTCTAAGCGAATCCTTGAGGTAACGGTAACTGATCAGCAATGGATTTACCATTTGAGGATGCTTAATTTACCAAAACTTAAGCCAATGTCACTAGCATCCAGTGACTGTCCTGCAAGGGAAGAGAAGGCTAGTCTTATTTCAATAGAAGAATGTCAAAAATTCACTAGCTTAGTGCGAGATAAAAATCCTTTTCACCAAGGGGAAGCAGCTATTGTGCCTGCGGCTCTATTATTGGAAAAAATAATGGAAGTTAGAAATGGAAAAATAAAGGAGATTCATTTGACTTTTTTATCTCCAGTAAGGGTGAATCAAGAATTCTCAGTGCAAGTAGTGGATAACACAGTGATTATTTTTCAGCATCAAATATTATGTGTGAGGGGGACATATGAAGAA

SEQ ID NO: 14220 - protein, 171 aa, Streptococcus agalactiae; identical to SEQ ID NO: 5334

SEQ ID NO: 14221 - protein, 1113 aa, Streptococcus agalactiae
ATGAAGAATAGAGATGTTTATATTGGTTTTGGGCTACGAACACCTATCGGTATAAAAGGGAAGCAATTTAAACATTACCGTCCAGAACTTTTAGGAGCACACCTCTTAAATCAAATAAAAAAAATAGAATCAGAATCTAATATTGATAGTATTATTTGTGGGAACACAGTTGGTACTGGGGGCAATATTGGTCGTTTGATGACTCTTTTTTCTGATTATGAATCCTATATTCCAGTACAAACGATTGATATGCAGTGTGCTTCATCAAGTTCTGCCTTGTTTTTTGGTTATCTAAAAATCAGTGCCGGTATTAATGAAAAAGTTCTTGTTGGGGGGATTGAAAGTAGTTCTCTTCAACCTATGAGACGTTACGCTAAAGAAGATAATCGTAACGGAGAATATACCGTTGCTCAGTTTTCTCCTGACTCTTATGCTGAAACTGTAATGTTAGAAGGGGCACAAAGAGTCTGTCAAAAATATGGTTTTAGAAGAGAAATGTTAGATAAATTGGCATTCTTGAGCCATAAACGCGCCTTAACAGCTAAACAAGGTGGCTATTTAGAAGAGGTAATCTTACCAATGGAAGGGATGCGAGATCAAGGCGTTAGAAAACTAAAAGAAGCATTTTTTCAAAAATTACCAAGATTGATGGAAAATTCACCTTTGCTCACTATTGGAAATGTTTGTTTAATGCACGATGCTGCTGCATTTCTAACGCTTCAGAGTCAGAAAACAGAATTCCGGATTGTTCACATTGTAGAAGTAGCAGGAGATCCCAAGCTTAGTCCAGAATTGGTTCACACGGCTACGGAAAAACTATTAACAGAAACTCATACTAAAATATCGGATTATGATGCAATTGAATGGAATGAACCATTTGCAGCGATTGATGCTTTATTTAATCATTATTATCCTGAAGAGAGAGAAAAATTCAATATTTTTGGAGGGGCATTAGCTTACGGACACCCTTATGCCTGCTCAGGAATTATTAATATCCTTCATCTTATGCAGGCATTAAAATATAAAAATAAACCTATGGGTCTAACTGCCATTGCAGGGGCAGGAGGAGTCGGAATGGCCATATCAATAGAGTACTTAGGAGTTAAGAATGCT

SEQ ID NO: 14222 - protein, 371 aa, Streptococcus agalactiae; identical to SEQ ID NO: 5336

SEQ ID NO: 14223 - protein, 1227 aa, Streptococcus agalactiae
ATGCTTGAATCATTGAAAACAATAGTTAAAACCAATAGCGATAAAAAGTTATTTGATGGTGATTTACAGGTCAGTTATGGAGAATTTTATAACTTAGTCAGACAAGATATGGCGTCACAAGACAATAGGAAACATGTGATTAGCACACACTCTCTGCTTAACCAATTAGTAAGATTTGTTTCAAAGTTATGTCAAAAAGCTCTTCCTATTATTTGTAAACCTAACCTTACTCATAATGAAATAAGTCGATTAGAAAAAGAAGTGCAGTATGCTCCTCAACTAGCTGATTTTGGTGTTCTTTCTTCTGGGACTACAGCTGATGCTAAACTATTGTGGAGGAGCTTCGCTTCGTGGTCTGATTTTTTTAGCATTCAGAATGCTTATTTTTCGGTCACTTCCAATAGCAGACTGTTTATTCAAGGTGATTTTTCATTTACTGGTAACTTAAATTTAGCGCTATCCCTTTTATTACTGGGGGGAACGCTTGTTGTCACACAGAAAAATTCTGTAAAATACTGGCAGACTTTATGGGAAAAAACTGGTGTAACGCATCTATATCTGCTCCCTAGTTATCTCAAGTTAGTGGAACAATATAGCAAGGAGACTGCGTTAGACAATAAAACTATTATTACCTCTTCGCAATATGTCTCTGACTCATTACTGGAAGGTTTATATATAAAGCATCCTAAAGTGTCAGTGAAAATCTTCTATGGTGCTAGTGAACTCAATTATGTGTCATGGTACGATGGTCGTGATATCCGAGATAAGCCACAGTATGTTGGAGAAATCGTTCCAAATGTAGCTGTTAGGATTAAAGAGGGAAGAATTTTTGTAAAAACACCGTATAGTATCTGTGGCCTTTCAAGTGAATATTGTGCTGGTGATTATGGTGAACTGATAGATGGCAAATTATATCTATTTGGTCGTGGTGACGATTGGTGCAATCAATCGGGCATTAAGCTCTATTTACCTAGATTAATTGAAAAAATAAAAACATGCCCTTATATCAAGGATGCAGTAGCATTTACAAAAGAGAGTCAAAGTCATGGACAAGAGTCACATTGCTGTATTGTTTTAATTGAAAATCAGATGCAACAAGAGTGTTTGAAGTGGTTATCGGAACATTTTGAAAAGAAGTATGGGTTTAAGCATTATCATATTGTATCTAAAATTCCTTTGATGCCATCTGGAAAAATTGATTATCAACAACTCAAAAGACAATTAGCA

SEQ ID NO: 14224 - protein, 409 aa, Streptococcus agalactiae; identical to SEQ ID NO: 5338

SEQ ID NO: 14225 - protein, 630 aa, Streptococcus agalactiae
ATGTTATCAAAAGCAAAATCACGATATATTATCCGTGAGATTATTAAGTTATTTCCAGATGCTAAACCTAGCTTAGACTTTACTAATGTCTTTGAGCTTTTGGTAGCTGTAATGCTATCAGCTCAAACAACTGATGCAGCTGTTAATAAAGTCACTCCCGCCCTTTTTGAACGCTTTCCAAATCCTTTAGTTTTGGCACAAGCTGATCCCAAAGAGATTGAACCCTATATTTCTAAAATTGGGCTTTACCGTAATAAAGCTCGATTCTTAAATCAATGCGCTAAACAATTGATAGAGCATTTTGATGGGAAAGTCCCCCAAACTCGTCAAGAGCTAGAAAGTTTGTCTGGCGTTGGAAGGAAAACGGCTAATGTGGTCATGAGTGTTGGATTTGGTATTCCGGCTTTTGCCGTAGATACTCATGTCACTCGGATTTGTAAACACCACCAGATTTGCAAACAGTCGGCTTCTCCACTAGAAATTGAGAAACGAGTCATGGAGGTTTTACCGCCAGAAGAGTGGCTAGCTGCTCATCAATCCATGATTTATTTTGGTCGTGCAATTTGTCATCCTAAAAATCCAAAATGCGACCAGTACCCACAACTTTATCACTTTCCTGATAATTTAAAG

SEQ ID NO: 14226 - protein, 210 aa, Streptococcus agalactiae; identical to SEQ ID NO: 5340

SEQ ID NO: 14227 - protein, 387 aa, Streptococcus agalactiae; identical to SEQ ID NO: 5341

SEQ ID NO: 14228 - protein, 129 aa, Streptococcus agalactiae; identical to SEQ ID NO: 5342

SEQ ID NO: 14229 - protein, 207 aa, Streptococcus agalactiae; identical to SEQ ID NO: 5343

SEQ ID NO: 14230 - protein, 69 aa, Streptococcus agalactiae; identical to SEQ ID NO: 966

SEQ ID NO: 14231 - protein, 966 aa, Streptococcus agalactiae; identical to SEQ ID NO: 5345

SEQ ID NO: 14232 - protein, 322 aa, Streptococcus agalactiae; identical to SEQ ID NO: 968

SEQ ID NO: 14233 - protein, 378 aa, Streptococcus agalactiae; identical to SEQ ID NO: 5347

SEQ ID NO: 14234 - protein, 126 aa, Streptococcus agalactiae; identical to SEQ ID NO: 970

SEQ ID NO: 14235 - protein, 1839 aa, Streptococcus agalactiae
ATGACAAATTTAAGAACAGATATCCGTAACGTTGCGATCATTGCCCACGTTGACCACGGTAAAACAACTCTCGTTGATGAATTATTAAAACAATCACATACTCTTGATGAGCGTAAAGAGCTTGAAGAACGTGCAATGGATTCAAATGATATCGAGAAAGAACGTGGTATCACCATTCTTGCAAAAAATACAGCCGTAGCATACAACGATGTTCGTATCAATATTATGGACACACCTGGTCACGCGGACTTTGGTGGTGAAGTTGAGCGTATTATGAAAATGGTTGATGGTGTTGTTTTAGTCGTTGATGCTTACGAAGGAACAATGCCACAAACACGTTTTGTTTTGAAGAAAGCTCTTGAACAAAACTTAATTCCAATCGTTGTTGTAAATAAAATTGATAAGCCATCAGCTCGTCCATCAGAGGTTGTTGATGAAGTTCTTGAACTCTTCATTGAGCTCGGTGCTGATGATGACCAACTAGATTTCCCTGTTGTTTATGCTTCAGCCATCAATGGAACATCTTCAATGTCAGATGATCCTTCAGATCAAGAAAAAACAATGGCACCGATTTTTGATACTATCATTGATCACATTCCAGCCCCAGTTGACAACTCGGAAGAACCACTTCAATTCCAAGTTTCTCTTCTTGATTACAATGATTTTGTAGGACGTATTGGTATTGGACGTGTTTTCCGCGGGACTGTCAAAGTTGGAGATCAAGTTACTCTTTCAAAACTTGATGGTACAACTAAAAACTTCCGCGTAACAAAACTTTTTGGTTTCTTTGGACTTGAACGTAAAGAAATCCAAGAGGCTAAAGCGGGTGATTTAATCGCTGTTTCTGGTATGGAAGATATCTTCGTTGGTGAGACAGTAACTCCGACAGATGCTATTGAACCACTACCAGTTTTACGTATTGACGAGCCAACACTTCAAATGACTTTCTTGGTGAATAATTCACCATTTGCAGGTCGCGAAGGTAAATGGATTACGTCACGTAAGGTTGAAGAACGTCTTTTAGCAGAATTACAAACAGACGTTTCTTTGCGTGTTGACCCAACAGATTCGCCAGATAAATGGACGGTTTCAGGGCGTGGAGAATTACATTTATCTATCCTCATTGAAACAATGCGTCGTGAGGGATATGAACTTCAAGTATCACGTCCAGAAGTTATCATCAAAGAAATTGATGGTGTTCAATGCGAGCCGTTTGAGCGTGTTCAAATTGATACTCCAGAAGAATATCAGGGTGCTATTATCCAAAGTTTGTCAGAGCGTAAAGGTGATATGCTTGATATGCAGATGGTTGGTAATGGTCAAACGCGTTTGATTTTCTTGATTCCTGCACGTGGTTTGATTGGTTATTCAACAGAGTTTCTTTCAATGACACGTGGATATGGTATCATGAATCATACTTTTGACCAGTATCTACCGGTTGTTCAAGGAGAAATTGGTGGTCGTCATCGTGGTGTCTTGGTTTCTATTGAAAATGGTAAAGCAACTACATATTCAATTATGCGTATTGAAGAACGTGGGACTATCTTTGTAAATCCAGGTACAGAAGTTTATGAAGGAATGATTGTTGGTGAGAATTCTCGTGATAATGATCTCGGAGTCAATATTACAACTGCTAAACAAATGACAAATGTCCGTTCAGCAACTAAAGATCAAACTGCAGTCATCAAGACGCCTCGTATCCTTACTTTAGAAGAGTCACTTGAATTTTTAGCAGATGATGAGTACATGGAAGTAACTCCTGAGTCTATTCGTCTTCGTAAACAAATTTTAAATAAAGCAGCACGTGACAAAGCTAATAAAAAGAAAAAATCAGCTGAA

SEQ ID NO: 14236 - protein, 613 aa, Streptococcus agalactiae
MTNLRTDIRNVAIIAHVDHGKTTLVDELLKQSHTLDERKELEERAMDSNDIEKERGITILAKNTAVAYNDVRINIMDTPGHADFGGEVERIMKMVDGVVLVVDAYEGTMPQTRFVLKKALEQNLIPIVVVNKIDKPSARPSEVVDEVLELFIELGADDDQLDFPVVYASAINGTSSMSDDPSDQEKTMAPIFDTIIDHIPAPVDNSEEPLQFQVSLLDYNDFVGRIGIGRVFRGTVKVGDQVTLSKLDGTTKNFRVTKLFGFFGLERKEIQEAKAGDLIAVSGMEDIFVGETVTPTDAIEPLPVLRIDEPTLQMTFLVNNSPFAGREGKWITSRKVEERLLAELQTDVSLRVDPTDSPDKWTVSGRGELHLSILIETMRREGYELQVSRPEVIIKEIDGVQCEPFERVQIDTPEEYQGAIIQSLSERKGDMLDMQMVGNGQTRLIFLIPARGLIGYSTEFLSMTRGYGIMNHTFDQYLPVVQGEIGGRHRGVLVSIENGKATTYSIMRIEERGTIFVNPGTEVYEGMIVGENSRDNDLGVNITTAKQMTNVRSATKDQTAVIKTPRILTLEESLEFLADDEYMEVTPESIRLRKQILNKAARDKANKKKKSAE

SEQ ID NO: 14237 - protein, 243 aa, Streptococcus agalactiae
ATGTTTTACTTAATTGTTGCCCTTTTGATTGCCTTATATTACTTTTTTATGGCACCAAAAACAGTACGTAATACTTTGAACGCTATTGGTTTAGTAGGTTTGGTAGCCTTATTACTTGTCTTGGCAGTTATGAGTTTTATTAAAATCCTTCAATTGCCAGGTGAATTGTATATTGGGCTTATAATGATTCCTCTAGGATATACAGCATTTAAAGAAACATTGAATTTGTCAGAAAAGAAGAAA

SEQ ID NO: 14238 - protein, 81 aa, Streptococcus agalactiae; identical to SEQ ID NO: 976

SEQ ID NO: 14239 - protein, 1353 aa, Streptococcus agalactiae
ATGAAAACAATAACAACATTTGAAAATAAAAAAGTTTTAGTCCTTGGTTTAGCACGATCTGGAGAAGCCGCTGCACGTTTGTTAGCTAAGTTAGGAGCAATAGTGACAGTTAATGATGGCAAACCATTTGATGAAAATCCAACAGCACAGTCTTTGTTGGAAGAGGGTATTAAAGTGGTTTGTGGTAGTCATCCTTTAGAATTGTTAGATGAGGATTTTTGTTACATGATTAAAAATCCAGGAATACCTTATAACAATCCTATGGTCAAAAAAGCATTAGAAAAACAAATCCCTGTTTTGACTGAAGTGGAATTAGCATACTTAGTTTCAGAATCTCAGCTAATAGGTATTACAGGCTCTAACGGGAAAACGACAACGACAACGATGATTGCAGAAGTCTTAAATGCTGGAGGTCAGAGAGGTTTGTTAGCTGGGAATATCGGCTTTCCTGCTAGTGAAGTTGTTCAGGCTGCGGATGATAAAGATATTCTAGTTATGGAATTATCAAGTTTTCAGCTAATGGGAGTTAAGGAATTTCGTCCTCATATTGCAGTAATTACTAATTTAATGCCAACTCATTTAGATTATCATGGGTCTTTTGAAGATTATGTTGCTGCAAAATGGAATATCCAAAATCAAATGTCTTCATCTGATTTTTTGGTACTTAATTTTAATCAAGGTATTTCTAAAGAGTTAGCTAAAACTACTAAAGCAACAATCGTTCCTTTCTCTACTACGGAAAAAGTTGATGGTGCTTACGTACAAGACAAGCAACTTTTCTATAAAGGGGAGAATATTATGTCAGTAGATGACATTGGTGTCCCAGGAAGCCATAACGTAGAGAATGCTCTAGCAACTATTGCGGTTGCTAAACTAGCTGGTATCAGTAATCAAGTTATTAGAGAAACTTTAAGCAATTTTGGAGGTGTTAAACACCGCTTGCAATCACTCGGTAAGGTTCATGGTATTAGTTTCTATAACGACAGCAAGTCAACTAATATATTGGCAACTCAAAAAGCATTATCTGGCTTTGATAATACTAAAGTTATCCTAATTGCAGGAGGTCTTGATCGCGGTAATGAGTTTGATGAATTGATACCAGATATCACTGGACTTAAACATATGGTTGTTTTAGGGGAATCGGCATCTCGAGTAAAACGTGCTGCACAAAAAGCAGGAGTAACTTATAGCGATGCTTTAGATGTTAGAGATGCGGTACATAAAGCTTATGAGGTGGCACAACAGGGCGATGTTATCTTGCTAAGTCCTGCAAATGCATCATGGGACATGTATAAGAATTTCGAAGTCCGTGGTGATGAATTCATTGATACTTTCGAAAGTCTTAGAGGAGAG

SEQ ID NO: 14240 - protein, 451 aa, Streptococcus agalactiae
MKTITTFENKKVLVLGLARSGEAAARLLAKLGAIVTVNDGKPFDENPTAQSLLEEGIKVVCGSHPLELLDEDFCYMIKNPGIPYNNPMVKKALEKQIPVLTEVELAYLVSESQLIGITGSNGKTTTTTMIAEVLNAGGQRGLLAGNIGFPASEVVQAADDKDILVMELSSFQLMGVKEFRPHIAVITNLMPTHLDYHGSFEDYVAAKWNIQNQMSSSDFLVLNFNQGISKELAKTTKATIVPFSTTEKVDGAYVQDKQLFYKGENIMSVDDIGVPGSHNVENALATIAVAKLAGISNQVIRETLSNFGGVKHRLQSLGKVHGISFYNDSKSTNILATQKALSGFDNTKVILIAGGLDRGNEFDELIPDITGLKHMVVLGESASRVKRAAQKAGVTYSDALDVRDAVHKAYEVAQQGDVILLSPANASWDMYKNFEVRGDEFIDTFESLRGE

SEQ ID NO: 14241 - protein, 1074 aa, Streptococcus agalactiae; identical to SEQ ID NO: 9769

SEQ ID NO: 14242 - protein, 358 aa, Streptococcus agalactiae; identical to SEQ ID NO: 980

SEQ ID NO: 14243 - protein, 1134 aa, Streptococcus agalactiae
ATGCCTAAGAAGAAATCAGATACCCCAGAAAAAGAAGAAGTTGTCTTAACGGAATGGCAAAAGCGTAACCTTGAATTTTTAAAAAAACGCAAAGAAGATGAAGAAGAACAAAAACGTATTAACGAAAAATTACGCTTAGATAAAAGAAGTAAATTAAATATTTCTTCTCCTGAAGAACCTCAAAATACTACTAAAATTAAGAAGCTTCATTTTCCAAAGATTTCAAAACCTAAGATTGAAAAGAAACAGAAAAAAGAAAAAATAGTCAACAGCTTAGCCAAAACTAATCGCATTAGAACTGCACCTATATTTGTAGTAGCATTCCTAGTCATTTTAGTTTCCGTTTTCCTACTAACTCCTTTTAGTAAGCAAAAAACAATAACAGTTAGTGGAAATCAGCATACACCTGATGATATTTTGATAGAAAAAACGAATATTCAAAAAAACGATTATTTCTTTTCTTTAATTTTTAAACATAAAGCTATTGAACAACGTTTAGCTGCAGAAGATGTATGGGTAAAAACAGCTCAGATGACTTATCAATTTCCCAATAAGTTTCATATTCAAGTTCAAGAAAATAAGATTATTGCATATGCACATACAAAGCAAGGATATCAGCCTGTCTTGGAAACTGGAAAAAAGGCTGATCCTGTAAATAGTTCAGAGCTACCAAAGCACTTCTTAACAATTAACCTTGATAAGGAAGATAGTATTAAGCTATTAATTAAAGATTTAAAGGCTTTAGACCCTGATTTAATAAGTGAGATTCAGGTGATAAGTTTAGCTGATTCTAAAACGACACCTGACCTCCTGCTGTTAGATATGCATGATGGAAATAGTATTAGAATACCATTATCTAAATTTAAAGAAAGACTTCCTTTTTACAAACAAATTAAGAAGAACCTTAAGGAACCTTCTATTGTTGATATGGAAGTGGGAGTTTACACAACAACAAGTACTATTGAATCAACCCCTGTGAAAGCGGAAGATACAAAAAATAAATCAACTGATAAAACACAAACACAAAATGGTCAGGTTGCGGAAAATAGTCAAGGACAAACAAATAACTCAAATACTAATCAACAAGGACAACAGATAGCAACAGAGCAGGCACCCAACCCTCAAAATGTTAAT

SEQ ID NO: 14244 - protein, 378 aa, Streptococcus agalactiae; identical to SEQ ID NO: 5358

SEQ ID NO: 14245 - protein, 1371 aa, Streptococcus agalactiae
ATGGCTAGAAATGGCTTTTTTACTGGTTTGGATATAGGAACAAGCTCGATTAAAGTTTTAGTTGCAGAATTTATTGCAAATGAAATGAATGTAATTGGGGTTAGCAACGTCCCTAGTTCCGGTGTAAAAGATGGTATAATTATTGATATTGAGGCAGCAGCAACTGCAATCAAAGAGGCGGTAAAACAAGCTGAGGAGAAAGCAGGCATCACCATTGACAAAATCAATGTTGGATTACCAGCAAATCTTCTCCAAATTGAACCAACTCAAGGAATGATTCCTGTTCCCAATGAATCAAAAGAAATTAAGGATGAAGATGTCGAAAGTGTTGTTAAATCAGCATTGACTAAAAGCATTACTCCTGAAAGAGAAGTTATTTCATTGATTCCGCTTGAATTCATTGTAGATGGTTTCCAAGGGATTAGAGACCCTAGAGGGATGATGGGGATTCGCCTTGAGATGCGTGGTCTTATCTATACTGGACCAACAACTATCCTTCATAATCTTCGTAAAACTGTTGAACGAGCAGGTATAAAAGTAGAGCATGTTGTGATTGCCCCTCTAGCCTTAGCAAAATCAGTTCTAAACGAAGGTGAACGTGAGTTTGGTGCAACTGTGATTGATATGGGAGGCGGACAAACAACAGTCGCTTCTATGCGTAATCAAGAATTGCAATATACTAATATTTATTCTGAAGGTAGCGATTATGTCACCAAAGATATTTCTAAAGTGTTACGTACAACAGTAGAAATTGCCGAAGCATTGAAATTCAACTTTGGACAAGCTAATGTTGAAGAAGCAAGTACTTCTGATACAGTTCAAGTTAATGTTGTTGGTAACGAGGAACCTGTTGAAATTACAGAAAGCTATCTTTCGCAAATTATTTCAGGACGTATTCGTCAAATTTTAGAACATGTCAAACAAGACTTGGGTAGAGGTCGTTTACTTGATTTACCTGGTGGTATTATTCTTGTTGGAGGTGGTGCAATTATGCCAGGAGTTGTCGAGGTTGCTCAACAAATTTTTGGAACTAGAGTTAAATTGCACGTTCCAAACCAAGTAGGTATTCGCAATCCAATGTTCGCTAATGTTATTAGTATCGTTGATTATGTAGGAATGATGTCAGAAGTTGACATTATCGCACAACATGCTGTAACTGGCGACGAAATGCTAAGACATAAACCAGTCGACTTTGATTATAAAGAAAAAACAAATACAATGTCGACAATGCCTTATTCTGAGCCGTTAACCTCTTCTATGGAAGATTCTAATTTAGAACCAATCCGAGCAAGAGAAAACGCTCAAGAGCCTACTGAGCCTAAAACTAATATTGGTGAGCGCATCAGAGGAATTTTTGGAAGTATGTTTGAC

SEQ ID NO: 14246 - protein, 457 aa, Streptococcus agalactiae
MARNGFFTGLDIGTSSIKVLVAEFIANEMNVIGVSNVPSSGVKDGIIIDIEAAATAIKEAVKQAEEKAGITIDKINVGLPANLLQIEPTQGMIPVPNESKEIKDEDVESVVKSALTKSITPEREVISLIPLEFIVDGFQGIRDPRGMMGIRLEMRGLIYTGPTTILHNLRKTVERAGIKVEHVVIAPLALAKSVLNEGEREFGATVIDMGGGQTTVASMRNQELQYTNIYSEGSDYVTKDISKVLRTTVEIAEALKFNFGQANVEEASTSDTVQVNVVGNEEPVEITESYLSQIISGRIRQILEHVKQDLGRGRLLDLPGGIILVGGGAIMPGVVEVAQQIFGTRVKLHVPNQVGIRNPMFANVISIVDYVGMMSEVDIIAQHAVTGDEMLRHKPVDFDYKEKTNTMSTMPYSEPLTSSMEDSNLEPIRARENAQEPTEPKTNIGERIRGIFGSMFD

SEQ ID NO: 14247 - protein, 1278 aa, Streptococcus agalactiae; identical to SEQ ID NO: 5361

SEQ ID NO: 14248 - protein, 426 aa, Streptococcus agalactiae; identical to SEQ ID NO: 986

SEQ ID NO: 14249 - protein, 672 aa, Streptococcus agalactiae; identical to SEQ ID NO: 5363

SEQ ID NO: 14250 - protein, 224 aa, Streptococcus agalactiae; identical to SEQ ID NO: 5364

SEQ ID NO: 14251 - protein, 603 aa, Streptococcus agalactiae; identical to SEQ ID NO: 5365

SEQ ID NO: 14252 - protein, 201 aa, Streptococcus agalactiae; identical to SEQ ID NO: 5366

SEQ ID NO: 14253 - protein, 786 aa, Streptococcus agalactiae
ATGACGTTAGATGATATTTATCAGCATTTTCGACCAGAAGAGTATGCGTTTATCAATAAAATAGACCATTTAGCTCAATATGTCGAAAACACCTATTCGTTTATTACCACTGAATTTCTAAATCCTAGGGAATTTAAAATACTCGAAAGTGTTCTAGAGAGGCGAGGTAGTCATTATTACACTTCTGGTCAGTATTTTCAAACAGAATATGTTAAAGTAATAATAGCACCGGAATACTATCAGTTAGATATGGTTGATTTTAACCTTAGCCTAATTGAAATAAAGTATAATGCTAAATTTAATCACCTTACCCATGCTAAAATTATGGGAACTTTACTGAATTACTTAGGTGTAAAACGATCAATTTTAGGGGATATCCTAGTTGAAGAAGGCTGTGCTCAGGTTTTGGTCGATAGTCAAATGACAAATCACCTTGTTCATTCAGTTACAAAAATTGGAACTGCTAGTGTACAATTAGCTGAAGTTCCCTTGTCCAAACTTCTAACTCCCAAACAAGATATTCAAAAACTAACTGTTATTGCTTCCAGTTTACGTCTTGATAAAATTTTAGCAACGATTTTAAAGATTTCACGAACACAGTCGACGAAATTGATTGAGGCAGATAAAGTCAAGGTTAATTATGCAATCGTCAATCGAGTTTCTGAACAATTAGTAGAGGGGGATTTGATTAGTGTTAGAGGATATGGTCGATTTACGTTGAACCATAACCTAGGGTTAACTAAAAATCAAAAATATAAGTTAGAAGTAGACAAAATGATACATAAC

SEQ ID NO: 14254 - protein, 262 aa, Streptococcus agalactiae; identical to SEQ ID NO: 5374

SEQ ID NO: 14255 - protein, 768 aa, Streptococcus agalactiae
ATGCCACTTACAGCACTTGAAATTAAAGATAAAACATTTTCATCAAAATTTCGCGGTTATAGCGAAGAAGAAGTTAATGAATTTTTAGAGATTGTTGTTGACGATTACGAAGACTTGATTAGACGTAATCGTGAGCAAGAGCAATACATTAAAGATTTAGAAGAGAAAATCGCTTACTTCAACGAAATGAAGGAATCGTTAAGTCAATCAGTTATTTTAGCTCAAGAAACTGCTGAACGTGTGAAAATTTCAGCACAGGATGAAGCATCTAACCTAATGGGGAAAGCTACATTTGATGCTCAACATTTAATTGATGAGGCTAAATTAAAAGCAAATCAAATCCTTCGTGATGCGACAGATGATGCTAAGCGTGTCGCTATAGAAACAGAAGATTTGAAACGTCAATCACGTGTTTTCCACCAACGCTTACTTTCTGAATTAGAAGGTCAGTTAAAATTAGCTAACTCATCTGCTTGGGAAGAATTGTTGAAACCAACAGCTATTTATCTTCAAAATTCTGATGCTTCTTTCAAAGAAGTTGTTGAAAAAGTTCTTGATGAAGATGATGCTTTACCAGTGGTGGATGACACTGAGTCATTTGATGCTACTCGTCAATTCTCACCAGATGAAATGGAAGAATTACAGCGTCGTGTTGAAGAAAGTAACAAACAACTTGAAGAGTCAGGTTTATTAGATACTAATAATTTCCAAATGGAAGAACCGATCAATTTAGGTGAAACTCAAACTTTTAAATTAAATATTGAAGAT

SEQ ID NO: 14256 - protein, 256 aa, Streptococcus agalactiae; identical to SEQ ID NO: 998

SEQ ID NO: 14257 - protein, 2790 aa, Streptococcus agalactiae
ATGAAATTAAAAGAAACCTTGAATTTAGGACAAACAGCTTTTCCAATGCGTGCAGGGCTTCCAAATAAGGAACCTCAATGGCAAGAAGCATGGGATCAAGCTGATATTTATAAAAAACGTCAAGCATTGAATGAAGGAAAACCAGCCTTTCACCTTCATGACGGACCTCCCTATGCTAATGGGAATATTCATGTAGGACATGCACTAAATAAAATTTCTAAAGACATTATTGTACGTTCAAAATCAATGTCAGGTTTTCGAGCTCCTTATGTGCCTGGTTGGGATACTCATGGACTCCCAATTGAGCAAGTATTAGCTAAAAAAGGGGTTAAACGTAAAGAAATGGACTTGGCTGAATACCTTGAAATGTGTCGTGATTATGCTCTCAGCCAAGTTGACAAACAACGTGATGATTTTAAACGTCTGGGCGTTTCTGCTGATTGGGAAAATCCTTATATTACACTGACACCAGATTATGAAGCAGATCAAGTACGTGTTTTCGGTGCTATGGCAGATAAAGGATATATCTATCGTGGTGCTAAACCAGTGTATTGGTCATGGTCATCAGAGTCTGCCCTTGCTGAGGCTGAAATCGAATATCATGATATTGATTCGACATCACTCTACTATGCCAATAAAGTTAAAGATGGTAAGGGAATTCTTGATACAGATACCTATATCGTCGTTTGGACGACAACACCATTTACTGTAACAGCTTCACGCGGTTTAACAGTAGGACCAGATATGGAGTATGTTGTAGTTGCACCAGTAGGTAGTGAGCGTAAATACCTTCTTGCAGAGGTTCTTGTAGATAGTCTCGCTGCTAAGTTTGGCTGGGAAAACTTTGAAATTGTGACTCATCACACTGGTAAAGAACTTAATCACATTGTTACAGAACATCCATGGGATACAGAAGTAGAAGAGTTGGTTATCCTTGGAGACCATGTTACAACAGATTCTGGTACAGGTATTGTCCACACGGCTCCTGGTTTTGGTGAAGATGACTATAACGTTGGTATTGCTAATGGACTTGATGTTGTAGTTACCGTAGATAGTCGTGGTTTGATGATGGAAAATGCTGGTCCTGATTTTGAAGGTCAATTCTATGACAAAGTGACACCACTTGTAAAAGAAAAATTGGGAGATCTTCTTTTAGCCAGCGAAGTTATCAACCACTCATATCCATTTGACTGGCGTACGAAAAAGCCAATCATTTGGCGTGCGGTTCCACAATGGTTTGCCTCTGTTTCGAAATTCCGTCAAGAAATCCTCGATGAAATTGAAAAGACAAATTTCCAACCTGAGTGGGGTAAAAAACGTCTTTATAACATGATCCGTGACCGTGGCGACTGGGTAATCTCACGTCAACGTGCTTGGGGTGTTCCACTTCCAATTTTTTATGCAGAAGATGGTACAGCTATCATGACAAAAGAAGTGACTGATCACGTTGCAGATTTATTTGCTGAATACGGCTCAATCGTTTGGTGGCAACGTGATGCTAAGGACCTTCTACCAGCAGGTTATACTCATCCAGGTTCACCTAATGGTCTCTTTGAGAAAGAAACAGACATCATGGATGTTTGGTTTGATTCTGGTTCATCATGGAATGGAGTAATGAATGCTCGTGAAAACCTTTCCTATCCAGCAGATCTTTATCTTGAAGGTTCTGATCAATACCGTGGTTGGTTCAACTCATCACTAATTACATCAGTTGCTGTTAATGGTCACGCTCCATACAAAGCAGTCTTATCTCAAGGTTTTGTACTTGATGGTAAAGGTGAGAAAATGTCTAAATCTCTAGGAAATACAATTCTTCCGAGTGATGTTGAAAAACAATTTGGTGCGGAAATCTTGCGTCTGTGGGTAACTTCTGTTGATTCAAGTAATGATGTTCGTATTTCAATGGATATCTTAAAACAAACATCAGAAACTTATCGTAAGATCAGAAATACATTGCGTTTCTTGATTGCAAATACTTCCGATTTTAATCCTAAACAAGATGCAGTAGCCTATGAAAATTTAGGTGCCGTTGATCGTTATATGACTATTAAATTTAATCAAGTTGTGGATACAATCAACAAAGCTTATGCTGCTTATGATTTTATGGCAATTTATAAAGCTGTCGTTAACTTCGTAACAGTTGATCTATCAGCATTTTACCTTGATTTTGCAAAAGATGTGGTTTACATTGAAGCGGCTAACAGTCCAGAACGACGTCGTATGCAAACTGTTTTCTACGATATTTTAGTTAAACTTACAAAACTTTTGACTCCGATTCTACCACATACTGCTGAAGAAATTTGGTCATACCTTGAACATGAGGAGGAGGAATTTGTTCAATTAGCAGAAATGCCTGTTGCACAGACATTCTCTGGTCAAGAAGAAATTCTTGAAGAGTGGTCAGCATTCATGACGTTACGAACACAAGCTCAAAAAGCTCTCGAAGAAGCACGTAACGCTAAAGTCATTGGTAAATCTCTAGAAGCACATTTAACAATTTATGCTAGTCAAGAAGTGAAAACGTTATTAACAGCGTTAAATAGCGATATTGCACTCTTGATGATTGTCTCACAATTAACAATTGCTGATGAAGCAGACAAACCAGCTGACTCAGTATCATTTGAAGGTGTTGCATTTACTGTTGAACACGCTGAAGGTGAAGTCTGCGAACGCTCACGCCGTATTGATCCAACCACAAGGATGCGTTCGTATGGTGTAGCTGTTTGTGATGCTAGTGCAGCAATTATTGAGCAATATTATCCTGAAGCAGTAGCTCAAGGTTTTGAAGCT

SEQ ID NO: 14258 - protein, 930 aa, Streptococcus agalactiae; identical to SEQ ID NO: 5378

SEQ ID NO: 14259 - protein, 300 aa, Streptococcus agalactiae
ATGAGACTAATTAATACAACCAGTAGTCATCCTGAACTAGTTCGAAATCAACTCCAAAATACAGATGCAAAATTAGTGGAAGTCTATTCAGCTGGCAACACCGATGTCGTTTTTACAACAGCACCTAAACATTATGAATTATTAATTTCAAACAAATATCGTGCTATCAAAGATGAAGAATTAGAAGCTATTCGTGAGTTCTTCTTAAAGCGTAAAATAGATCAATCTATTATTATTCAAGAGCAGATGAAATCACTCCATACTGCCAAGTTAATTGAAATTTCATATCCAACAACAGCA

SEQ ID NO: 14260 - protein, 100 aa, Streptococcus agalactiae
MRLINTTSSHPELVRNQLQNTDAKLVEVYSAGNTDVVFTTAPKHYELLISNKYRAIKDEELEAIREFFLKRKIDQSIIIQEQMKSLHTAKLIEISYPTTA

SEQ ID NO: 14261 - protein, 453 aa, Streptococcus agalactiae; identical to SEQ ID NO: 5381

SEQ ID NO: 14262 - protein, 151 aa, Streptococcus agalactiae; identical to SEQ ID NO: 5382

SEQ ID NO: 14263 - protein, 2258 aa, Streptococcus agalactiae
ATGCTCTGTCAAAACTGCAAACTAAACGAATCAACTATTCATTTGTATACAAATGTTAATGGAAAACAAAAGCAAGTTGATCTTTGTCAAAATTGCTACCAAATTATTAAAACTGACCCTAATAATCCACTTTTTTCAGGTTTAAATCATGTTTCACATGCGCCTGGTGGCATCAATCCTTTCTTTGATGATTTCTTTGGAGATTTAAATAATTTCAGAGCCTTTAATGGCCAAGATTTACCAAACACTCCTCCTACACAAGCAGGAGGAAACCGAGGTGGAGGAAACGGTAATGGACGAAATAATAATCGCAACCAAACTGCAACTCCTCCTCAAGCCAAAGGGATTCTAGAAGAATTTGGTATCAATGTCACTGAAATAGCCCGCCATGGTGATATTGACCCTGTTATTGGACGTGACTCAGAAATTATTCGTGTTATCGAAATCCTTAATCGTCGTAAAAAAATAATCCTGTACTTATTGGCGAACCCGGCGTAGGGAAAACTGCCGTTGTTGAAGGACTTGCTCAGAAAATTGTTGATGGTAATGTGCCTCATAAACTTCAAGGCAAACAAGTTATTCGTTTGGATGTTGTGAGTCTAGTACAAGGAACGGGCATTCGTGGTCAATTTGAAGAACGCATGCAAAAGTTGATGGAAGAAATTCGTCAACGTCAAGATGTTATTCTATTCATAGATGAAATTCACGAAATAGTTGGAGCTGGTACAGCTGGCGAAGGTAGTATGGATGCAGGTAATATTTTAAAACCTGCCCTTGCACGTGGAGAATTACAACTAGTAGGTGCCACTACTCTCAATGAATATCGTATTATCGAAAAGGACGCTGCCTTAGAACGCCGTATGCAACCTGTAAAAGTCGATGAACCTTCTGTTGAAGAAACCATTACTATTTTGAAAGGTATCCAAAAAAAATACGAAGATTATCATCACGTAAAATATAATAATGATGCCATAGAAGCAGCTGCAGTACTATCTAATCGTTATATCCAAGACCGCTTTTTACCTGATAAAGCAATAGACTTATTAGATGAAGCTGGTTCTAAAATGAACCTAACACTAAATTTTGTTGATCCAAAAGAAATTGATCAACGTCTCATTGAAGCAGAAAATTTAAAAGCGCAAGCGACTCGTGAAGAAGATTACGAACGTGCAGCTTACTTCCGTGACCAGATTGCAAAATATAAAGAAATGCAGCAACAAAAGGTCGACGATCAAGATACACCTATTATTACCGAAAAAACAATTGAGCACATCATTGAAGAAAAAACGAATATCCCTGTTGGTGATTTAAAAGAAAAAGAACAATCTCAATTAATTAATCTCGCAGATGACTTGAAACAGCATGTGATCGGCCAGGATGACGCTGTCATTAAGATTGCAAAAGCTATTCGTCGTAATCGAGTTGGTCTTGGTAGCCCAAACCGTCCTATTGGTTCCTTTTTATTTGTAGGACCAACCGGTGTTGGTAAAACTGAACTTTCTAAACAACTAGCAATTGAGCTCTTTGGTTCAGCTGATAGTATGATTCGTTTTGATATGTCAGAGTACATGGAAAAGCATGCTGTTGCTAAATTAGTCGGAGCGCCTCCAGGATACGTGGGATACGAGGAAGCTGGACAACTAACTGAAAAGGTTCGTCGAAATCCTTACTCGCTCATCCTTCTAGATGAAATTGAAAAAGCTCATCCCGATGTCATGCATATGTTCTTGCAGGTCCTTGATGACGGTCGATTAACAGATGGACAAGGAAGAACTGTTAGTTTTAAAGATACCATTATCATCATGACCTCAAATGCTGGTTCTGGTAAAACTGAAGCAAGTGTTGGCTTTGGTGCCTCACGAGAAGGTAGGACGAATTCCGTACTAGGTCAACTAGGTAACTTCTTCAGCCCTGAATTTATGAACCGCTTTGACGGTATTATTGAATTCAAGGCTTTAGATAAAGAGAATCTCCTCAATATCGTTGATATTATGTTATCTGACGTTAATGCACGTCTCGCCATCAATGGTATTCATCTAGATGTCACTGATAAAGTGAAAGAAAAATTGGTTGATTTAGGTTACGATCCCAAAATGGGAGCACGTCCATTACGTCGTACCATTCAAGAACATATTGAAGATGCTATCACAGATTACTATCTTGAGAATCCAAGCGAAAAAGAACTTCGTGCTATTATGACTAGCAATGGAAATATCATAATAAAATCTTCTAAAAAAACTGAGGAAAGTACAAAAGGT

SEQ ID NO: 14264 - protein, 753 aa, Streptococcus agalactiae
MLCQNCKLNESTIHLYTNVNGKQKQVDLCQNCYQIIKTDPNNPLFSGLNHVSHAPGGINPFFDDFFGDLNNFRAFNGQDLPNTPPTQAGGNRGGGNGNGRNNNRNQTATPPQAKGILEEFGINVTEIARHGDIDPVIGRDSEIIRVIEILNRRTKNNPVLIGEPGVGKTAVVEGLAQKIVDGNVPHKLQGKQVIRLDVVSLVQGTGIRGQFEERMQKLMEEIRQRQDVILFIDEIHEIVGAGTAGEGSMDAGNILKPALARGELQLVGATTLNEYRIIEKDAALERRMQPVKVDEPSVEETITILKGIQKKYEDYHHVKYNNDAIEAAAVLSNRYIQDRFLPDKAIDLLDEAGSKMNLTLNFVDPKEIDQRLIEAENLKAQATREEDYERAAYFRDQIAKYKEMQQQKVDDQDTPIITEKTIEHIIEEKTNIPVGDLKEKEQSQLINLADDLKQHVIGQDDAVIKIAKAIRRNRVGLGSPNRPIGSFLFVGPTGVGKTELSKQLAIELFGSADSMIRFDMSEYMEKHAVAKLVGAPPGYVGYEEAGQLTEKVRRNPYSLILLDEIEKAHPDVMHMFLQVLDDGRLTDGQGRTVSFKDTIIIMTSNAGSGKTEASVGFGASREGRTNSVLGQLGNFFSPEFMNRFDGIIEFKALDKENLLNIVDIMLSDVNARLAINGIHLDVTDKVKEKLVDLGYDPKMGARPLRRTIQEHIEDAITDYYLENPSEKELRAIMTSNGNIIIKSSKKTEESTKG

SEQ ID NO: 14265 - protein, 228 aa, Streptococcus agalactiae
ATGGAATCACATTTAGTGAGAATCATCAATCGCCTCGAATTAATGGCGACTGATGGTGGTAATTTAAAACGTAATTTTGAACGTGAAGGTGTTGTTGTAGCAGAAGTATCTTTTAGTAATGACCCTGAAAACGGTCCTGTTTTCACATTACGTGATGTAGAAGCGCGTGAATCATATTCATTTGACAGCATTGACCTTATCGCAATGGAAATTTACGATTTATTATAC

SEQ ID NO: 14266 - protein, 76 aa, Streptococcus agalactiae; identical to SEQ ID NO: 1010

SEQ ID NO: 14267 - protein, 108 aa, Streptococcus agalactiae
TTGACAGACCATACAGAAGTATCATCTGATGTTCCTGTGGACTTTAAAACTGAAGGTGTTGGAGGACCAAGTGCAGGTTTAATGGTAACTTTAGCGAATAACGACCAA

SEQ ID NO: 14268 - protein, 36 aa, Streptococcus agalactiae
MTDHTEVSSDVPVDFKTEGVGGPSAGLMVTLANNDQ

SEQ ID NO: 14269 - protein, 993 aa, Streptococcus agalactiae
ATGTCTATTATAAAAAATTTGTGGTGGTTTTTTAAGGAAGAAAAGAAGCGCTATCTTATTGGGATTTTGTCATTAAGTTTGGTTGCAGTGTTAAATCTTATCCCTCCTAAAATCATGGGATCAGTTATTGATGCTATTACAACTGGAAAATTAACAAGACCACAATTACTATGGAATTTATTAGGTTTGGTTTTGTCAGCTTTAGCTATGTATGGGCTGCGTTATATTTGGCGTATGTATATTTTAGGGACTTCTTACAAATTAGGCCAAGTTGTCAGATACCGTTTATTTGAACATTTTACAAAAATGTCTCCTTCTTTTTATCAGAAATATCGTACAGGTGATTTAATGGCGCACGCGACCAACGACATCAATTCTCTAACACGTCTTGCAGGAGGAGGAGTTATGTCAGCAGTGGATGCCTCTATCACAGCATTAGTAACGCTTATCACCATGTTCTTTACTATTTCGTGGCAAATGACATTAATTGCGGTTATCCCTTTGCCCTTAATGGCCTTAGCAACTAGTAAATTGGGGCGAAAAACCCATGAAACCTTCAAAGAATCTCAGGCAGCCTTTTCAGAATTAAATAATAAAGTGCAAGAAAGTGTCTCTGGCGTCAAAGTGACTAAATCATTTGGTTATCAAGAACAAGAAATTGCTTCTTTTCAAGAGATTAATCAGATGACTTTCGTGAAGAACATGCGGACCATGACTTATGATGTCATGTTTGATCCTTTAGTTCTTCTTTTTATAGGTGCCTCCTACGTATTAACATTGGCTATGGGAGCTTTTATGATTTCAAAAGGTCAAGTTACTGTTGGTGACTTGGTAACATTTGTGACGTATTTAGATATGGTGGTATGGCCCTTGATGGCGAATGGTTTCTTGGTTCATATGGTACAGCGTGGTAGTGTTCTTATAACCGTATATAGTCTACTGAGCAAGATCGATATACTGATCCTTAAATCTATCAACCTGTGTCATGGACAT

SEQ ID NO: 14270 - protein, 331 aa, Streptococcus agalactiae
MSIIKNLWWFFKEEKKRYLIGILSLSLVAVLNLIPPKIMGSVIDAITTGKLTRPQLLWNLLGLVLSALAMYGLRYIWRMYILGTSYKLGQVVRYRLFEHFTKMSPSFYQKYRTGDLMAHATNDINSLTRLAGGGVMSAVDASITALVTLITMFFTISWQMTLIAVIPLPLMALATSKLGRKTHETFKESQAAFSELNNKVQESVSGVKVTKSFGYQEQEIASFQEINQMTFVKNMRTMTYDVMFDPLVLLFIGASYVLTLAMGAFMISKGQVTVGDLVTFVTYLDMVVWPLMANGFLVHMVQRGSVLITVYSLLSKIDILILKSINLCHGH

SEQ ID NO: 14271 - protein, 561 aa, Streptococcus agalactiae
ATGTCAGCAGTGGATGCCTCTATCACAGCATTAGTAACGCTTATCACCATGTTCTTTACTATTTCGTGGCAAATGACATTAATTGCGGTTATCCCTTTGCCCTTAATGGCCTTAGCAACTAGTAAATTGGGGCGAAAAACCCATGAAACCTTCAAAGAATCTCAGGCAGCCTTTTCAGAATTAAATAATAAAGTGCAAGAAAGTGTCTCTGGCGTCAAAGTGACTAAATCATTTGGTTATCAAGAACAAGAAATTGCTTCTTTTCAAGAGATTAATCAGATGACTTTCGTGAAGAACATGCGGACCATGACTTATGATGTCATGTTTGATCCTTTAGTTCTTCTTTTTATAGGTGCCTCCTACGTATTAACATTGGCTATGGGAGCTTTTATGATTTCAAAAGGTCAAGTTACTGTTGGTGACTTGGTAACATTTGTGACGTATTTAGATATGTTGGTATGGCCCTTGATGGCGATTGGTTTCTTGTTCAATATGGTACAGCGTGGTAGTGTTTCTTATAACCGTATTAATAGTCTACTTGAGCAAGAACTTCCANNNNNT

SEQ ID NO: 14272 - protein, 187 aa, Streptococcus agalactiae
  VARIANT 186, 187: Xaa = Any Amino Acid
MSAVDASITALVTLITMFFTISWQMTLIAVIPLPLMALATSKLGRKTHETFKESQAAFSELNNKVQESVSGVKVTKSFGYQEQEIASFQEINQMTFVKNMRTMTYDVMFDPLVLLFIGASYVLTLAMGAFMISKGQVTVGDLVTFVTYLDMLVWPLMAIGFLFNMVQRGSVSYNRINSLLEQELPXX

SEQ ID NO: 14273 - protein, 210 aa, Streptococcus agalactiae
GTGTATAATGAGGTCAAAGCACTAGGAAAGGTCTATAAAATGTTACTATTGGTAGATAATTACGATTCTTTTACCTATAATTTAAAGCAATATTTAAGTGTCTATAAAGAAATATTCGTCATAAAAAATGATGATCCTAACCTTTTTTTATTAGCTGAGAGCGCAGAAGCTATCGTCTTATCACCTGGACCAGGACACCCNNNNNTTAAT

SEQ ID NO: 14274 - protein, 70 aa, Streptococcus agalactiae
  VARIANT 68, 69: Xaa = Any Amino Acid
MYNEVKALGKVYKMLLLVDNYDSFTYNLKQYLSVYKEIFVIKNDDPNLFLLAESAEAIVLSPGPGHPXXN

SEQ ID NO: 14275 - protein, 906 aa, Streptococcus agalactiae
TTGTTAGCTGGGAATATCGGCTTTCCTGCTAGTGAAGTTGTTCAGGCTGCGGATGATAAAGATATTCTAGTTATGGAATTATCAAGTTTTCAGCTAATGGGAGTTAAGGAATTTCGTCCTCATATTGCAGTAATTACTAATTTAATGCCAACTCATTTAGATTATCATGGGTCTTTTGAAGATTATGTTGCTGCAAAATGGAATATCCAAAATCAAATGTCTTCATCTGATTTTTTGGTACTTAATTTTAATCAAGGTATTTCTAAAGAGTTAGCTAAAACTACTAAAGCAACAATCGTTCCTTTCTCTACTACGGAAAAAGTTGATGGTGCTTACGTACAAGACAAGCAACTTTTCTATAAAGGGGAGAATATTATGTCAGTAGATGACATTGGTGTCCCAGGAAGCCATAACGTAGAGAATGCTCTAGCAACTATTGCGGTTGCTAAACTAGCTGGTATCAGTAATCAAGTTATTAGAGAAACTTTAAGCAATTTTGGAGGTGTTAAACACCGCTTGCAATCACTCGGTAAGGTTCATGGTATTAGTTTCTATAACGACAGCAAGTCAACTAATATATTGGCAACTCAAAAAGCATTATCTGGCTTTGATAATACTAAAGTTATCCTAATTGCAGGAGGTCTTGATCGCGGTAATGAGTTTGATGAATTGATACCAGATATCACTGGACTTAAACATATGGTTGTTTTAGGGGAATCGGCATCTCGAGTAAAACGTGCTGCACAAAAAGCAGGAGTAACTTATAGCGATGCTTTAGATGTTAGAGATGCGGTACATAAAGCTTATGAGGTGGCACAACAGGGCGATGTTATCTTGCTAAGTCCTGCAAATGCATCATGGGACATGTATAAAAATTTCGAAGTCCGTGGTGATGAATTCNNNNNT

SEQ ID NO: 14276 - protein, 302 aa, Streptococcus agalactiae
  VARIANT 301, 302: Xaa = Any Amino Acid
MLAGNIGFPASEVVQAADDKDILVMELSSFQLMGVKEFRPHIAVITNLMPTHLDYHGSFEDYVAAKWNIQNQMSSSDFLVLNFNQGISKELAKTTKATIVPFSTTEKVDGAYVQDKQLFYKGENIMSVDDIGVPGSHNVENALATIAVAKLAGISNQVIRETLSNFGGVKHRLQSLGKVHGISFYNDSKSTNILATQKALSGFDNTKVILIAGGLDRGNEFDELIPDITGLKHMVVLGESASRVKRAAQKAGVTYSDALDVRDAVHKAYEVAQQGDVILLSPANASWDMYKNFEVRGDEFXX

SEQ ID NO: 14277 - protein, 654 aa, Streptococcus agalactiae
ATGCCAACTCATTTAGATTATCATGGGTCTTTTGAAGATTATGTTGCTGCAAAATGGAATATCCAAAATCAAATGTCTTCATCTGATTTTTTGGTACTTAATTTTAATCAAGGTATTTCTAAAGAGTTAGCTAAAACTACTAAAGCAACAATCGTTCCTTTCTCTACTACGGAAAAAGTTGATGGTGCTTACGTACAAGACAAGCAACTTTTCTATAAAGGGGAGAATATTATGTCAGTAGATGACATTGGTGTCCCAGGAAGCCATAACGTAGAGAATGCTCTAGCAACTATTGCGGTTGCTAAACTAGCTGGTATCAGTAATCAAGTTATTAGAGAAACTTTAAGCAATTTTGGAGGTGTTAAACACCGCTTGCAATCACTCGGTAAGGTTCATGGTATTAGTTTCTATAACGACAGCAAGTCAACTAATATATTGGCAACTCAAAAAGCATTATCTGGCTTTGATAATACTAAAGTTATCCTAATTGCAGGAGGTCTTGATCGCGGTAATGAGTTTGATGAATTGATACCAGATATCACTGGACTTAAACATATGGTTGTTTTAGGGGAATCGGCATCTCGAGTAAAACGTGCTGCACAAAAAGCAGGAGTAACTTATAGCGATGCTTTAGATGTTAGAGATGACGGTACA

SEQ ID NO: 14278 - protein, 218 aa, Streptococcus agalactiae
MPTHLDYHGSFEDYVAAKWNIQNQMSSSDFLVLNFNQGISKELAKTTKATIVPFSTTEKVDGAYVQDKQLFYKGENIMSVDDIGVPGSHNVENALATIAVAKLAGISNQVIRETLSNFGGVKHRLQSLGKVHGISFYNDSKSTNILATQKALSGFDNTKVILIAGGLDRGNEFDELIPDITGLKHMVVLGESASRVKRAAQKAGVTYSDALDVRDDGT

SEQ ID NO: 14279 - protein, 573 aa, Streptococcus agalactiae
ATGTCAGGTTTTCGAGCTCCTTATGTGCCTGGTTGGGATACTCATGGACTCCCAATTGAGCAAGTATTAGCTAAAAAAGGGGTTAAACGTAAAGAAATGGACTTGGCTGAATACCTTGAAATGTGTCGTGATTATGCTCTCAGCCAAGTTGACAAACAACGTGATGATTTTAAACGTCTGGGCGTTTCTGCTGATTGGGAAAATCCTTATATTACACTGACACCAGATTATGAAGCAGATCAAGTACGTGTTTTCGGTGCTATGGCAGATAAAGGATATATCTATCGTGGTGCTAAACCAGTGTATTGGTCATGGTCATCAGAGTCTGCCCTTGCTGAGGCTGAAATCGAATATCATGATATTGATTCGACATCACTCTACTATGCCAATAAAGTTAAAGATGGTAAGGGAATTCTTGATACAGATACCTATATCGTCGTTTGGACGACAACACCATTTACTGTAACAGCTTCACGCGGTTTAACAGTAGGACCAGATATGGAGTATGTTGTAGTTGCACCAGTAGGTAGTGAGCGTAAATACCTTCTTGCAGAGGTTCTTGTNNNNNTTAAT

SEQ ID NO: 14280 - protein, 191 aa, Streptococcus agalactiae
  VARIANT 189, 190: Xaa = Any Amino Acid
MSGFRAPYVPGWDTHGLPIEQVLAKKGVKRKEMDLAEYLEMCRDYALSQVDKQRDDFKRLGVSADWENPYITLTPDYEADQVRVFGAMADKGYIYRGAKPVYWSWSSESALAEAEIEYHDIDSTSLYYANKVKDGKGILDTDTYIVVWTTTPFTVTASRGLTVGPDMEYVVVAPVGSERKYLLAEVLVXXN

SEQ ID NO: 14281 - protein, 750 aa, Streptococcus agalactiae
ATGACTATTAAATTTAATTTAGCTGTGGATACAATCAACAAAGCTTATGCTGCTTATGATTTTATGGCAATTTATAAAGCTGTCGTTAACTTCGTAACAGTTGATCTATCAGCATTTTACCTTGATTTTGCAAAAGATGTGGTTTACATTGAAGCGGCTAACAGTCCAGAACGACGTCGTATGCAAACTGTTTTCTACGATATTTTAGTTAAACTTACAAAACTTTTGACTCCGATTCTACCACATACTGCTGAAGAAATTTGGTCATACCTTGAACATGAGGAGGAGGAATTTGTTCAATTAGCAGAAATGCCTGTTGCACAGACATTCTCTGGTCAAGAAGAAATTCTTGAAGAGTGGTCAGCATTCATGACGTTACGAACACAAGCTCAAAAAGCTCTCGAAGAAGCACGTAACGCTAAAGTCATTGGTAAATCTCTAGAAGCACATTTAACAATTTATGCTAGTCAAGAAGTGAAAACGTTATTAACAGCGTTAAATAGCGATATTGCACTCTTGATGATTGTCTCACAATTAACAATTGCTGATGAAGCAGACAAACCAGCTGACTCAGTATCATTTGAAGGTGTTGCATTTACTGTTGAACACGCTGAAGGTGAAGTCTGCGAACGCTCACGCCGTATTGATCCAACCACAAGGATGCGTTCGTATGGTGTAGCTGTTTGTGATGCTAGTGCAGCAATTATTGAGCAATATTATCCTGAAGCAGTAGCTCAAGGGTTTGAAGCT

SEQ ID NO: 14282 - protein, 250 aa, Streptococcus agalactiae
MTIKFNLAVDTINKAYAAYDFMAIYKAVVNFVTVDLSAFYLDFAKDVVYIEAANSPERRRMQTVFYDILVKLTKLLTPILPHTAEEIWSYLEHEEEEFVQLAEMPVAQTFSGQEEILEEWSAFMTLRTQAQKALEEARNAKVIGKSLEAHLTIYASQEVKTLLTALNSDIALLMIVSQLTIADEADKPADSVSFEGVAFTVEHAEGEVCERSRRIDPTTRMRSYGVAVCDASAAIIEQYYPEAVAQGFEA

SEQ ID NO: 14283 - protein, 612 aa, Streptococcus agalactiae
GTGGTTTACATTGAAGCGGCTAACAGTCCAGAACGACGTCGTATGCAAACTGTTTTCTACGATATTTTAGTTAAACTTACAAAACTTTTGACTCCGATTCTACCACATACTGCTGAAGAAATTTGGTCATACCTTGAACATGAGGAGGAGGAATTTGTTCAATTAGCAGAAATGCCTGTTGCACAGACATTCTCTGGTCAAGAAGAAATTCTTGAAGAGTGGTCAGCATTCATGACGTTACGAACACAAGCTCAAAAAGCTCTCGAAGAAGCACGTAACGCTAAAGTCATTGGTAAATCTCTAGAAGCACATTTAACAATTTATGCTAGTCAAGAAGTGAAAACGTTATTAACAGCGTTAAATAGCGATATTGCACTCTTGATGATTGTCTCACAATTAACAATTGCTGATGAAGCAGACAAACCAGCTGACTCAGTATCATTTGAAGGTGTTGCATTTACTGTTGAACACGCTGAAGGTGAAGTCTGCGAACGCTCACGCCGTATTGATCCAACCACAAGGATGCGTTCGTATGGTGTAGCTGTTTGTGATGCTAGTGCAGCAATTATTGAGCAATATTATCCTGAAGCAGTAGCTCAAGGTTTTGAAGCT

SEQ ID NO: 14284 - protein, 204 aa, Streptococcus agalactiae
MVYIEAANSPERRRMQTVFYDILVKLTKLLTPILPHTAEEIWSYLEHEEEEFVQLAEMPVAQTFSGQEEILEEWSAFMTLRTQAQKALEEARNAKVIGKSLEAHLTIYASQEVKTLLTALNSDIALLMIVSQLTIADEADKPADSVSFEGVAFTVEHAEGEVCERSRRIDPTTRMRSYGVAVCDASAAIIEQYYPEAVAQGFEA

SEQ ID NO: 14285 - protein, 381 aa, Streptococcus agalactiae
ATGACGTTACGACACAAAGCTCAAAAAGCTCTCGAAGAAGCACGTAACGCTAAAGTCATTGGTAAATCTCTAGAAGCACATTTAACAATTTATGCTAGTCAAGAAGTGAAAACGTTATTAACAGCGTTAAATAGCGATATTGCACTCTTGATGATTGTCTCACAATTAACAATTGCTGATGAAGCAGACAAACCAGCTGACTCAGTATCATTTGAAGGTGTTGCATTTACTGTTGAACACGCTGAAGGTGAAGTCTGCGAACGCTCACGCCGTATTGATCCAACCACAAGGATGCGTTCGTATGGTGTAGCTGTTTGTGATGCTAGTGCAGCAATTATTGAGCAATATTATCCTGAAGCAGTAGCTCAAGGTTTTGAAGCT

SEQ ID NO: 14286 - protein, 127 aa, Streptococcus agalactiae
MTLRHKAQKALEEARNAKVIGKSLEAHLTIYASQEVKTLLTALNSDIALLMIVSQLTIADEADKPADSVSFEGVAFTVEHAEGEVCERSRRIDPTTRMRSYGVAVCDASAAIIEQYYPEAVAQGFEA

SEQ ID NO: 14287 - protein, 595 aa, Streptococcus agalactiae
TTGGACTATTATAGGCGTGTTAATTGCTTTATAAAGCGTACTAATTTACATTTTCTCACAATATTAGCTAATTTCTATGTATGGGTATTTCGTGGGACACCGATGGTAGTTCAAATTATGATTGCTTTCGCATGGATGCATTTTAACAATTTACCAACAATTAGCTTTGGTGTTTTAGATTTAGATTTTACACGACTTTTACCTGGTATCATTATCATTTCCTTAAATAGTGGTGCCTATATTTCGGAAATTGTACGTGCAGGGATTGAGGCTGTACCATCTGGACAAATAGAAGCAGCTTACTCGTTGGGGATTCGACCTAAAAATACACTTCCTATGTTATCTTACCCCAAGCTTTTAAATATTTTACCTGCTCTAGGGAATGAATTTATTACAATTATTAAAGATAGTGCTCTCCTTCAAACTATTGGTGTCATGGAATTATGGAACGGAGCACAATCAGTTGTAACGGCTACTTACTCACCAGTTGCACCGTTATTATTTGCAGCATTTTACTATTTAATGTTGACAACGATTCTCTCAGCTTTGTTAAAACAAATGGAGAAATATCTTGGGAAAGGGTAAAATAGATGGT

SEQ ID NO: 14288 - protein, 200 aa, Streptococcus agalactiae
  VARIANT 121: Xaa = Any Amino Acid
MDYYRRVNCFIKRTNLHFLTILANFYVWVFRGTPMVVQIMIAFAWMHFNNLPTISFGVLDLDFTRLLPGIIIISLNSGAYISEIVRAGIEAVPSGQIEAAYSLGIRPKNTLRYVILPQAFXNILPALGNEFITIIKDSALLQTIGVMELWNGAQSVVTATYSPVAPLLFAAFYYLMLTTILSALLKQMEKYLGKGVKIDG

SEQ ID NO: 14289 - protein, 731 aa, Streptococcus agalactiae
ATGGTTGAGCCAATTATTTCATACAAGGACTTCATAAAAGTTTTGGGAAAAATGAGGTTTTAAAAGGCATTGACTTGGATATTCATCAAGGAGAAGTGGTGGTTATTATTGGCCCTTCTGGCTCTGGTAAGTCAACATTTTTAAGAACAATGAATCTCTTGGAAGTACCAACAAAGGGAACAGTGACTTTTGAAGGGATTGATATAACAGACAAAAAGAATGATATTTTTAAAATGCGCGAAAAAATGGGCATGGTTTTTCAACAGTTCAATCTATTTCCCAATATGACTGTACTAGAAAATATTACTTTATCACCTATTAAGACAAAGGGACTTTCTAAGCTTGATGCTCAGACAAAAGCATACGAGCTACTTGAAAAAGTTGGACTCAAAGAGAAGGCTAATGCTTATCCAGCAAGCTTATCTGGAGGACAACAACAACGGATTGCTATTGCAAGAGGTCTTGCAATGAATCCTGATGTCCTTCTTTTTGATGAACCTACTTCAGCTCTTGATCCTGAAATGGTAGGTGAAGTCTTGACTGTTATGCAAGATTTAGCTAAATCTGGTATGACGATGGTTATTGTCACTCATGAAATGGGTTTTGCACGTGAAGTAGCGGATCGTGTCATTTTTATGGATGCAGGGATTATTGTTGAGCAAGGGACCCCTAAGAAAGTATTTGAGCAGACAAAAGAAATCCGCACAAGAGACTTCTTAAGTAAAGTATTA

SEQ ID NO: 14290 - protein, 244 aa, Streptococcus agalactiae
  VARIANT 8: Xaa = Any Amino Acid
MVEPIISXQGLHKSFGKNEVLKGIDLDIHQGEVVVIIGPSGSGKSTFLRTMNLLEVPTKGTVTFEGIDITDKKNDIFKMREKMGMVFQQFNLFPNMTVLENITLSPIKTKGLSKLDAQTKAYELLEKVGLKEKANAYPASLSGGQQQRIAIARGLAMNPDVLLFDEPTSALDPEMVGEVLTVMQDLAKSGMTMVIVTHEMGFAREVADRVIFMDAGIIVEQGTPKKVFEQTKEIRTRDFLSKVL

SEQ ID NO: 14291 - protein, 1691 aa, Streptococcus agalactiae
ATGAATTATAAAGAGATTTATCAAGAGTGGTTAGAAAACGACTCACTCGGTAAAGATATTAAGTCAGATTTAGAAGCTATTAAAGGAGATGAATCTGAAATTCAGGATCGTTTTTACAAAACATTAGAATTTGGAACGGCGGGATTGAGAGGTAAACTTGGAGCAGGAACCAATCGTATGAATACTTATATGGTGGGGAAAGCAGCACAAGCATTAGCTAATACGATTATTGATCATGGCCCTGAAGCTATTGCACGTGGAATTGCAGTTAGTTATGATGTCCGTTATCAATCTAAGGAATTTGCAGAATTAACTTGTTCCATTATGGCAGCAAATGGTATTAAGTCTTATATTTATAAAGGGATTCGCCCAACACCAATGTGCTCATATGCTATTCGTGCTCTAGGATGTGTTTCGGGTGTGATGGTTACTGCTAGTCATAATCCTCAAGCTTATAATGGTTATAAGGCATATTGGAAAGAAGGATCTCAGATTTTAGATGATATTGCTGACCAAATTGCCAATCATATGGATGCTATAACCGATTATCAGCAAATTAAGCAAATACCCTTTGAAGAGGCTCTGGCAAGTGGTTTGGCAAGTTATATTGATGAGAGTATTGAAGAAGCATATAAAAAAGAAGTGCTTGGTTTAACTATTAATGATACTAACATTGATAAGTCAGTCCGAGTAGTTTATACTCCTTTAAATGGCGTAGGAAATTTACCTGTGCGCGAAGTTTTAAGACGCCGTGGTTTTGAAAATATTTATGTAGTACCTGAGCAGGAAATGCCCGATCCTGATTTTACAACAGTTGGCTATCCAAACCCTGAAGTTCCTAAAGCATTTGCCTATTCAGAATCTCTAGGAAAGTCAGTTGATGCAGATGTCTTACTTGCCACAGATCCAGATTGTGACCGAGTAGCATTGGAAGTCAAAGATAGTAAGGGAGAATATATTTTCTTAAATGGTAATAAGATAGGGGCACTTCTTTCCTATTATATTTTTTCACAACGATGTGCCTTAGGGAATTTGCCACATCATCCTGTATTGGTAAAATCCATTGTAACTGGTGATCTATCAAAAGTTATTGCAGATAAATATAATATTGAAACTGTTGAAACTTTAACAGGATTTAAAAATATTTGTGGAAAAGCTAATGAATATGATATCTCAAAGGATAAAACTTATCTCTTTGGCTATGAAGAAAGTATTGGTTTTTGCTATGGCACTTTTGTACGTGATAAAGATGCTGTGAGTGCTTCAATGATGGTAGTAGAAATGACTGCCTATTATAAAGAACGAGGGCAAACACTTTTAGACGTTTTGCAAACCATTTACGATGAATTTGGCTATTACAACGAGCGCCAATTTTCTCTTGAGTTAGAGGGTGCTGAGGGGCAAGAACGTATTAGTCGTATTATGGAGGATTTTAGACAGAACCCAATATTACAAGTAGGTGAGATGACATTGGAGAATTCTATTGATTTCAAGGATGGTTATAAGGATTTTCCAAAGCAAAATTGTTTAAAATATTATTTTAATGAGGGTTCATGGTATGCTTTAAGGCGTCAGGGACAGAACCTAAGATAAAATGTTACCTTTATACGATTGGTTGTACAGAAGCAGATAGTTTATCGAAACTTAATGCAATTGAGTCGGCTTGTCGTGCTAAAATGAATAGTACTAAA

SEQ ID NO: 14292 - protein, 564 aa, Streptococcus agalactiae
  VARIANT 524: Xaa = Any Amino Acid
MNYKEIYQEWLENDSLGKDIKSDLEAIKGDESEIQDRFYKTLEFGTAGLRGKLGAGTNRMNTYMVGKAAQALANTIIDHGPEAIARGIAVSYDVRYQSKEFAELTCSIMAANGIKSYIYKGIRPTPMCSYAIRALGCVSGVMVTASHNPQAYNGYKAYWKEGSQILDDIADQIANHMDAITDYQQIKQIPFEEALASGLASYIDESIEEAYKKEVLGLTINDTNIDKSVRVVYTPLNGVGNLPVREVLRRRGFENIYVVPEQEMPDPDFTTVGYPNPEVPKAFAYSESLGKSVDADVLLATDPDCDRVALEVKDSKGEYIFLNGNKIGALLSYYIFSQRCALGNLPHHPVLVKSIVTGDLSKVIADKYNIETVETLTGFKNICGKANEYDISKDKTYLFGYEESIGFCYGTFVRDKDAVSASMMVVEMTAYYKERGQTLLDVLQTIYDEFGYYNERQFSLELEGAEGQERISRIMEDFRQNPILQVGEMTLENSIDFKDGYKDFPKQNCLKYYFNEGSWYALRXSGTEPKIKCYLYTIGCTEADSLSKLNAIESACRAKMNSTK

SEQ ID NO: 14293 - protein, 852 aa, Streptococcus agalactiae
ATGACTGAATTAATAGATGGTAAAGCCTTATCACAAAAAATGCAGGCTGAGTTAGGGCGAAAAGTTGAAAGGTTAAAGGAACAGCATGGTATCATACCTGGTTTAGCTGTAATCCTTGTTGGGGATAATCCAGCTAGCCAAGTGTACGTTCGAAATAAAGAACGCTCTGCATTAGAAGCTGGTTTTAAAAGTGAGACTTTACGATTATCTGAATCCATTTCTCAAGAAGAACTGATTGATATTATCCATCAATACAATGAAGATAAAAGTATCCATGGTATTTTAGTTCAACTTCCGTTACCACAACATATTAACGATAAAAAAATTATTTTAGCAATAGATCCTAAGAAAGATGTTGATGGTTTCCACCCAATGAATACGGGTCATCTTTGGTCAGGACGACCGATGATGGTACCTTGTACGCCAGCTGGTATTATGGAGATGTTTAGAGAGTACCATGTGGATTTAGAGGGAAAACATGCTGTTATCATCGGAAGGTCCAATATTGTTGGTAAGCCAATGGCACAACTTCTCCTTGATAAAAACGCAACAGTTACTTTGACACATTCAAGAACTCGAAACCTTTCTGAGGTAACAAAGGAGGCTGATATCCTTATTGTTGCGATTGGTCAGGGGCACTTTGTTACAAAAGACTTCGTTAAAGAAGGTGCTGTTGTGATTGATGTTGGTATGAATCGCGATGAAAATGGTAAATTGATTGGAGACGTTGTATTTGAACAAGTGGCAGAAGTTGCTAGTATGATAACACCTGTTCCTGGGGGCGTAGGACCTATGACGATTACAATGCTTTTGGAACAAACTTATCAAGCAGCTCTTAGAAGTGTGAGTCTA

SEQ ID NO: 14294 - protein, 284 aa, Streptococcus agalactiae; identical to SEQ ID NO: 1016

SEQ ID NO: 14295 - protein, 711 aa, Streptococcus agalactiae
ATGGCAGCTTTGGCCTGTGTCAAAACTGGTGCAGGATTAGTTACTGTAGCAACCCAAAGTTGCAATATCCCCTCTTTGCATAGTCAACTACCAGAGGTAATGGCGTTTGATAGTGATGATTACAAATGGTTGGAAAAATCAATTGTTCAAAGTGATGTTATTGTAATTGGTCCTGGATTAGGAGTATCAGAATCATCTCGAAAAATTTTGAACCGGACCATGGAGAAGATTCAATCACATCAAAGTGTCATCATTGACGGATCAGCCTTGACTCTGTTATCAGAAGGTGCGTTTCCGCAAACAAAGGCTAAGAATTTAGTGTTGACACCTCATCAAAAAGAATGGGAGCGATTGTCAGGTATTGCTGTATCGCAACAGACAAAAGAAAATACCCAAACTGCTCTTAAATCTTTTCCCAAAGGGACGATCTTAGTCGCTAAGAGTTCGCATACGCGTATTTTTCAAGATTTAGACGAAAAAGAAATTATAGTAGGAGGTCCTTACCAGGCGACTGGAGGGATGGGGGATACTTTGTGTGGTATGATTGCAGGTATGTTAGCGCAATTTAAAGAAGCCTCTCCTCTAGATAAGGTATCAGTGGGAGTTTATCTACATTCGGCAATTGCTCAAGAATTATCTAAAGAAGCCTACGTTGTTCTACCGACAACGATTAGTGATGAGATTCCAAAAGAAATGGCTAGACTATCTAAA

SEQ ID NO: 14296 - protein, 237 aa, Streptococcus agalactiae
MAALACVKTGAGLVTVATQSCNIPSLHSQLPEVMAFDSDDYKWLEKSIVQSDVIVIGPGLGVSESSRKILNRTMEKIQSHQSVIIDGSALTLLSEGAFPQTKAKNLVLTPHQKEWERLSGIAVSQQTKENTQTALKSFPKGTILVAKSSHTRIFQDLDEKEIIVGGPYQATGGMGDTLCGMIAGMLAQFKEASPLDKVSVGVYLHSAIAQELSKEAYVVLPTTISDEIPKEMARLSK

SEQ ID NO: 14297 - protein, 1338 aa, Streptococcus agalactiae
ATGTCAGACTATTTATCCGTGTCGACACTGACTAAGTATTTAAAATTAAAATTTGACAAAGACCCTTATTTAGAGAGGGTTTATTTAACTGGGCAAGTGTCTAATTTTCGTCGTCGCCCAAACCATCAATACTTCTCTTTAAAAGATGATAAATCAGTCATTCAGGCGACAATGTGGTCAGGTCAATTCAAAAAACTGGGTTTTGAATTAGAGGAAGGGATGAAGGTTAATGTAGTTGGCCGTGTTCAACTTTATGAACCAAGCGGCTCCTACTCTATTATTGTTGAAAAAGCAGAACCGGATGGTATAGGAGCTCTTGCTATCCAATTTGAACAACTAAAGAAGAAACTCTCTCAAGCAGGTTACTTTGATGATCGTCATAAGCAATTACTTCCTCAATTTGTTAGAAAAATAGGAGTTGTGACTAGTCCAAGTGGAGCTGTTATTCGGGATATTATTACAACAGTATCTCGTCGATTCCCAGGAGTGGAAATATTACTTTTCCCCACAAAAGTTCAAGGAGAGGGCGCAGCTCAGGAGATAGCACAAACTATTGCTTTAGCTAACGAGAAAAAGGATTTGGATCTATTAATTGTTGGCCGTGGGGGAGGTTCTATTGAGGACTTATGGGCATTTAATGAAGAATGTGTTGTAGAAGCTATTTTTGAATCTCGTCTTCCCGTTATTTCTAGTGTCGGACATGAAACTGATACAACTTTAGCAGATTTTGTAGCCGATCGCAGAGCAGCAACTCCAACTGCAGCAGCTGAGCTTGCTACAACGGTTACTAAAATTGATATCTTGTCTTGGATTACTGAACGTGAAAATAGAATGTATCAGTCTAGCCTTCGTCTTATCAGGACAAAAGAGGAGAGGTTGCAAAAATCAAAGCAATCAGTTATTTTTAGGCAACCAGAGCGTCTATATGATGGTTTCCTTCAAAAATTAGATAACCTAAATCAGCAGTTAACATATTCTATGCGTGATAAACTACAAACAGTAAGACAAAAGCAAGGTTTGCTTCATCAAAAACTGCAAGGCATAGATTTAAAACAGCGGCTTCATACTTACCAAGAGCGTGTTGTGCAAAGTAGACGACTATTATCAAGTACAATGACTAGTCAGTATGACAGCAAGCTAGCACGTTTTGAAAAGGCTCAAGATGCGCTTATATCATTGGATAGTTCTAGAATTGTAGCGCGTGGTTACGCTATTATCGAAAAAAACCATACTTTAGTATCTACTACTAATGGAATAAATGAAGGAGATCATTTGCAAGTTAAGATGCAAGATGGTCTTTTAGAAGTTGAGGTGAAGGATGTCAGACAAGAAAACATT

SEQ ID NO: 14298 - protein, 446 aa, Streptococcus agalactiae
MSDYLSVSTLTKYLKLKFDKDPYLERVYLTGQVSNFRRRPNHQYFSLKDDKSVIQATMWSGQFKKLGFELEEGMKVNVVGRVQLYEPSGSYSIIVEKAEPDGIGALAIQFEQLKKKLSQAGYFDDRHKQLLPQFVRKIGVVTSPSGAVIRDIITTVSRRFPGVEILLFPTKVQGEGAAQEIAQTIALANEKKDLDLLIVGRGGGSIEDLWAFNEECVVEAIFESRLPVISSVGHETDTTLADFVADRRAATPTAAAELATTVTKIDILSWITERENRMYQSSLRLIRTKEERLQKSKQSVIFRQPERLYDGFLQKLDNLNQQLTYSMRDKLQTVRQKQGLLHQKLQGIDLKQRLHTYQERVVQSRRLLSSTMTSQYDSKLARFEKAQDALISLDSSRIVARGYAIIEKNHTLVSTTNGINEGDHLQVKMQDGLLEVEVKDVRQENI

SEQ ID NO: 14299 - protein, 213 aa, Streptococcus agalactiae
ATGTCAGACAAGAAAACATTTGAAGAAAATTTGCAGGAATTAGAGACAATTGTCTCACGTTTAGAAACAGGTGATGTTGCCTTAGAAGATGCCATTGCTGAATTTCAAAAAGGAATGCTTATTTCAAAAGAGTTACAAAAAACTTTAAAAGAAGCTGAAGAGACGCTTGTAAAAGTGATGCAAGCTGACGGAACGGAAGTAGAAATGGATACT

SEQ ID NO: 14300 - protein, 71 aa, Streptococcus agalactiae
MSDKKTFEENLQELETIVSRLETGDVALEDAIAEFQKGMLISKELQKTLKEAEETLVKVMQADGTEVEMDT

SEQ ID NO: 14301 - protein, 867 aa, Streptococcus agalactiae
ATGGTTACTATTGAAAAAATTGATGAAGCTATTCATCGTCATTACAAACAGACACATAGTGTCGTTTCTCCTGATTTAATTAAGGCTATCCTCTACTCAGTTGATGGAGGTGGGAAACGTATTCGTCCACGCATCCTTTTAGAAATTTTAGAGGGATTTGGAGTTGAACTAATAGATGGTCATTATGATGTGGCTGCTGCTTTGGAGATGATTCACACTGGCTCTTTAATTCATGATGATTTACCGGCGATGGATAATGATGATTTTCGTCGTGGCCGCTTAACAAACCATAAAAAGTTTGATGAAGCTACAGCGGTTTTAGCTGGAGATTCCCTTTTTTTAGACCCATTTGATTTAGTTGTAAAAGCTGGTTTTAAAGCTGATGTTACTGTTAGGTTAATAGAGTTATTGTCTATGTCTGCGGGTAGTTTTGGCATGGTTGGTGGACAAATGTTAGATATGAAGGGAGAAAACAAAGTTTTATCTATTGACGATTTAAGCTTGATTCATATTAATAAAACGGGACGCCTGTTAGCTTATCCCTTTGTGCAGCAGGTATTTTAGCTGAGAAGTCGGAAGAAGTAAAAGGAAAACTGCTCAGCTGGCCTTTTAATCGGTCATGCTTTTCAAGTACGTGATGATATTTTAGATGTGACTGCTAGTTTTGAAGAATTGGGTAAGACACCAAATAAAGACATTGTAGCAGAAAAGACAACTTATCCAAATTTATTGGGTTTGGATAAGTCACAGGAAATACTTGACGATACTTTGAAAAAAGCTCAGGCAATTTTTCAAAATCTAGAGAAAAAAGCTAACTTTAATGCTAGAAAAATAATAGATATAATAGAGGGATTACGGTTGAATGGC

SEQ ID NO: 14302 - protein, 290 aa, Streptococcus agalactiae
  VARIANT 183: Xaa = Any Amino Acid
MVTIEKIDEAIHRHYKQTHSVVSPDLIKAILYSVDGGGKRIRPRILLEILEGFGVELIDGHYDVAAALEMIHTGSLIHDDLPAMDNDDFRRGRLTNHKKFDEATAVLAGDSLFLDPFDLVVKAGFKADVTVRLIELLSMSAGSFGMVGGQMLDMKGENKVLSIDDLSLIHINKTGRLLAYPFXAAGILAEKSEEVKGKLHQAGLLIGHAFQVRDDILDVTASFEELGKTPNKDIVAEKTTYPNLLGLDKSQEILDDTLKKAQAIFQNLEKKANFNARKIIDIIEGLRLNG

SEQ ID NO: 14303 - protein, 824 aa, Streptococcus agalactiae
ATGGCTAAAGAGAGGGTAGATGTTCTTGCCTATAAACAGGGACTTTTTGATACACGAGAGCAAGCGAAACGTGGTGTTATGGCAGGACTGGTGATTAACGTTATCAATGGAGAACGTTATGATAAACCAGGCGAAAAGGTTGCAGACGATACTGAATTAAAACTAAAAGGTGAAAAACTAAAATATGTTAGTAGAGGTGGATTGAAATTAGAAAAAGCTTTACAAGTTTTTGAAATTTCAGTTGCAGATAAGCTAACTATAGATATTGGCGCCTCTACGGGTGGTTTTACTGATGTTATGCTACAATCAGGAGCGCGTTTAGTTTACGCAGTAGATGTAGGAACAAATCAATTAGTTTGGAAGTTACGTCAGGATCATCGTGTTCGTTCTATGGAACAATATAATTTTAGGTATGCCCAAAAAGAAGATTTCAAGGAGGGACTGCCTGAATTTGCATCGATAGATGTCTCATTTATCTCTCTTAATTTGATTTTACCAGCTCTAAAAGAAATTTTAGTGGATGGTGGACAAGTAGTGGCATTAATTAAACCACAATTTGAAGCAGGTCGTGAGCAAATTGGTAAAAATGGTATTGTCAAAGACAAGTTGGTTCATGAAAAGGTTTTGACAACAGTGACCAATTTCACGAAAGATTATGGATATACGGTTAAACATCTTGATTTTTCGCCCGTTCAAGGTGGACATGGAAATATTGAGTTTTTAATGCATTTGCAAAAGTGTCAAGATCCACAAAATCTTGTGCTTGACCAAATACAAGATGTTATAGAAAAAGCACATAAGGATTTAAGAAAAATGAAGAAGAG

SEQ ID NO: 14304 - protein, 275 aa, Streptococcus agalactiae
  VARIANT 268: Xaa = Any Amino Acid
MAKERVDVLAYKQGLFDTREQAKRGVMAGLVINVINGERYDKPGEKVADDTELKLKGEKLKYVSRGGLKLEKALQVFEISVADKLTIDIGASTGGFTDVMLQSGARLVYAVDVGTNQLVWKLRQDHRVRSMEQYNFRYAQKEDFKEGLPEFASIDVSFISLNLILPALKEILVDGGQVVALIKPQFEAGREQIGKNGIVKDKLVHEKVLTTVTNFTKDYGYTVKHLDFSPVQGGHGNIEFLMHLQKCQDPQNLVLDQIQDVIEKAHKXFKKNEEE

SEQ ID NO: 14305 - protein, 470 aa, Streptococcus agalactiae
ATGAAGAAGAGTGAACGTTTAAATTTAATTAAGCAAATTGTTCTTACCATGCTGTTGAAACACAACATGAGTTGTTACGCAGATTGGAAGCTTATGGGGTAACTCTAACTCAAGCAACTATTTCACGTGATATGAATGAAATTGGCATTATAAAAGTGCCATCAGCAAAAGGTCGCTATATTTACGGTTTGTCAAATGAAAACGACCCTATCTTTACAACTGCTGTGGCAAAGCCTATTAAAACAAGTATTTTATCAATATCAGATAAGCTACTAGGTTTAGAGCAATTTATCAATATTAATGTCATACCAGGTAACAGTCAATTAATTAAAACCTTCATAATGTCACATTGTCAAGAACATATTTTTAGTTTGACAGCTGACGATAATAGTCTCCTTTTGATTGCAAAATCAGAAGCAGATGCTGATCACATTCGTCAATCAATGATTGCAATGTTGGAGAAAAAAGAT

SEQ ID NO: 14306 - protein, 157 aa, Streptococcus agalactiae
  VARIANT 16: Xaa = Any Amino Acid
MKKSERLNLIKQIVLXHAVETQHELLRRLEAYGVTLTQATISRDMNEIGIIKVPSAKGRYIYGLSNENDPIFTTAVAKPIKTSILSISDKLLGLEQFININVIPGNSQLIKTFIMSHCQEHIFSLTADDNSLLLIAKSEADADHIRQSMIAMLEKKD

SEQ ID NO: 14307 - protein, 1656 aa, Streptococcus agalactiae
ATGCTTTTAGAAATTTCTATTAAGAATTTCGCTATTATCGAAGAAATTTCACTTAATTTTGAAACAGGAATGACTGTTTTAACTGGTGAGACTGGTGCAGGGAAATCTATCATTATTGATGCTATGAATATGATGTTAGGAGCCCGTGCTAGTGTTGAAGTGATTCGCCATGGTGCTAACAAAGCAGAAATTGAAGGATTTTTCTCTATTGAAAAAAATCAATCATTAGTCCAATTATTGGAAGAAAATGGCATTGAATTAGCAGATGAATTAATTATTCGCCGAGAAATCTTTCAAAATGGGCGCAGCGTTAGTCGAATTAATGGGCAAATGGTGAATTTGTCAACACTAAAAGCTGTGGGGCATTATTTGGTAGACATTCATGGTCAGCATGACCAAGAGGAACTAATGAAACCTAACATGCACATTCTGATGTTAGATGAATTTGGTAATACAGAATTTAATGTCATAAAAGAGCGTTATCAAAGTCTTTTTGATGCTTATCGTCAGCTTCGTAAACGTGTATTGGATAAGCAAAAAAATGAACAAGAGAATAAATCACGTATTGAAATGCTAGAATTTCAAATAGCAGAAATTGAGTCTGTAGCCCTTAAATCAGATGAAGACCAAACGCTACTCAAGCAACGTGATAAATTAATGAATCATAAGAATATTGCAGATACTTTGACAAATGCATATCTTATGTTAGATAACGAAGAGTTTTCAAGTTTATCGAATGTTCGTTCTGCAATGAATGACCTTATGGCTTTAGAAGAATTTGATCGAGAATATAAAGATCTTTCCACCAATCTTTCAGAAGCTTACTACGTTATTGAAGAAGTTACTAAACGTTTAGGTGACGTTATCGATGATTTAGATTTTGACGCTGGTTTACTACAAGAAATTGAAAATAGACTAGATGTTATTAACACAATAACGCGAAAATATGGCGGTGATGTGAATGATGTTTTAGACTATTTTGATAACATTACTAAAGAATATAGTCTATTGACAGGTAGTGAAGAGTCCTCAGATGCTTTAGAAAAAGAATTAAAGATTTTAGAACACGATTTGATTGAATCAGCAAATCAATTAAGTTTAGAGCGTCATAAGCTAGCTAAACAATTGGAAAATGAAATCAAACAAGAATTAACAGAGCTTTATATGGAGAAAGCTGATTTCCAAGTTCAATTTACAAAAGGAAAATTTAATAAAGAAGGGAACGAAATCGTTGAATTTTATATTTCAACGAATCCCGGAGAGGGCTTTAAGCCATTGGTAAAAGTGGCTTCAGGAGGAGAGTTATCTCGATTGATGTTAGCTATTAAATCTGCTTTTTCACGTAAGGAAGATAAAACTTCCATTGTATTTGATGAGGTGGATACAGGAGTTTCTGGTCGCGTGGCCCAGGCTATTGCTCAAAAAATTCACAAGATTGGTAGTCATGGACAAGTTTTAGCAATTTCTCATTTAGCTCAGGTTATTGCAATAGCGGATTACCAATATTTTATTGAAAAAATTTCCAGTGACTCTTCAACAGTTTCAACGGTAAGGCTTTTAAGCTATGAAGAACGTGTAGAAGAAATCGCTAAAATGTTGGCAGGAAACAATGTAACTGATACTGCACGTACTCAAGCTAAAGAATTACTTGGTAGT

SEQ ID NO: 14308 - protein, 552 aa, Streptococcus agalactiae
MLLEISIKNFAIIEEISLNFETGMTVLTGETGAGKSIIIDAMNMMLGARASVEVIRHGANKAEIEGFFSIEKNQSLVQLLEENGIELADELIIRREIFQNGRSVSRINGQMVNLSTLKAVGHYLVDIHGQHDQEELMKPNMHILMLDEFGNTEFNVIKERYQSLFDAYRQLRKRVLDKQKNEQENKSRIEMLEFQIAEIESVALKSDEDQTLLKQRDKLMNHKNIADTLTNAYLMLDNEEFSSLSNVRSAMNDLMALEEFDREYKDLSTNLSEAYYVIEEVTKRLGDVIDDLDFDAGLLQEIENRLDVINTITRKYGGDVNDVLDYFDNITKEYSLLTGSEESSDALEKELKILEHDLIESANQLSLERHKLAKQLENEIKQELTELYMEKADFQVQFTKGKFNKEGNEIVEFYISTNPGEGFKPLVKVASGGELSRLMLAIKSAFSRKEDKTSIVFDEVDTGVSGRVAQAIAQKIHKIGSHGQVLAISHLAQVIAIADYQYFIEKISSDSSTVSTVRLLSYEERVEEIAKMLAGNNVTDTARTQAKELLGS

SEQ ID NO: 14309 - protein, 834 aa, Streptococcus agalactiae
ATGAGTAAAATCAAAATTGTAACGGATTCTTCCATTACCATTGAACCAGAACTTATTAAAGAGCTTGACATTACAGTTGTTCCCTTGTCAGTTATGATAGATGGTACCTTGTATTCAGACAATGACTTAAAAGCACAAGGGGAATTCTTGAACCTAATGCGTGGAAGTAAGGAATTGCCAAAAACAAGTCAACCACCTGTAGGTGTTTTTGCAGAAATTTATGAAAAATTAATGAATGAAGGTGCGGAACATATCATTGCAATTCATTTAACGCATACACTATCAGGAACTATTGAAGCATCACGCCAGGGAGCTAATATTGCTGGTGCAGATGTTACAGTTATTGATTCTACTTTTACAGACCAGTGTCAAAAATTCCAGGTTGTAGAAGCCGCGAAATTAGCTAAAGAGGGAGCTGATTTAGATACAATTTTGGCTCGTGTGGAAGAAGTACGCCAGAAGTCAGAATTATTTATTGGCGTATCGACCCTTGAAAATTTAGTAAAAGGTGGTCGTATTGGACGTGTAACAGGTCTCCTAAGTTCATTGCTTAACATAAAAGTAATTATGGAGCTAACAAACCATGAATTAGTACCGATTGTTAAAGGTCGCGGTCTAAAGACCTTCAGCAAATGGTTAGATAATTTTGTTGAAAGTGCCCAAACACGAAAAATTGCTGAAATTGGCATCTCCTACTGTGGTAAAGCTGATATGGCTAATAACTTTAAAGAAAAACTAGCTGTTCTAGGTGCTCCTATATCCGTATTAGAAACTGGCTCAATCATCCAAACTCATACTGGTGAGGATGCATTTGCTGTTATGGTTCGTTATGAA

SEQ ID NO: 14310 - protein, 278 aa, Streptococcus agalactiae; identical to SEQ ID NO: 5406

SEQ ID NO: 14311 - protein, 855 aa, Streptococcus agalactiae
TTGCTGTTATGGTTCGTTATGAATAAGAAAAAAATACTTACCGGACTTTCTTTTTTTCTGGTAAGTCTTCTTTTATCTTTTGGGATTTTTTCCTTGATCATTCCAAAATCAAATCCTAAATTAACAAAAAAAGACTTCCTAACAAAGAAAGTTATCCCACTTAACTATGTTGCTCTTGGAGATTCTCTGACCGAAGGTGTGGGGGATACAACCTCTCAAGGTGGTTTTGTCCCACTGCTATCAGAATCACTCCATAATCGATACTCTTACCAAGTGACTTCTGTTAATTATGGTGTGTCTGGGAATACTAGTCAACAAATTTTAAAACGTATGACGACAGATCCTCAAATCGAAAAAGATTTAGAGAAAGCTGATTTATTGACGCTAACTGTTGGTGGTAATGATGTCTTGGCTGTTATTCGTAAAGAGCTCAGTCATTTATCACTAAATTCCTTTGAGAAACCAGCAGAAGCATATAAGGAACGTTTGAAAGAAATTCTTGCAAAAGCAAGACAAGATAATCCTAAATTGCCTATTTATGTTTTAGGCATTTATAATCCTTTTTACCTAAACTTTCCACAATTAACTAAAATGCAAACCGTTATTGATAATTGGAATAAAGCTACAAAAGAAGTAGTTGATGCTTCAGAAAATGTTTATTTTGTCCCAATTAATGACCGCCTTTATAAGGGAATAAATGGTAAAGAGGGTATTACAGAGTCATCAAATAGTCAGGCAAGTATCACTAATGATGCTCTCTTTACTGGAGACCATTTTCATCCCAATAATATTGGCTATCAAATCATGTCTAACGCCGTTATGGAGAAAATAAATGAAACAAGAAAAAACTGGCCG

SEQ ID NO: 14312 - protein, 285 aa, Streptococcus agalactiae; identical to SEQ ID NO: 1034

SEQ ID NO: 14313 - protein, 600 aa, Streptococcus agalactiae
ATGAAACAAGAAAAAACTGGCCGTAATTTAAATTTTTGGAAATGGGCATTTCTCTTATTGTTGGCAATTAACCTTTCCTTCACAGCAGTGATTGCAAGTCGTTTAATTCAAGTACGTGAGCCTAATACAGGAAAAATTTCGACTGGGGTACAAGATAAAGTAAAAGTAGGTACTTTTACGACCAATAAGTCGCAACTGAATAAGACAATTGCACTTTATTTAAAACAATATCAAACTAAGAAGATGAATTATAAGATTTATGCTGCTTCATCTTCTATACTATTTGAAGGCTCTTATCAATTATTAGGTTATGAAGTGCCTTTATACATCTATTTTGAACCTTATCGTTTAACAAATGGCGCTGTTCAACTTAAAGTGACCTCATTTTCAGTAGGAACTCTTCCGCTTCCAGAAAAAGATGTGTTACAATATATAAAATCATCTTATAAATTGCCAAACTTTGTAGATATAAAACCTAAAAAATCGGTTATTAATATTAATTTGCAAGATTTAAAAAATAAAGAAGGTATTTATTTGAAAGCGACTGCAATTGATTTAGTAAACGATAATTTTAGTTTCGATATTTTTAAGAAAAAGCCC

SEQ ID NO: 14314 - protein, 200 aa, Streptococcus agalactiae
MKQEKTGRNLNFWKWAFLLLLAINLSFTAVIASRLIQVREPNTGKISTGVQDKVKVGTFTTNKSQLNKTIALYLKQYQTKKMNYKIYAASSSILFEGSYQLLGYEVPLYIYFEPYRLTNGAVQLKVTSFSVGTLPLPEKDVLQYIKSSYKLPNFVDIKPKKSVININLQDLKNKEGIYLKATAIDLVNDNFSFDIFKKKP

SEQ ID NO: 14315 - protein, 207 aa, Streptococcus agalactiae; identical to SEQ ID NO: 5413

SEQ ID NO: 14316 - protein, 69 aa, Streptococcus agalactiae; identical to SEQ ID NO: 1040

SEQ ID NO: 14317 - protein, 930 aa, Streptococcus agalactiae
ATGGTATCGCTAAAAACGGAAATTGCTGGTTTTAGTTTTGACAATTGTTTGATGAATGCAGCGGGTATTTATTGTATGACTAAGGAAGAGTTATTAGCTATTGAAAATTCTGAAGCTGGTTCCTTTGTTACAAAAACAGGTACCCTTAAAGCTAGAGAGGGAAACCCTCAACCACGTTATGCAGATACTGACTGGGGATCAATTAATTCTATGGGACTCCCTAATAAAGGTATTGACTATTATCTTGATTTCGTGACTGAATTACAAGACCAAGACAATAGCAAAAATCACGTTTTATCATTAGTAGGTTTATCACCAGAAGAGACACATATTATTCTTAAAAAGGTTGAAAACAGTAGTTACAATGGCCTGATAGAGTTAAATTTATCGTGCCCAAATGTTCCTGGAAAACCTCAAATTGCTTATGATTTTGAAATGACTGACCTCATCCTTTCAGAAATCTTTAGCTATTATCAAAAGCCATTGGGCATCAAATTACCACCTTACTTTGATATCGTTCACTTTGATCAAGCAGCTACAATTTTTAACAAATATCCTTTAGCTTTTATTAACTGTGTTAATTCTATCGGAAATGGACTTGTTATTGATGATGAAACTGTCGTTATAAAGCCTAAAAATGGCTTTGGAGGTATCGGCGGTGATTTTATCAAGCCTACCGCCTTAGCTAACGTCCATGCTTTCTACAAACGTTTAAATCCTTCAATTAAAATTATCGGAACAGGTGGTGTTAAAAACGGCCGTGATGCCTTTGAACACATTCTATGTGGAGCTAGTATGGTCCAAATCGGAACCGCTTTACAAAAAGAAGGACCAGAAATTTTTCAGCGTGTAAGCAGAGAGTTAAAAGAAATAATGGCTGATAAAGGCTATCAATCATTGGAGGATTTTCGAGGACAACTTAATTACCTT

SEQ ID NO: 14318 - protein, 310 aa, Streptococcus agalactiae
MVSLKTEIAGFSFDNCLMNAAGIYCMTKEELLAIENSEAGSFVTKTGTLKAREGNPQPRYADTDWGSINSMGLPNKGIDYYLDFVTELQDQDNSKNHVLSLVGLSPEETHIILKKVENSSYNGLIELNLSCPNVPGKPQIAYDFEMTDLILSEIFSYYQKPLGIKLPPYFDIVHFDQAATIFNKYPLAFINCVNSIGNGLVIDDETVVIKPKNGFGGIGGDFIKPTALANVHAFYKRLNPSIKIIGTGGVKNGRDAFEHILCGASMVQIGTALQKEGPEIFQRVSRELKEIMADKGYQSLEDFRGQLNYL

SEQ ID NO: 14319 - protein, 1233 aa, Streptococcus agalactiae
ATGGCGCTTAAAGAATTAACAGCTAAAGAGTTCGAAAGTTATTCAGGAAATTACGATTTACAATCGTTTATGCAAACCCCTGAGATGGCAAAGCTTCTAAAAAAACGTGGGTATGACATTACCTACATGGGCTACCAAATCGATGGGAAAATGGAAATCATCAGTATTGTTTATACCATCCCAATGACTGGTGGACTTCATATGGAAGTCAATTCTGGTCCAGCCCATTCCAATTCTAAATATCTGAAACATTTTTATAAAGAACTACAGAACTATGCCAAATCTCAGGGCGCTTTAGAATTATTAATTAAACCTTATGATACCTACCAAGAGTTTACTGGTGAAGGTGAACCTAAAGGTGCACCGAACACCTATCTTATTGATGGCCTGACTAGTATAGGTTATCACCACGATGGGCTTCATATTGGTTATCCTGGCGGTGAACCTGATTGGCATTATGTTAAAAATCTAGAAGGTATCACTCCTCAAAATCTTCTTAAATCTTTCTCTAAAAAAGGACGCCCCTTGGTTAAGAAAGCCATGTCTTTTGGTATAAAAATACGTGTCCTCAAGCGGGAAGAACTACATATCTTTAAGGATATTACTTCTTCTACTTCTGATCGCCGGGACTATATGGATAAATCTCTAGATTATTATCAAGATTTTTATGATAGTTTCGGAGATAAGGCGGAATTTGTCATTGCAACTCTAAACTTTAGGGAATATGATCATAACCTACAATTAAATGCAAAGAAATTGGAAGAACAGATTACAGTCCTTGATAATCGCCATCAAAATAATACAGATTCTGCCAAATACCATCGTCAACGTACTGAGCTTGTCAATCAACTAGCTAGTTTAGATAAACGTCGCAAAGAAGTCGAACCTTTTATTCAAAAATTTGGAAATCAAGATGTTGTTTTAGCTGGTAGCCTCTTTATTTATAGCCCTAAAGAAACTGTCTATCTTTTCTCTGGCTCATACACAGAATTTAATAAATTTTATGCGCCTGCAGTTCTTCAAGAATATGTTATGCAAGAGGCTCTAAAGCGTCAATCAACTTTCTATAATTTTTTAGGTATTCAAGGAAATTTTGATGGTTCAGATGGCGTACTTCGCTTTAAACAGAATTTTAATGGTTACATTGTTCGTAAAATGGGTACTTTCCGCTACTATCCAAATCCATTAAAATATAAGAGTATTCAATTACTAAAGAAAATCTTACGCCGAACA

SEQ ID NO: 14320 - protein, 411 aa, Streptococcus agalactiae
MALKELTAKEFESYSGNYDLQSFMQTPEMAKLLKKRGYDITYMGYQIDGKMEIISIVYTIPMTGGLHMEVNSGPAHSNSKYLKHFYKELQNYAKSQGALELLIKPYDTYQEFTGEGEPKGAPNTYLIDGLTSIGYHHDGLHIGYPGGEPDWHYVKNLEGITPQNLLKSFSKKGRPLVKKAMSFGIKIRVLKREELHIFKDITSSTSDRRDYMDKSLDYYQDFYDSFGDKAEFVIATLNFREYDHNLQLNAKKLEEQITVLDNRHQNNTDSAKYHRQRTELVNQLASLDKRRKEVEPFIQKFGNQDVVLAGSLFIYSPKETVYLFSGSYTEFNKFYAPAVLQEYVMQEALKRQSTFYNFLGIQGNFDGSDGVLRFKQNFNGYIVRKMGTFRYYPNPLKYKSIQLLKKILRRT

SEQ ID NO: 14321 - protein, 1209 aa, Streptococcus agalactiae
ATGTATAGAGAAATTACCGCTGTCGAACACGATCGCTTTGTGAGCGAATCCAACCAAACAAACCTACTTCAATCTTCTAATTGGCCCAAAGTAAAAGACAACTGGGGTAGTCAATTACTTGGCTTTTTTGACGGTGAAACCCAAATTGCCAGCGCTAGTATTCTCATCAAATCACTTCCTCTTGGCTTCTCCATGCTGTATATTCCGCGTGGACCAATCATGGATTACTCCAATCTAGATATTGTAACTAAGGTCCTTAAGAACCTTAAAGCTTTTGGCAAAAAACAAAGAGCTCTCTTTATCAAGTGTGATCCTCTCATCTATTTAAAAATGGTCAATGCCAAAGATTTTGAAAATTCGCCCGATGAAAAAGAAGGGTTAATCGCCATTGATCATTTACAGCGTGCAGGTGCTGATTGGACTGGTCGGACAACAGATTTAGCTCATACTATCCAACCACGTTTTCAAGCAAACCTATATGCTAATCAATTTGGACTTGATAAAATGTCTAAAAAAACTCGTCAAGCTATTCGAACTTCCAAAAATAAGGGAGTAGATATACAATTTGGTAGCCATGAACTACTTGAAGATTTTGCAGAGTTAATGAAAAAAACAGAAGACCGTAAAGGGATAAATCTTAGAGGAATTGACTACTACCAAAAACTCCTTGATACGTATCCTAATAACTCATACATCACAATGGCTTCGCTAGATGTTGCAAAACGATTAGAAAAAATAGAAAAAGAATGCCAGATAGCTCAATCTGAAAGAATAAAATCACTTGAACTTAATCGTGAGAAAAAAGTTAAACAACACCAAGATACGATTGATCGATTAAATAAAGAAATTGATTTTCTCAAAGAAGCTCAAAAAGCCTATGACCGAGACATTGTTCCATTGGCTGCAACCCTCACTCTAGAATTTGGTAATACATCAGAAAATATTTATGCTGGTATGGACGATTACTTCAAATCTTATTCTGCTCCTATTTACACTTGGTTTGAAACAGCTCAAAGGGCTTTTGAACGTGGAAATATTTGGCAAAATATGGGGGGGATTGAGAATGACTTATCTGGTGGTTTATATCATTTTAAGTCTAAGTTCGAACCAATCATTGAGGAATTTATTGGAGAATTTAACATTCCAGTGAACAGATTGCTTTATAAAGCCTCTAATTATGTCTATGCCTTACGCAAAAAACGTAATAGC

SEQ ID NO: 14322 - protein, 403 aa, Streptococcus agalactiae
MYREITAVEHDRFVSESNQTNLLQSSNWPKVKDNWGSQLLGFFDGETQIASASILIKSLPLGFSMLYIPRGPIMDYSNLDIVTKVLKNLKAFGKKQRALFIKCDPLIYLKMVNAKDFENSPDEKEGLIAIDHLQRAGADWTGRTTDLAHTIQPRFQANLYANQFGLDKMSKKTRQAIRTSKNKGVDIQFGSHELLEDFAELMKKTEDRKGINLRGIDYYQKLLDTYPNNSYITMASLDVAKRLEKIEKECQIAQSERIKSLELNREKKVKQHQDTIDRLNKEIDFLKEAQKAYDRDIVPLAATLTLEFGNTSENIYAGMDDYFKSYSAPIYTWFETAQRAFERGNIWQNMGGIENDLSGGLYHFKSKFEPIIEEFIGEFNIPVNRLLYKASNYVYALRKKRNS

SEQ ID NO: 14323 - protein, 1232 aa, Streptococcus agalactiae
ATGGGTAATAAACTGATGTATCATGTTACCGTTGGAATATCCGAAAAAGAATATGATGCCTTTGCTATTGCATCGTCTCAAACCAATCTCCTCCACTCTTCAAAGTGGGCACAAGTAAAATCAAATTGGCAAAATGAACGTTTAGGCTTTTATAAAGATGACCAATTAGTTGCTGTAGCTAGCATCTTAATTAAATCATTACCTCTTGGTTTTACAATGCTTTATATTCCACGTGGACCTATTATAGACTACAGCAATAAAGAATTAGTTGGCTTTGTGTTAAAAACACTAAAAAACTTTGGACGAAAGAAACGTGCTGTTTTTGCAAAATTCGATCCAGCACTTCTTCTACGTCAATATCACCTTAAAGAAGAGAATGTCGCCGAAGAGATAGATGAAAGTAGACAGGCAATTGATAATCTTAAGTCAGCAGGTGCCCAATGGATAGGTCCAACGAAAGCCATTTCCGAAACCATCCAACCACGTTTTCAAGCGAACATCTATACCAAAGCAAATATAGAAGAAAACTTTCCAAAACACACTAAACGTCTGATAAAAGATGCAAAGCATCGCGGTGTTCAAATTTATCGTGCCAACATTGATGATTTACCTAAATTCGCCACGGTTGTAGCATTAACCGAGAATCGTAAAGGTGTAGCTTTACGTAATGAAAACTATTTCCATCAACTAATGACAATTTATGGAGAAGATGCCTATCTCTATTTGGCTAAAGTCAATCTTCCTAAAAGATTAGCGCAATTTAAAGAACAACTTCTTCAAATCCAAAGAGATTTATCAGAAACTCCATCCCATCAAAAAAGTCGCCTGACAAGGCTAAATCAACAAGAAGCTTCTGTTAAACAATATATCCTTGAATTTCAGGAGTTTAGCAAGAAATATCCAGATGAGCCTGTCATTGCAGGAATTTTGTCCATTCGTTTTGGCAATGTCCTGGAGATGTTGTATGCTGGTATGGATGATAGCTTCCGTAATTTTATCCACAGTATCTCTTGAATGCTAGGGTGTTCGAAGATGCTTTCAAAAACGGTATTGTATCTGCTAATCTAGGCGGTGTCGAGGGAAGTCTTAACGATGGTTTAACAAAATTTAAAAGTAACTTCAATCCAAGGTTTGAAGAATATATTGGCGAGTTTAATCTAGCAATCAATCCATTATTATATAAATTGGCCAACCTAGCCTATACTATTCGAAAAAAACAAAGACACTCTCAC

SEQ ID NO: 14324 - protein, 411 aa, Streptococcus agalactiae
MGNKLMYHVTVGISEKEYDAFAIASSQTNLLHSSKWAQVKSNWQNERLGFYKDDQLVAVASILIKSLPLGFTMLYIPRGPIIDYSNKELVGFVLKTLKNFGRKKRAVFAKFDPALLLRQYHLKEENVAEEIDESRQAIDNLKSAGAQWIGPTKAISETIQPRFQANIYTKANIEENFPKHTKRLIKDAKHRGVQIYRANIDDLPKFATVVALTENRKGVALRNENYFHQLMTIYGEDAYLYLAKVNLPKRLAQFKEQLLQIQRDLSETPSHQKSRLTRLNQQEASVKQYILEFQEFSKKYPDEPVIAGILSIRFGNVLEMLYAGMDDSFRKFYPQYLLNARVFEDAFKNGIVSANLGGVEGSLNDGLTKFKSNFNPRFEEYIGEFNLAINPLLYKLANLAYTIRKKQRHSH

SEQ ID NO: 14325 - protein, 810 aa, Streptococcus agalactiae
ATGACTTCAATTAAACTTGTTGCCGTAGATATTGACGGCACCCTATTAAATAGTAAGCGTGAAATTACACCTGAAGTGGCTAAAGCTGTTCAAGAAGCAAAATCAAAAGACGTTAAAATTGTTATTGCTACAGGACGTCCAATCATCGGAGTCCAAGATCTTTTAGAAGAATTGAAACTCAATGAAGAGGGAGATTATGTTATCACCTTTAACGGCGGTCTAGTTCAAGACACAGCCACAGGAGATGACATCATCAAAGAAACCTTAACCTATGAAGACTATCTGGATTTCGAACTGTTAGCGCGTAAATTAGGCGTCCACATGCACGCCATTACAAAAGAAGGAATTTACACAGCGAATCGTGATATTGGTAAATATACAATACACGAAGCAACTTTAGTTAATATGCCGCTCTTCTATCGTACTCCTGAAGAAATGGGAGACAAAGAAATCATTAAACTAATGATGATTGATCAACCTGACATCTTAGATGCAGCAATTGCTAAAATTCCAAAAAAAGTTCTCGATAACTACACCATTGTAAAATCAACTCCTTTTTATTTAGAAATTTTACCCAAAAACGTTAATAAAGGCACTGCACTTCTCCACCTTGCAGAGAAAATGGGATTAACTGTAGATCAAACAATGGCTATTGGTGATGAAGAAAATGACCGTGCTATGCTTGAAGTTGTTGGAAATCCTGTTGTTATGCAAAACGGCAATCCTGAACTAAAAAAAATAGCAAAATATATCACCAAATCAAACGAGGAAAGTGGCGTAGCCTACGCACTACGTGAATGGGTAATAAAC

SEQ ID NO: 14326 - protein, 270 aa, Streptococcus agalactiae
MTSIKLVAVDIDGTLLNSKREITPEVAKAVQEAKSKDVKIVIATGRPIIGVQDLLEELKLNEEGDYVITFNGGLVQDTATGDDIIKETLTYEDYLDFELLARKLGVHMHAITKEGIYTANRDIGKYTIHEATLVNMPLFYRTPEEMGDKEIIKLMMIDQPDILDAAIAKIPKKVLDNYTIVKSTPFYLEILPKNVNKGTALLHLAEKMGLTVDQTMAIGDEENDRAMLEVVGNPVVMQNGNPELKKIAKYITKSNEESGVAYALREWVIN

SEQ ID NO: 14327 - protein, 1314 aa, Streptococcus agalactiae
ATGAATGAAAAAGTATTTCGTGACCCCGTTCACACTTATATCCATGTAAATAATCAAGTCATATATGACTTGATTAACACTAAAGAATTTCAACGTTTACGACGCATTAAACAAACCTCAACGACTTCTTTTACCTTCCATGGTGCAGAGCATAGTCGTTTTTCACATTGTCTCGGAGTTTATGAACTGGCTCGTAAAGTTACAGAAATCTTTGATGAACATTATTCTGATCTTTGGAATAAAAATGAGTCCCTGCTAACGATGGCTGCCGCCCTACTACATGATATCGGACATGGCGCATATTCTCATACATTTGAGCGTCTCTTCAATACTGATCATGAAGCTTACACTCAGGAAATCATCACCAATCCTACCACAGAGATTAATGCTATTTTACGAAAGGTGGCTCCTGATTTTCCTGATAAAGTAGCTAGTGTTATTAATCATAGCTACCCCAATAAACAAGTTGTTCAATTAATTTCTAGTCAAATTGATTGTGATCGAATGGACTATCTTCTCAGAGATTCTTACTACACTGCTGCTAGCTATGGACAATTTGATTTAACACGAATTTTACGCGTTATTAGACCAACCGATTCTGGAATTGCTTTTGCTCGTAACGGGATGCACGCTGTGGAAGATTATATTGTTAGTCGCTTCCAAATGTATATGCAAGTTTATTTCCATCCAGCCAGTCGTGCTATGGAATTACTCTTACAAAATTTACTAAAACGTGCTCGCTTCTTATTTGATACCCATCGCGATTTTTTTGAACAAACTTCTCCAAATCTTATTCCTTTCTTCACGGATCAATATGATTTACAAGATTATTTAGCCCTAGATGATGGGGTAATGAATACTTACTTCCAATCTTGGATGCAAGCTGATGATAACATTTTGGCAGATTTAGCTAATCGTTTTATCAATCGAAAAGTCTTTAAATCAATTACCTTTGAAGAGGCTGATAAAGAAAATCTAGTTAAAATGAAAGAACTAGTCTCACAGGTTGGTTTTGATCCCGATTATTACACTGGTGTCCATGCTAATTTTGACTTACCTTACGATGTTTATCGGCCTGAACATTCAAATCCACGAACAGAAATTCAAATTATCCAAAAGAATGGACAACTTGCTGAATTATCAAGCTTATCACCGATTGTAAAAGCATTAACTGGATCTAATTATGGTGATCAACGTTTTTATTTTCCAAAAGAAATGTTGACATTAGATAGCCTATTTTCAAGTACAAAAGAAGAATTTCAATCTTATATCACAAATGAGCATTTGACACTCACGAAAGATAATAGCCATTCA

SEQ ID NO: 14328 - protein, 438 aa, Streptococcus agalactiae
MNEKVFRDPVHTYIHVNNQVIYDLINTKEFQRLRRIKQTSTTSFTFHGAEHSRFSHCLGVYELARKVTEIFDEHYSDLWNKNESLLTMAAALLHDIGHGAYSHTFERLFNTDHEAYTQEIITNPTTEINAILRKVAPDFPDKVASVINHSYPNKQVVQLISSQIDCDRMDYLLRDSYYTAASYGQFDLTRILRVIRPTDSGIAFARNGMHAVEDYIVSRFQMYMQVYFHPASRAMELLLQNLLKRARFLFDTHRDFFEQTSPNLIPFFTDQYDLQDYLALDDGVMNTYFQSWMQADDNILADLANRFINRKVFKSITFEEADKENLVKMKELVSQVGFDPDYYTGVHANFDLPYDVYRPEHSNPRTEIQIIQKNGQLAELSSLSPIVKALTGSNYGDQRFYFPKEMLTLDSLFSSTKEEFQSYITNEHLTLTKDNSHS

SEQ ID NO: 14329 - protein, 384 aa, Streptococcus agalactiae
ATGAAACTAGAAATTAACAATAACATTCAAATTGACAACGAAACCGAAATGATTCATGAGATTCACGATTGTCAATTTATTGAAAAAGGAAGTTACGTTTATTTGAATTATATTAATGCTGAGGGCGAGAGAGTAGTTATTAAGGCAAATCATGAGGAATTGCTTATGACGAGGTTTTCAAATCCTAAGTCTGTAATGCGTTTTCATCGTGAAACGCCTGCTTTGGTTAATATCCCCACTCCACTTGGTATTCAACATTTGATTACAGAGACAAGTCACTATCAGTTTGATTTGTCACAGCAAAGGTTGCACATCAATTATGTCCTTAAGCAAACGGAGACAGGAGCCTGTTTTGCAAATTATGAATTAAAGATTCAATGGTAT

SEQ ID NO: 14330 - protein, 128 aa, Streptococcus agalactiae
MKLEINNNIQIDNETEMIHEIHDCQFIEKGSYVYLNYINAEGERVVIKANHEELLMTRFSNPKSVMRFHRETPALVNIPTPLGIQHLITETSHYQFDLSQQRLHINYVLKQTETGACFANYELKIQWY

SEQ ID NO: 14331 - protein, 2682 aa, Streptococcus agalactiae
TTGTTAAAAGAACAGAAAAAATCCTTGTTTTACACACAAGGTCAAGAAGAGGTTCTAACGTCTTTAGAATCTTCTCGTGAAGGATTATCAACAACAGAAGCGAAAAATCGCTTAGAGATGTATGGTCGCAATGAGCTTGAAGAAGGGAAAAAACGTAGTCTAATAGCTAAGTTTTTTGACCAATTCAAAGATTTAATGATTATTATCTTACTGGTTGCTGCAGCTCTCTCTGTTATTACGGAAGGTATGCATGGCTTAACGGATGCATTGATTATCTTGGCAGTTGTTATCTTAAATGCAGCTTTTGGTGTTTATCAAGAGGGGCAAGCCGAAGCAGCTATTGAAGCCCTCAAAGATATGTCAAGCCCAATTGCGCGTGTTCGTCGTGATGGTCATACTATTGAGGTGGATTCTAAAGAACTAGTTCCTGGTGACCTCGTTATGTTAGAAGCAGGAGATGTTGTTCCCGCAGATTTACGACTTTTAGAAGCCGCGTCTTTAAAAATTGAAGAAGCAGCTCTAACTGGTGAGTCAGTACCTGTTGAGAAAGACATATCTCAAGTAGTAGCAGAGGATGCAGGTATTGGTGATCGTGTGAATATGGCGTATCAAAATTCAAATGTCACGTATGGTCGAGGATATGGTGTTGTTACTAACACAGGGATGTATACTGAAGTTGGTAAAATTGCTGATATGTTGGCAAATGCTGATGAATCTGAAACACCATTGAAACAAAGTTTAGTTCAACTTTCTAAATTATTGACTTACTTAATCGTGATTATTGCGGTTATTACTTTCTTAGTGGGGATATTTGTCCGTAAAGAAGGTTGGATTGAAGGATTGATGACTTCAGTTGCTTTAGCAGTTGCAGCTATTCCAGAAGGGCTTCCTGCAATTGTTACGATTGTCTTATCAATGGGAACAAAAACTCTTGCTAAACGTAATTCTATCGTTCGTAAACTCCCTGCAGTTGAAACTTTAGGTTCTACAGAAATCATTGCATCGGATAAGACTGGTACTCTGACAATGAATCAAATGACTGTCGAAAAAGTGTATACTAATGGCGTTCTCCAATCATCTTCGGAAGAAATTTCAGTTGATAATAACACTTTACGTATTATGAATTTCTCCAACGATACTAAGATTGATCCTTCAGGAAAATTAATCGGTGACCCAACAGAGACTGCACTGGTACAATTTGGTTTAGATAAGAATTTTGATGTCCGTGAAGTTTTGAAAAATGAACCACGTGTCGCTGAGTTACCATTTGATTCAGATCGTAAGTTAATGTCTACGATTCATAAAGAATCAGATGGTCGCTACTTTATCGCAGTCAAGGGTGCTCCTGATCAATTATTAAAACGAGTTACTAAAATTGAAGATAATGGCTTGGTTCGTGATATCACGGCTGAAGATAAAGAGGCTATCCTAAATACCAATAAAGAACTCGCAAAACAAGCTCTTCGTGTCTTGATGATGGCTTATAAATATGAAACACAAATTCCAACTTTAGAGACTGATATTGTTGAGTCAGATTTAGTATTCTCAGGTTTAGTGGGAATGATTGACCCTGAGCGTCCAGAAGCGGCAGAAGCTGTTCGAGTTGCTAAAGAAGCAGGAATTCGTCCGATTATGATTACCGGGGACCATCAAGATACTGCAGAAGCTATTGCAAAGCGTCTAGGTATTATTGATGCAAATGACACAGAAGATCATGTCTTTACGGGTGCTGAACTTAATGAATTAAGTGACGAAGAGTTTCAAAAAGTATTTAAACAATATTCTGTCTATGCACGTGTTTCTCCTGAACATAAAGTGCGTATCGTGAAAGCTTGGCAAAACGATGGCAAAGTCGTTGCCATGACTGGTGATGGTGTTAATGATGCTCCATCGCTAAAAACAGCAGATATTGGTATTGGTATGGGAATAACTGGTACAGAAGTTTCCAAAGGTGCTTCTGATATGGTTCTTGCTGATGATAATTTTGCAACTATTATTGTGGCTGTTGAGGAAGGACGTAAAGTCTTCTCAAATATCCAAAAATCTATTCAATATCTTCTTTCAGCCAACATGGCAGAGGTATTTACAATTTTCTTTGCAACTTTATTAGGATGGGATGTACTTGCACCGGTTCACCTTCTTTGGATTAACTTGGTAACAGATACTCTTCCAGCTATCGCTCTTGGAGTTGAGCCAGCTGAACCAGGAGTTATGACACATAAACCTCGTGGTCGCCAGTCAAACTTCTTTGATGGTGGTGTTATGGGAGCTATTATCTATCAAGGTATTTTACAAACTATCTTAGTACTTGGTGTCTATGGTTGGGCATTGATGTATCCAGAACATGCTGGTTATCGCATGATTCACGCAGATGCCCTTACGATGGCCTTTGCAACGCTTGGTTTAATCCAATTGGTACATGCATTTAACGTTAAATCAGTTTACCAATCAATCTTTACAGTTGGAGCTTTTAAAAATAGAACCTTTAACTGGTCTATTCCAGTAGCTTTCATTCTTTTGATGGTGACTATTGTTGTTCCTGGATTTAATAAACTTTTCCATGTAACTCATTTAAGTTCAACACAATGGTTAACTGTAGTTATCGGAAGTTTATTGATGGTAGTGTTAACGGAAATTGTTAAATTTATCCAACGTAAATTAGGACAAGACGAAAAAGCTATT

SEQ ID NO: 14332 - protein, 894 aa, Streptococcus agalactiae; identical to SEQ ID NO: 1056

SEQ ID NO: 14333 - protein, 375 aa, Streptococcus agalactiae
ATGCACTTTGTTCCCCATAAACAGTTCACGATGACTCATCCTAGATTCTCTCCTTTTAATGCTTTTTTGGGGAGTCAGGCTTATCATGATTTATTCCAAAAATATCATATCAAAGATGTTGTTTTTGGTCATGCACACCGCTCATTTGGCGACGTTAAAATTGGAGAGACTACTTATCATTCTAGACCACTTGGATATATTAGAGAATGGAATTTAACTATTGACTTTGTCAATCAGAATCCCAATCATAACCCTAATTTAACCTGGAATCTTAGCAAAAGGCATAATGCCGTTAAGCATTTGGATAGTTTTGAAAACTATCCAAAAAAATATTTTGAAGACGAATTACGCAACTCTATGACAATATTTGATTGC

SEQ ID NO: 14334 - protein, 125 aa, Streptococcus agalactiae
MHFVPHKQFTMTHPRFSPFNAFLGSQAYHDLFQKYHIKDVVFGHAHRSFGDVKIGETTYHSRPLGYIREWNLTIDFVNQNPNHNPNLTWNLSKRHNAVKHLDSFENYPKKYFEDELRNSMTIFDC

SEQ ID NO: 14335 - protein, 303 aa, Streptococcus agalactiae
ATGACCAAACTTGCTATCATGAGTGATTTACATATTGACCTCAATCATTTTTCTACCTTTGAGACGAAAACGTTAATTAATTTGCTTAAGAAAGAAAAAATTGATCACCTCCATATCGCTGGGGATATATCTAATCATTTTACTAAAGATACACTTCCCTTTATCAATAACTTAAAAAAGCATATTAAACTTAGCTATAATTTAGGAAACCATGATATGCTTGATTTAACAGAAACAGAAATCCAACGCCTTGACTTTCAAACCTATCGATTTGACAAAAAAATGCTACTAGCTTTTCATGGC

SEQ ID NO: 14336 - protein, 101 aa, Streptococcus agalactiae
MTKLAIMSDLHIDLNHFSTFETKTLINLLKKEKIDHLHIAGDISNHFTKDTLPFINNLKKHIKLSYNLGNHDMLDLTETEIQRLDFQTYRFDKKMLLAFHG

SEQ ID NO: 14337 - protein, 1929 aa, Streptococcus agalactiae
ATGTCTAATTTTTATAAGCTCTTGAAAGAAAAATTTCCTCGAAAAGAAGATATCGTAACAGAAATGATCAATTTAGAAGCTATTTGTCAATTACCCAAAGGGACGGAATATTTTATTAGTGATTTACACGGGGAATACGATGCTGTTGATTATCTCTTACGGACAGGTGCAGGGTCTATTAGAGCTAAATTATTAGACTGCTTTGATTGGCAGAAAATAGTTGCTGTTGATTTAGATGATTTTTGTATACTGCTTTATTACCCAAAGGAAAAATTAGCCTTCGATAAAATGAACTTGTCAGTAAGTGCTTATAAAACGAAGTTATGGGAAATGATTCCGTTACAAATACAAGTTTTAAAATATTTTTCTAGTAAATATACAAAATCTAAAGTACGTAAGCAATTGCCAGGTAAGTTTGCTTACATTATCGAAGAACTTTTAGCTGAGATTGACCGTAACCCAGAGAAGAAAAGCTATTTTGATACTATTATTGAAAAATTATTTGAATTAGACCAAGTAGAAGATTTAATTATAGTATTATCCCAAACAATTCAAGTTTTAATCATTGACCATTTACATGTTGTAGGGGATATTTACGATCGTGGTAGGTATCCTGATCGTATCTTGAATAGGTTAATGGCTTTTCCAAATTTGGATATCCAATGGGGGAACCATGATGTCACTTGGATGGGAGCAGCATCTGGTTCCTACCTTTGTATGGTAAATGTTATCCGTATTGCTGCACGTTATAATAATATTACTTTAATTGAAGACCGATATGGTATCAATTTGCGTCGCTTGGTTGATTACTCACGCCGTTACTATGAACCTCTACCTTCTTTCGCCCCCATATTAGATGGAGAGGAAATGACTCATCCAGATGAATTAGATTTGTTAAATATGATACAACAAGCAACAGCAATTTTACAGTTTAAATTGGAAGCCCAATTGATTGACAGGCGTCCAGAATTTCAAATGCATAATCGACAACTTATTAACCAGGTAAATTATAAAGATTTAAGTATATCTATAAAGGGAGTTGTGCATCAACTTAAAGATTTTAATAGTAGATGCATTGATTCGAAAAATCCCAGTCGATTAACAAGTGAGGAAGAAGAGCTTTTACAACAATTGATGATAGCCTTCCAGACTTCTGAAAGTTTAAAGAAACATATTGATTTCCTATTTGAGAAAGGAAGTATGTATTTAACCTATAATGATAATCTTTTATTCCATGGTTGCATACCAATGCATAGTAATGGTGATTTTAAAAGCTTTAAAATTGCAGGAAAAACTTATGGTGGTAGGGATTTACTGGATTTATTTGAAAGTCAAATACGTCTAGCATATGCTAGACCAGAGAAACATGATGATTTGGCGACAGATATCGTTTGGTATCTTTGGTGTGGTGAAAATTCTTCTCTTTTTGGTAAGAATGCCATGACTACTTTTGAGCGCTATTATGTTTCCGACAAAGTAACTCATCAAGAAAGAAAAAATCCCTACTTTAAACTGAGAGATAAAGATGATATTTGCACTGCCCTTTTACAAGAGTTTGATTTGCCTAAGTTTGGACATATTGTCAATGGTCATACGCCAGTCAAAGAAAAAAATGGTGAGCAACCGATAAAAGCAAATGGTAAGATGTTAGTAATTGATGGTGGCTTTGCCAAAGGTTATCAGAAAAATACAGGTTTAGCTGGCTACACTTTGATTTATAATAGCTATGGGATACAATTAATTTCACACCTTCCTTTTACATCCATTGAGGAAGTTTTAAGTGGAACCAACTATATCATTGATACGAAGCGATTAGTAGAAGAAGCCAAGGATAGGATTCTTGTAAAAGATACAACTATTGGACAAAAGTTAACCAAAGAGATTAAAGACTTAGATCACCTTTATCGTCATTTTCAGGAATATGATGAC

SEQ ID NO: 14338 - protein, 643 aa, Streptococcus agalactiae
MSNFYKLLKEKFPRKEDIVTEMINLEAICQLPKGTEYFISDLHGEYDAVDYLLRTGAGSIRAKLLDCFDWQKIVAVDLDDFCILLYYPKEKLAFDKMNLSVSAYKTKLWEMIPLQIQVLKYFSSKYTKSKVRKQLPGKFAYIIEELLAEIDRNPEKKSYFDTIIEKLFELDQVEDLIIVLSQTIQVLIIDHLHVVGDIYDRGRYPDRILNRLMAFPNLDIQWGNHDVTWMGAASGSYLCMVNVIRIAARYNNITLIEDRYGINLRRLVDYSRRYYEPLPSFAPILDGEEMTHPDELDLLNMIQQATAILQFKLEAQLIDRRPEFQMHNRQLINQVNYKDLSISIKGVVHQLKDFNSRCIDSKNPSRLTSEEEELLQQLMIAFQTSESLKKHIDFLFEKGSMYLTYNDNLLFHGCIPMHSNGDFKSFKIAGKTYGGRDLLDLFESQIRLAYARPEKHDDLATDIVWYLWCGENSSLFGKNAMTTFERYYVSDKVTHQERKNPYFKLRDKDDICTALLQEFDLPKFGHIVNGHTPVKEKNGEQPIKANGKMLVIDGGFAKGYQKNTGLAGYTLIYNSYGIQLISHLPFTSIEEVLSGTNYIIDTKRLVEEAKDRILVKDTTIGQKLTKEIKDLDHLYRHFQEYDD

SEQ ID NO: 14339 - protein, 1122 aa, Streptococcus agalactiae
ATGGACATAAAGGCAGAAATTCAAAAATTAGCAAAAGAAATTGGTATCTCTAAAATTGGTTTTACGACGGCAGATAACTTTGATTATTTGGAAAAGTCATTGCGTGCTTCTGTGGAAGAGGGGCGCAATTCAGGATTTGAACATAAAGTCATAGAGGATCGTATCTACCCTGAAAGGCTTTTAGAATCGGCTAAAACGATTATTTCAATTGGCGTTGCTTATCCTCACAAACTTCCTCAGCAACCTCAAAAAACACCTTATAAACGAGGAAAAATTACACCTAATTCGTGGGGGCTTGATTATCATTATGTGGTCGGCGAAAAGTTAGACAGACTATCAAAAGGCATTGAAGAGCTCTGTCGAGATTTTCCTTTGCAACAAAAAGCAATGGTCGATACTGGAGCTTTAGTTGATACTGCAGTTGCCCAAAGAGCAGGTATTGGTTTTATAGGAAAAAATGGTCTAGTTATTTCTAAAGAATATGGCTCTTATATGTTTTTGGGAGAATTAATTACCAATTTAGAGATCGAGCCAGACAAGCCTGTCGATTATGATTGTGGTGACTGTCGTCGTTGTCTAGATGCCTGTCCAACTTCTTGTTTAATTGGTGATGGCTCAATGAATGCCAAGCGTTGTCTATCATTTCAAACCCAAGATAAGGGAATGATGGACATAGAGTTTCGAAAAAAGATTAAAACAGTTATCTATGGTTGCGATATTTGCCAAATTTGCTGTCCTTATAACAAAGGTATAAATAATCCATTGGCGACAGAGATTGATCCTGAGTTGGCTCAACCAGAATTAATACCATTTTTGAGTTTATCAAATGGACAATTTAAAGAAAAATTTGGTATGATTGCTGGAAGTTGGCGAGGTAAAAATATTTTACAGCGTAATGCCATTATTGCGCTAGCAAATGCTCATGATAAAACCGCAGTGGTTAAATTAATAGAGATTATTGATAAAAATAATAACCCTATTCATACTGCAACAGCTATATGGGCATTGGGAGAAATTGTCAAAAAACCAAACGATGAGATACTGGAGTTTATGAGTAATTTAACCTTAAAAGATGAAGATAGCCGAAAAGAGTTGGAATTAATCCGTCATAAATGGCAATTT

SEQ ID NO: 14340 - protein, 374 aa, Streptococcus agalactiae; identical to SEQ ID NO: 5438

SEQ ID NO: 14341 - protein, 978 aa, Streptococcus agalactiae
ATGACTGAGCCAGACTTTTGGAATGACAATATTGCAGCGCAAAAGACATCTCAAGAACTGAATGAGTTAAAAGGTAAGTATGATACTTTCCATAATATGCAAGAATTATCTGACGAAACAGAACTCTTACTTGAGATGCTTGACGAAGATGATTCTTTGAAAGAAGAATTAGAAGAAAATCTAATGCAGCTAGATAAGATAATGGGTGCTTATGAAATGACGCTTCTCTTATCTGAGCCTTATGACCACAATAATGCTATCTTAGAAATCCATCCTGGTTCAGGAGGAACTGAAGCGCAAGATTGGGGAGATTTACTCTTACGAATGTATACCCGTTTTGGCAATGCTAATGGTTTCAAAGTAGAAGTATTGGATTATCAAGCAGGGGATGAAGCTGGTATTAAATCGGTTACCCTCTCTTTTGAAGGTCCCAATGCTTATGGTTTGTTGAAATCAGAAATGGGAGTTCATCGCCTCGTTCGTATATCACCTTTTGATTCGGCTAAACGTCGTCATACCTCATTTGCTTCAGTTGAAGTGATGCCAGAGTTAGATGATACGATTGAAGTAGAAGTACGTGATGATGACATTAAAATGGATACTTTCCGTTCCGGAGGAGCTGGTGGTCAGAACGTCAATAAAGTATCAACAGGTGTTCGTTTGACGCATATTCCAACTGGAATTGTGGTATCGTCTACCGTTGACCGTACTCAATATGGGAACCGCGATCGCGCTATGAAGATGTTGCAGGCTAAGCTATATCAGTTAGAACAAGAAAAGAAAGCACAAGAAGTAGATGCTCTCAAGGGTGATAAAAAAGAAATCACTTGGGGAAGTCAGATTCGTTCTTATGTTTTCACCCCTTATACGATGGTGAAGGATCATCGTACTAACTTTGAGCTTGCTCAGGTAGATAAGGTTATGGATGGAGAAATCAATGGCTTTATTGATGCCTACCTTAAGTGGCGCATTGAAGAC

SEQ ID NO: 14342 - protein, 326 aa, Streptococcus agalactiae; identical to SEQ ID NO: 1064

SEQ ID NO: 14343 - protein, 690 aa, Streptococcus agalactiae
ATGGCACTAATAGAAATGTCTGGTGTTACTAAAAAGTATCGCCGTTCAACAACTGCCTTGAGAAACTTAAATTTATCAATTCAGCAAGGTGAGTTTGTGTATTTAGTTGGTCCGTCAGGTGCTGGTAAATCTAGCTTGATTCGCCTCCTATACCGTGAAGAAAAATTAAGTTCAGGTAGATTAAAGGTAGGGGAATTCAATCTCAATAAACTCAAACGTCGTCAAATTCCTATTTTACGTCGTAGTATTGGAGTTGTCTTCCAAGATTATAAATTACTACCAACAAAAACAGTTTATGAGAATGTTGCGTTTGCGATGCAAGTTATTGGAGCTAAGCGCCGTCATATTAAAAAACGCGTGCCAGAAGTTTTAGAATTAGTAGGTTTAAAACACAAGATGCGTTCTTTTCCAACACAGTTATCTGGTGGAGAACAACAACGTGTGGCAATTGCACGTGCGATTGTTAATAATCCAAAATTATTAATTGCAGATGAACCTACTGGTAATTTGGATCCAGAAATCGCTTGGGAAATCATGCATCTATTGGAACGTATTAACCTTCAAGGAACGACTGTTTTGATGGCAACACACAATAGTCAAATTGTTAACACACTTCGTCATCGTGTCATTGAGATTGAAGCAGGTAGCGTTATCCGAGATGAAGAGAAGGGAGAATATGGTTATCATGAT

SEQ ID NO: 14344 - protein, 230 aa, Streptococcus agalactiae; identical to SEQ ID NO: 1066

SEQ ID NO: 14345 - protein, 927 aa, Streptococcus agalactiae
ATGGTTATCATGATTAATTTCTTTAGACATTTCTGGGAATCGCTTAAAAACTTAAAACGTAACTTTTGGATGACTTTTGCTTCTGTAACATCAGTTACCATAACATTACTTCTTGTAGGCTTGTTTTCATCAGTTTTACTGAATGTTGAAAAGTTAACAACTGATGTTTCAGGTAATTTTACTATCAGTGCCTTTTTAAATGTTGACTCAACGGATGCTCAAAAACAAGTCAAAGATAAGGACGGAAAGCTAAAAGATAATCCTGATTATCATAAAGTTTATGACAAGATTAAACGTATTTCTGGTGTAGAGAAAGTCACTTATTCAAGTAAAGCTGAACAATTAAAAGAAGTTCAAAAAGAGTATGGTTCAGATGTTATTGATGATACCTACAAAGATGCTTTGTTAGATGTTTACGTAGTTGGGACAAGTTCTGCAAAAGTTTCTAAGAGTGTCAGTGAAGCAATTGGACGCATTGAAGGTGTTGATTATACTAAAGAACCTATTGATTCAACAAAACTATCTAATCTCACAGATAACATCCGTATATGGGGATTTGGTGGTGTTGCCTTATTAATTGTCCTTGCTATCTTTTTGATTTCAAATACTATTCGTATGTCGATTATGTCACGCCGTACAGATATTGAAATCATGAGATTAGTTGGCGCTAAAAATTCTTATATTCGAGGACCGTTCTTTTTTGAAGGTGCTTGGGTAGGGATTTTAGGGGCTATCGTTCCATCGCTGATTTTCTATTTTGGTTATCAATTTGTGTTTAACAAGTTTAATCCAAAATTTGAGACAAGCCATGTTTCATTGTATCCTATGGATATTATGGTTCCAGCAATTATTGGTGGTATGGTGATTATTGGTATTATTATTGGCTCACTTGGATCTGTCCTATCAATGAGACGTTACCTTAAGATT

SEQ ID NO: 14346 - protein, 309 aa, Streptococcus agalactiae; identical to SEQ ID NO: 1068

SEQ ID NO: 14347 - protein, 534 aa, Streptococcus agalactiae; identical to SEQ ID NO: 14133

SEQ ID NO: 14348 - protein, 178 aa, Streptococcus agalactiae; identical to SEQ ID NO: 2808

SEQ ID NO: 14349 - protein, 831 aa, Streptococcus agalactiae
ATGGTCACAGGAGGATTCCGACTAGACCTCTTACTTGAGATAACTAAGATAGCTCGTGCAACTTACTATTATCAACTAAAGAAACTGAATAAACCAGATAAAGACAAAGCAATCAAATCTGACATTCAATCCATTTATGATGAACATAGAGGAAACTATGGCTATCGTCGGATTTATTTAGAACTGCGAAATCGTGGCTTTGTCATCAACCACAAAAGGGTGCAAGGCTTGATGAAAAGTATGGGCTTGACTGCTCGTATTCGTCGTAAGCGCAAGTATGCCTCTTACAAAGGTGAGGTTGGTAAGAAGGCTGATAACCTGATTCAACGCCAGTTTGAGGGGTCGAAGCCCTATGAGAAGTGCTATACCGATGTGACGGAGTTTGCTTTACCTGAAGGGAAACTTTATCTATCGCCTGTTCTTGATGGCTATAACAGTGAGATAATTGATTTTACCCTGTCTCGGTCTCCTGCCTTGAAACAGGTTCAAACCATGCTTGAGAGGGCTTTTCCTGCGGCTTCATACAGCGAAACCATTCTCCACAGCGACCAAGGCTGGCAGTACCAGCACAAGTCCTACCATCAATTTCTGGAGGACAAAGGCATTCGTCCTTCTATGTCACGGAAGGGGAACAGTCCTGACAACGGTATGATGGAATCTTTCTTTGGGATTCTAAAGTCTGAGATGTTCTATGGCTTGGAGAAGTCTTACAAATCACTTGATGACCTTGAGCAAGCTATCACAGATTACATTTTTTACTACAACAACAAGCGAATCAAAGCAAAACTAAAAGGACTTAGTCCTGTGCAATACAGAACTAAATCCTTCACT

SEQ ID NO: 14350 - protein, 277 aa, Streptococcus agalactiae; identical to SEQ ID NO: 14132

SEQ ID NO: 14351 - protein, 735 aa, Streptococcus agalactiae
ATGAACATAAAACGTCACTCTATTTTTCTTTGGTTAACAACAAGTATCCTTGCTATTTTAATGGCCGTCGGGATGACCATTTACTTCAATACTTACCAAGCCTCCCCATTAGCTAGGAGAATTGCTAAAACCGCTACAAACCATAAGAACTACCTTCTTTTTAGAAGCAAGGGTAAGGTAAAAGCAAATATTATTTTCTATCAAGGGGCTCTTGTGGAAGAAGAAGCTTATTCTCAACTTGCTAGAGATTTAGCTGATAAAGGGTATAATACCTATATTTTGAAGACACCTTTAAATTTGCCAGTTTTATCACCTTATAAAGCTAAAACAATTATTAATCAGAACCACTTAACTAATGTTTACCTTGCTGGACATTCTTTAGGAGGAGTTGTTGCTAGCCAAAATGCCAAAGTAGCCCCTGTTAGAGGGCTCATATTATTAGCTTCCTACCCTTCAAGTAAATCCGACCTATCTCATAAAAAGTTAAGAGTACTCTCCATTACAGCAAGTAACGATCATATTTTAAACTGGGAAAAATATGAGGAAGCTAAAAAACGCCTCCCAAATTCAAGTACTTTTCGAACTATTGTCGGGGGAAACCATAGCCGATTTGGTATACGGACATCAAAAGGGGATGGTAAAGCTACCCTTTCTCACAAATCATCTGAAAAACATTGGCTACGTTTATTTCAAATTTTATCCACTAGCATGATATCTACAATTAATAAAAAGAGA

SEQ ID NO: 14352 - protein, 246 aa, Streptococcus agalactiae
  VARIANT 210: Xaa = Any Amino Acid
MNIKRHSIFLWLTTSILAILMAVGMTIYFNTYQASPLARRIAKTATNHKNYLLFRSKGKVKANIIFYQGALVEEEAYSQLARDLADKGYNTYILKTPLNLPVLSPYKAKTIINQNHLTNVYLAGHSLGGVVASQNAKVAPVRGLILLASYPSSKSDLSHKKLRVLSITASNDHILNWEKYEEAKKRLPNSSTFRTIVGGNHSRFGTTDIXKGMVKLPFLTNHLKNNWLRLFQILSTSMISTINKKR

SEQ ID NO: 14353 - protein, 696 aa, Streptococcus agalactiae
TTGCCATTTATTTTCCGCCACTCTTTTTTTAACAAAGTCTTGATTTTTTGGTACACTATCATTATGAAAATCTATAAAACAATAAACCACATTGCTGGTGAAAATACTTATTACCTCGTTAATGATCAAGCTGTTATCCTCATTGATCCAGGGAGCAATGGCCAAGAAATCATTGCTAAAATTAAATCCTTTGAAAAACCTTTAGTGGCTATCCTCTTAACTCATACTCACTATGATCATATTTTTAGTTTAGATTTGGTCAGAGATACTTTTGATAATCCACCTGTTTATGTTTCAGAAAAAGAAGCCGCTTGGCTATCTTCCCCAGATGATAATTTATCTGGGTTAGGCCGTCATGATGATATCATTAATGTTATAGCAAGACCGGCAGAGAACTTTTTTAAATTAAAGCAACCCTATCAACTAAATGGTTTTGAATTCACAGTTTTACCAACACCTGGTCATTCTTGGGGAGGAGTCTCATTTGTTTTCCACTCAGATGAATTAGTCGTTACTGGCGATGCTCTATTTCGTGAAACTATCGGTCGTACTGACTTACCTACCAGTAACTTTGAGGACCTCATTACTGGTATTCGCCAAGAACTATTCACCTTACCTAGTCATTATAGTGTTCACCCAGGCCATGGCATGAATACAACTATTGGCCACGAAAAAAACTTTAATCCTTTCTTCCAA

SEQ ID NO: 14354 - protein, 232 aa, Streptococcus agalactiae; identical to SEQ ID NO: 1072

SEQ ID NO: 14355 - protein, 109 aa, Streptococcus agalactiae
TTGACTAAAGAATATGAGGTGGAAGATATGTCAAAAGTTGCTATTGTTACTGGTGCTGGTCAAGGAATTGGATTTGCTATTGCGAAACGTCTTCATGCAGACGGCTTAA

SEQ ID NO: 14356 - protein, 37 aa, Streptococcus agalactiae
MTKEYEVEDMSKVAIVTGAGQGIGFAIAKRLHADGFK

SEQ ID NO: 14357 - protein, 531 aa, Streptococcus agalactiae
TTGAATGTTGTTGTTAACAATGCAGGTATTGCCCCAACAACCCCTCTTGACACTATTACTGAAGAGCAGTTTGAAAAGGCTTTTGCAATCAATGTCGGAGGAACTATTTGGGGAAGTCAAGCAGCTCAAAAACATTTTAGAGAATTAGGTCATGGCGGAAAAATTATAAATGCAACTTCACAAGCAGGATGTGAAGGGAATCCTAATTTGACTGTTTATGGTGGTACAAAATTTGCAGTTCGTGGTATTACACAGACTTTGGCAAAGGATTTGGCATCAGAAGGAATCACAGTCAATGCCTACGCACCAGGTATTGTTAAAACACCTATGATGTTTGATATTGCCCATGAAGTTGGTAAGAATGCAGGCAAAGATGATGAATGGGGTATGGAGCAGTTTGCAAAAGATATCACTTTGAAACGCTTGTCTGAACCAGAAGATGTTGCTAATGCAGTAGGCTTCTTAGCGGGAGATGATTCAAATTATATCACTGGACAAACAATAGTTGTCGATGGTGGTATGGTATTCCAT

SEQ ID NO: 14358 - protein, 177 aa, Streptococcus agalactiae
MNVVVNNAGIAPTTPLDTITEEQFEKAFAINVGGTIWGSQAAQKHFRELGHGGKIINATSQAGCEGNPNLTVYGGTKFAVRGITQTLAKDLASEGITVNAYAPGIVKTPMMFDIAHEVGKNAGKDDEWGMEQFAKDITLKRLSEPEDVANAVGFLAGDDSNYITGQTIVVDGGMVFH

SEQ ID NO: 14359 - protein, 246 aa, Streptococcus agalactiae
GTGACCATCCTAGCAGCCTACGCACCAGGTATTGTTAAAACACCTATGATGTTTGATATTGCCCATGAAGTTGGTAAGAATGCAGGCAAAGATGATGAATGGGGTATGGAGCAGTTTGCAAAAGATATCACTTTGAAACGTTGCTGACCAGAAGATGTTGCTAATGCAGTAGGCTTCTTAGCGGGAGATGATTCAAATTATATCACTGGACAAACAATAGTTGTCGATGGTGGTATGGTATTCCAT

SEQ ID NO: 14360 - protein, 83 aa, Streptococcus agalactiae
  VARIANT 50: Xaa = Any Amino Acid
MTILAAYAPGIVKTPMMFDIAHEVGKNAGKDDEWGMEQFAKDITLKRLSXPEDVANAVGFLAGDDSNYITGQTIVVDGGMVFH

SEQ ID NO: 14361 - protein, 2505 aa, Streptococcus agalactiae
ATGTTTTGTTTTATAGATATAGCGTGCTATAATAGACTTACTATGACCCAGAAAAAACTTAGAAAATATGCAGTAGTTGACTTGGAGGCTACTGGAGCAGGTCCCAATGCTTCTATTATTCAGGTTGGGATTGTTATTATCCAAGGAAATAAAATTATTGATAGTTATGAAACAGATGTTAATCCTCATGAATCTTTGGATGAGCATATTGTTCATTTGACAGGTATTACGGATAAGCAGTTGGTTAAAGCTCCGGATTTTGGTCAAGTGGCGCATCACATTTATCAATTGATTGAAGATTGTATTTTTGTTGCCCACAATGTAAAGTTCGATGCAAATTTATTGGCTGAGCAACTATTTTTAGAAGGCTTCGAGTTACGTACACCAAGGATAGATACAGTAGAGTTATCACAAGTGTTTTATCCCTGTTTAGAAAAATATTCTTTAGGGGCATTAGCAGAAAGCTTAAATATTGAATTAACAGATGCGCACACTGCTATTGCAGATGCAAGAGCTACAGCACAGTTATTCATTAAGTTAAAAGCTAAAATTAGTAGTTTACCTAAAGAAGTGTTGGAGACCATTTTAACATTTGCTGATAATCTTTTGTTCGAATCCTATTTATTGATTGAAGAAGCTTATCAAGAAGCTGATTTCGTTAATCCTAAAGAATATTATTTCTGGCAAGGATTGGTCTTAAAAAAAGAAAAAGCTGTTGGAAAGCCTAAGAAATTATCTAGTGATTTTCAAGTTAACATGGCTTTGTTAGGTATGGATGCTCGCCCTAAGCAAATTGTTTTTGCTGACTTGGTTAAAGCGCATTTTAATGATCAAACAACAACGTTTTTAGAAGCTCAATCAGGACTTGGTAAAACATATGGATATCTCTTGCCTTTATTGGATCAGTCTCAAAAACAACAAATAATAGTATCTGTTCCAACAAAGATTTTGCAAGATCAAATAATGGCTAAAGAAATAAAGCACATTCAAGAACTTTTTCATATTCCCTGTCACAGTATCAAAGGACCGAGAAATTACTTGAAGTTAGATGCGTTTTATAAGAGCCTCCAAGTGCAGGATCGAAATCGATTGATAAATCGTTTTAAAATGCAACTGCTAGTGTGGTTGACGGAAACGACTACAGGTGATTTGGATGAAATTAAACAAAAACAACGATTAGAATCTTACTTTGACCAGCTAAAACACGATGGAGAAGTGACTCAATCATCACTTTTTTATGATCTGGATTTTTGGAAACGCAGTTATGATAAAGTTGCACAAAGTCAACTTGTTATTATTAATCATGCTTATTTTCTTGAGCGTGTTCAGGATGACAAAGATTTTGCAAAGGGGAAGGTTTTAGTTTTTGATGAAGCTCAGAAACTTGTTTTGGGACTGGAAAATTTTTCTCGTGGGCAACTTGATATTAGTCACCAATTGCAGGTTATTCAAAAAATAATTGATAGTCCTATTCCGTTATTACAAAAGCGCCTTCTGGAAAGTATTTCTTATGAGTTAAGTCATGCAGCAGAACTTTTTTATCGTCATAATTCTTTTGAATTTTCAGAGACCTGGTTGAAACGTCTAAAAAATAGTATAAACGCTTTAGAAGTAGTAGGATTAGATGATTTACAAACTTTTTTCACAGCTACTTATACTAACTATTGGTTTGAAACTGATAAAGTCAATGAGAAGCGTTTAACCATTTTACGTGGGGCGAGAGAAGATTTTCTTAAATTTTCAGAGTTCCTCCCTCCCACAAAAAAGACCTATATGATATCAGCTACTTTACAAATCAGTCCCAAAGTCTACTTGTCAGATCTTTTAGGAGGATTTTCAAGTATAAGCACAGAGAAGATAGCGCATGAGAAAAATGCCAATCAGAAAGTATGGATTGATACCTCTATGCCTAATATACTTGATTTATCACCGGAACAGTATGCTTACGAAATAGCCAAGCGTTTACAAGATATAATGACGTTAAAGCAGCCTACCTTAGTCTTATTAACTTCTAAACAGACAATGTTTATGGTATCTGATTATTTGGATAAGTGGGAGATAAAACATCTTACTCAAGATAAAAATGGCTTAGCTTATAACGTTAAAAAACGTTTTGATCGTGGAGAAAGCAATCTTCTTTTAGGTACAGGATCTTTTTGGGAAGGTGTTGACTTTGTACATCGTGATCGTCTTATTGAAGTTATCACGCGATTGCCTTTTGATAATCCCAAAGACTATTTTATCCAGAAACTATCGCAGAGTTTAACAAAAGAGGGGAAAAACTTCTTTTATGACTATTCTTTACCAATGACTGTCTTAAAATTAAAACAGGCCTTGGGACGTACTACAAGGAGAGAAGAACAAAAGTCAGCGGTAATTATTTTGGATAGCAGATTGGTTATTAAATCTTATGGACAAACCATCATGCATTCTCTTGGTAGAGATTTTGAAATTTCTAAGGAAAAAATTAACAAGGTCTTGACTGAAATGGCTAAATTTTTGATA

SEQ ID NO: 14362 - protein, 835 aa, Streptococcus agalactiae
MFCFIDIACYNRLTMTQKKLRKYAVVDLEATGAGPNASIIQVGIVIIQGNKIIDSYETDVNPHESLDEHIVHLTGITDKQLVKAPDFGQVAHHIYQLIEDCIFVAHNVKFDANLLAEQLFLEGFELRTPRIDTVELSQVFYPCLEKYSLGALAESLNIELTDAHTAIADARATAQLFIKLKAKISSLPKEVLETILTFADNLLFESYLLIEEAYQEADFVNPKEYYFWQGLVLKKEKAVGKPKKLSSDFQVNMALLGMDARPKQIVFADLVKAHFNDQTTTFLEAQSGLGKTYGYLLPLLDQSQKQQIIVSVPTKILQDQIMAKEIKHIQELFHIPCHSIKGPRNYLKLDAFYKSLQVQDRNRLINRFKMQLLVWLTETTTGDLDEIKQKQRLESYFDQLKHDGEVTQSSLFYDLDFWKRSYDKVAQSQLVIINHAYFLERVQDDKDFAKGKVLVFDEAQKLVLGLENFSRGQLDISHQLQVIQKIIDSPIPLLQKRLLESISYELSHAAELFYRHNSFEFSETWLKRLKNSINALEVVGLDDLQTFFTATYTNYWFETDKVNEKRLTILRGAREDFLKFSEFLPPTKKTYMISATLQISPKVYLSDLLGGFSSISTEKIAHEKNANQKVWIDTSMPNILDLSPEQYAYEIAKRLQDIMTLKQPTLVLLTSKQTMFMVSDYLDKWEIKHLTQDKNGLAYNVKKRFDRGESNLLLGTGSFWEGVDFVHRDRLIEVITRLPFDNPKDYFIQKLSQSLTKEGKNFFYDYSLPMTVLKLKQALGRTTRREEQKSAVIILDSRLVIKSYGQTIMHSLGRDFEISKEKINKVLTEMAKFLI

SEQ ID NO: 14363 - protein, 1191 aa, Streptococcus agalactiae
ATGACCTATTTGTCAGAACGTGTACTCAATATGGAAGAGAGTGTTACTTTAGCTGCGGGAGCTAAAGCAAGAGAACTCAGAGTACAAGGAAGAGATATTCTTAGTTTAACTTTAGGGGAGCCTGATTTCGCTACTCCTAAAAACATTCAGCAAGCGGCTATTGAGGCTATAACAGATGGACGTGCAAGTTTTTACACACCATCAAGTGGTTTGCCGGAGTTGAAGTCAGCAATTAATGCGTATTTTGAACGTTTTTATGGCTACTCCCTTAAACCTAATCAGGTGGTTGTGGGAACTGGTGCTAAGTTTATCCTTTATACTTTCTTTATGACAGTACTGAATCCCGGTGATGAAGTAATTATTCCGACTCCTTATTGGGTATCTTATGCTGATCAGATTAAGATGGCTGAAGGTAAGCCAGTTTTTGTCACAGCAAAAGAAGTTAATCACTTCAAAGTAACTGTGGAACAGTTAGAAGCTGTTAGGACTGATAAGACAAAAGTCATACTTCTTAATAGTCCATCAAATCCTACAGGTATGATTTATAAAGCTGAGGAGTTGGAGGCTATTGGAAATTGGGCAGTCGAACATGATATCCTAATTTTAGCAGATGATATTTACGGTCGATTGGTTTACAATGGCAATATTTTTACCCCTATTTCAAGCCTTTCAGAGTCCATTCGAAACCAAACGATAGTCATAAATGGAGTTTCTAAGACTTATGCGATGACAGGTTGGCGTGTTGGTTTTGCAGTGGGTAATCATGATATTATAGCGGCAATGTCTAAAGTAGTCAGTCAAACAACTTCTAACCTTACGGCTGTCTCACAGTATGCTACTATTGAGGCTTTAAATGGTTCTCAAGAGTCATTTGAAAAAATGAGGCTAGCATTTGAAGAACGCCTTAATATCATTTATCCATTGTTGTGTCAGGTCCCTGGGTTTGAGGTTGTTAAACCACAAGGTGCTTTTTATCTTTTCCCAAATGTTACAAAAGCAATGGAAATGAAAGGATATACGGATGTTACAGCATTCACGGATGCCATTCTTGAAGAAGTTGGACTTGCTTTAGTAACGGGTGCTGGTTTTGGAGCGCCGGAAAATGTTCGTCTGAGTTATGCTACAGATCTTGGAACCCTTAAAGAAGCTGTTCGTAGACTGCATGTCTTTATGGGAAGTAATGAAATTAAT

SEQ ID NO: 14364 - protein, 397 aa, Streptococcus agalactiae
MTYLSERVLNMEESVTLAAGAKARELRVQGRDILSLTLGEPDFATPKNIQQAAIEAITDGRASFYTPSSGLPELKSAINAYFERFYGYSLKPNQVVVGTGAKFILYTFFMTVLNPGDEVIIPTPYWVSYADQIKMAEGKPVFVTAKEVNHFKVTVEQLEAVRTDKTKVILLNSPSNPTGMIYKAEELEAIGNWAVEHDILILADDIYGRLVYNGNIFTPISSLSESIRNQTIVINGVSKTYAMTGWRVGFAVGNHDIIAAMSKVVSQTTSNLTAVSQYATIEALNGSQESFEKMRLAFEERLNIIYPLLCQVPGFEVVKPQGAFYLFPNVTKAMEMKGYTDVTAFTDAILEEVGLALVTGAGFGAPENVRLSYATDLGTLKEAVRRLHVFMGSNEIN

SEQ ID NO: 14365 - protein, 1344 aa, Streptococcus agalactiae
ATGTCAAAAAAACTTATTTCAATTGTTGATGTTAAAGATTATGTTGGTCAAGAAGTTACTATTGGTGCTTGGGTTGCTAACAAATCAGGTAAAGGTAAGATTGCGTTTGTACAGTTGCGCGATGGTTCTGCCTTTTTCCAAGGTGTCGCTTTTAAACCAAACTTCATTGAAAAATATGGTGAAGAATCAGGTCTTGAAAAATTTGACGTTATTAAACGTCTCAACCAAGAAACATCTGTTTATGTAACAGGGATTGTTAAAGAGGATGAACGTTCAAAATTTGGCTATGAGCTTGATATTACTGACCTTGAAGTCATTGGAGAGTCACATGAATATCCTATAACTCCTAAAGAGCATGGGACAGACTTCTTGATGGACAACCGTCATCTTTGGTTGCGTTCTCGTAAACAAATGGCTGTTATGCAAATTCGTAACGCTATTATTTATTCAACTTATGAATTCTTTGACCAAAATGGTTTTATCAAATTTGATAGCCCAATTTTATCAGAAAATGCAGCAGAAGATTCAACAGAGTTATTCGAAACAGACTATTTTGGGAAACCAGCATTTCTTAGCCAATCTGGTCAATTATACCTTGAAGCTGGAGCAATGGCTCTAGGCCGAGTTTTCGACTTTGGTCCAGTCTTTCGTGCTGAAAAATCTAAAACACGTCGCCATTTAACAGAATTTTGGATGATGGATGCCGAGTATTCTTTCTTGTCACATGAGGAATCACTTGACCTTCAAGAAGCTTATGTTAAAGCATTGATCCAAGGCGTTCTAGATCGTGCGCCTCAAGCACTTGATATTTTAGAACGTGATGTTGAGGCTCTCAAACGTTATATCGCAGAGCCATTCAAGCGTGTTTCTTATGATGATGCTATTACACTTCTTCAAGAGCATGAAGCAGATGAAGATACAGATTATGAACATTTAGAGCATGGTGATGACTTTGGTTCACCACATGAAACTTGGATTTCTAATTACTTTGGAGTGCCGACATTTGTAGTGAATTACCCAGCAAGCTTTAAAGCATTTTATATGAAACCAGTTCCTGGAAATCCAGAACGCGTTCTTTGTGCTGATCTTTTAGCTCCAGAAGGTTATGGAGAGATCATTGGCGGCTCAATGCGTGAAGACAACTACGATGCTCTTGTGGCTAAAATGGATGAACTAGGTATGGATAAATCAGAATACGACTTTTACCTTGACCTTCGTAAATACGGCTCTGTTCCTCATGGCGGTTTTGGTATAGGTATTGAACGTATGGTAACTTTTGTTGCTGGTACCAAACATATTCGCGAAGCTATTCCATTCCCACGTATGTTACATCGTATCAAACCA

SEQ ID NO: 14366 - protein, 448 aa, Streptococcus agalactiae
MSKKLISIVDVKDYVGQEVTIGAWVANKSGKGKIAFVQLRDGSAFFQGVAFKPNFIEKYGEESGLEKFDVIKRLNQETSVYVTGIVKEDERSKFGYELDITDLEVIGESHEYPITPKEHGTDFLMDNRHLWLRSRKQMAVMQIRNAIIYSTYEFFDQNGFIKFDSPILSENAAEDSTELFETDYFGKPAFLSQSGQLYLEAGAMALGRVFDFGPVFRAEKSKTRRHLTEFWMMDAEYSFLSHEESLDLQEAYVKALIQGVLDRAPQALDILERDVEALKRYIAEPFKRVSYDDAITLLQEHEADEDTDYEHLEHGDDFGSPHETWISNYFGVPTFVVNYPASFKAFYMKPVPGNPERVLCADLLAPEGYGEIIGGSMREDNYDALVAKMDELGMDKSEYDFYLDLRKYGSVPHGGFGIGIERMVTFVAGTKHIREAIPFPRMLHRIKP

SEQ ID NO: 14367 - protein, 555 aa, Streptococcus agalactiae
ATGACAAAATCACCTGCTCGTTTAATTTCATTTATCTCAATCGCTATCGCCATCAACCTTATTGGGGCTAATTTAGCTCTATTTTTACGCCTACCTATCTATCTAGATACTATAGGTACATTGCTAATAGCAGTTATCCTGGGACCATGGTACGCTGCCAGCACTGCTTTTCTCAGTGCACTCATCAATTGGATGACTACTGATATTTTTTCACTTTATTATTCACCAGTCGCCATCGTAGTTGCTATCATTACTGGTATCTTGATTAAAAGGAATTGTAAACCCTCTAGCCTATTGTGGAAATCACTGATTATTTCTTTACCAGGAACTATTATTGCTTCAGTTATAACAGTTATCCTTTTTAAAGGAATTACCTCTAGTGGCTCAAGTATTATAGCACAATTCTTACATGGAATTGGATTAGACATGACAAGTAGTTTGATACTTGTTCAAGTTGGAACAGATTATATTGATCGACTAATCAGTCTTATCCTTGTCTTTTCGACAATCACATTGTTAAAAAAACATAGTCCCAATTTAATTAACCAACGATTC

SEQ ID NO: 14368 - protein, 185 aa, Streptococcus agalactiae
MTKSPARLISFISIAIAINLIGANLALFLRLPIYLDTIGTLLIAVILGPWYAASTAFLSALINWMTTDIFSLYYSPVAIVVAIITGILIKRNCKPSSLLWKSLIISLPGTIIASVITVILFKGITSSGSSIIAQFLHGIGLDMTSSLILVQVGTDYIDRLISLILVFSTITLLKKHSPNLINQRF

SEQ ID NO: 14369 - protein, 981 aa, Streptococcus agalactiae
ATGAACAAAGAAAAAATTATTATCGATTGCGATCCCGGTATTGATGATACCTTAGCACTGATGTATGCTATTCAGCATCCTAAGTTAGAAGTTGTTGCTATTACTATAACAGCAGGCAATTCGCCTGTTGAGCTAGGACTAAAGAATACCTTTGTAACGCTTGAATTACTAAATCGTCGCGACATTTCAGTTTATGTTGGTAATAACTTGCCTTTACAACGTGAATTTGTATCTGCTCAAGATACTCATGGAATGGATGGCCTTGGAGAGAATAACTTTACATTGGCGCAACCAATTATCTTTCAAGAAGAATCAGCAGATTGTTTTTTAGCAAACTATTTTGAACACAAAAATGATACTTCTATTATAGCTCTCGGACCTCTGACCAATATCGCTCGAGCCTTACAAACTAATCCCAAATTAGGCAAACATTGCAAGCGATTTGTTAGCATGGGAGGAAATTTTAAATCACATGGCAATTGTTCTCCAGTTGCTGAATACAACTATTGGTATGATCCCCATGCTGCACAATATGTATTTGAAAACCTTGACAAAAAAATAGAGATGGTTGGACTAGACATCACACGTCATATTGTATTAACCCCCAATCATTTATCTTATATGGAGCGTATTAATCCAGACGTATCAACTTTTATCCAAAAAATCACAAAGTTCTACTTCGATTTTCACTGGCAATATGAGCATATTATTGGATGTGTGATAAATGATCCTTTAGCTATTGCTTACTTTGTTAATGAAAATATCGCTACTGGTTTTGATAGCTATACCGATGTTGCTTGTCACGGAATCGCCATGGGACAAACAATTGTAGATCAGTATCATTTTTATAAAAAAGATGCTAACAGTAAGATTTTAACCTCAGTCAATACTAATTTATTTTGGAATGATTTTATGACCGTCCTATTACATGCACAAAATTCAGTCATCATTGAAGACTTAGAAATGTTAGGACTTAACAAA

SEQ ID NO: 14370 - protein, 327 aa, Streptococcus agalactiae
MNKEKIIIDCDPGIDDTLALMYAIQHPKLEVVAITITAGNSPVELGLKNTFVTLELLNRRDISVYVGNNLPLQREFVSAQDTHGMDGLGENNFTLAQPIIFQEESADCFLANYFEHKNDTSIIALGPLTNIARALQTNPKLGKHCKRFVSMGGNFKSHGNCSPVAEYNYWYDPHAAQYVFENLDKKIEMVGLDITRHIVLTPNHLSYMERINPDVSTFIQKITKFYFDFHWQYEHIIGCVINDPLAIAYFVNENIATGFDSYTDVACHGIAMGQTIVDQYHFYKKDANSKILTSVNTNLFWNDFMTVLLHAQNSVIIEDLEMLGLNK

SEQ ID NO: 14371 - protein, 411 aa, Streptococcus agalactiae
ATGCTTTATGAAGTAACCTCATCAAACACTCAAGGCGTTGATGGAAAAGTTTATCTCTCCAATGGAAAAATTGTGGAGACCAATCACCCTTTAAATCATTTACCAGGATTTAATCCTGAAGAATTAATTGCTTTAGCATGGTCAACATGTTTAAATGCAACTATAAAAGCTATTTTAGAACAAAAAGGATTCAAAGACCTAAAATCTCGTGTTGATGTTAATTGCCAGCTCATGAAGGAAAAGCAAGTAGGTAAGGGATTTTATTTCCAAGTTAACGCTGTTGCTAGTATTGAAAAACTGTCATTATCTGATAGTAAGCTAATCGTTAACAAAGCACACAGCAGATGTCCGATTTCAAAATTAATTTCAAATGCTAAAACAATCAATCTAGACACTGTTAAATGGTCAGTT

SEQ ID NO: 14372 - protein, 137 aa, Streptococcus agalactiae
MLYEVTSSNTQGVDGKVYLSNGKIVETNHPLNHLPGFNPEELIALAWSTCLNATIKAILEQKGFKDLKSRVDVNCQLMKEKQVGKGFYFQVNAVASIEKLSLSDSKLIVNKAHSRCPISKLISNAKTINLDTVKWSV

SEQ ID NO: 14373 - protein, 888 aa, Streptococcus agalactiae
ATGTCAGACGAACAAATCAAACTTGTGATTGTAACAGGTATGAGTGGGGCAGGAAAGACAGTGGCTATTCAGTCATTTGAAGATTTAGGATATTTTACAATAGATAATATGCCGCCTACTCTAGTGCCTAAGTTTTTAGAATTAGCAGCACAATCAGGAGATACAAGCAAGATTGCTATGGTAGTTGACATGCGTAGTCGTCTTTTCTTTAGAGAAATTAACTCTATTTTGGATAGCCTTGAAATTAATGATAATATTAACTTTAAGATTCTATTTTTAGATGCTACTGACACCGAGCTAGTGTCACGATATAAAGAGACACGTCGTAGCCACCCTCTTGCTGCCGACGGCAGAGTGTTAGATGGTATTTCTCTAGAGAGAGAACTATTAGCACCGCTTAAAAGTATGAGTCAGAACGTTGTGGACACTAGTGAATTAACACCAAGACAACTACGTAAGGTCATTTCTGAAGAATTCTCAAATCAAGATAGTCAAAGTTCTTTTCGTATTGAAGTTATGAGTTTTGGGTTTAAATATGGTATACCTTTGGATGCGGATTTAGTATTCGATGTGCGTTTTTTACCAAATCCATACTATAAACCAGAATTAAGAGATAAGACAGGTTTAGATACTGAGGTTTATGACTATGTCATGAGTTTTGATGAATCAGACGATTTTTATGACCATCTTCTTGCCTTAATAAAGCCAATCTTACCAGGCTATCAAAAAGAAGGGAAATCTGTTTTGACTGTGGCAATCGGATGTACAGGTGGGCAACATCGTAGCACCGCTTTTGCTCATAGATTATCAGAAGATTTAAAAGCAGATTGGACAGTGAATGAAAGCCATCGTGATAAAAATAAGCGTAAGGAGACGGTGAATCGTTCA

SEQ ID NO: 14374 - protein, 296 aa, Streptococcus agalactiae
MSDEQIKLVIVTGMSGAGKTVAIQSFEDLGYFTIDNMPPTLVPKFLELAAQSGDTSKIAMVVDMRSRLFFREINSILDSLEINDNINFKILFLDATDTELVSRYKETRRSHPLAADGRVLDGISLERELLAPLKSMSQNVVDTSELTPRQLRKVISEEFSNQDSQSSFRIEVMSFGFKYGIPLDADLVFDVRFLPNPYYKPELRDKTGLDTEVYDYVMSFDESDDFYDHLLALIKPILPGYQKEGKSVLTVAIGCTGGQHRSTAFAHRLSEDLKADWTVNESHRDKNKRKETVNRS

SEQ ID NO: 14375 - protein, 972 aa, Streptococcus agalactiae
ATGAGAAAACCTAAAATAACCGTTATTGGCGGAGGAACGGGAATTCCAGTTATTTTGAAAAGTCTTCGCTTAGAAGATGTTGAGATTACAGCGGTTGTCACGGTGGCAGATGATGGTGGTTCGTCAGGTGAGTTGCGCTCAGTTATGCAACTAACACCGCCAGGAGATTTAAGAAATGTTTTGGTTGCCTTGAGTGATATGCCGAAGTTTTACGAACAAATTTTCCAATATCGTTTTGCAGAAGGTGATGGGGATTTTGCAGGTCATCCTTTAGGAAATCTTATTATTGCTGGTGTTGCTGAAATGCAAGGTTCAACTTATAACGCTATGCAGAGTTTAACACAGTTCTTTCATACAACAGGAAAGATATATCCATCTAGTGAACATCCGCTCACTCTGCATGCTGTTTTTAAAGATGGCCATGAAGTGGTTGGAGAGAGTCAAATAGCCGATTATAAAGGCATGATTGACCATGTGTATGTCACTAATACTTATAATGAAGAGACTCCTACGGCCAGCCGCAAAGTTGTTGATGCAATTTTAGAAAGTGATATGATTGTGTTGGGTCCAGGGTCACTTTTCACCTCTATTTTACCTAACCTAGTTATTCCAGAGATTAAACAAGCTCTTTTAGAAACTCGGGCAGAGGTAGCTTATGTATGCAATATTATGACACAACGTGGTGAAACTGAGCATTTTACAGACGCAGACCACGTTGAAGTATTGAAACGTCATTTAGGACAAGATGCTATCGATACAGTTTTGGTTAATATTGAAAAAGTGCCAGAGTCTTATATGGAAAACAATCATTTTGATGAGTATTTGGTACAGGTTGAACATGATTTTTCAGGGCTTAGAAAACATGCCAGACGTGTCATCTCGTCTAACTTTTTAAAATTAGAAAAAGGTGGAGCCTTCCATCATGGTGACTTCGTTGTTGAGGAACTAATGAATTTAGTAGGAACACATTTA

SEQ ID NO: 14376 - protein, 324 aa, Streptococcus agalactiae; identical to SEQ ID NO: 1098

SEQ ID NO: 14377 - protein, 909 aa, Streptococcus agalactiae; identical to SEQ ID NO: 5467

SEQ ID NO: 14378 - protein, 303 aa, Streptococcus agalactiae; identical to SEQ ID NO: 1100

SEQ ID NO: 14379 - protein, 1395 aa, Streptococcus agalactiae
ATGGCTTGTACAACAATATTGGTTGGTAAAAAGGCTTCTTATGATGGTTCGACTATGATCGCTAGAACGGAAGACTCTGTTAATGGCGATTTCACACCCAAAAAATTAAAGGTAATGACATCTAAAGATCAACCGCGTCATTACAAATCAGTTTTATCAAATTTTGAAGTAGATTTACCAGATAACCCACTTCCTTATACTTCAGTACCGGACGCATTGGGAAAAGATGGTATATGGGGTGAAGCCGGTATTAACAGTAAAAATGTAGCGATGAGTGCTACAGAAACTATTACAACGAATTCCCGCGTTTTGGGTGCAGATCCTTTGGTTTCAGATGGTATAGGGGAAGAGGATATACTCACTTTAGTGCTTCCCTATATTCAGTCAGCGCGAGAAGGTGTGGAGCGTTTAGGTGCTATTTTGGAAAAATATGGAACCTATGAATCAAATGGTATTGCTTTTTCAGATACCGAAGAAATATGGTGGTTAGAAACAATTGGTGGGCATCATTGGATTGCTCGTCGCGTACCTGATGATGTTTATGTTACTAATCCTAACCAACTAGGAATTGATCATTTTGAATTTAATAACTGTGATGACTACATGTGCTCTAGTGATTTGAAAGAGTTTATCGAACAATACCATTTAGATTTGACCTATTCTAATGAGCATTTCAATCCTCGATATGCTTTTGGTAGCCAACGTGATAAAGATCGTCATTACAACACACCAAGAAGTTGGGCAATGCAGCGTTTTTTAAATCCTGAAATTGAACAGGATCCACGTAGTTTGTTTATTCCCTGGTGTCAAAAGCCTTACCGAAAAATTACTGTTGAGGATATTAAATATGTGTTGAGTGATCATTATCAAGACAGTGTGTATGACCCATATGGACCAGAAGGGGATGCGGTAAGTAGGAGAGCTTTTCGTTCAGTTGGTATCAACCGAACTAGTCAAACGTCTATTCTACAATTGCGACCAAATAAATCACTTGAAACGACAGGTGTTCAATGGTTATCTTATGGCTCTATGCCATTTGCAACCATGGTGCCGTTGTTTACACAAGTTGAGACTGTACCAGACTATTTTTCGAATACAACCAAGGATGCTTCAACAGATAATTTTTATTGGACCAATCGTTTAATTGCAGCTCTAGCAGATCCACACTTTTATCAACATGAAGCTGATATTGAAAGCTATATCGAGAGAACGATGGCCCAAGGACATGCACATATTAATGGTATTGATAGAGAAGTTGCTGAGAATAAAGAGATTGATTTTCAACAGAAAAATCAAGAAATGAGTGACTATATTCAAAAAGAAAGCCAAGAATTGTTAAATCGTATTCTATTTGATGCAAGTAATTTAATGACAAATCGCTTTTCAATGGGAGAT

SEQ ID NO: 14380 - protein, 465 aa, Streptococcus agalactiae; identical to SEQ ID NO: 5470

SEQ ID NO: 14381 - protein, 1518 aa, Streptococcus agalactiae
ATGAGAAAGAAATTTCTTTTATTGATAAGCTTTGTAGCTATGTTTGCAGCTTGGCAACTTGTTCAAGTTAAACAAGTTTGGGCTGATAGTAAACTTAAAGTGGTAACAACTTTTTACCCAGTTTATGAGTTTACAAAAAATGTCGTTGGTGATAAAGCTGATGTATCTATGTTAATTAAAGCAGGTACAGAGCCGCATGATTTTGAACCATCAACTAAAAACATCGCTGCCATCCAAGATTCAAATGCTTTTGTTTACATGGATGATAACATGGAAACTTGGGCTCCAAAAGTAGCTAAGTCAGTTAAATCCAAAAAAGTAACAACTATTAAAGGTACTGGCGATATGTTACTTACTAAAGGCGTCGAAGAAGAAGGTGAAGAACATGAAGGACATGGTCATGAAGGGCATCATCATGAACTTGACCCACACGTATGGTTGTCTCCAGAACGTGCGATTTCTGTTGTAGAAAACATCCGTAATAAATTTGTCAAAGCTTATCCAAAAGATGCAGCTTCATTTAATAAAAATGCAGATGCTTACATTGCAAAATTAAAAGAGCTTGACAAAGAATACAAAAATGGTTTGTCAAATGCTAAACAAAAGAGTTTTGTGACTCAACACGCAGCGTTTGGTTACATGGCGCTTGATTACGGTTTAAATCAAGTTCCAATTGCTGGTCTTACTCCAGATGCAGAACCTTCATCAAAACGTTTAGGCGAATTAGCTAAATACATCAAGAAATATAACATCAACTACATTTATTTTGAAGAAAATGCTTCAAATAAAGTTGCTAAAACTTTAGCAGATGAAGTTGGCGTGAAAACAGCTGTGCTTAGTCCACTTGAAGGACTTTCTAAAAAAGAAATGGCAGCTGGCGAAGATTACTTCTCAGTTATGAGACGTAATTTGAAAGTTCTTAAAAAGACAACAGATGTTGCAGGTAAAGAAGTAGCTCCTGAAGAAGATAAAACTAAAACAGTTGAAACAGGTTACTTTAAAACTAAAGATGTTAAAGACCGTAAATTGACAGATTACTCTGGTAATTGGCAATCAGTATATCCTCTTCTTCAAGATGGAACACTTGATCCAGTTTGGGATTACAAAGCTAAATCTAAAAAAGATATGACTGCTGCAGAGTACAAAAAATATTATACAGCAGGTTACAAGACTGACGTAGAATCAATCAAGATTGATGGTAAAAAACACCAAATGACCTTTGTACGTAATGGTAAATCACAAACATTTACATACAAATATGCAGGTTACAAAATCTTAACTTATAAAAAAGGTAATCGTGGAGTACGTTATCTCTTTGAAGCTAAGGAAAAAGATGCTGGTCAATTCAAATATATCCAATTTAGTGACCATGGTATTAAACCGAATAAAGCTGAACACTTCCATATCTTCTGGGGTTCAGAAAGCCAAGAAAAATTATTTGAGGAAATGGAAAACTGGCCAACATACTTCCCAGCTAAAATGTCTGGACGTGAAGTTGCCCAAGACCTTATGTCTCAT

SEQ ID NO: 14382 - protein, 506 aa, Streptococcus agalactiae
MRKKFLLLISFVAMFAAWQLVQVKQVWADSKLKVVTTFYPVYEFTKNVVGDKADVSMLIKAGTEPHDFEPSTKNIAAIQDSNAFVYMDDNMETWAPKVAKSVKSKKVTTIKGTGDMLLTKGVEEEGEEHEGHGHEGHHHELDPHVWLSPERAISVVENIRNKFVKAYPKDAASFNKNADAYIAKLKELDKEYKNGLSNAKQKSFVTQHAAFGYMALDYGLNQVPIAGLTPDAEPSSKRLGELAKYIKKYNINYIYFEENASNKVAKTLADEVGVKTAVLSPLEGLSKKEMAAGEDYFSVMRRNLKVLKKTTDVAGKEVAPEEDKTKTVETGYFKTKDVKDRKLTDYSGNWQSVYPLLQDGTLDPVWDYKAKSKKDMTAAEYKKYYTAGYKTDVESIKIDGKKHQMTFVRNGKSQTFTYKYAGYKILTYKKGNRGVRYLFEAKEKDAGQFKYIQFSDHGIKPNKAEHFHIFWGSESQEKLFEEMENWPTYFPAKMSGREVAQDLMSH

SEQ ID NO: 14383 - protein, 282 aa, Streptococcus agalactiae
ATGGCAGAAAGGAAATTTTTAAAGATGAAAAAAGACATCCATCCAGATTATCGTCCAGTTGTTTTCTTAGATACAACTACAGGTTACAAATTCCTTAGTGGTTCAACTAAATCAACTAAAGAAACAGTAGAATTCGAAGGTGAAACTTACCCACTTATCCGTGTGGAAATCTCATCAGATTCACACCCATTCTATACAGGACGTCAAAAATTCACTCAAGCAGATGGACGTGTGGACCGTTTCAACAAAAAATATGGTCTCAAAGACGCAAACGCTGCTCAA

SEQ ID NO: 14384 - protein, 94 aa, Streptococcus agalactiae; identical to SEQ ID NO: 1108

SEQ ID NO: 14385 - protein, 932 aa, Streptococcus agalactiae
ATGATTATTTTTCAACAAATTCTTGATAAAATCAAAGAGTACGACACCATCATTATCCATCGACATATGAGACCAGACCCTGATGCTCTTGGTAGCCAAATCGGCTTAAGGGATATCATCAGGCATAATTTCCCAAAGAAAAAAGTACTTGCTACTGGTTTTGACGAACCCACACTCGCTTGGATTGCTAAAATGGATCAAGTGACCGACCAAGACTATCAAGGCGCTCTTGTTATTGTTACAGATACAGCAAATACCCCTCGCATTGATGATGAACGTTATAAAAAAGGTGACTTTTTAATTAAAATTGACCATCATCCAAACGATGAAGTCTATGGAGACCTCTCTTATGTAGATACTAACGCCTCTAGTGCAAGTGAAATTGTGACAGACTTTGCTCTTTCTTGTGATTTGTTGTTATCAACAAGTGCAGCAAGAGTTCTATATAATGGTATTGTAGGAGATACAGGACGCTTTTTATATCCTGCTACCACAAGTAAAACACTGAAGATTGCTAGCAAACTTCGTGAATTTGACTTTGATTTTTCTGCAATGGCACGTCAAATGGATTCCTTTCCTTTCAAATTGCAAAATTACAAGGCTTTATTTTTGAGCAACTTGAAATTGACAAGAACGGCGCTGCATGCGTTACTTTAACACAAGAAGACTTAAAACGCTTTGATGTAACAGATGCAGAGACTGCTGCAATCGTTGGTATACCTGGAAAAATTGATATTGTAGAAAGTTGGGCAATTTTCGTTGAACAAAGCGATGGGCATTATCGTGTGCGCCTACGTAGTAAGTCACACATCATTAATGAAATAGCTAAACGTCATAATGGAGGCGGCCATCCTTTAGCCAGTGGAGCTAATTCTTATAGTTTGGAAGAGAATCAAGCTATTTACCAAGAAATCCAGGAAGTACTTTCTTTA

SEQ ID NO: 14386 - protein, 311 aa, Streptococcus agalactiae
MIIFQQILDKIKEYDTIIIHRHMRPDPDALGSQIGLRDIIRHNFPKKKVLATGFDEPTLAWIAKMDQVTDQDYQGALVIVTDTANTPRIDDERYKKGDFLIKIDHHPNDEVYGDLSYVDTNASSASEIVTDFALSCDLLLSTSAARVLYNGIVGDTGRFLYPATTSKTLKIASKLREFDFDFSAMARQMDSFPFKIAKLQGFIFEQLEIDKNGAACVTLTQEDLKRFDVTDAETAAIVGIPGKIDIVESWAIFVEQSDGHYRVRLRSKSHIINEIAKRHNGGGHPLASGANSYSLEENQAIYQEIQEVLSL

SEQ ID NO: 14387 - protein, 1020 aa, Streptococcus agalactiae
ATGACACAAGCAGTATTAAAAGAATTGGCTAAGGCGGAGTTGCATTGTCATCTAGATGGCTCACTTTCTTTACCAGCTATTAGAAAATTGGCTAATATGGCTGATATAATACTGCCAAATAGTGATAAAGAATTAAGAAAATATGTTATAGCTCCAGCTCAAACAGAAAGCTTGGTAGATTACCTTAAAACGTTTGAGTTTATCAGACCGCTTCTTCAAACGAAGGAAGCATTACGTTTTGCTGCTTATGATGTTGCTAGACAGGCAGCTTTAGAAAATGTTATTTATATTGAAATTCGTTTTGCGCCAGAACTCTCTATGGATAAAGGTTTAACCGCAAGTGATACAGTCTTTGCAGTCTTAGAAGGTTTAGCAGATGCTCAGAAAGAATTTAATATCGTTGCACGCGCCCTTGTCTGCGGTATGCGCCAATCGTCTCATAAAACGACCAAGGAAATTATTAAACACATTGTTGATTTGGCTCCCAAAGGCCTGGTAGGTTTTGATTTTGCAGGTGATGAATTTTCCTATCCAACAGATAGTTTAGTAGATCTTATTCAGGAAGTAAAACGCTCAGGTTACCCGATGACTTTACATGCAGGTGAGTGTGGTTGTGCTAAGCATATTGCGGATAGTTTAAATTTAGGGATTAAGCGTATGGGACATGTGACAGCTTTAACAGGACAGAGGGCTTTAATAAAGCGATTTGTCGAAGAAGATGCTGTAGCAGAGATGTGTTTAACTAGCAATTTACAAACGAAAGCAGCCTCAAGTATTCAAAGTTTTCCTTATCAAGAACTTTATGATGCTGGAGGTAAGATTACAATTAATACAGATAATCGTACTGTTTCCGATACAAATTTGACGAAAGAATATAGTCTTTTCGTAACTTATTTTGGAACGAAAATAGAAGACTTTCTTGTTTTTAATCAAAACGCTGTGAAGGCCTCCTTTACAAGTGATTCAGAGAAAGATACTTTACTACATAAGCTACAAGAAAACTATGACAGCTATCTAAAA

SEQ ID NO: 14388 - protein, 340 aa, Streptococcus agalactiae
MTQAVLKELAKAELHCHLDGSLSLPAIRKLANMADIILPNSDKELRKYVIAPAQTESLVDYLKTFEFIRPLLQTKEALRFAAYDVARQAALENVIYIEIRFAPELSMDKGLTASDTVFAVLEGLADAQKEFNIVARALVCGMRQSSHKTTKEIIKHIVDLAPKGLVGFDFAGDEFSYPTDSLVDLIQEVKRSGYPMTLHAGECGCAKHIADSLNLGIKRMGHVTALTGQRALIKRFVEEDAVAEMCLTSNLQTKAASSIQSFPYQELYDAGGKITINTDNRTVSDTNLTKEYSLFVTYFGTKIEDFLVFNQNAVKASFTSDSEKDTLLHKLQENYDSYLK

SEQ ID NO: 14389 - protein, 441 aa, Streptococcus agalactiae
ATGGCTTTAGCAAAGATTGTTTATGCTAGCATGACCGGAAATACTGAAGAAATTGCTGACATTGTTGCTGATAAATTACGTGACTTGGGTCTAGATGTTGAAGTAGAAGAGTGTACGATGGTTGATGCTGCAGATTTTGAAGATGCTGACATTGCAATTGTTGCCACTTATACATATGGTGATGGAGATTTACCAGATGAAATCGTGGACTTTTATGAAGATTTAGCAGAAGTTGATTTATCTGGTAAAGTTTACGGCGTAGTGGGTTCAGGTGATACTTTCTATGATTACTTCTGCAAATCTGTTGATGAGTTCGAGGCTCAATTCGCATTAACAGGAGCACAAAAAGGTGCTGATTGTGTTAAAGTTGATTTAGCGGCAGAAGACGAAGACATTGAAAACTTAGAAGCTTTTGCTGAAGAAATTGCTTCTAAACTTAAC

SEQ ID NO: 14390 - protein, 147 aa, Streptococcus agalactiae; identical to SEQ ID NO: 1116

SEQ ID NO: 14391 - protein, 273 aa, Streptococcus agalactiae; identical to SEQ ID NO: 5483

SEQ ID NO: 14392 - protein, 91 aa, Streptococcus agalactiae; identical to SEQ ID NO: 1118

SEQ ID NO: 14393 - protein, 1190 aa, Streptococcus agalactiae
GTGATTAAACGATTTGATAATTATGCTCAGTACGTACTTGTTTTAGGGTTTAGCTTACTAATCGGTGGTGTGGTTGGGGCTATTACAGCAGTCTTTGGACGTGTTCTATTATTCCTGACAGCCTTTAGAAGTGATTATATAGCTTACCTACTCCCTTTTCTAGCATTGTTGGTTTATTTATAGTTTTTGTCTATCAAAAATTTGGGGGTAAGAGTGTTAAAGGGATGGGATTGGTATTTGAAGTAGGTCATGGTAATGAGGAGACTATTCCGAAACGTCTTGTTCCTCTCGTGAATTACAACTTGGTTAACCCACTTATTTGGTGGTAGTGCAGGTCGTGAGGGGGTTGCTGTACAGATTGGGGCTACCGTTTCACACTACTTTCAAAAATATTGCCGTTTACAAAACGCTTCTCAACTTTTCCTAGTAATGGGAATGGCAGCAGGTTTTGCTGGTTTATTTCAGACTCCTTTAGCTGCTACTTTTTTTGCGATCGAAGTTTTGGTAGTAGGTCGTTTAATGGTTTCGTATATATTACCAAGTTTAATTGCTGCTCTGAAGCAAATTTCGTCTCACATTCTTTAGGTTTAGAAAAATTTTCTCATAGTATAGCAACATCAATGGCGTTAACACCAGATATTATTCTAAAATTATTGGTTTTAGGACTATGTTTTGGTCTGTGTGGCAATTTATTTGCTTATTTATTGGCTAAAGCTAAATTAATTGCTTCTAGTAGGTTACTAAACCCATATAAACGGATTTTCACACTTGGATTGTTAGCTACTTTTTTATTGTTTATCTTCCATTTTGGACGATATTCAGGACTGGGAACAAATCTAATTGAGGCTAGCTTCACTAATAAGAATCTTTATGATTATGATTGGTTGTTAAAATTGTGTTTGACAGTTATTACTTTGGCTGCAGGTTATCAGGGAGGAGAAGTAACTCCCTTATTTGCAATAGGAGCAAGTTTAGGAGTGATTATTGCGCCCATTTTAGGTTTGCCAGTTATTTTAGTTGCTGCTTTAGGCTATACTAGCGTTTTTGGGAGTGCAACGAATACTCTGTTAGGTCCTATCTTAATAGGTGGCGAAGTCTTTGGCTTTGCCAACACTCCTTATTTTGTTATTGTATGTCTTGTTGCTTACTCCATATCACATGCTCATACGATTTATGGTGCTCAATCTAGA

SEQ ID NO: 14394 - protein, 398 aa, Streptococcus agalactiae
  VARIANT 188: Xaa = Any Amino Acid
MIKRFDNYAQYVLVLGFSLLIGGVVGAITAVFGRVLLFLTAFRSDYIAYLLPFLSIVGLFIVFVYQKFGGKSVKGMGLVFEVGHGNEETIPKRLVPLVILTTWLTHLFGGSAGREGVAVQIGATVSHYFQKYCRLQNASQLFLVMGMAAGFAGLFQTPLAATFFAIEVLVVGRLMVSYILPSLIAALXANFVSHSLGLEKFSHSIATSMALTPDIILKLLVLGLCFGLCGNLFAYLLAKAKLIASSRLLNPYKRIFTLGLLATFLLFIFHFGRYSGLGTNLIEASFTNKNLYDYDWLLKLCLTVITLAAGYQGGEVTPLFAIGASLGVIIAPILGLPVILVAALGYTSVFGSATNTLLGPILIGGEVFGFANTPYFVIVCLVAYSISHAHTIYGAQSR

SEQ ID NO: 14395 - protein, 343 aa, Streptococcus agalactiae
ATGAATCCATTAATTCAAAGTTTGACAGAAGTCACTTCGTTCTGATATCCCTGAGTTCCGTGCTGGTGATACTGTACGTGTTCACGCTAAAGTTGTTGAAGGTACTCGCGAACGTATTCAGATCTTTGAAGGTGTTGTTATCTCACGTAAAGGTCAAGGAATCTCAGAAATGTACACAGTACGTAAAATTTCTGGTGGTATCGGTGTAGAGCGTACATTCCCAATTCACACTCCTCGTGTTGATAAAATCGAAGTTGTTCGTTATGGTAAAGTACGTCGTGCTAAACTTTACTACTTACGCGCATTGCAAGGTAAAGCTGCACGTATTAAAGAAATCCGTCGT

SEQ ID NO: 14396 - protein, 115 aa, Streptococcus agalactiae; identical to SEQ ID NO: 1122

SEQ ID NO: 14397 - protein, 579 aa, Streptococcus agalactiae
TTGATAAAAATTTGTAAAGAAAAATCACAACATCAATCGTATGCAGCGTTATACCTCATCGCTAAAACTGGCATGCGCTTCGCTGAATGTTTAGGTTTAACAGTTAATGATATTGATTACACTAACAAATATTTATCAATTAATAAAACTTGGGATTATCATTTCAACCAAAGATACCTGCCAACAAAAAACAAAAGTAGTATCAGAAATATACCAATTGACAATGATACATTATTTTTTTTGCATGAATTTACAAAAAATAAAAACGACAGATTATTCGACAAACTTTCAAATAATGCAGTCAATAAAACTATCCGAAAAATAACTGGTCGCGAGGTACGAGTGCACTCTCTCAGGCATACATTTGCAAGCTATCTAATTTCCATCTCTCAAGTTTTAGATCACGAGAATTTAAATATCACTTTAGAAGTTTACGCACATCAATTACAAGAACAAAAAGATAGGAACGATAAACTTAATCAGAGAAATTTGGGGCGGATTTGGGGCAAAATAGCTCTAAACCGCTATTTACATGCAATGAATATGTCCCCTGCCGGAATCGAACCAGCAATTACTCCT

SEQ ID NO: 14398 - protein, 193 aa, Streptococcus agalactiae; identical to SEQ ID NO: 1124

SEQ ID NO: 14399 - protein, 402 aa, Streptococcus agalactiae; identical to SEQ ID NO: 5623

SEQ ID NO: 14400 - protein, 134 aa, Streptococcus agalactiae; identical to SEQ ID NO: 5624

SEQ ID NO: 14401 - protein, 198 aa, Streptococcus agalactiae
GTGCCTATTCAGGCCTTATGCCAACTCTTGAAGGGGTCTCGTTCAGGCTATTACAAGTGGCTCAATCGTCAAAAAACAGATTTTGAGACAAAAAATACAAAGCTAATGGCTAAAATCAAGGAACTTCATAGACTCTACAATGGTATCTTAGGTTATCGCCGTATGACAACATTTATTAATCGTCAACTTGGGACAACT

SEQ ID NO: 14402 - protein, 66 aa, Streptococcus agalactiae; identical to SEQ ID NO: 1128

SEQ ID NO: 14403 - protein, 258 aa, Streptococcus agalactiae; identical to SEQ ID NO: 5627

SEQ ID NO: 14404 - protein, 86 aa, Streptococcus agalactiae; identical to SEQ ID NO: 1130

SEQ ID NO: 14405 - protein, 207 aa, Streptococcus agalactiae
ATGTCCCGGATTGGCAAATGTATTGATAATGCACCAACTGAAAGTTTCTTTGGGTTTTTCAAGACTGAGTCTTACCACCTTAAGAAATACAACTCTTATGATGAGTTGGTCAATGATGTGGCACGTTATATCGAATTCTACAACACACAACGTTATCAATCAAAATTAAACAATCTGACTCCTCTAGAATTCAGGAATCAGGTTGCA

SEQ ID NO: 14406 - protein, 69 aa, Streptococcus agalactiae; identical to SEQ ID NO: 5630

SEQ ID NO: 14407 - protein, 159 aa, Streptococcus agalactiae; identical to SEQ ID NO: 5631

SEQ ID NO: 14408 - protein, 53 aa, Streptococcus agalactiae; identical to SEQ ID NO: 1132

SEQ ID NO: 14409 - protein, 1275 aa, Streptococcus agalactiae
GTGATAAAAAATGCTATAGCATATATTACCAGAAAAAAAAATAGAACACTTATTATATTTGCTATTTTAACAATTGTTCTTTCTTGCTTGTATTCATGTTTAACAATAATGAAATCAAGTAATGAAATAGAAAAGGCTTTATATGAAAGTTCTAATTCTTCAATATCAATTACAAAAAAAGATGGTAAATATTTTAATATTAATCAATTTAAGAATATTGAAAAAATAAAAGAGGTTGAAGAAAAAATATTTCAATATGATGGATTAGCAAAATTGAAAGATCTTAAAGTAGTTAGTGGTGAGCAAAGTATAAATAGAGAAGATTTATCTGACGAATTTAAAAATGTTGTTTCACTAGAAGCTACAAGTAATACTAAAAGAAATCTTTTATTTAGTAGTGGAGTATTTAGTTTTAAAGAAGGAAAAAATATAGAAGAAAATGATAAGAATTCAATTCTTGTTCATGAAGAATTTGCTAAACAAAACAAACTAAAATTGGGTGATGAAATTGATCTTGAATTACTAGATACGGAAAAAAGTGGAAAAATAAAAAGTCATAAATTTAAAATTATAGGAATCTTTTCTGGTAAAAAACAGGAAACATATACAGGATTATCATCTGATTTTAGCGAAAATATGGTTTTTGTAGATTATTCAACTAGCCAAGAAATATTAAATAAATCAGAGAATAATAGAATTGCAAATAAAATTTTAATGTATTCTGGTAGTTTAGAATCTACAGAGCTTGCCTTAAACAAATTGAAAGACTTTAAAATTGATAAGTCAAAGTATTCTATTAAGAAAGATAATAAAGCATTCGAAGAGTCTTTAGAGTCAGTGAGTGGAATAAAACATATAATTAAAATAATGACTTATTCGATTATGTTAGGTGGAATAGTTGTTCTTTCATTAATCTTGATTCTATGGTTAAGAGAAAGAATTTATGAAATAGGTATATTTTTATCTATTGGAACAACTAAGATACAAATTATAAGGCAATTTATATTTGAGTTAATATTCATATCAATACCAAGTATAATATCCTCCTTATTTTTAGGGAATCTACTATTAAAAGTAATTGTAGAAGGATTTATTAACTCAGAGAACTCAATGATTTTCGGTGGAAGTTTAATAAATAAAAGCAGTTTTATGTTAAACATAACAACACTTGCAGAAAGTTATTTAATATTAATAAGTATTATTGTTTTATCAGTTGTAATGGCCTCTTCATTAATATTATTTAAGAAACCAAAAGAAATATTATCAAAAATAAGT

SEQ ID NO: 14410 - protein, 425 aa, Streptococcus agalactiae; identical to SEQ ID NO: 1134

SEQ ID NO: 14411 - protein, 654 aa, Streptococcus agalactiae; identical to SEQ ID NO: 5635

SEQ ID NO: 14412 - protein, 218 aa, Streptococcus agalactiae; identical to SEQ ID NO: 5636

SEQ ID NO: 14413 - protein, 1374 aa, Streptococcus agalactiae
ATGATAAAAAATGCATTTGCTTATGTAACTAGAAAAAGCTTAAAATCATTAATTATTATATTAGTTATTCTATCAATGGCAACTTTAAGCATCATTAGTTTATCTATTAAAGATGCCACAGATAGAGCTTCTAAGGAAACATTTGCTAATATAACAAACAGTTTTTCTATGGAAATAAATAGACAAGTAAATCCAGGAACACCTAGGGGTGGAGGAAATGTAAAAGGTGAAGATATTAAAAAGATATCTCAAACAAACAGTATAGACTCCTATGTAAAAAGAATAAACAGCGTCGCAGACCTAGTTGATCATGATATAATTGAAACTCAAGATACACTTGCAAATCAATCACCTGAAAGAGCAAAGAATTTTAAGAGAACAGTTATGTTAACAGGGGTTAATGACTCAGCAAAAGAAACAAAATTTGTATCAGAAGCATATAAGTTAGTAGAAGGAAAGCATTTAGAAAATAAAGATAAAAATAAAATTTTAATGCATAAAGATTTGGCAAAAAAAAACAATCTCAAAGTTGGTGATAAAATAAAAATAAAATCTAATTTGTTTGATGCTGACAATGAAAAAGTTGCAAATGAAACTGTAGAAGTAGAAATTAAAGGTTTATTTGATGGTCATAATAGCGGTGGGGTAAGTGCAGCACAAGAACTATACGAAAATACACTAATCACTGACGTTCATTCAGCTGCTAAAGTTTATGGTAATACAGAAGATACAGCCGTATACCAAGATGCAACATTCTTTGTAAAAGGTGATAAGAATCTTGATAGTGTAATAAAAGATCTTGGGAAACTAGATATAAATTGGAGAGAATATAATTTGATTAAAAGTTCATCAAATTATCCTGCGCTGCAACAATCTATATCCGGTATCTATTCTATTTCAAACAAATTATTTGTTGGCTCATTAATATTTGCAGGAGTTGTAGTTTCATTATTACTTTTCTTATGGATGAATGCCAGAAAGAAAGAAATAGCAGTATTACTATCATTAGGTATATCTAAATTAGAAATTTTTGGTCAATTTATAATCGAGATGGTATTTATATCCATTCCCGCACTTCTTGGATCTTATTTCTTAGCTCAATATACAGCTGATAAGCTAGGGAATAATATATTGAATAAAGTTACTGGCGATATAGCTAAACAAATAGCTAGACAATCTGCATCTAGTCAATTAGGCGGGGGGGCAGAAGCTGAAGGATTCAACAAGACTCTTTCAGGTTTAGATATAAATGTATTACCTAAATTCATAATTTATGTAGTTATATTTATGAGTTTTGTACTTCTTGTATCATTGATTCTTTCTTCAATTTATACATTAAGAAAGAATCCAAAAGAGTTATTAATTGATAATAAT

SEQ ID NO: 14414 - protein, 458 aa, Streptococcus agalactiae; identical to SEQ ID NO: 5638

SEQ ID NO: 14415 - protein, 651 aa, Streptococcus agalactiae; identical to SEQ ID NO: 9929

SEQ ID NO: 14416 - protein, 217 aa, Streptococcus agalactiae; identical to SEQ ID NO: 1146

SEQ ID NO: 14417 - protein, 707 aa, Streptococcus agalactiae
ATGAAGAAATTAAAAATATTCCCAAAAATGTTCATACAAATATTTTCTATTCTTGGAATACTAATTATATTAGTTCATTCATTATTCTTTTTTATCTTTCCTAAAACATATTTGGAGACGAGGAAAGTAAAAATCCACATTATGGCAGATGAAATTTCTAAAAATATGAATGGAAAAGAGTTAAAATATTTAGACCAAACTTTGGAGCTTTATTCTAAAAGTAGTGACATAAAGGTATTTATAAAAAAAAATAATAACAAAAATGAATTACAAATAAATGATAATATAAATGTTAATGTAAAAAGTGATAGTAATTCTTTAATAATTGAAGAAAGGGAAATTAAACTTCATGATGGCAAAAAAATACATCTTCAATTTGTTTCAACAGCTGATATGCAAAAAGACGCGAAAGACTTGAGCCTTAAGTTTTTACCATATTCTTTATCGATATCATTTCTTTTTTCCATTGTTATTTCTTTAATTTATGCTAAATCTATAAAAAACAATATACAAGAAATAACTATGGTTACTGATAAAATGATAAAACTTGACAAAGAAACAAGATGAAAATTAGTTCTAATGATGAAATTGGACAACTAAAACAGCAAATCAATGACTTATATTGTGCTTTATTGAATACAATTAATGATTTGGAATTTAAAAATAAGGAAATTTTAAAGTTAGAAAAATTGAAATATGATTTTTTT

SEQ ID NO: 14418 - protein, 236 aa, Streptococcus agalactiae
MKKLKIFPKMFIQIFSILGILIILVHSLFFFIFPKTYLETRKVKIHIMADEISKNMNGKELKYLDQTLELYSKSSDIKVFIKKNNNKNELQINDNINVNVKSDSNSLIIEEREIKLHDGKKIHLQFVSTADMQKDAKDLSLKFLPYSLSISFLFSIVISLIYAKSIKNNIQEITMVTDKMIKLDKETRLKISSNDEIGQLKQQINDLYCALLNTINDLEFKNKEILKLEKLKYDFF

SEQ ID NO: 14419 - protein, 544 aa, Streptococcus agalactiae
ATGAATATATCGGAAATATAAAGATAGAGACTTTTATATCAGTGAGTGTATTAATATTGTAGATAACTTAACAAAGAATGTCTTGCAAATATTATCTTTTTATTCTATAAAAGACTTGAATAATGATGAAGAATATTTAAATGTTGGTGATACATTAGATGAAGTATTAGAAAAATACTCTATCTTAGTAAATCAAAAAAAAATAAATATTAATAAGGAATTATTAGACTATAATATTTATATAGGAAAAACGGCACTAAATATTGTATTTTCTAATTTGATTAGCAATGCAGTAAAATATACTAATCGAAATGGAATAATTAATATCAAAATAGCTAATGATTGGTTACTTATAGAAAACTCATATGATAAAAATAAAATTTCGAAAATAAATAAAATTTTAGATGCTAGTTTTGATCTAAAATTGGATAATAGTAATGGATTAGGATTAAATATAGTAAAGAATATACTTAATAAGTATAATATAAAGTATGAAATATTACATGGTGAAAATTATTTTATATTTAAAATAAAAATAATCTCT

SEQ ID NO: 14420 - protein, 183 aa, Streptococcus agalactiae
MKYNIGKYKDRDFYISECINIVDNLTKNVLQILSFYSIKDLNNDEEYLNVGDTLDEVLEKYSILVNQKKININKELLDYNIYIGKTALNIVFSNLISNAVKYTNRNGIINIKIANDWLLIENSYDKNKISKINKILDASFDLKLDNSNGLGLNIVKNILNKYNIKYEILHGENYFIFKIKIIS

SEQ ID NO: 14421 - protein, 609 aa, Streptococcus agalactiae
ATGAAGAATATGGCGCTCCCTAAAATGGCTACCGTTAAGACAAAAACAGCTCTTAAAAAGACTCAAAAAACGTATCCTCAAAACTTACTCAACCAGAAATTTAATCCTGATAAACCTAATCAAGTATGGTCTACTGACTTCACCTATATTTCTATTGGATATAAGAAATATGTCTATCTCTGCGCAATAATTGATCTCTATTCTAGAAAATATATTGCTTGGAAATTGAGTCATCGTATGGATGCAAAGTTAGCATGTGACACTCTAGAATTAGCTCTTAATAAAAGAAAGATTGAAGGAACACTTCTCTTTCATTCCGACCAAGGGTCACAATTTAAGGCCAGGGAATTTAGAAAAATAATTGATGACAACAATATCATGCATTCTTTTTCTAAACCTAGATATCCTTATGATAATGCCGTAACTGAAGCATTTTTCAAGTATTTAAAGCATAGACAAATCAACCAAAAAAATTATCAAAATATCAAACAGGTTCAATTAGACTGCTTTGAATACATTGAGAATTTTTATAACAATTACATCCCACATACGGCTAATCTAGGACTAACCCCTAATCAGAAAGAAGAAAATTATTTTAACGCAATAAAA

SEQ ID NO: 14422 - protein, 203 aa, Streptococcus agalactiae; identical to SEQ ID NO: 9934

SEQ ID NO: 14423 - protein, 198 aa, Streptococcus agalactiae; identical to SEQ ID NO: 5651

SEQ ID NO: 14424 - protein, 66 aa, Streptococcus agalactiae; identical to SEQ ID NO: 5652

SEQ ID NO: 14425 - protein, 186 aa, Streptococcus agalactiae; identical to SEQ ID NO: 5653

SEQ ID NO: 14426 - protein, 62 aa, Streptococcus agalactiae; identical to SEQ ID NO: 5654

SEQ ID NO: 14427 - protein, 1203 aa, Streptococcus agalactiae
ATGTCACAAAAATCAAACTATTTTAAAGGGCAAATTGATTATGCTGTTGTGATACCAGTATTTTTTTTATTAATGATTGGTTTAGCCTCAATTTATGTTGCAACGATGAATGATTATCCTTCTAATATCTATATCGCGATGTTTCAGCAGGTGTCTTGGATTATTATGGGGTGTATTATTGCATTTGTCGTTATGCTTTTCAGTACTGAATTTTTATGGAAAGCCACGCCCTATCTGTATGCTTTAGGACTAACCCTAATGGTTCTTCCCTTAATTTTTTATAGTCCACAGCTTTTTGCGGCAACAGGTGCTAAAAATTGGGTGACCATTGGCTCGGTAACTTTGTTTCAACCGTCAGAGTTTATGAAGATTTCCTATATTTTAATGTTATCTCGAATAACTGTTAGTTTTCATCAGAAAAATCGCAAAACTTTTCAAGATGATTGGAAGTTGCTAGGATTGTTTGGTTTGGTTACATTGCCAGTGATGATTCTTCTAATGTTACAAAAAGATTTAGGAACAGCATTAGTTTTCCTTGCCATTTTGTCAGGTTTAATCCTTTTATCGGGCATATCTTGGTGGATAATCTTGCCAATTTTATCTACTATCGTTCTTTTTATAGCTAGCTTTTTGATGATTTTTATCTCACCAAACGGCAAGGAATGGTTTTATAATTTGGGGATGGATACATATCAAATCAACCGTTTATCTGCTTGGATTGATCCATTTAGTTTTGCAGACTCAATTGCTTATCAACAAACACAGGGTATGGTATCAATTGGAAGTGGCGGGGTAACAGGTAAAGGTTTTAATATTTTAGAGCTCTCGGTTCCTGTTCGTGAAAGTGACATGATTTTTACTGTCATTGCTGAGAATTTTGGCTTCATTGGTTCGGCGATTGTTTTAGGGTTATATCTCATTATCATTTACCGTATGTTAAGGATCACCATTGAATCTAATAATCAATTTTATACTTTTATATCAACTGGTTTTATCATGATGATTGTTTTCCATGTTTTTGAAAATATTGGTGCAGCAGTTGGTATATTACCTCTAACAGGAATCCCACTTCCGTTTATTTCGCAAGGTGGAAGTTCATTACTAAGTAATCTTATTGGAATTGGATTGGTCTTATCCATGTCTTATCAAAATACAGTTCGTCAGGCCAAGGCTAATGGATCACATTTGAAGTATCGTAGTATA

SEQ ID NO: 14428 - protein, 401 aa, Streptococcus agalactiae; identical to SEQ ID NO: 1152

SEQ ID NO: 14429 - protein, 558 aa, Streptococcus agalactiae; identical to SEQ ID NO: 5657

SEQ ID NO: 14430 - protein, 186 aa, Streptococcus agalactiae; identical to SEQ ID NO: 1154

SEQ ID NO: 14431 - protein, 1860 aa, Streptococcus agalactiae
ATGCGTCCAGGCATGTATATCGGTTCGACTTCGAAAGAAGGGCTTCATCACCTTGTATGGGAAATTGTTGATAACTCAATTGATGAAGCCTTAGCTGGATTTGCAGGACATATTAAAGTTTACATTGAACCAGATAACTCTATTACAGTTGTTGATGATGGTCGCGGTATTCCGGTAGATATCCAAGAAAAAACTGGAAGACCAGCTGTAGAGACAGTTTTTACAGTTCTCCATGCCGGTGGTAAATTTGGTGGTGGCGGATACAAGGTTTCTGGTGGCTTACATGGTGTAGGGTCATCTGTTGTTAATGCATTGTCAACACAATTAGATGTCAAGGTTTATAAAAATGGCAAGGTTCATTATCAAGAATACCAACGCGGTGTTGTTGTTAATGATCTTGAAATTATCGGTGATACTGACTTATCAGGAACAACAGTTCACTTTACGCCTGACCCAGAAATTTTCACTGAAACCACTGTATTTGATTTTGATAAATTAGCCAAACGTATTCAGGAATTAGCTTTTTTAAATCGTGGACTAAGAATCTCCATTTCAGACAAGCGAGAAGGTCAAGAAGTTGAAAAAGAATATCACTATGAAGGTGGTATAGGTTCATACGTTGAGTTTATCAATGAGAACAAAGAAGTGATTTTTGAAAATCCTATTTATACTGACGGTGAATTAGATGGTATTTCAGTTGAAGTAGCAATGCAGTATACTACTGGATATCAAGAGACTGTTATGAGTTTTGCAAATAACATCCACACTCATGAAGGAGGAACGCACGAACAAGGATTTCGTACTGCCTTGACACGTGTGATTAATGATTACGCTAAAAAGAATAAGATTCTCAAAGAAAATGAAGATAATTTAACTGGAGAAGATGTTCGTGAAGGTTTAACAGCAGTTATATCTGTTAAACATCCAAATCCACAATTTGAAGGACAAACTAAAACAAAACTTGGAAATTCTGAAGTTGTTAAAATTACAAATCGTCTCTTTAGCGAAGCTTTCAATCGATTCCTATTAGAAAATCCACAAGTAGCTAAGAAGATTGTTGAAAAAGGAATTTTGGCATCTAAAGCCCGTATTGCAGCAAAACGGGCGCGTGAAGTAACACGTAAAAAGTCAGGCTTAGAGATTTCAAACTTACCTGGGAAACTGGCTGATTGCTCATCTAATAATGCTGAGATGAATGAACTTTTTATAGTGGAGGGAGATTCTGCGGGAGGGTCTGCAAAATCAGGACGTAATCGTGAGTTTCAAGCAATTTTACCGATTAGGGGTAAGATTCTAAACGTTGAAAAAGCTACAATGGATAAAATTTTAGCAAACGAAGAAATCCGAAGTCTCTTCACAGCTATGGGAACTGGATTTGGTGCAGATTTTGATGTATCAAAAGTCAGATATCAAAAATTAGTCATTATGACTGATGCCGATGTTGATGGAGCTCACATCAGAACTTTACTTTTAACTCTGATTTATCGTTTTATGCGACCTGTTTTGGAAGCAGGATATGTTTATATCGCTCAACCACCAATCTATGGTGTCAAAGTAGGAAGTGAGATTAAAGCTTATATTCAGCCAGGGGTCAATCAAGAAGAGGAATTACGTCAAGCTCTAGATACCTATAGTTCAGGACGTTCAAAACCTACTGTACAACGTTACAAAGGTCTAGGTGAGATGGATGACCATCAACTTTGGGAAACAACAATGGATCCTGAAAACCGCTTGATGGCACGTGTCTCAGTTGATGATGCAGCAGAAGCAGATAAGATTTTCGATATGCTAATGGGAGATCGAGTAGAACCACGACGTGAATTCATTGAAGCTAATGCTGTTTATAGTAACTTAGATATC

SEQ ID NO: 14432 - protein, 620 aa, Streptococcus agalactiae
MRPGMYIGSTSKEGLHHLVWEIVDNSIDEALAGFAGHIKVYIEPDNSITVVDDGRGIPVDIQEKTGRPAVETVFTVLHAGGKFGGGGYKVSGGLHGVGSSVVNALSTQLDVKVYKNGKVHYQEYQRGVVVNDLEIIGDTDLSGTTVHFTPDPEIFTETTVFDFDKLAKRIQELAFLNRGLRISISDKREGQEVEKEYHYEGGIGSYVEFINENKEVIFENPIYTDGELDGISVEVAMQYTTGYQETVMSFANNIHTHEGGTHEQGFRTALTRVINDYAKKNKILKENEDNLTGEDVREGLTAVISVKHPNPQFEGQTKTKLGNSEVVKITNRLFSEAFNRFLLENPQVAKKIVEKGILASKARIAAKRAREVTRKKSGLEISNLPGKLADCSSNNAEMNELFIVEGDSAGGSAKSGRNREFQAILPIRGKILNVEKATMDKILANEEIRSLFTAMGTGFGADFDVSKVRYQKLVIMTDADVDGAHIRTLLLTLIYRFMRPVLEAGYVYIAQPPIYGVKVGSEIKAYIQPGVNQEEELRQALDTYSSGRSKPTVQRYKGLGEMDDHQLWETTMDPENRLMARVSVDDAAEADKIFDMLMGDRVEPRREFIEANAVYSNLDI

SEQ ID NO: 14433 - protein, 1436 aa, Streptococcus agalactiae
ATGTCGAGCGGAATCATATTGCTGCTTGTGGCTATAGTCCTGCTTGTGATTATTGCCTACGTAGTCGGCGTCGTAATAAGAAAACGTAATGATACATTAATTGCAAACTTAGAAACTAGAAAACAAGAGTTAGTTGACCTTCCTGTGCAAGAGGAGATTGAGCAAGTCAAATTGCTTCATTTGATTGGCCAAAGTCAATCAACTTTTAGAGAATGGAACCAAAAATGGACTGATTTATCAACTAATTCATTTAAAGATATTGATTTTCATTTAGTTGAAGCTGAAAATCTTAATGATTCATTTAATTTTGTGCGTGCTAAGCACGAGATTGATAATGTTGATAGTCAGCTAACTATTATAGAAGAAGATATTGTTTCGATTCGTGAAGCTTTAGAAGTTTTAAAAGAGCAAGAAGAGAAAAATAGTGCCCGTGTAACACATGCTTTGGACCTATACGAAACACTTCAAAAATCAATTTCTGAAAAAGAAGATAATTACGGGACAACCATGCCAGAAATTGAAAAGCAGTTGAAAAATATCGAGGCTGAATTTTCACATTTTGTGACCTTAAACTCAACTGGTGACCCGATTGAAGCTTCTGAAGTTTTGAATAAAGCAGAGGAGCATACGATTGCTTTAGGGCAAATTACAGAACAAATTCCAGCTATTGTTGCTAAATTAGAAGACGATTTTCCAGATCAGTTAGATGATTTGGAGACAGGATATCGTCGTCTTTTAGAGGAAAACTACCATTTCCCTGAAAAGGATATTGAACAACGTTTTCAAGAAGTTCGTGAGGCTATTCGTTCGAATTCAGATGGTTTAGTTAGTTTGGATCTAGATCGTGCTCGCGATGAAAATGAACATATTCAAGAAAAAATTGATAAACTTTATGATATTTTTGAACGTGAGATTGCTGCTTATAAAGTAGCTCATAAGGATAGTAAAATTATTCCTCAATTCCTTGCTCATGCAAAATCTAACAATGAACAACTGGGGCATGAAATCAAACGATTATCTGCTAAATATATCTTAAATGAAAATGAAAGCTTAAGTTTACGTTCCTTCACAAATGATTTGGAAGAAATTGAAACAAAGGTTTTACCTTCTGTAGAAAATTTTGGTCAAGAAGCTTCACCTTATACTCATCTACAAATTTTATTTGAGCGTACGTTGAAAACATTGACTACTGTTGAAGAAAATCAAATGGAAGTTTTTGAAGCCGTTAAAACTATTGAAAGCGTTGAGACACGAGCACGCCAAAATATGGATAAGTATGTTAACAAGCTCCATATGATTAAACGTTTCATGGAAAAACGCAATCTTCCAGGAATCCCGCAAGACTTCTTAAGCACTTTCTTTACAACAAGTTCTCAAATTGAGGCACTTATTAATGAACTCAGTCGCGGTCGTATGTATTGAGGCTGTTTCACGTT

SEQ ID NO: 14434 - protein, 479 aa, Streptococcus agalactiae
MSSGIILLLVAIVLLVIIAYVVGVVIRKRNDTLIANLETRKQELVDLPVQEEIEQVKLLHLIGQSQSTFREWNQKWTDLSTNSFKDIDFHLVEAENLNDSFNFVRAKHEIDNVDSQLTIIEEDIVSIREALEVLKEQEEKNSARVTHALDLYETLQKSISEKEDNYGTTMPEIEKQLKNIEAEFSHFVTLNSTGDPIEASEVLNKAEEHTIALGQITEQIPAIVAKLEDDFPDQLDDLETGYRRLLEENYHFPEKDIEQRFQEVREAIRSNSDGLVSLDLDRARDENEHIQEKIDKLYDIFEREIAAYKVAHKDSKIIPQFLAHAKSNNEQLGHEIKRLSAKYILNENESLSLRSFTNDLEEIETKVLPSVENFGQEASPYTHLQILFERTLKTLTTVEENQMEVFEAVKTIESVETRARQNMDKYVNKLHMIKRFMEKRNLPGIPQDFLSTFFTTSSQIEALINELSRGRMILRLFHV

SEQ ID NO: 14435 - protein, 159 aa, Streptococcus agalactiae
GTGCAAAAGAGCTTTGAACAAGCTTTGTACTTATTTGAAGTTGAACATAACTATAAAGCATCTTTCGATGAAATTTCATACGCACTTGAGACTGTGGAACCAGGTGTAACTGACCGTTTTGTGACGTCTTATGAAAAGACACAAGAACGTATTCGTTTC

SEQ ID NO: 14436 - protein, 53 aa, Streptococcus agalactiae
MQKSFEQALYLFEVEHNYKASFDEISYALETVEPGVTDRFVTSYEKTQERIRF

SEQ ID NO: 14437 - protein, 639 aa, Streptococcus agalactiae; identical to SEQ ID NO: 5665

SEQ ID NO: 14438 - protein, 213 aa, Streptococcus agalactiae; identical to SEQ ID NO: 1162

SEQ ID NO: 14439 - protein, 483 aa, Streptococcus agalactiae; identical to SEQ ID NO: 5667

SEQ ID NO: 14440 - protein, 161 aa, Streptococcus agalactiae; identical to SEQ ID NO: 1164

SEQ ID NO: 14441 - protein, 453 aa, Streptococcus agalactiae; identical to SEQ ID NO: 5669

SEQ ID NO: 14442 - protein, 151 aa, Streptococcus agalactiae; identical to SEQ ID NO: 1166

SEQ ID NO: 14443 - protein, 183 aa, Streptococcus agalactiae
ATGACAAAATCACCTGCTCGTTTAATTTCATTTATCTCAATCGCTATCGCCATCAACCTTATTGGGGCTAATTTAGCTCTATTTTTACGCCTACCTATCTATCTAGATACTATAGGTACATTGCTAATAGCAGTTATCCTGGGACCATGGTACGCTGCCAGCACTGTACCTATAGTATCTAGA

SEQ ID NO: 14444 - protein, 61 aa, Streptococcus agalactiae
MTKSPARLISFISIAIAINLIGANLALFLRLPIYLDTIGTLLIAVILGPWYAASTVPIVSR

SEQ ID NO: 14445 - protein, 417 aa, Streptococcus agalactiae
ATGGTTGGACTAGACATCACACGTCATATTGTATTAACCCCCAATCATTTATCTTATATGGAGCGTATTAATCCAGACGTATCAACTTTTATCCAAAAAATCACAAAGTTCTACTTCGATTTTCACTGGCAATATGAGCATATTATTGGATGTGTGATAAATGATCCTTTAGCTATTGCTTACTTTGTTAATGAAAATATCGCTACTGGTTTTGATAGCTATACCGATGTTGCTTGTCACGGAATCGCCATGGGACAAACAATTGTAGATCAGTATCATTTTTATAAAAAAGATGCTAACAGTAAGATTTTAACCTCAGTCAATACTAATTTATTTTGGAATGATTTTATGACCGTCCTATTACATGCACAAAATTCAGTCATCATTGAAGACTTAGAAATGTTAGGACTTAACAAA

SEQ ID NO: 14446 - protein, 139 aa, Streptococcus agalactiae
MVGLDITRHIVLTPNHLSYMERINPDVSTFIQKITKFYFDFHWQYEHIIGCVINDPLAIAYFVNENIATGFDSYTDVACHGIAMGQTIVDQYHFYKKDANSKILTSVNTNLFWNDFMTVLLHAQNSVIIEDLEMLGLNK

SEQ ID NO: 14447 - protein, 171 aa, Streptococcus agalactiae
GTGTTACTGGCTGGAGAAATAATTAATATATTAAAGGAATTAGCTCAAGATAGAAATAAATGTGTAATAGTTGTAACACATAGTAAGGAAGTAGCAGATTCTGCGGATATCATTTTAGAACTAAGTGGTAAAAAGTTGAAAAAAGTAAATAAAATGAATTTGGAGGTTGAA

SEQ ID NO: 14448 - protein, 57 aa, Streptococcus agalactiae
MLLAGEIINILKELAQDRNKCVIVVTHSKEVADSADIILELSGKKLKKVNKMNLEVE

SEQ ID NO: 14449 - protein, 645 aa, Streptococcus agalactiae
ATGATAAAAAATGCATTTGCTTATGTAACTAGAAAAAGCTTAAAATCATTAATTATTATATTAGTTATTCTATCAATGGCAACTTTAAGCATCATTAGTTTATCTATTAAAGATGCCACAGATAGAGCTTCTAAGGAAACATTTGCTAATATAACAAACAGTTTTTCTATGGAAATAAATAGACAAGTAAATCCAGGAACACCTAGGGGTGGAGGAAATGTAAAAGGTGAAGATATTAAAAAGATATCTCAAACAAACAGTATAGACTCCTATGTAAAAAGAATAAACAGCGTCGCAGACCTAGTTGATCATGATATAATTGAAACTCAAGATACACTTGCAAATCAATCACCTGAAAGAGCAAAGAATTTTAAGAGAACAGTTATGTTAACAGGGGTTAATGACTCAGCAAAAGAAACAAAATTTGTATCAGAAGCATATAAGTTAGTAGAAGGAAAGCATTTAGAAAATAAAGATAAAAATAAAATTTTAATGCATAAAGATTTGGCAAAAAAAAACAATCCTCAAGTTGGTGATAAAATAAAAATAAAATCTAATTTGTTTGATGCTGACAATGAAAAAAAGTGCAATGAAACTGTAGAAGTAGAAATTAAGGTTTATTTGATGGGTCATATAGCGGTGGGG

SEQ ID NO: 14450 - protein, 215 aa, Streptococcus agalactiae
MIKNAFAYVTRKSLKSLIIILVILSMATLSIISLSIKDATDRASKETFANITNSFSMEINRQVNPGTPRGGGNVKGEDIKKISQTNSIDSYVKRINSVADLVDHDIIETQDTLANQSPERAKNFKRTVMLTGVNDSAKETKFVSEAYKLVEGKHLENKDKNKILMHKDLAKKNNPQVGDKIKIKSNLFDADNEKKCNETVEVEIKVYLMGHIAVG

SEQ ID NO: 14451 - protein, 492 aa, Streptococcus agalactiae
ATGCATAAAGATTGGCAAAAAAAAAAATCTCAAAGTTGGTGATAAAATAAAAATAAAATCTAATTTGTTTGATGCTGACAATGAAAAAGTTGCAAATGAAACTGTAGAAGTAGAAATTAAAGGTTTATTGATGGTCATAATAGCGGTGGGGTAAGTGCAGCACAAGAACTATACGAAAATACACTAATCACTGACGTTCATTCAGCTGCTAAAGTTTATGGTAATACAGAAGATACAGCCGTATACCAAGATGCAACATTCTTTGTAAAAGGTGATAAGAATCTTGATAGTGTAATAAAAGATCTTGGGAAACTAGATATAAATTGGAGAGAATATAATTTGATTAAAAGTTCATCAATGATTTTGACCCATCGACTAATAAGGTATCAAAACCAGCCGATTCTCCTGCTTGCTTATCTATATCACGATCGCCTATTACTAAACAATTATCAATTTGGTATTTTTCTTTCAAATAAAGCATACTCTCGGGAC

SEQ ID NO: 14452 - protein, 165 aa, Streptococcus agalactiae
  VARIANT 44: Xaa = Any Amino Acid
MHKDLAKKNNLKVGDKIKIKSNLFDADNEKVANETVEVEIKGLXDGHNSGGVSAAQELYENTLITDVHSAAKVYGNTEDTAVYQDATFFVKGDKNLDSVIKDLGKLDINWREYNLIKSSSMILTHRLIRYQNQPILLLAYLYHDRLLLNNYQFGIFLSNKAYSRD

SEQ ID NO: 14453 - protein, 251 aa, Streptococcus agalactiae
TGGTGTCTCATCGTGATAATCAAGTTATATTTTCTGGAAAAACAGAAATTATTGACTATTTTACAGAAGTAGTGACTGCTGATAACGGCTTTTCAAGGAAACCTAGTCCCGAGAGTATGCTTTATTTGAAAGAAAAATACCAAATTGATAATTGTTTAGTAATAGGCGATCGTGATATAGATAAGCAAGCAGGAGAATCGGCTGGTTTTGATACCTTATTAGTCGATGGGTCAAAATCATTGATGAACTTT

SEQ ID NO: 14454 - protein, 85 aa, Streptococcus agalactiae
  VARIANT 16: Xaa = Any Amino Acid
LVSHRDNQVIVILEKXEIIDYFTEVVTADNGFSRKPSPESMLYLKEKYQIDNCLVIGDRDIDKQAGESAGFDTLLVDGSKSLMNF

SEQ ID NO: 14455 - protein, 1198 aa, Streptococcus agalactiae
ATGGTCTTCAGGAGCTTCTACTGGTGAACACGAAGCAGTTGAACTTCGCGACGGCGACAAGTCTCGTTACGGTGGTCTTGGAACACAAAAAGCTGTTGACAATGTAAATAACGTTATTGCAGAAGCAATCATTGGTTATGATGTACGCGACCAACAAGCTATCGACCGTGCTATGATCGCTCTTGACGGAACTCCTAATAAAGGTAAATTAGGTGCAAATGCTATTCTTGGTGTTTCTATTGCCGTAGCACGTGCTGCAGCTGATTACCTTGAAGTACCACTTTACAGCTACCTTGGTGGATTCAACACTAAAGTTCTTCCAACTCCAATGATGAACATCATCAACGGTGGTTCTCACTCAGACGCTCCAATCGCATTCCAAGAATTCATGATTATGCCAGTTGGTGCACCAACTTTCAAAGAAGCACTTCGTTGGGGTGCTGAAGTATTCCATGCTCTTAAGAAAATCCTTAAAGAACGTGGTCTTGAAACAGCTGTTGGTGATGAAGGTGGATTTGCACCTAAATTTGAAGGTACTGAAGATGGCGTAGAAACTATTCTTAAAGCTATTGAAGCAGCTGGTTACGAAGCTGGCGAAAACGGAATCATGATTGGTTTTGACTGTGCTTCATCAGAGTTCTACGATGCAGAACGTAAAGTATACGACTACAGTAAATTCGAAGGTGAAGGTGGAGCAGTTCGTACTGCTGCAGAACAAATCGATTACCTTGAAGAGTTGGTTAACAAATACCCAATCATCACTATTGAAGATGGTATGGATGAAAACGACTGGGATGGTTGGAAAGCTCTTACAGAACGCCTTGGTGGACGTGTACAATTAGTTGGTGACGATTTCTTCGTTACAAATACTGATTACTTAGCACGTGGTATCAAAGAAGAAGCTGCTAACTCAATCCTTATCAAAGTTAACCAAATCGGTACTTTGACAGAAACTTTCGAAGCTATTGAAATGGCTAAAGAAGCTGGTTACACTGCAGTTGTATCACACCGTTCAGGTGAAACTGAAGATTCAACAATCGCTGATATCGCAGTTGCAACTAACGCTGGTCAAATTAAAACAGGTTCATTATCACGTACTGACCGTATTGCTAAATACAACCAATTACTTCGTATCGAAGACCAACTTGGTGAAGTTGCTCAATACAAAGGTATCAAATCATTCTACAACTTAAAAAAA

SEQ ID NO: 14456 - protein, 400 aa, Streptococcus agalactiae
  VARIANT 3: Xaa = Any Amino Acid
MVXSGASTGEHEAVELRDGDKSRYGGLGTQKAVDNVNNVIAEAIIGYDVRDQQAIDRAMIALDGTPNKGKLGANAILGVSIAVARAAADYLEVPLYSYLGGFNTKVLPTPMMNIINGGSHSDAPIAFQEFMIMPVGAPTFKEALRWGAEVFHALKKILKERGLETAVGDEGGFAPKFEGTEDGVETILKAIEAAGYEAGENGIMIGFDCASSEFYDAERKVYDYSKFEGEGGAVRTAAEQIDYLEELVNKYPIITIEDGMDENDWDGWKALTERLGGRVQLVGDDFFVTNTDYLARGIKEEAANSILIKVNQIGTLTETFEAIEMAKEAGYTAVVSHRSGETEDSTIADIAVATNAGQIKTGSLSRTDRIAKYNQLLRIEDQLGEVAQYKGIKSFYNLKK

SEQ ID NO: 14457 - protein, 1062 aa, Streptococcus agalactiae; identical to SEQ ID NO: 5673

SEQ ID NO: 14458 - protein, 354 aa, Streptococcus agalactiae; identical to SEQ ID NO: 1170

SEQ ID NO: 14459 - protein, 1281 aa, Streptococcus agalactiae; identical to SEQ ID NO: 5675

SEQ ID NO: 14460 - protein, 427 aa, Streptococcus agalactiae; identical to SEQ ID NO: 1172

SEQ ID NO: 14461 - protein, 510 aa, Streptococcus agalactiae; identical to SEQ ID NO: 5677

SEQ ID NO: 14462 - protein, 170 aa, Streptococcus agalactiae; identical to SEQ ID NO: 5678

SEQ ID NO: 14463 - protein, 1371 aa, Streptococcus agalactiae; identical to SEQ ID NO: 9961

SEQ ID NO: 14464 - protein, 457 aa, Streptococcus agalactiae; identical to SEQ ID NO: 1176

SEQ ID NO: 14465 - protein, 1349 aa, Streptococcus agalactiae
ATGTTACATAAAAATGATATTATTGAAACTGAAATTAGCGACATTAGCCATGAGGGAATGGGTATTGCCAAAGTAGATGGCTTTGTTTTCTTTGTTGAAAATGCTCTTCCAGGTGAGATTATTAAGATGCGCGTCTTGAAATTACGTAAGCGTATAGGATATGGAAAAGTTGAGGAATATTTAACGACTTCTCCTCACCGAAATGAAGGATTAGACTATACCTATTTACGTACAGGGATTGCTGATTTGGGACATCTTACTTATGAACAACAGCTGTTATTTAAACAAAAACAAGTAGCTGATAACCTTATAAAATTGCTCATATATCTGATGTTTTAGTAGAACCTACTCTTGGTATGACAATCCCTTTGGCATATCGAAATAAAGCTCAGGTACCAGTTCGTCGTGTTGATGGACAGCTAGAGACAGGTTTTTTCAGAAAAAATTCACATACTCTGGTATCCATTGAAGATTATTTAATTCAGGAAAAAGAGATTGATGCTCTGATTAATTTTACACGAGATTTATTAAGAAAATTTGATGTTAAACCATATGACGAAGAGCAGCAATCTGGTTTAATTAGAAATCTCGTTGTTCGTCGAGGACATTATACAGGGCAATTAATGTTGGTTTTGGTGACAACACGTCCTAAAATATTCCGCATTGACCAAATGATTGAAAAGTTGGTGTCTGCCTTTCCTTCTGTTGTTTCAATTATGCAAAATATTAATGATCGTAATAGCAACGTTATTTTTGGGAAAGAATTTCGTACTCTATATGGTTCTGATACTATTGAGGACCAAATGTTAGGAAATACTTACGCTATATCAGCCCAATCTTTTTACCAAGTTAATACTGAAATGGCTGAAAAACTGTACCAAAAAGCAATCGATTTTTCAGATTTAAACTCAGAGGATATCGTTATTGATGCCTATTCAGGTATAGGAACAATTGGCTTATCTGTTGCTAAACAAGTAAAACATGTTTATGGTGTTGAAGTTGTTGAAAAAGCAGTAAGTGATGCCAAAGAAAATGCTACTCGAAATGGGATAACTAACAGTACCTATGTTGCTGATTCGGCTGAAAATGCAATGGCAAAGTGGCTTAAAGAAGGTAAAAACCAACTGTTATAATGGTTGATCCACCACGAAAGGATTAACGGAGAGTTTTGTATATTCTGCTGCCCAAACAAAAGCAGATAAAATCACTTATATTTCTTGTAATTCAGCGACAATGGCGCGTGATATCAAACTATTTGAGAATTAGGGTATCATTTAGTAAAAATTCAACCAGTAGACTTATTCCCAATGACACATCATGTGGAGTGTGTGGCTCTGCTCGTAAAAGCC

SEQ ID NO: 14466 - protein, 451 aa, Streptococcus agalactiae; identical to SEQ ID NO: 1178

SEQ ID NO: 14467 - protein, 210 aa, Streptococcus agalactiae; identical to SEQ ID NO: 10059

SEQ ID NO: 14468 - protein, 70 aa, Streptococcus agalactiae; identical to SEQ ID NO: 1180

SEQ ID NO: 14469 - protein, 735 aa, Streptococcus agalactiae; identical to SEQ ID NO: 10061

SEQ ID NO: 14470 - protein, 245 aa, Streptococcus agalactiae; identical to SEQ ID NO: 1182

SEQ ID NO: 14471 - protein, 516 aa, Streptococcus agalactiae
TTGAGAGTTTATGAAAATAAAGAAGAGTTGAAAAAAGAAATAAGTAAAACATTTGAGAAATACATTATGGAATTTAATAATATTCCAGAGAATCTAAAAGATAAAAGAATTGATGAAGTTGATAGAACTCCAGCAGAAAACCTTTCTTATCAGGTTGGCTGGACCAACTTGGTTCTTAAATGGGAAGAAGATGAAAGAAAGGGACTTCAAGTAAAAACACCATCGGATAAATTTAAATGGAATCAACTTGGTGAATTATATCAGTGGTTCACAGATACCTACGCTCATTTATCTCTGCAAGAGTTGAAAGCAAAATTAAATGAAAATATTAATTCTATCTATGCAATGATTGATTTGTTGAGTGAGGAAGAATTATTTGAAGCGCATATGAGAAAGTGGGCTGATGAAGCGACTAAAACAGCGACTTGGGAAGTGTATAAGTTTATTCATGTAAATACGGTTGCACCTTTTGGAACTTTCAGAACTAAAATCAGAAAATGGAAGAAGATAGTATTA

SEQ ID NO: 14472 - protein, 172 aa, Streptococcus agalactiae; identical to SEQ ID NO: 10064

SEQ ID NO: 14473 - protein, 114 aa, Streptococcus agalactiae
ATGGTTACCAAAGGCGATAGAAGAAAAAACTATCGTCTTTTTCTTTATAAAGTATTAGATGAGGAAAAGACGATAGTTTTTTCTAATACAAATATTAAATTCTCACGACAGATG

SEQ ID NO: 14474 - protein, 38 aa, Streptococcus agalactiae
MVTKGDRRKNYRLFLYKVLDEEKTIVFSNTNIKFSRQM

SEQ ID NO: 14475 - protein, 330 aa, Streptococcus agalactiae; identical to SEQ ID NO: 10067

SEQ ID NO: 14476 - protein, 110 aa, Streptococcus agalactiae; identical to SEQ ID NO: 10068

SEQ ID NO: 14477 - protein, 819 aa, Streptococcus agalactiae
TTGTGTCGTGTTTTACGTGTCAATCGCTCCACTTACTATAAATTTCTAAAACATAAGCCCTCAAAAAGAGAATTGGATAATCAAATTTATAAAAAACAAATACTTGAGATTTATACCAAAGCAAACAAAAGACTTGGTGTGAAGTCTATCAAAGTCATTCTTCAAAGAGACTACGACACAAAAATCTCTGAAGGAAGAATTTACCATCTGATGAAGAATATGGCGCTCCCTAAAATGGCTACCGTTAAGCCAAAAACAGCTCTTAAAAAGACTCAAAAAACGTATCCTCAAAACTTACTCAACCAGAAATTTTATCCTGACAAACCTAATCAAGTATGGTCTACTGACTTCACCTATATTTCTATTGGATATAAGAAATATGTCTATCTCTGCGCAATACTTGATCTCTATTCTAGAAAATGTATTGCTTGGAAATTGAGTCACCGTATGGATGCAAAGTTAGCATGTAACACTCTAGAATTAGCTCTTAATAAAAGAAAGATTGAAGGAACACTTCTCTTTCATTCCGACCAAGGGTCACAATTTAAGGCCAGGGAATTTAGAAAAATAATTGATGACAACAATATCATGCATTCTTTTTCTAAACCTGGATATCCTTATGATAATGCCGTAACTGAAGCATTTTTCAAGTATTTAAAGCATAGACAAATCAACCGAAAACATTATCAAAATATCAAACAGGTTCAATTAGACTGCTTTGAATACATTGAGAATTTTTATAACAATTACATCCCACATACGGCTAATCTAGGACTAACCCCTAATCAGAAAGAAGAAAATTATTTTAACGCAATAAAA

SEQ ID NO: 14478 - protein, 273 aa, Streptococcus agalactiae; identical to SEQ ID NO: 1190

SEQ ID NO: 14479 - protein, 318 aa, Streptococcus agalactiae
GTGTTACAATCTGTTTTAAAAGACACAAAAACGAAAGGACAACCTATGTCAACATTTAAACGCTATGATGAAGAATTCAAACAATCTCTTGTTAACCTTTATCAAACTGGAAAAACTCAGTCTGAACTCTGTAAAGACTATAGGGTATCCACTTCTGCGCTTGCAAAATGGATCAAACAGTACTCTCAATTCAAACTCGAAGATAATTCTGTACTTACTGCCAAGCAAATACAAGAGTTACAAAAACGTAATGCGCAGCTTGAAGAGGAGAACCTTATCCTAAAAAAAGCAAGTGCCATATTCATGCAAAACTTAAAG

SEQ ID NO: 14480 - protein, 106 aa, Streptococcus agalactiae
MLQSVLKDTKTKGQPMSTFKRYDEEFKQSLVNLYQTGKTQSELCKDYRVSTSALAKWIKQYSQFKLEDNSVLTAKQIQELQKRNAQLEEENLILKKASAIFMQNLK

SEQ ID NO: 14481 - protein, 147 aa, Streptococcus agalactiae
GTGCAGGAAGTTTTGATTATCGCAAGAGAGAATCATCAAGTGACTCATGAACACGTGTCAATCTTATTGACCTGCGTTCAAGAATTGATTGTGGAAGTCAATCAAACACAGCCACTCAGTCGTGAGTTTCGTGAAAAGTATATGGGT

SEQ ID NO: 14482 - protein, 49 aa, Streptococcus agalactiae; identical to SEQ ID NO: 1196

SEQ ID NO: 14483 - protein, 177 aa, Streptococcus agalactiae
TTGCTAAGAGCAATTGTCAAAATTTCTCAGTCTATGCTAGAAGAGTTCTTCTTAATCCCAATATGTCATTTGTCACGATTAACACGGATTGGAAATAACATCAATCAAATTGCGCGTGCTATCAACCAAAGCCATCTAATTTCTCAGGCTCAGTATCACTTTCATCGAGAAGCACGT

SEQ ID NO: 14484 - protein, 59 aa, Streptococcus agalactiae
MLRAIVKISQSMLEEFFLIPICHLSRLTRIGNNINQIARAINQSHLISQAQYHFHREAR

SEQ ID NO: 14485 - protein, 186 aa, Streptococcus agalactiae
ATGGGGAATGGTCATTTTGTGACCATCATCGACTATGGCACAGGTAATCCCTATACCTCAACAACGCCTCTTATTACTGGGAAAATTGGTGAGGATTTTGCTTATTACTTAACCGAATCAGAGCAACCCCCCCTGCTGTTGGGCTTAACGTGCTTCTCGATGAAAGTGATACTGAGCCTGAGAAAT

SEQ ID NO: 14486 - protein, 62 aa, Streptococcus agalactiae
MGNGHFVTIIDYGTGNPYTSTTPLITGKIGEDFAYYLTESEQPPLLLGLTCFSMKVILSLRN

SEQ ID NO: 14487 - protein, 345 aa, Streptococcus agalactiae; identical to SEQ ID NO: 10077

SEQ ID NO: 14488 - protein, 115 aa, Streptococcus agalactiae; identical to SEQ ID NO: 10078

SEQ ID NO: 14489 - protein, 1206 aa, Streptococcus agalactiae
ATGGTTACATTCGATTTTAAACATGTTCAAACATTGCATACCATATCTCAACTACCTATTTCAGTCATGTCACGAGACAAGGAACTCGTTCAGTTATATAGTAACGAAGACTATCTGTTGCCTTACTATCAGTTTTTAAAACATTTAGCTATCCCTTATAACCAAGATATCACTGTTTATGAGGGTCTTTTTGAAGAATCATTCTTAATTTTTCCTGTCTGTCAATATCTTATTGCTATTGGACCATTTTATCCCTATAGCCCTGATATCAATAGGCAAGAACAGTTATCCAGTCGCTTTCTAGAACAATTTTCTCATCGTAGTAAAAAAGAAATCTTATCCTATATAAAGCTTGTCCCTTGTTTTCCTACTACCAGTATACGTAGTCTTCTTGTGTCTATCGATGCCTTTTTCCAAACACAGTTTGAGGCTAGTTGCCAACAAGTCATCAATCATTTATTAGAAGAGTCAGAACAGATTGTTGCGGATCCTGATATTGTTCTTCACCTAAAACATACTAAGAAAAACTCTTTTCAGTTACCCACTGTTTTAAACCATCTCAATCACATTATTGATCTCGTTAAGCTGGGTAACACTCAACTGTTAAAGCAAGAAATTAATCGCCTCCCATCATCCAGTGTTACCTCATCTTCAATCCCTGCCCTAAGAGCTGAAAAGAACTTAACTGTTGTTTACTTAACAAAATTACTAGAATTAAGTTTCGAGGAAAATACTGATGTGGCTAAAAGTTATGCGCTGGTAAAGCACTATATGGCTTTAAACGAAGAGGCTCCTGATCTTATTGATGTTTCAAGAATTCGCTGTGCAGCTCTTATTGATTTTTCAGAATCCTTAACCAATAAGAGCATCTCTGACAAGCAGCAAATGTACAATAGTATTCTCCATTATGTGGACAACCACCTCTACTCCAAACTCAAAGTATCTGATATTGCCAACTACCTATATATCTCAGATTCCCACTTACGCTCAGTTTTTAAAAAATACTCTGACATTTCCTTGCAAAGTTATATTCTAAAGGCAAAAATTAAGGAGGGACAATTACTACTGCAAAGAGGGGTACCGATTGGGGAAGTAGCGAAATTATTACATTTTTACGACACCACACATTTTCTTAAAACCTTTAAAAAATACGTGGGAATATCTTCAAACGAATATCTTACTAAATATCGTGAGACCTCATGCCAG

SEQ ID NO: 14490 - protein, 402 aa, Streptococcus agalactiae
MVTFDFKHVQTLHTISQLPISVMSRDKELVQLYSNEDYLLPYYQFLKHLAIPYNQDITVYEGLFEESFLIFPVCQYLIAIGPFYPYSPDINRQEQLSSRFLEQFSHRSKKEILSYIKLVPCFPTTSIRSLLVSIDAFFQTQFEASCQQVINHLLEESEQIVADPDIVLHLKHTKKNSFQLPTVLNHLNHIIDLVKLGNTQLLKQEINRLPSSSVTSSSIPALRAEKNLTVVYLTKLLELSFEENTDVAKSYALVKHYMALNEEAPDLIDVSRIRCAALIDFSESLTNKSISDKQQMYNSILHYVDNHLYSKLKVSDIANYLYISDSHLRSVFKKYSDISLQSYILKAKIKEGQLLLQRGVPIGEVAKLLHFYDTTHFLKTFKKYVGISSNEYLTKYRETSCQ

SEQ ID NO: 14491 - protein, 1662 aa, Streptococcus agalactiae
ATGAAATTATCGAAGAAGTTATTGTTTTCGGCTGCTGTTTTAACAATGGTGGCGGGGTCAACTGTTGAACCAGTAGCTCAGTTTGCGACTGGAATGAGTATTGTAAGAGCTGCAGAAGTGTCACAAGAACGCCCAGCGAAAACAACAGTAAATATCTATAAATTACAAGCTGATAGTTATAAATCGGAAATTACTTCTAATGGTGGTATCGAGAATAAAGACGGCGAAGTAATATCTAACTATGCTAAACTTGGTGACAATGTAAAAGGTTTGCAAGGTGTACAGTTTAAACGTTATAAAGTCAAGACGGATATTTCTGTTGATGAATTGAAAAAATTGACAACAGTTGAAGCAGCAGATGCAAAAGTTGGAACGATTCTTGAAGAAGGTGTCAGTCTACCTCAAAAAACTAATGCTCAAGGTTTGGTCGTCGATGCTCTGGATTCAAAAAGTAATGTGAGATACTTGTATGTAGAAGATTTAAAGAATTCACCTTCAAACATTACCAAAGCTTATGCTGTACCGTTTGTGTTGGAATTACCAGTTGCTAACTCTACAGGTACAGGTTTCCTTTCTGAAATTAATATTTACCCTAAAAACGTTGTAACTGATGAACCAAAAACAGATAAAGATGTTAAAAAATTAGGTCAGGACGATGCAGGTTATACGATTGGTGAAGAATTCAAATGGTTCTTGAAATCTACAATCCCTGCCAATTTAGGTGACTATGAAAAATTTGAAATTACTGATAAATTTGCAGATGGCTTGACTTATAAATCTGTTGGAAAAATCAAGATTGGTTCGAAAACACTGAATAGAGATGAGCACTACACTATTGATGAACCAACAGTTGATAACCAAAATACATTAAAAATTACGTTTAAACCAGAGAAATTTAAAGAAATTGCTGAGCTACTTAAAGGAATGACCCTTGTTAAAAATCAAGATGCTCTTGATAAAGCTACTGCAAATACAGATGATGCGGCATTTTTGGAAATTCCAGTTGCATCAACTATTAATGAAAAAGCAGTTTTAGGAAAAGCAATTGAAAATACTTTTGAACTTCAATATGACCATACTCCTGATAAAGCTGACAATCCAAAACCATCTAATCCTCCAAGAAAACCAGAAGTTCATACTGGTGGGAAACGATTTGTAAAGAAAGACTCAACAGAAACACAAACACTAGGTGGTGCTGAGTTTGATTTGTTGGCTTCTGATGGGACAGCAGTAAAATGGACAGATGCTCTTATTAAAGCGAATACTAATAAAAACTATATTGCTGGAGAAGCTGTTACTGGGCAACCAATCAAATTGAAATCACATACAGACGGTACGTTTGAGATTAAAGGTTTGGCTTATGCAGTTGATGCGAATGCAGAGGGTACAGCAGTAACTTACAAATTAAAAGAAACAAAAGCACCAGAAGGTTATGTAATCCCTGATAAAGAAATCGAGTTTACAGTATCACAAACATCTTATAATACAAAACCAACTGACATCACGGTTGATAGTGCTGATGCAACACCTGATACAATTAAAAACAACAAACGTCCTTCAATCCCTAATACTGGTGGTATTGGTACGGCTATCTTTGTCGCTATCGGTGCTGCGGTGATGGCTTTTGCTGTTAAGGGGATGAAGCGTCGTACAAAAGATAAC

SEQ ID NO: 14492 - protein, 554 aa, Streptococcus agalactiae
MKLSKKLLFSAAVLTMVAGSTVEPVAQFATGMSIVRAAEVSQERPAKTTVNIYKLQADSYKSEITSNGGIENKDGEVISNYAKLGDNVKGLQGVQFKRYKVKTDISVDELKKLTTVEAADAKVGTILEEGVSLPQKTNAQGLVVDALDSKSNVRYLYVEDLKNSPSNITKAYAVPFVLELPVANSTGTGFLSEINIYPKNVVTDEPKTDKDVKKLGQDDAGYTIGEEFKWFLKSTIPANLGDYEKFEITDKFADGLTYKSVGKIKIGSKTLNRDEHYTIDEPTVDNQNTLKITFKPEKFKEIAELLKGMTLVKNQDALDKATANTDDAAFLEIPVASTINEKAVLGKAIENTFELQYDHTPDKADNPKPSNPPRKPEVHTGGKRFVKKDSTETQTLGGAEFDLLASDGTAVKWTDALIKANTNKNYIAGEAVTGQPIKLKSHTDGTFEIKGLAYAVDANAEGTAVTYKLKETKAPEGYVIPDKEIEFTVSQTSYNTKPTDITVDSADATPDTIKNNKRPSIPNTGGIGTAIFVAIGAAVMAFAVKGMKRRTKDN

SEQ ID NO: 14493 - protein, 921 aa, Streptococcus agalactiae; identical to SEQ ID NO: 10083

SEQ ID NO: 14494 - protein, 307 aa, Streptococcus agalactiae; identical to SEQ ID NO: 1208

SEQ ID NO: 14495 - protein, 915 aa, Streptococcus agalactiae; identical to SEQ ID NO: 10085

SEQ ID NO: 14496 - protein, 305 aa, Streptococcus agalactiae; identical to SEQ ID NO: 1214

SEQ ID NO: 14497 - protein, 849 aa, Streptococcus agalactiae; identical to SEQ ID NO: 10087

SEQ ID NO: 14498 - protein, 283 aa, Streptococcus agalactiae; identical to SEQ ID NO: 1216

SEQ ID NO: 14499 - protein, 2670 aa, Streptococcus agalactiae
ATGAAAAAGAGACAAAAAATATGGAGAGGGTTATCAGTTACTTTACTAATCCTGTCCCAAATTCCATTTGGTATATTGGTACAAGGTGAAACCCAAGATACCAATCAAGCACTTGGAAAAGTAATTGTTAAAAAAACGGGAGACAATGCTACACCATTAGGCAAAGCGACTTTTGTGTTAAAAAATGACAATGATAAGTCAGAAACAAGTCACGAAACGGTAGAGGGTTCTGGAGAAGCAACCTTTGAAAACATAAAACCTGGAGACTACACATTAAGAGAAGAAACAGCACCAATTGGTTATAAAAAAACTGATAAAACCTGGAAAGTTAAAGTTGCAGATAACGGAGCAACAATAATCGAGGGTATGGATGCAGATAAAGCAGAGAAACGAAAAGAAGTTTTGAATGCCCAATATCCAAAATCAGCTATTTATGAGGATACAAAAGAAAATTACCCATTAGTTAATGTAGAGGGTTCCAAAGTTGGTGAACAATACAAAGCATTGAATCCAATAAATGGAAAAGATGGTCGAAGAGAGATTGCTGAAGGTTGGTTATCAAAAAAAAATACAGGGGTCAATGATCTCGATAAGAATAAATATAAAATTGAATTAACTGTTGAGGGTAAAACCACTGTTGAAACGAAAGAACTTAATCAACCACTAGATGTCGTTGTGCTATTAGATAATTCAAATAGTATGAATAATGAAAGAGCCAATAATTCTCAAAGAGCATTAAAAGCTGGGGAAGCAGTTGAAAAGCTGATTGATAAAATTACATCAAATAAAGACAATAGAGTAGCTCTTGTGACATATGCCTCAACCATTTTTGATGGTACTGAAGCGACCGTATCAAAGGGAGTTGCCGATCAAAATGGTAAAGCGCTGAATGATAGTGTATCATGGGATTATCATAAAACTACTTTTACAGCAACTACACATAATTACAGTTATTTAAATTTAACAAATGATGCTAACGAAGTTAATATTCTAAAGTCAAGAATTCCAAAGGAAGCGGAGCATATAAATGGGGATCGCACGCTCTATCAATTTGGTGCGACATTTACTCAAAAAGCTCTAATGAAAGCAAATGAAATTTTAGAGACACAAAGTTCTAATGCTAGAAAAAAACTTATTTTTCACGTAACTGATGGTGTCCCTACGATGTCTTATGCCATAAATTTTAATCCTTATATATCAACATCTTACCAAAACCAGTTTAATTCTTTTTTAAATAAAATACCAGATAGAAGTGGTATTCTCCAAGAGGATTTTATAATCAATGGTGATGATTATCAAATAGTAAAAGGAGATGGAGAGAGTTTTAAACTGTTTTCGGATAGAAAAGTTCCTGTTACTGGAGGAACGACACAAGCAGCTTATCGAGTACCGCAAAATCAACTCTCTGTAATGAGTAATGAGGGATATGCAATTAATAGTGGATATATTTATCTCTATTGGAGAGATTACAACTGGGTCTATCCATTTGATCCTAAGACAAAGAAAGTTTCTGCAACGAAACAAATCAAAACTCATGGTGAGCCAACAACATTATACTTTAATGGAAATATAAGACCTAAAGGTTATGACATTTTTACTGTTGGGATTGGTGTAAACGGAGATCCTGGTGCAACTCCTCTTGAAGCTGAGAAATTTATGCAATCAATATCAAGTAAAACAGAAAATTATACTAATGTTGATGATACAAATAAAATTTATGATGAGCTAAATAAATACTTTAAAACAATTGTTGAGGAAAAACATTCTATTGTTGATGGAAATGTGACTGATCCTATGGGAGAGATGATTGAATTCCAATTAAAAAATGGTCAAAGTTTTACACATGATGATTACGTTTTGGTTGGAAATGATGGCAGTCAATTAAAAAATGGTGTGGCTCTTGGTGGACCAAACAGTGATGGGGGAATTTTAAAAGATGTTACAGTGACTTATGATAAGACATCTCAAACCATCAAAATCAATCATTTGAACTTAGGAAGTGGACAAAAAGTAGTTCTTACCTATGATGTACGTTTAAAAGATAACTATATAAGTAACAAATTTTACAATACAAATAATCGTACAACGCTAAGTCCGAAGAGTGAAAAAGAACCAAATACTATTCGTGATTTCCCAATTCCCAAAATTCGTGATGTTCGTGAGTTTCCGGTACTAACCATCAGTAATCAGAAGAAAATGGGTGAGGTTGAATTTATTAAAGTTAATAAAGACAAACATTCAGAATCGCTTTTGGGAGCTAAGTTTCAACTTCAGATAGAAAAAGATTTTTCTGGGTATAAGCAATTTGTTCCAGAGGGAAGTGATGTTACAACAAAGAATGATGGTAAAATTTATTTTAAAGCACTTCAAGATGGTAACTATAAATTATATGAAATTTCAAGTCCAGATGGCTATATAGAGGTTAAAACGAAACCTGTTGTGACATTTACAATTCAAAATGGAGAAGTTACGAACCTGAAAGCAGATCCAAATGCTAATAAAAATCAAATCGGGTATCTTGAAGGAAATGGTAAACATCTTATTACCAACACTCCCAAACGCCCACCAGGTGTTTTTCCTAAAACAGGGGGAATTGGTACAATTGTCTATATATTAGTTGGTTCTACTTTTATGATACTTACCATTTGTTCTTTCCGTCGTAAACAATTG

SEQ ID NO: 14500 - protein, 890 aa, Streptococcus agalactiae
MKKRQKIWRGLSVTLLILSQIPFGILVQGETQDTNQALGKVIVKKTGDNATPLGKATFVLKNDNDKSETSHETVEGSGEATFENIKPGDYTLREETAPIGYKKTDKTWKVKVADNGATIIEGMDADKAEKRKEVLNAQYPKSAIYEDTKENYPLVNVEGSKVGEQYKALNPINGKDGRREIAEGWLSKKNTGVNDLDKNKYKIELTVEGKTTVETKELNQPLDVVVLLDNSNSMNNERANNSQRALKAGEAVEKLIDKITSNKDNRVALVTYASTIFDGTEATVSKGVADQNGKALNDSVSWDYHKTTFTATTHNYSYLNLTNDANEVNILKSRIPKEAEHINGDRTLYQFGATFTQKALMKANEILETQSSNARKKLIFHVTDGVPTMSYAINFNPYISTSYQNQFNSFLNKIPDRSGILQEDFIINGDDYQIVKGDGESFKLFSDRKVPVTGGTTQAAYRVPQNQLSVMSNEGYAINSGYIYLYWRDYNWVYPFDPKTKKVSATKQIKTHGEPTTLYFNGNIRPKGYDIFTVGIGVNGDPGATPLEAEKFMQSISSKTENYTNVDDTNKIYDELNKYFKTIVEEKHSIVDGNVTDPMGEMIEFQLKNGQSFTHDDYVLVGNDGSQLKNGVALGGPNSDGGILKDVTVTYDKTSQTIKINHLNLGSGQKVVLTYDVRLKDNYISNKFYNTNNRTTLSPKSEKEPNTIRDFPIPKIRDVREFPVLTISNQKKMGEVEFIKVNKDKHSESLLGAKFQLQIEKDFSGYKQFVPEGSDVTTKNDGKIYFKALQDGNYKLYEISSPDGYIEVKTKPVVTFTIQNGEVTNLKADPNANKNQIGYLEGNGKHLITNTPKRPPGVFPKTGGIGTIVYILVGSTFMILTICSFRRKQL

SEQ ID NO: 14501 - protein, 567 aa, Streptococcus agalactiae
ATGTTAGAAGTCAGAGAGCAGGTTGACCATGTGATGATTCCAAAAATCAATCAGGATTTACCAATCTACGCTGGTTCAGAAGAGGACAATCTGCAACGGGGAGTTGGTCATCTAGAAGGGATAAGTTTGCCGATTGGAGGGGCTTCTACACATGCGGTCTTGAGCGGTCAAAGAGGTATGCCAGCTGCTCGGTTGTTTGCGGATTTGGATAAGATGAAAAAAGGTGATTATTTTTATGTTACCAATCTGAAAGAAACCTTGGCTTATCAAGTGGATCGTATCATGGTGATTGAACCTAGCCAATTGGATGCCGTGAGCATTGAAGAGGATAAAGATTATGTTACCCTTCTGACCTGTACACCTTATATGGGCTCTTTGTCAACTGTAATGGGTGACTTATCATTAACAACGAGAGAGAATCAGCTTGGTTCTCTCTCTTTTTGGATGTTCAAAGCGATGAGAATTTTGCTTTTAAAATTTTTAAAGTTGCGAAAGCCAAAGGCTTGTCGCTTGATGTCTTTGATAAGCTTGTTGGTCGCTTCTAATTTGGCATTGGAAAGGGATAGC

SEQ ID NO: 14502 - protein, 189 aa, Streptococcus agalactiae; identical to SEQ ID NO: 1222

SEQ ID NO: 14503 - protein, 603 aa, Streptococcus agalactiae
GTGGCGCGCGATCCATATAGTGATAGATCGAGATATTTAGATCCAAAAGTTCTATCATCCTCTTTTGGCGCCTTTTTTCCAGCAGATAATATTAAGGTAGCTTGGTCTAACAACTCCAGCACTTTATTTACACCACCTATTAATGCAAACTACACCACTCAGATTCAAGCTATTGGGACAACGATTAAGTCACAAATTCCGGAATCGATTTTGACGGTTACGGATAAAAAGAGCAGGAAGTTCAGCATTAACAAGATTGACGAAGCTAAAGAAGGCTTAGTAGGTGCGACCTTCACCTTGTCTAAACGCACAACAGTAGCGGCAGATCATCAAGTACAAGGAGATTTCATTCCTGTCAGCAAAGAGACGACAGTCGGTCGGACAACCCTTACCTTTGACAACCTTAAACCTGGATTTTATGACCTTAAAGAAACGAAAGCGCCGAATGCTTACGTACTTGATCCTAAGACTTATGTTGTGGTCGTTCAAAATTCAGGAAAAACGACAATTGTGGATGAAGCTAACTTCAAAGAGGCTGATTACCCAATGGCTGATAATACCAGCCATGTGGAGTGCGTAGCGTTGCTACAACGAAGCAAAGGG

SEQ ID NO: 14504 - protein, 201 aa, Streptococcus agalactiae; identical to SEQ ID NO: 1224

SEQ ID NO: 14505 - protein, 90 aa, Streptococcus agalactiae; identical to SEQ ID NO: 5685

SEQ ID NO: 14506 - protein, 30 aa, Streptococcus agalactiae; identical to SEQ ID NO: 1226

SEQ ID NO: 14507 - protein, 93 aa, Streptococcus agalactiae; identical to SEQ ID NO: 5687

SEQ ID NO: 14508 - protein, 31 aa, Streptococcus agalactiae; identical to SEQ ID NO: 5688

SEQ ID NO: 14509 - protein, 228 aa, Streptococcus agalactiae; identical to SEQ ID NO: 5689

SEQ ID NO: 14510 - protein, 76 aa, Streptococcus agalactiae; identical to SEQ ID NO: 1228

SEQ ID NO: 14511 - protein, 102 aa, Streptococcus agalactiae; identical to SEQ ID NO: 5691

SEQ ID NO: 14512 - protein, 34 aa, Streptococcus agalactiae; identical to SEQ ID NO: 1230

SEQ ID NO: 14513 - protein, 267 aa, Streptococcus agalactiae; identical to SEQ ID NO: 5693

SEQ ID NO: 14514 - protein, 89 aa, Streptococcus agalactiae; identical to SEQ ID NO: 1232

SEQ ID NO: 14515 - protein, 1147 aa, Streptococcus agalactiae
ATGGTACGTAAATTTTTAAAATCGCTCCTATCTCTCTTTCTTATAGCAGTAATCGCCACCGGTATTTCAGTGGCATGTTTCTTTTTTATTCCAGAAAATAAAGGGAATATTACACCGATTTTATTGCATCGCTTTATGCGAAAAAATAATGTTAATGGAATGATGATTGTTAGCGATAATACTGGTAAACCGATTACCATCTCGCATGGGATTAACCGTGGGGAAGTTGAAACGGATATTGAAAATAATAAATTATTTCCAATGGCTTCTCTCCAAAAACTCATGACAGGAATTATTATCCAAAGATTAATTGATCAAGATGTCTTGAGTGAAGACGACCGATTGTCTCAGTTCTTTCCCCAAGTAAAAGGTAGTAATAGTATTACCATCCACCAATTGTTGACCCATACGAGTGGGTTAAGAGAAAAAGGTGTTAAGGTGTCTCCTTATCTAAAAAATGAGAGAGAACAATTACAATTTTGCTTAAAACACTATAACTTTGTTAATAAGAAATCGTGGTATTATTCTAATATCAACTTTAGTTTCCTAACAGGTATAGCCACTCAAGTTACGGGAAGGACCTACGCTGAACTTGTTGATGATGTGATAAAAAATCCTTTGCGATTAGATGATACCCAAAGTTACCAATCAGTTGTTAATCATGACTTAGTTAGCCCAATGCGAAAGAACGGCAAGTTAAATAAAATTAATATCTTTAATCAAGTATCCACAGCATATGGAGCTGGAGATTTTTTCACAACTCCGCTGAACTTTTGGGTGTTGATGCGGTCTTTTTCTAAAGGGTACTTTTTCCAACGGATGAATATACCAAACATCAAAATGATGCGATATCACATTATTATGGTGGGCTTTACATGCATGGTCGTATAGTTAATTCTAATGGGGCCTTTTTCCAGTATTCAAGTTTTGGTTATGCAGATCTAAAGACGCATGATACAATGGTGCTTTTTATGAATAACAAAGTCTATAGTGATGCTAGTCACGTGGCACCAAAAGCATTTGAATATTATCAAAAATTTATGTTCCTTAATAAGATTTTCCACTTAGTCTTTTACTTGTATTTTCTTTCTTTTTAATGCTTTTAATACGTCATTCGTTTAGGAAAAGAAGGTATAAGAAACGTCTC

SEQ ID NO: 14516 - protein, 383 aa, Streptococcus agalactiae
  VARIANT 360: Xaa = Any Amino Acid
MVRKFLKSLLSLFLIAVIATGISVACFFFIPENKGNITPILLHRFMRKNNVNGMMIVSDNTGKPITISHGINRGEVETDIENNKLFPMASLQKLMTGIIIQRLIDQDVLSEDDRLSQFFPQVKGSNSITIHQLLTHTSGLREKGVKVSPYLKNEREQLQFCLKHYNFVNKKSWYYSNINFSFLTGIATQVTGRTYAELVDDVIKNPLRLDDTQSYQSVVNHDLVSPMRKNGKLNKINIFNQVSTAYGAGDFFTTPLNFWVLMRSFSKGYFFPTDEYTKHQNDAISHYYGGLYMHGRIVNSNGAFFQYSSFGYADLKTHDTMVLFMNNKVYSDASHVAPKAFEYYQKFMFLNKIFHLVFYXVFSFFLMLLIRHSFRKRRYKKRL

SEQ ID NO: 14517 - protein, 321 aa, Streptococcus agalactiae
ATGTCAATGATTGAAGTTTCTCACCTTCAGAAAAATTTTATAAAAACCGTTAAAGCACCAGGGTTAAAAGGAGCATTTCAATCATTTCTTCGTCCTGAAAAACACACCTTTGAAGCTGTTAAAGATTTAACATTTGATGTGCCTAAAGGACAAATTTTGGGATTTATTGGAGCGAACGGTGCAGGAAAATCTACAACAATTAAAATGTTAACTGGGATTTTAAAACCAACTTCGGGCTTTTGCCGTATTGATGGCAAATTGCCACAAGAAAACCGACAAAATTATGTTAAGGATATTGGAGTCGTTTTTGGGCAACGTACG

SEQ ID NO: 14518 - protein, 107 aa, Streptococcus agalactiae
MSMIEVSHLQKNFIKTVKAPGLKGAFQSFLRPEKHTFEAVKDLTFDVPKGQILGFIGANGAGKSTTIKMLTGILKPTSGFCRIDGKLPQENRQNYVKDIGVVFGQRT

SEQ ID NO: 14519 - protein, 666 aa, Streptococcus agalactiae
TTGTGGTGGGATTTAGCTCTACAAGAAACCTATACAGTGTTAAAAGAAATCTATGACGTTCCTGATAAAGAATTTCGCAAACGCATGGCTTTTTTAAATGAGGTTTTGGAACTAAATGACTTTATAAAGGATCCTGTTAGAACTTTGTCTCTCGGACAGCGTATGAGAGCGGATATCGCAGCTTCTTTATTACATAACCCAAAGGTTCTTTTCTTAGATGAACCCACCATTGGCTTGGACGTTTCAGTGAAAGATAATATCCGACGTGCAATCACACAAATTAATCAAGAAGAAGAGACAACGATTTTACTAACGACACATGACCTCAGTGATATTGAACAACTTTGTCATCGTATTTTTATGATTGATAGAGGACAAGAAATATTTGATGGCACAGTTTCTCAGCTAAAAGAGACATTTGGAAAGATGAAAACTCTTTCTTTTGATTTGCGCCCAGGACAAGAGCATATCAGCTCTAGTTTAATTGGAAAGTCGGAGATTAATATTAAACGTAATGACTTAGTTTTAGATATTCAGTATGATAGTTCTCGCTACCAAACTGCTGACATAATTCAGCAGACATTAGCAGATTTTTCTGTACGTGACCTTAAAATGACAGATGCGGATATTGAAGATATCATTCGTCGCTTCTATAGAAATGAGCTA

SEQ ID NO: 14520 - protein, 222 aa, Streptococcus agalactiae
MWWDLALQETYTVLKEIYDVPDKEFRKRMAFLNEVLELNDFIKDPVRTLSLGQRMRADIAASLLHNPKVLFLDEPTIGLDVSVKDNIRRAITQINQEEETTILLTTHDLSDIEQLCHRIFMIDRGQEIFDGTVSQLKETFGKMKTLSFDLRPGQEHISSSLIGKSEINIKRNDLVLDIQYDSSRYQTADIIQQTLADFSVRDLKMTDADIEDIIRRFYRNEL

SEQ ID NO: 14521 - protein, 816 aa, Streptococcus agalactiae; identical to SEQ ID NO: 10109

SEQ ID NO: 14522 - protein, 272 aa, Streptococcus agalactiae; identical to SEQ ID NO: 5700

SEQ ID NO: 14523 - protein, 783 aa, Streptococcus agalactiae
ATGACAAAATATCAGCGAATGCACTTTATTTTTATTAAACAATACATGAAGCAAATCATGGAGTATAAAATAGACTTTTTTGTAGGCGTTTTAGGAGTATTTTTAACACAAGGGCTAAATCTTTTATTTCTGAATGTTCTTTTTCAACATATCCCTTCTTTAGAAGGATGGACTTTTCAGCAAATAGCTTTTATTTATGGTTTTTCTCTCCTCCCAAAAGGAATTGATCACCTTTTCTTTGATAACTTGTGGGCTCTTGGTCAAAGGCTTATTCGAAAAGGAGAATTTGATAAGTATTTAACCAGGCCGATCAGTCCTTTATTTCATGTCCTAGTTGAAACCTTTCAAGTAGATGCATTGGGGGAGTTATTGGTTGGTTTTATTCTGTTATCTACCACAGTATCTAGTATAAGCTGGATCGTGCCAAAAGTATTATTATTTATATTTATTATCCCCTTTGCAACTTTGATTTATACCTCCTTGAAGATTGCTACGTCAAGTATCGCTTTTTGGACCAAACAATCTGGTGCTGTTATCTATATTTTTTATATGTTTAATGACTTTGCTAAGTATCCTGTCGCAATATATAATAATCTATTGCGTTGGATCATTAGTTTTGTCATTCCATTTGCTTTTACAGCTTATTATCCCGCTGCTTACTTCTTACAAGATAGAAATGTCTATTTTAATATTGGTGGGGTTATCTTGATTTCCTTGATTTCTTTTATGGTATCACTAATACTTTGGCATAAAGGAGTAGAAGTATATGAGAGTGCGGGTTCT

SEQ ID NO: 14524 - protein, 261 aa, Streptococcus agalactiae
MTKYQRMHFIFIKQYMKQIMEYKIDFFVGVLGVFLTQGLNLLFLNVLFQHIPSLEGWTFQQIAFIYGFSLLPKGIDHLFFDNLWALGQRLIRKGEFDKYLTRPISPLFHVLVETFQVDALGELLVGFILLSTTVSSISWIVPKVLLFIFIIPFATLIYTSLKIATSSIAFWTKQSGAVIYIFYMFNDFAKYPVAIYNNLLRWIISFVIPFAFTAYYPAAYFLQDRNVYFNIGGVILISLISFMVSLILWHKGVEVYESAGS

SEQ ID NO: 14525 - protein, 846 aa, Streptococcus agalactiae; identical to SEQ ID NO: 5703

SEQ ID NO: 14526 - protein, 282 aa, Streptococcus agalactiae; identical to SEQ ID NO: 1242

SEQ ID NO: 14527 - protein, 720 aa, Streptococcus agalactiae; identical to SEQ ID NO: 10115

SEQ ID NO: 14528 - protein, 240 aa, Streptococcus agalactiae; identical to SEQ ID NO: 1244

SEQ ID NO: 14529 - protein, 303 aa, Streptococcus agalactiae; identical to SEQ ID NO: 5707

SEQ ID NO: 14530 - protein, 101 aa, Streptococcus agalactiae; identical to SEQ ID NO: 1246

SEQ ID NO: 14531 - protein, 474 aa, Streptococcus agalactiae; identical to SEQ ID NO: 5709

SEQ ID NO: 14532 - protein, 158 aa, Streptococcus agalactiae; identical to SEQ ID NO: 1248

SEQ ID NO: 14533 - protein, 927 aa, Streptococcus agalactiae; identical to SEQ ID NO: 10121

SEQ ID NO: 14534 - protein, 309 aa, Streptococcus agalactiae; identical to SEQ ID NO: 1250

SEQ ID NO: 14535 - protein, 876 aa, Streptococcus agalactiae
ATGTTTGAACTAATTTCTAGAAATCGTAAAGTTTACACGCGAGATCGGTTAGCGTTTTTCATGTCTTTTTTATCAGTTATTATCTTAATTTTGGTCTATCAGATTTTCTTGGGAAAAATTCAATTAGATGCTATAAAAGCAGCATTGAGGAGTAATACAGTATCCAGTGATACTATTCACATGGTTAATTATTGGCTCGTTGCAGGTTTGACGACTATTATTTCAATGACTAGTACATTAGGTGCCTTTGGAGTTATGGTGTCCGACAAAGAAAAAAAATTAAATGAAGATTTTAAGGTCAGTCCTATATCAAATATCAAAATTGAATTGTCCTATGCTATATTTGCCGTTTTATTTGGTATTGTCATGACGATGTTCTCTTGCATCTTTGCTATCGGTATTTTTAACGGCTTTAATTCCTTGCTAGAGTATTCAGCTATGGATTATTTAACTATTTTAGGGATCGTTTCCTTAGGGACTGTTTTATCTGCGGCGATGATTTTACCTATTTTAGCCTTTATTCATACTAGTTCAGCTTTTACGACTCTTAGCACAATTGTAGGGACTTTTATTGGTTTTATTTCAGGAGTATATCTCTCAATTGGCTCGGTAGGAAAAGCATTACAACAGGTTATGACATGGTTTCCATTGACTCAAATCAATTCTCTTTTGAAACAGGTCTTAATGAAGGGTTCTATTGCGAAGGTATTTGACAAAGCCAACGAAGCCACTGTCTCTAACTATAAAGAATCATATGGTGTTGTTTTGCGTAATGCTGATGGAGAAAGGCTGAGTAATCACTTTATGTTGATTTATATCATTGCCCTCATTCTTATTTTATTGGCAATTCATTTTATTATTAAAAAGGTTAAAAAA

SEQ ID NO: 14536 - protein, 292 aa, Streptococcus agalactiae
MFELISRNRKVYTRDRLAFFMSFLSVIILILVYQIFLGKIQLDAIKAALRSNTVSSDTIHMVNYWLVAGLTTIISMTSTLGAFGVMVSDKEKKLNEDFKVSPISNIKIELSYAIFAVLFGIVMTMFSCIFAIGIFNGFNSLLEYSAMDYLTILGIVSLGTVLSAAMILPILAFIHTSSAFTTLSTIVGTFIGFISGVYLSIGSVGKALQQVMTWFPLTQINSLLKQVLMKGSIAKVFDKANEATVSNYKESYGVVLRNADGERLSNHFMLIYIIALILILLAIHFIIKKVKK

SEQ ID NO: 14537 - protein, 2001 aa, Streptococcus agalactiae
ATGAAAGATGATAATAAATTAAAGATTTCTGAAGCTTCCTTAGAAGATTATTCTGAAGTGGTTCATTTATTTAATAGGAATCATGTTTATCAATTTCCAGACGGTAGGCCTTTAACTGTTGATGACCTTGATTTAACGTTAAAAGTTAAAGAAGTGACACATTTATTTTTACTGAAAAATCATGGTGTTTTGATTGGAACATCAGCTTTCTTTAAATTTATTACCTATGGTTGTTTAGATTGGAATAGTAGCTTTAGTGGTTTTCTTTTAATTGATTCGAAAAGTCGTAGTGGACAGGCAATCACTTATCTATATAAAACTATCTTAAAGAAGATAACAAAACTGAAGTTTTCTAATATCTATACCGAAATCAGTAACTACAATAAACCCTCCTTAGCTTTATCAAAATTGAATGGCTTCAAAGAGTATGATAAGACATATGAAGACATACTGCATTGTCGATCATTGCGTAGTCACCTCCCTAAGATATTGAATACGTTTCGTATTTCGAATTATTATGGTAAAACATACGACATATCAACTTTTCAAATTATGGAGGAAATTGAAAATCCCTTGGAAGAGGAGACAGAAATTAGGACCAAAGTCTCTGATGAAGAAATATTATTTAAAGCAGAAGATAGTGCTTCACTTCCTTATTATTTAAAAATGAGCTTGTTTCAAATGGAAATTGCTAAGTTAGATAACCGTTATGTTTTACAAGTTGACTTTTTATCGGAACAAGTAAAGAGGGTTCGGGTTAAAACTGGAAAATATCACTTGGCAAACTTAACGAGGGCTCACCCTAGCCTAACTTTAAGTCGTTTTGCCAATTATTATTACATTCAAGCAACTGTGGAAACCCTTTATGGTAATATCGATGTTCAACTGGAACGTCGAAAAAAGCATTATAGAGATGCAACTATTTGTCTTAAGAGAACTTTTCAAGGTTATGATTTACTTATCTCTCCAAATGGCAGCCTTATTTTTGAAAAGCAGAAAAGAAAGATACTTGAAGATAGTTTTTTGATTTTTAGCCAACCTTTGGACAAGAAATTAGTTGTAAAAGAAGAAGAAAATCACATTACAATCAAATGTTTCTATCAAGGTGCTTTAATTGAGAAAATCATGACATTTACAAGTGACGAAGAAATCACTTGTGTTTATAAATGTAATCAAAAGGCTAAAGAGATGTTCCCAAAATTATTGAAACAGACTTTCAAGTTACACTGCCAAGAGCAGTTGATTAGAGATAGTGAAGGTTATCTTGTGAATGTTCCAGGAAGTTACCCGATTGAGCATGATGATTTTCTTCGAGCAGATAAGTTTGAAGATAGACAATTCCATTATTACCTCCCGAATGAAGATAAAATGATTTCCTATTCTCCTCCTGGCAAAGCCAGCAATCAAATGCAATTTAGACCCTTATGTCTTATTGATACAGATAGCCTTTCTTTTCCACTGACTTATCATTTTAGGATTTCACAAGCATCATCGGAGGAGGCGTTAATCAATCTAAAAAAACAGCCAATATGGGACAGCAACTACCAAGCGTCAGCAACTGACCTTTTAAAACATATCTCTAACCTAACATTAGAAGAAGAGAAGGATTATGGCATCAAGAGAATGATAGCTAACAGAAAGCATTATCCTAGTCACAAACTGGTTTTAGCCTATAATCAGATTGTTTTGCCTAAGAATGAAATTCCAAGAGACAGTGAATTATATTCTATTTCTTTTGATTATCGAATTAGAGGAAAGTTTGTCCAAATCCGCCAAGGGGAACATGTCAAATATGATAATAAATCCTATGTTTTGGAAAATAGTCAACAATTAGTATTGTATGTAGCTAGCGATGATAAATATATACTAATTTCTGCTAAAAATGGAATATTTTATTCTTACAAAGAGAACAATCATTTAAAAATAAGGTGCATGTTTAAAAGGAACTCACCTTATGCTACAAATGTGAGCATTACAGAATATAGAAAGTGTGAAGAAAAA

SEQ ID NO: 14538 - protein, 667 aa, Streptococcus agalactiae; identical to SEQ ID NO: 1254

SEQ ID NO: 14539 - protein, 951 aa, Streptococcus agalactiae
ATGAATACTATTTATAATACATTGAGAACAGATAAAGGTTATAAAGTTTATGAGGGGTATTTATATGAAATTACTGGTGAAGAATGTGAAGAAGCCTTAGACCTTGTGATTCCTAAGAATATTGTATTTGCAGATACAGATACTTGTGGCTACACTTTTTTACTCAATGAAGATGGAACAGTTTATGATGATGTGACTTTCTACAAATTTGATGATAAATATTGGTTGGCTAGTCATAAAGCTTTGGATTCTTATTTAGACAACATCAATTTTGACTATACCGTAACAGATATTTCTGACGAGTATAAAATGCTGCAAATTGAAGGAAGATATTCGGGAGAAATTGCTCAGTCATTTTATGAATATGATATTTCAACACTTAATTTTCGTACTTTGATAGAGATGACTTATAAAGGTGAGAAAGGTTATCTTGCTAGATTTGGTTTTTCTGGAGAATTTGGCTATCAATTTTTCCTACCATCTTCTATTTTTGCTACTTTTGTTTCGGATGTCTGTGAAGGTATAGCAGAGTGTGGGGATGAACTTGATAGATATTTAAGGTTTGAAGTGGGACAACCCATTACTGATATTTATCAACAAGAAGAATATTCTTTATATGAAATAGGTTATTCTTGGAATCTAGATTTCACAAAGGAAGAATTTAGAGGTCGCGATAGCTTGTTAGAGCACATCAGATCAGCAACAGTTAAAAGTGTTGGATTCTCAACGAAGGAAAAACTCGCTTCAGGAACACCAGTGCTATTTGATGACCAAATTGTTGGAAAGATTTTTTGGATAGCAGACGAGAAAGACTCTTCGGAAAATTACCTAGGTTTGATGATTGTTAACCAAACATATGCTCATTCAGGAGTTACTTTTGTAACAGAAGATGGCCAAATTTTGAAAACACAATCAAGCCCTTATTGTATCCCAGAAAGTTGGAACAAAGAA

SEQ ID NO: 14540 - protein, 317 aa, Streptococcus agalactiae
MNTIYNTLRTDKGYKVYEGYLYEITGEECEEALDLVIPKNIVFADTDTCGYTFLLNEDGTVYDDVTFYKFDDKYWLASHKALDSYLDNINFDYTVTDISDEYKMLQIEGRYSGEIAQSFYEYDISTLNFRTLIEMTYKGEKGYLARFGFSGEFGYQFFLPSSIFATFVSDVCEGIAECGDELDRYLRFEVGQPITDIYQQEEYSLYEIGYSWNLDFTKEEFRGRDSLLEHIRSATVKSVGFSTKEKLASGTPVLFDDQIVGKIFWIADEKDSSENYLGLMIVNQTYAHSGVTFVTEDGQILKTQSSPYCIPESWNKE

SEQ ID NO: 14541 - protein, 2193 aa, Streptococcus agalactiae; identical to SEQ ID NO: 10129

SEQ ID NO: 14542 - protein, 731 aa, Streptococcus agalactiae; identical to SEQ ID NO: 1258

SEQ ID NO: 14543 - protein, 1209 aa, Streptococcus agalactiae; identical to SEQ ID NO: 10131

SEQ ID NO: 14544 - protein, 403 aa, Streptococcus agalactiae; identical to SEQ ID NO: 10132

SEQ ID NO: 14545 - protein, 573 aa, Streptococcus agalactiae; identical to SEQ ID NO: 10133

SEQ ID NO: 14546 - protein, 191 aa, Streptococcus agalactiae; identical to SEQ ID NO: 1264

SEQ ID NO: 14547 - protein, 339 aa, Streptococcus agalactiae; identical to SEQ ID NO: 10135

SEQ ID NO: 14548 - protein, 113 aa, Streptococcus agalactiae; identical to SEQ ID NO: 1266

SEQ ID NO: 14549 - protein, 513 aa, Streptococcus agalactiae; identical to SEQ ID NO: 10137

SEQ ID NO: 14550 - protein, 171 aa, Streptococcus agalactiae; identical to SEQ ID NO: 1268

SEQ ID NO: 14551 - protein, 2610 aa, Streptococcus agalactiae
GTGCCAAAGCCTCAAAAAGTAAGAGTAATTGTTGAATTTAATGAGGAATCTATCTTAGATTATGCGACAGAACAGAAAAAAACAGTTGCACAGTTAAATCAAGCTGATGTTGAGAAAAAATTACAAAGCATCAAGCAAGAGCAAGATAAAGTTCTTAAGAATATTGAAAAAAGTGTTCACTTTGATTCAAGCAAAGTGAAGCGTTACGATGCTATTATTAATGGTGTCGCACTTGATATTCAAGCTCAAGAAATTGAAAAATTAAAAACGATTGCTGATGTTAGAAGGGTCTATGTCTCACAAGAATATGTTCAGACAAAACCTTTACTATCTTCCTCAGGGCAACTTATTGGTTTGCCAGAAGTTTGGAACAACTCCCAGTATAAAGGTGAGGGAACTGTTGTTGCAGTTATTGATTCAGGGGTTGATTTCAAACACCAAGCACTAAAAATCAAAGAACCAAATCGTGCTAAGTATAATAAAACTAGTATTGAAAAACTGATTCATGAAAAGAATCTCAAAGGAAAATTCTATTCCGAAAAAGTACCTTATGGTTATAACTATTATGACTATAATGATAACCTCAAGGATAGCTACGGTGTAATGCATGGTATGCATGTAACAGGTATCGTAGGAGCTAATGATGATAATCAAAAATTGTATGGTGTTGCACCAAATGCTCAAATTTTAGCGATGAAGGTATTTTCAGATGACCAACAAAATCCCACAACCTTCACAGATGTGTGGCTAAAAGCTCTAGACGATGCTATTTTACTAAAAGCTGATGTTGTTAATATGAGTCTTGGAACACCTGCTGGATTTGTACATGAGGGGAAAGACTATCCTGAACTTGAAGTTATTGCAAGAGCGTGTAAGGCAGGAATCGTCATTGCAGTAGCAGCAGGTAATGAAGGAAATATCACTGACGGTAATACTTATGGTGTTAAGCCGCTAGCAGAAAATTATGATACAGCCTTGATTGCCAACCCAGCCCTCGATGATAATACCTTGGCTGTTGCCTCTATGGAGAACCTTAAAAAGCATGCTCATGTTTTGAAATTTAAAGATAAAAAATCTGGAACAGAAGTTACAGAAGTCATTAATCTTCATGTTGCCCCAAACGCTTCAAAAACTATTATTGGATTGGCTGTAGATTTGGGAGCAGAAGCTCCTTCGGAATTGTCAAAACATTTTGATTTAAGTGGTAAAATCGCCATGCTTGAAATTCCAGAAGATAATAAATCTAATGGATTTTTAGAAAAAGTACAGGCGATTACTAAGTTAAATCCAGCTGCTATCTTGCTTTACAATAATGCGAAGGTTAAAGATGATTTAGGCAGTCAATTATTAGTTGAATCAGAAGCAGCTAAATTTAATATTGCTCGCATTACCAGAAGCACGTATAACAATATCAAAAATAATAGCAATAAAATTATTACTATTTTAACAGAGCGTCAAGCTATTGATAATAGTTTAGCAGGACAATTATCTTCTTATTCTTCTTGGGGACCTACACCAGACTTACGTCTAAAACCTGAGATTACAGCTCCAGGTGGTCATATTTTCTCAACTGTGGAGGATAATCAATATGCTGATAAATCAGGAACATCAATGGCTGCACCTCAGGTAGCTGGGGCAGCTGCAGTTTTAAAACAATACATTACAGATAAAAAAATTCCTGTTGATAATGCTGCTGATTTTATTAAATTACTCTTGATGAACACTGCACAGCCAATTATCAATAAACAATCAAAAGATGGCAAAACACCTTACTTTGTGCGCCAACAAGGTAGCGGAGCAATGAATCTTGCCAAAGCTCTTGTTACGACAGTCGTTGCAACTGTAACAGGGACTAACGATAATAATGCAGATGGTAAGTTGGAGTTACGTGAATTAAAAGAGAAAAAATTTAAAGCACGCATTCTACTTCGTAACTTTGGAAAAACTAATAAAACGTATATCATCTCATCAGAAGTGATTGCGGACCCAGTTGATGAAAAAGGATTTCGTACGCAAAATTCAGAACACCTAGTATCAAAAAAAGCTGATGCAGTTACAAGGAAAGTTACTGTAGAAGCAGGTAAGACATTAGCTGTTGACCTTGATGTGGATTATTCTGATGCAGAGGCTTTAACTCGCAATAATTTCTTGGAAGGTTATCTTAACTTAAAAGATACTGAAGGTGTAGCCGATTTACACTTACCATTTTTAGGTTTTTACGGTTCATGGACAGAGCAAAAAGCTATTGATGCTTTTGAAGGCATTTCTGAAATTGGTAACGGTGACAAAAAACGTCGCGTTCAATTCTATGTTAATAAAGAAACCAACAAGACCTCATCAACCTTTACAACTAACGGCATGTTGAGTCTTCCAATCTATAACAATACAGTATTTTTCTCTCCTAATAGTCCTTTCTATGACAAAGCAGGAGTTCGTATTGCAGCTTTGCGTAATATGGAGTATGTTCAATATTCTATTATAGATCCAGATACCAATAAAGAAGTTCGTGTACTTGGTAGATCACACGACGTTAGAAAACTTTATCGCCTAGATTATCGTAATAGTTTTGCCATGATGCCAGATTCTATTTGGGATGGTAAGATTAAAGAT

SEQ ID NO: 14552 - protein, 870 aa, Streptococcus agalactiae
MPKPQKVRVIVEFNEESILDYATEQKKTVAQLNQADVEKKLQSIKQEQDKVLKNIEKSVHFDSSKVKRYDAIINGVALDIQAQEIEKLKTIADVRRVYVSQEYVQTKPLLSSSGQLIGLPEVWNNSQYKGEGTVVAVIDSGVDFKHQALKIKEPNRAKYNKTSIEKLIHEKNLKGKFYSEKVPYGYNYYDYNDNLKDSYGVMHGMHVTGIVGANDDNQKLYGVAPNAQILAMKVFSDDQQNPTTFTDVWLKALDDAILLKADVVNMSLGTPAGFVHEGKDYPELEVIARACKAGIVIAVAAGNEGNITDGNTYGVKPLAENYDTALIANPALDDNTLAVASMENLKKHAHVLKFKDKKSGTEVTEVINLHVAPNASKTIIGLAVDLGAEAPSELSKHFDLSGKIAMLEIPEDNKSNGFLEKVQAITKLNPAAILLYNNAKVKDDLGSQLLVESEAAKFNIARITRSTYNNIKNNSNKIITILTERQAIDNSLAGQLSSYSSWGPTPDLRLKPEITAPGGHIFSTVEDNQYADKSGTSMAAPQVAGAAAVLKQYITDKKIPVDNAADFIKLLLMNTAQPIINKQSKDGKTPYFVRQQGSGAMNLAKALVTTVVATVTGTNDNNADGKLELRELKEKKFKARILLRNFGKTNKTYIISSEVIADPVDEKGFRTQNSEHLVSKKADAVTRKVTVEAGKTLAVDLDVDYSDAEALTRNNFLEGYLNLKDTEGVADLHLPFLGFYGSWTEQKAIDAFEGISEIGNGDKKRRVQFYVNKETNKTSSTFTTNGMLSLPIYNNTVFFSPNSPFYDKAGVRIAALRNMEYVQYSIIDPDTNKEVRVLGRSHDVRKLYRLDYRNSFAMMPDSIWDGKIKD

SEQ ID NO: 14553 - protein, 441 aa, Streptococcus agalactiae
TTGAATAATAAAGGTGTCGGTGGCGATGGTGTCCAAATTTATCAATACTATATCAAAATGGACAACAATAAACCTTACTTAAGTCCCAAAGATAAGACTACTGTAGAGAAGTTAGAAGATCGCTGGAAAAAAATTACTTTCAAAGTTCAGGATACTGGCATTGGTTTGAAAGACGTTTATCTTCAATCTGTTAAGTATGTTGGTGGTGGCAATAATAATTTAGACCTTATCACACCTCCAGGATTTAAAAAAGAAGATAAAAAAGTTGAAAAACCAAAATTAGACCGTCCACCAGGAATTGATTTACCAGCACCAACTTCAATGAGAAGTTTTGATTATTCAACCCCACCGGGAACTAAGCCAAGCAAACCCAAAGATAGTTTATCAACTCCTCCAGGTTTCCCAGATTTAAACACGCCGCCGGATGAAGCCACCAAAGGA

SEQ ID NO: 14554 - protein, 147 aa, Streptococcus agalactiae
MNNKGVGGDGVQIYQYYIKMDNNKPYLSPKDKTTVEKLEDRWKKITFKVQDTGIGLKDVYLQSVKYVGGGNNNLDLITPPGFKKEDKKVEKPKLDRPPGIDLPAPTSMRSFDYSTPPGTKPSKPKDSLSTPPGFPDLNTPPDEATKG

SEQ ID NO: 14555 - protein, 2892 aa, Streptococcus agalactiae
ATGAAGCCACCAAAGGATAGTAAAAAAGACGCTATTGAAGATAAATCAGGAGCAATTAAATATGCTAAGTCTCTTCAACTTAGCTTTGTTGATGACCCTATTTTAGCTAGCAAAGTAAATGGCAAAATATTACAAGTCGAATCTGATGGCAAATTAGTCATTCCTAGAAATGCTTTGTCAGCTAATCAATTTGATGACACTAGTCTTAAAATTTATCGTAATAATAATCGCAATAAAGAAATTACTATCACAACAGATTATTTTGCAGATACAAAATATGTCAATATCACAGCGGTTGACTATTTGAGCAATACTACTTTTGAGCAATTAGCTACTGGTGAAACAGTAGATTACCATGCCATTGTATTTTCAAGCTTTGCTGCTATTAAAGACAAGGGTGGTAAGATTTATGTTAACGATAAATTGCAAGAAACTTCTCGTATAGCGCTTAAAGATAAATCTGTTAAGATTGGTATTGAATTACCAAATGATGTCAGACATATTGATAGTTTATCTGTTCGTCGTTTGAATGAGGTTAAAACTGTTGATAATATCTTGAAAAATGATGAACAAGACATTAATCTCAGCAAAACTTACCAATTAAAATACAACCCGACAAATCGTCGTCTAGAGTTTACTATTAATAACATTAACTCAAGTTCAGAAATCATGACCACTTTCAAAGATGGAAAGATGCCAGAATTGGTTGAACAAAAAGATGTTTCTTTGGATATAAACGATATGGACATGAGTAAGTTTAAAACTATTCGACTTGGACGAAAGGATTCTGAATTTAAGGGACAACTTATTGCAAAAACTGGAACAGTTGAATTAGATATGTTTTTCAAACAATCTCAAGACCCAGCTTCAATTATTAAAAAAATATACCTTATCCAAAATGGTGTTCCAAATGAATTGAAAAAATTTGACTCTAGTTTTGGTTTAACTGAAAGTCAGATAGATGGATACTATATTTATAAAGATGCAATTAACCTTAAATTTAAATTAACCAGTGGTGCAAGTCTTAAAGTTGTTTATAAAGGGCAAGAAGATCCATATAGTCATCAGAAAGAAGATATGACTAAAAAAGGTGAACAGCTCAGTCATTCAACTCAAGCCAATGAAAATACAGCAAAAGTAACCTTTGCTAATATTGACTGGTCACATTATAGTAAGGTTACTGTGAATGGAAAAGAAGTTGGTAAAGGTAGTGAGTTACCTTTAACTAAAGGATGGACAACATTTGTATTACATAAAACAGAAAATTCATTAAATGTTAAAAGTTTGATTATGGAGACGGGTAGTGTAAGTAAGAAAGTTCAACAACTTCCTTTAAGTCCTAGATTATCTAAAAATAAGCATATGAGGGATATGCTACTTACTATGCAAAAAGATTCAGCGTATTACGAAACAAGTGACAGTCTAGTCCTTCGAATTAATCTCACTGCAGATACTAAACTTAATTTTAATGCTGTTAAAGGAGCGAGTGCTCTTACTGAAAATATGATGATGAGACAGTTTGCAGTTGCTGGACCACAAGATGATCCTGTTAGTGAACATAAATACCCATCAGTATTTCTCTTAACTCCTGCCTTATTGGAAACTGCTAGTGAGGCAACTCTAAATGGTAAGGAAATCACAGCATCTGGTATTATCGGTCACATCAAGGATGGTGATAAAAGCAAGCATGTTGAAGTCAAAATGGTGAATGAAAATGGAGACATGCTAGGAACCCCTGTTATTATTCAAGGTAAAGACTTGACTAATCGAACAAAACCATTAATGAGTGGACGTAGAGTACTTTATGCCGGTAAACAATATGAGTTCCGGGCTAAATTACCACTTAGTCGTTTTAACACTTGGATTAGGGTTGAAGTGGTAACAGAAGCAGGAGAGAAAGCAAGTATTGTTCGTCGCATGTTCTTTGACCAATCAGTTCCAGAGCTTAACACAGCAGTTGCTAAACGTGATTTGACTTCTGATACTGCTCTTATCCACATCGTTGCCAAAGATGACTCTCTAAAACTAAAATTATATCAAGATGATTCATTACTTGAATCTGTTGATAAAACCGGTCTTTATAGTTTTAGAAATGGTGTAGAAATCACTAAAGATATGACAGTACCACTAGAATTTGGAGATAATATTATTAAGTTATCTGCTGTTGACTTATCAAATTATCGTCGTAATGAGACCCTTCATATCTATAGAAACCGTTTTGATGTTAAAGCAAGCCAAATGACAGCTGACAAAGGAGCTAAAGTAACTGTGGATATGTTGATGAAGCACTTAGTTGTTCCAGAAATGGCAGGAGCTTATACATTAACAATCGACGAAGCTCCAAACACAAATGAATCAGGAATGTTAACAAACGCTAAAGTATCGATTCATTATGTAAATGGTGGTGTTGATAAAGTTGATGTTCCGATTAAAGTAGTTGACTTAGAAGCTATTCGTAAAGCTGAAGAAGCACATAAAGCTGACGAAGCACGTAAAGCTGAAGAAGCACGTAAAGCTGAAGAAGCACATAAAGCTGAAGAAGTACGTAAAGCTGAAGAAGCACATAAAGTCGAAGAAGCACGTAAAGCTGAAGAGGGACATAAAACCCAAGAAGCACCTATAGTTGAAGAAGGCTACAAAGTTAATAACGTTCATCAAACTGATACTACAGTTAAAGCGTCTGATTTACCAAAGACTAAGACAGTTTCCGCAGTTCATATGGCTAGAACAGACAATAAACAGATAACTTCACATCAGACACATGTTGAAAAACAAATTAAAAATACATTGCCATCCACTGGTGACAGCAAACGTGGTTATTATATCACTGGAATGGCTATCGTTATGCTGAGTGTATTATTTAGTTTAGCTAAAAAGTTTAAAAGCAAATAT

SEQ ID NO: 14556 - protein, 964 aa, Streptococcus agalactiae
MKPPKDSKKDAIEDKSGAIKYAKSLQLSFVDDPILASKVNGKILQVESDGKLVIPRNALSANQFDDTSLKIYRNNNRNKEITITTDYFADTKYVNITAVDYLSNTTFEQLATGETVDYHAIVFSSFAAIKDKGGKIYVNDKLQETSRIALKDKSVKIGIELPNDVRHIDSLSVRRLNEVKTVDNILKNDEQDINLSKTYQLKYNPTNRRLEFTINNINSSSEIMTTFKDGKMPELVEQKDVSLDINDMDMSKFKTIRLGRKDSEFKGQLIAKTGTVELDMFFKQSQDPASIIKKIYLIQNGVPNELKKFDSSFGLTESQIDGYYIYKDAINLKFKLTSGASLKVVYKGQEDPYSHQKEDMTKKGEQLSHSTQANENTAKVTFANIDWSHYSKVTVNGKEVGKGSELPLTKGWTTFVLHKTENSLNVKSLIMETGSVSKKVQQLPLSPRLSKNKHMRDMLLTMQKDSAYYETSDSLVLRINLTADTKLNFNAVKGASALTENMMMRQFAVAGPQDDPVSEHKYPSVFLLTPALLETASEATLNGKEITASGIIGHIKDGDKSKHVEVKMVNENGDMLGTPVIIQGKDLTNRTKPLMSGRRVLYAGKQYEFRAKLPLSRFNTWIRVEVVTEAGEKASIVRRMFFDQSVPELNTAVAKRDLTSDTALIHIVAKDDSLKLKLYQDDSLLESVDKTGLYSFRNGVEITKDMTVPLEFGDNIIKLSAVDLSNYRRNETLHIYRNRFDVKASQMTADKGAKVTVDMLMKHLVVPEMAGAYTLTIDEAPNTNESGMLTNAKVSIHYVNGGVDKVDVPIKVVDLEAIRKAEEAHKADEARKAEEARKAEEAHKAEEVRKAEEAHKVEEARKAEEGHKTQEAPIVEEGYKVNNVHQTDTTVKASDLPKTKTVSAVHMARTDNKQITSHQTHVEKQIKNTLPSTGDSKRGYYITGMAIVMLSVLFSLAKKFKSKY

SEQ ID NO: 14557 - protein, 1083 aa, Streptococcus agalactiae
ATGCAAAGAAAATCCTATTTAAAATCCATGAGTGTTCTTACTTTAACAGCTTGTCTTATATCAGGATATGTGGTTAAAGATATTGCTATGTTACATGCAGTATCTGCCAGTGAGAAGAAAGCAAATAATGTCAGTCCGAGAGAAAATCTCTACAGGGCTGTCAATGATAATTGGCTAGCCAATACAAAACTCAAACAAGGGCAGACTAGTGTTAATAGTTTTTCAGAAATTGAGGATAAATTAAAGCAACTGTTAGTGTCTGATATGGCTAAAATGGCCTCAGGAAAGATTGAAACAACCAATGATGAACAGAAAAAAATGGTTGCATACTATAAACAAGGTATGGACTTTAAAACAAGAGATAAAAATGGTCTCAAACCTCTAAAACCAGTTTTACAAAAACTTGAAGCAGTCTCTTCAATGAAAGACTTTCAAAGTTTGGCCCATGATTTTGTGATGAGTGGTTTTGTTTTACCATTTGGTTTGACTGTGGAAACCAATGCTCGAGATAATAGCCAAAAGCAATTGGTGCTTCGTCAAGCACCCGCATTACTTGAATCACCTGACCAATATAAGAAGGGCAATAAAGAAGGTGAGGCTAAATTATCAGCTTACCGTACTTCAGCAATGGCTTTGCTTAAACAAGCTGGAAAAAGTAACATTGAAGATAGAAAACTAGTTAAACAAGCTATAGCATTTGATAGACTCTTATCAGAAAAAACGCAAGTTGATCAAAGTAAAATCACAGCTGAAAGTGAGACAGCTGCGGGGCGATATAACCCTGAAAGTATGGAAACGGTTCACAATTACGCCAAGGAATTTGACTTTAAAGAATTGATTGAAAAACTAGTTGGGCCAACGAATAAGGCAGTCAATGTAGAAGATAAAACTTATTTTAAACAGGTTAATGATGTTATAAATAGTAAACAATTAGCCAATATGAAAGCATGGATGATGATTTCTATGCTAGTTGATCAATCAGATTTTCTAGGAGAACAAAATCGTCAAGCAGCGAGTGCTTTTAAGAATGTTGCGTCTGGTTTGACTCAGATTGAATCGAAAGAAAAAATGCTTACACCCAAT

SEQ ID NO: 14558 - protein, 361 aa, Streptococcus agalactiae; identical to SEQ ID NO: 1274

SEQ ID NO: 14559 - protein, 816 aa, Streptococcus agalactiae; identical to SEQ ID NO: 10145

SEQ ID NO: 14560 - protein, 272 aa, Streptococcus agalactiae; identical to SEQ ID NO: 1276

SEQ ID NO: 14561 - protein, 108 aa, Streptococcus agalactiae; identical to SEQ ID NO: 10147

SEQ ID NO: 14562 - protein, 36 aa, Streptococcus agalactiae; identical to SEQ ID NO: 1278

SEQ ID NO: 14563 - protein, 1029 aa, Streptococcus agalactiae
ATGAAGAATATAACAAAGCTATCAACTGTTGCTTTAAGCCTACTACTTTGTACGGCGTGTGCTGCATCAAACACGTCTACATCTAAAACACAGTCTCATCATCCTAAACAAACTAAACTCACAGATAAGCAAAAAGAAGAACCCAAAAACAAAGAAGCTGCTGATCAAGAGATGCATCCCCAAGGCGCTGTTGATTTGACAAAATATAAGGCAAAACCGGTCAAAGATTATGGTAAAAAAATCGATGTTGGTGATGGCAAGAAAATGAACATTTATGAAACTGGTCAGGGAAAAATTCCAATTGTTTTTATTCCTGGTCAAGCTGAGATTTCGCCACGCTATGCTTATAAGAATTTAATTGAGCGGTTAAGTAAAAAATATAAAATTTATACAGTAGAACCATTAGGCTATGGTCTCAGTGATATTCCTACTAAACCACGTACGCTAGAAAACATTACAAAAGAAATTCACACAGGCCTAAATAAAATTGGAGTTAAAAATTTCTACCTTGCAGCTCACTCACTTGGCGGTATGTATTCTTTAAATTATGCTAAAAATTATCCAGAAGAAGTCAGAGGATTTATTGGTATGGATACCAGTACACCTTGGATGGAAGGGGAACAAAAAACAAAGTATGACCCTGAAAGTGCTAAATGGGCAATGAAATTACCAGATGTTGATGATAAGACTAACGAACAGTATCTGTCAATTGCGAAAAAAATTAACGGCAATAAGTCTCAACGAGATGAAGATGAGCGCTTAGGTGATAATCTTGGTAAATTGAAGAATGTAAAATTCCCTAAAGGGATGCCAACTAAGTATTTTCTTGCTGATCAATCTGTGGAGGGAATCAAGCTACGTCAAGCAGATTTTAAAGGTTTGAAAAATTGGGATCAGCAGCATATTGATTTATCTGAAGATCCAAAAGATGCTTCCGTTGAAATTCTTAAAGGTAGTCACAATATTTTCCAAACACAATATGAACATATGGCTAAAGCTATTGATGGATTTATCCAATCCCATCAAAAG

SEQ ID NO: 14564 - protein, 343 aa, Streptococcus agalactiae; identical to SEQ ID NO: 1280

SEQ ID NO: 14565 - protein, 247 aa, Streptococcus agalactiae
ATGAATAAAATAACGAAATTATCAACCGTTGCCCTCGCTTTGATGCTTTGCGTTGGATGTTCTGCCAATAAAGATAATCAAAAAACTAAAACTGAGCAGCCTAAGCAAGAAAAGTCAATCGCTAAGCAAAAACAGAGAGAGAAGCAGAAAAAGCTATGATTGCTAAAGGTGCTATTGACCACTAAATATAAAGCGAAACCAATTGAAGATTACGGACAAAAAATTGATGTCGGTGACGGTAAAAAAA

SEQ ID NO: 14566 - protein, 83 aa, Streptococcus agalactiae
MNKITKLSTVALALMLCVGCSANKDNQKTKTEQPKQEKSIAKQKQEREAEKAMIAKGAIDLLNIKRNQLKITDKKLMSVTVKK

SEQ ID NO: 14567 - protein, 267 aa, Streptococcus agalactiae
ATGAACATATATACAATGGGTCAAGGGAAAATTCCGCTAGTAGTCTTCCCTGGTCAAGCTGAAATTTCACCACGTTATGCTTACAAAAACTTGCTTGATAGATTAGGGAAAAAATATAAAATTTATACGGTTGAACCGCTCGGTTATGGGCTTAGTGATATGACAGATAAGCCACGTACGATTGAAAATATTACCAAAGAAAGTCGGTGTCAAAAATTTCTATCTTATGGCTCACTCGTTAGGTGGCATATACGGTCTAAATTATGC

SEQ ID NO: 14568 - protein, 89 aa, Streptococcus agalactiae
MNIYTMGQGKIPLVVFPGQAEISPRYAYKNLLDRLGKKYKIYTVEPLGYGLSDMTDKPRTIENITKESRCQKFLSYGSLVRWHIRSKLC

SEQ ID NO: 14569 - protein, 567 aa, Streptococcus agalactiae
TTGAAAATATTACCAAAGAAAGTCGGTGTCAAAAATTTCTATCTTATGGCTCACTCGTTAGGTGGCATATACGGTCTAAATTATGCTAAGACATATTCTAACGATGTCAAAGGTTTCATTGGCATGGATACAAGCACACCAAATATGGAAGGTGATGGCACAACTGGAGAATCTTCAGCTTCAACCTTAAAATGGGCAGAATCCATTCCAGAAGTTGATAAGAAAACCAATGAACAATACTTATCAATCGGTGCTAAAAAATCAGGTAATAAAACAGAGCGCGATGAAGATAGGCGTGTTAGTGACAATCTTCATAAAATGGAAAAAGTTAAGTTCCCTAAAGGTATGCCAGCTAAGTATTTCTTAGCTAATGAGTCAGCAGAAGATATAAAAATGCGTAAAAAAATATTCCCTAAGCTTAAAAGCTGGGAACAACAACATATTGACTTATCTGAAGATCCAAAAGACGTTTCTGTTGAGACACTAGATGCTAGCCACTTGATTTATCATACGCAATATAAACATATGGCGAAGGCTATTGACGAGTGGATTCAATCGCATGAAAAA

SEQ ID NO: 14570 - protein, 189 aa, Streptococcus agalactiae
MKILPKKVGVKNFYLMAHSLGGIYGLNYAKTYSNDVKGFIGMDTSTPNMEGDGTTGESSASTLKWAESIPEVDKKTNEQYLSIGAKKSGNKTERDEDRRVSDNLHKMEKVKFPKGMPAKYFLANESAEDIKMRKKIFPKLKSWEQQHIDLSEDPKDVSVETLDASHLIYHTQYKHMAKAIDEWIQSHEK

SEQ ID NO: 14571 - protein, 1059 aa, Streptococcus agalactiae
ATGAATAAAATAACGACATTATCAACCATCGCCCTGACTTTAATGCTTTGCGTTGGATGTTCTGCCAATAAAGATAATCAAAAAACTAAAACTGAGGATCCTAAGCAAGAAAACGTAACTGCAAATCCGAAGGAAGACAAGGCAACAGCAGCCAAGCGAATGAAGTTAACGAAAGAACTTGAAAAATATAATAAAGGCACAGAGAGCTTTATTAGTAACAAACAATATCAAAAATATATCAAAACACCTATCAAAGAATATGGTCAAAAGGTTGAAGTCAAAGGCAAGAAGATGAATGTCTATACTGTTGGAGAAGGTAAAGTACCAATTGTCTTTATTCCTGGTCAAGGGACGGTGACTGCCAAACATCAGTACCATAATTTGATTAGTAATTTAAGTAAAACTCATAAGGTTGTGGTAGTTGAGCCATTTGGTTCAGGTTTAAGTGATGTCATTGACCAACCACGAAATCTAGCTAATATTACCTCAGATATCCACGAAGCTTTACAAAAAGTTGGTATTACCGGAAAATATGTAATTGCCTCTCATTCAATTGGTGGTGTTTATGCCCTTAAATACATCAGTACTTATCCAAAGGAAGTGCTAGGATTAATAGGTTTAGATACATCAACGCCGGGTATGGAAGGTGGTAAGCAAGTTGATTTCGCTGCTCCAGTGTTAAAAGAATTACCTAAAATTCCTAAAGTATCCGACGATATTAATGCACAATTTTTTGCTATTGGACATAAGATACTTAATAATTCTAATATGAAAGAAGAAGCGAAGAATTCTTCTAATATGATTAACGAAAGTGCCAACTATAAGATTCCAAAGGGAATTCCTGCTATGTATTTATTAGCACGTGAAAGTGACTTAGGGCTTCAATTACGTAGTTTAGATATACCAATTAAAGGCAGTTGGCAAGAGCAACATAAGGAGTTATCAGAAGATCCAAAAGAAGTCTCTATTCATACACTAGACGGAACTCACCAAATTTATGATACTAACCTTAAAGAAGTAATTGATTATACTAACCAATTTATGAAAACATTTGAGAAA

SEQ ID NO: 14572 - protein, 353 aa, Streptococcus agalactiae; identical to SEQ ID NO: 1284

SEQ ID NO: 14573 - protein, 1227 aa, Streptococcus agalactiae
GTGAACCTATGGACATTAAGTTTAGCTTATTTGAAACGTCAAAAAATGAAAACAGTAACCTTGTTCTTAGTTTTTCTAACTATAGGCACATGTTTAATCAGTCTGATGAGTATTCAGCATTCTTTGGAAAAAAATATCCTAACAAAACAAGGGAAAAGCATTTATTTAACCTCCAAAGAAAAGGCTTATTGGCCTGAACAAGCATACGAAGCTTTGAAAAAAGCAAAAATGGTTGAGTCAGTAGAGGCAAGTTTAAGCATTGATGTTGGTAGCCGTTTAAAATCTGTATCACCATATAACTCTTCTAAAGAAGAGAATCAAGTTACATTAGCAGGTTATCAAAGTACAGAAGATTTACGAGCTTTTCAGACAAAAGCATTGGTCTTAAAGAAAGGAAGCCATTTAGCGGCCGATAATACAAAACAAGTACTAGTTCCATTGAAGTTAGCACAAAAGAATCATTTAAGTGTGGGTAACAAATTGAGATTAGGCAAAGAAAATGTTACTATTGCAGGAATTTATGATGCGAATAGTGCTAAGTCTAAAAATACTTTTAATCCCAATATTGATAATACATTGATTGCTCAGGCAACATTGGTTAGGAAGATTAGTAAACAAAAAGGTTATCAGACGGTTGCAGTGCGCTTAAGTGATAAACGTTTAGTGGATACAGTTATCCAAAACATCAAACAATGGCCGCTTGATTTCGGGAAATTAGATGTTCAAACAGCTAAAGAGTTTTATGGAGATTCTTATCGTAATATCGAGACATTGCATCGTCTAGTGGGACGAATCATTCTTATTGTTAGTCTCGTGGCGATGGCAATATTAGTTGTCATGCTAACATTTTGGATTAATAACCGCATTAAAGAGACGGGAATTTTACTCGCTATCGGAAAAACTAAGTTTGAAATCATAGGTCATTATCTGATAGAAGTACTGTTAGTAGCAGGTGCTGCCTTCACACTATCTATTATTGGTGGTGTCTTTCTTGGAAAAACATTTGCAGCTGGCCTTTTATCACAAGTTAATGGTGGTGTGAGTTCACAAATTGTACAAAATAGTAGTCTAATTATTGATAGAATTGATAACCTCGCTGTTTCTGTTGGAGTAATGGATGTCTTTAGACTCTATGCTCAGGGTGCTTTAATTTGCTTATTTGCAGTTGTATTATCTAGTTATTCTATTCTTAAACTACAACCAAAGCAAATATTGTCACGAATGTCA

SEQ ID NO: 14574 - protein, 409 aa, Streptococcus agalactiae; identical to SEQ ID NO: 1286

SEQ ID NO: 14575 - protein, 792 aa, Streptococcus agalactiae
ATGAATTTATTTAAACGTTCCTTTTTATATGTTAGCCGTAAAAAGCGTAAGAGTATCACTTTATTCGTATGTTTATGGCTAGTTGCTTCTACATTAATTAGCGGTATTGCGGTAAAAAATGCTGGTCTTACTGCTAAGAAGACATTTTCAAGGCAAACTGGATCAATTTTGCATATTTCATCGGATAGTACTGACCTTGTTGGTGATGGTTACGGATCTGGAGAAATCCCTGAAAAAGCAATAGTTAACATAGCAAGTAATCCAAATGTTAAGCGCGTTAATAATAATTTGATGGCTTATGCTGGACTAACCTCGGAAAAAATGGTTACACGACCAAATGATAAAGAACAATATAAAGAACAAGTTTTACAAGTTCATGGTAATAGTTACTCCGATACAGATCCTAAATACACAGCGGGGATGATTTCTCTTAAGGGAGGGCGACATATCACGCCGAAAGATCAGCGAGTTATAATTGTTCATCAGGCTTTTGCGAAGACAAATCATCTTAAAGTTGGCGATAAGTTAATGTTTTCAAAAGACCCCGTTAGAAACAGTAAGGATAAAACATTAGTTGAAGCAACTATTGTTGGCATATATAAAGGTAAAACGGTACAAAAATCAAATTACCCTTATGAGATGCTAGAAAATACAGCCTTTTCAGATACGCAATTGATTAAGGATTTATACGGCTATTCTAAAGGTAAGGCCTTTTATCGCCAAACAACTGTATATCCTAAAAAGAATGCTGATATAGAAACTCTTAAAAGTTTTATCAAAAAACAATCCTAT

SEQ ID NO: 14576 - protein, 264 aa, Streptococcus agalactiae
MNLFKRSFLYVSRKKRKSITLFVCLWLVASTLISGIAVKNAGLTAKKTFSRQTGSILHISSDSTDLVGDGYGSGEIPEKAIVNIASNPNVKRVNNNLMAYAGLTSEKMVTRPNDKEQYKEQVLQVHGNSYSDTDPKYTAGMISLKGGRHITPKDQRVIIVHQAFAKTNHLKVGDKLMFSKDPVRNSKDKTLVEATIVGIYKGKTVQKSNYPYEMLENTAFSDTQLIKDLYGYSKGKAFYRQTTVYPKKNADIETLKSFIKKQSY

SEQ ID NO: 14577 - protein, 192 aa, Streptococcus agalactiae
TTGCTAACAAGTTATGCAAAAAGTATAGATGTCTTGAATCAATTAATTACTTCTCTACAAGGCGGCATGTTAGTAGTATCTATTATCCTAGTGATGATGGCTCTGCTATTCTGGATTGGTGGTAGAACCCATGAGACAGGTATTTTATTAGCTATTGGTAAGTCTAAAGCAATTATCATTGTCAGTACGCAG

SEQ ID NO: 14578 - protein, 64 aa, Streptococcus agalactiae; identical to SEQ ID NO: 1292

SEQ ID NO: 14579 - protein, 318 aa, Streptococcus agalactiae
ATGATTGCTATTCCAGCCTTTGCTTTATCAGTACTTATCAGTCAATTTATTGGTCAAAAATTAGCAGACTCCTTAGTGTATCAGGCCTCTAGAACTGTCAGAGCAGACTTTATGAAAGGGTTTGGGAATATGCAGCTTGGGGCTGATAGTGATACAGATATGTTTATGCAAACGATTAAGACGTTAAATGTACAAGTGAAGCCTGAGGAAGTCTGGTTAGTAATTCTAGTTGGTTTAGCAATCGTCTTATTTGCTATTATTACTACTAGTTTAATTATTGCTCGCTACAAACCAAGGGGAATCTTATCAAAACTGTCC

SEQ ID NO: 14580 - protein, 106 aa, Streptococcus agalactiae; identical to SEQ ID NO: 1294

SEQ ID NO: 14581 - protein, 668 aa, Streptococcus agalactiae
ATGCTCGAATTAAAAAATATTGCTTATCGTTATAAGGGGAACGACAATAAAACATTAGAAAATATCAATTATAGTTTTCAGTCAGGGGTATTTTATACTATATTAGGGAATTCTGGTTCAGGGAAAACAACCCTTCTATCCTTGATGGCAGGTCTTGATTCGCCTACTGAGGGACAAGTATTATTTAACAAAAAAGATATTAAAGAAGCAGGTTATGCTCAGCATCGCAAAAAGAATATAGCTTTGGTCTTTCAAAATTATAACCTTTTAGACTATCTAACCCCATTGGAAAATGTTCAGTTGGTAAAACCTACTGCAGATAAACAATTATTGTTGGATTTAGGTTTAAAAGAAGATATGTTAACGCGAAATATCTTGAGATTATCAGGAGGGCAACAACAACGTGTAGCTATTGCGAGAGCTTTGGTTGTAGGAACACCAGCTATTTTACTTGATGAACCTACGGGAAATTTAGATTTTGACATTGCGCGTGATATTACGATGCGTCTTAAAGATTTTGCGCATAAGGAAAAACGATGTGTTATTATGGTGACACATAGTAGAGAGATCGCTCATATGGCTGATACTGCTTTACAATTGATAGGAGATAACTTAAAAGAATTATCAAAAGAAAGTATAGCACAGTCTATATTACAACAAAGAATTTA

SEQ ID NO: 14582 - protein, 223 aa, Streptococcus agalactiae; identical to SEQ ID NO: 1296

SEQ ID NO: 14583 - protein, 1414 aa, Streptococcus agalactiae
ATGGGAGTTAGTGGTTTAGCTGTTCTACTAGCACTTTCTCGTAAAAAAGAGAAAGAGTTAAAACAGTTAGCTATTTTTTGTTTTGATGATACTGTCCACTTTGGACGAGGAATTCCTTTTCAAGAAGACGTTGACTCAGCTTTAATCAATTCCCCAATCAACGATATTTCATTTGATTATCGCCATATGTCTGACTTCATGGATTGGTTAGAAGAAAATTACTATGACACAAATCTAACCTATGTATCAAGGACACTTTACGGACAATACCTTTCAGAAAGAACTAAGTTACTTTTAGATAAACTCCCTGTCACGGTTATTAAAACAAGAGTGGATAAACTAAACTATTTATCAGATGAGCAACAATGGCAAGTCTATATTCAAGATAAGCTTTTTCCTGTCACATTTGATGAATTACACTTAGCTTGTGGTGCTCTGCCTGTTATAGAACCTTATCATTTGGAAGGGAAGACCGATTATATCAAAGACCCTTATCCTATCAAATACTTGGCTCAGGAAAATTGGAAGGGAAAAACAGTTGCTATCATCGGGACTGGTCTAGCTGCAATTGATGTTATAAAATGGTTGCTACTCAATACACAATCTTCTGTTAAAGCATTTTCAAGAACCAACTACTTCCCTAGCGTCCGTATTGTTAATGATTTACCACTTACTTGGCACTTTTTTACCAATGATAACCTTAAAGCATTTCTATCACATCCTTCAAAAACCTTCACTATTGCCGATTTTAATGATTTGATGTCTGGCGAATTGGAGCATCTTGGCTTTAAAAACTGGAAAAATACAACAGAAACTTTTTTATCCCCAGGAATTGATGGTCTCAAGTTAGCCTTTAAATACCCTAAGCAACTCTATCTATTACAACAATTAGCTTCACGAATCACTGTCTGGTTAACTGACCTTTGGCCACTCATGTCATTATCAGATAAGAAAGAGTATAAAGCACTCTATGGAAAAGCGATTATTAACTTGCGAAATCCTATGCCTGATGAATCTGCTAAAGTAATTTTGAAAGCTGCACAAAAAGGGACTTTTTCTCTGATCAATAACGTCAGACAATTACAAAAAATGACGAAGGATTTTCATAGAAAAAGAAAAACAAAATCATATATCTGTCGATCGCGTCATTAACGCTACTGGTTACCAGTTAAACACTAAAAACTGGACAAAAGCCAATCCACTTCTAAAATCGCTCATCAATCAAGAATTTTGTCAAATTGACGATCAAGGAGGGATTACTATTTTAACTGAAAATGCACAAGTTTTGTCTCCAAAATATGGTCCAATGCCAGGTTTATATGCGCATGGTGCACTGGTTAATGGTGTCGTTTATCAGAATAACTCTACAATTAAAATTCAACAAATGGCAGAGCGAGCCTTTTCTGATAATAAA

SEQ ID NO: 14584 - protein, 472 aa, Streptococcus agalactiae
MGVSGLAVLLALSRKKEKELKQLAIFCFDDTVHFGRGIPFQEDVDSALINSPINDISFDYRHMSDFMDWLEENYYDTNLTYVSRTLYGQYLSERTKLLLDKLPVTVIKTRVDKLNYLSDEQQWQVYIQDKLFPVTFDELHLACGALPVIEPYHLEGKTDYIKDPYPIKYLAQENWKGKTVAIIGTGLAAIDVIKWLLLNTQSSVKAFSRTNYFPSVRIVNDLPLTWHFFTNDNLKAFLSHPSKTFTIADFNDLMSGELEHLGFKNWKNTTETFLSPGIDGLKLAFKYPKQLYLLQQLASRITVWLTDLWPLMSLSDKKEYKALYGKAIINLRNPMPDESAKVILKAAQKGTFSLINNVKTITKNDEGFSIEKEKQNHISVDRVINATGYQLNTKNWTKANPLLKSLINQEFCQIDDQGGITILTENAQVLSPKYGPMPGLYAHGALVNGVVYQNNSTIKIQQMAERAFSDNK

SEQ ID NO: 14585 - protein, 117 aa, Streptococcus agalactiae
ATGAGTAATGAGGGATATGCTATTAATAGTGGATATATTTATCTCTATTGGAGAGATTACAACTGGGTCTATCCATTTGATCCTAAGACAAAGAAAGTTTCTGCAACNNNNNTTAAT

SEQ ID NO: 14586 - protein, 39 aa, Streptococcus agalactiae
  VARIANT 37, 38: Xaa = Any Amino Acid
MSNEGYAINSGYIYLYWRDYNWVYPFDPKTKKVSATXXN

SEQ ID NO: 14587 - protein, 561 aa, Streptococcus agalactiae
TTGATTTTTAGCCAACCTTTGGACAAGAAATTAGTTGTAAAAGAAGAAGAAAATCACATTACAATCAAATGTTTCTATCAAGGTGCTTTAATTGAGAAAATCATGACATTTACAAGTGACGAAGAAATCACTTGTGTTTATAAATGTAATCAAAAGGCTAAAGAGATGTTCCCAAAATTATTGAAACAGACTTTCAAGTTACACTGCCAAGAGCAGTTGATTAGAGATAGTGAAGGTTATCTTGTGAATGTTCCAGGAAGTTACCCGATTGAGCATGATGATTTTCTTCGAGCAGATAAGTTTGAAGATAGACAATTCCATTATTACCTCCCGAATGAAGATAAAATGATTTCCTATTCTCCTCCTGGCAAAGCCAGCAATCAAATGCAATTTAGACCCTTATGTCTTATTGATACAGATAGCCTTTCTTTTCCACTGACTTATCATTTTAGGATTTCACAAGCATCATCGGAGGAGGCGTTAATCAATCTAAAAAAACAGCCAATATGGGACAGCAACTACCAAGCGTCAGCAACTGACCTTTTAAACATATCTCTAACC

SEQ ID NO: 14588 - protein, 187 aa, Streptococcus agalactiae
MIFSQPLDKKLVVKEEENHITIKCFYQGALIEKIMTFTSDEEITCVYKCNQKAKEMFPKLLKQTFKLHCQEQLIRDSEGYLVNVPGSYPIEHDDFLRADKFEDRQFHYYLPNEDKMISYSPPGKASNQMQFRPLCLIDTDSLSFPLTYHFRISQASSEEALINLKKQPIWDSNYQASATDLLNISLT

SEQ ID NO: 14589 - protein, 708 aa, Streptococcus agalactiae
GTGAAAGGTATTGAAAAGCAAATCACACCAGAAGGATATGCACATGTTTCTGCTTCACGATTCCCGTTTACAGTAATGAATGCAGCAGCTGGTATGCTTTCTATCATTTTTAAAATAACAGGTCCTTTATCTGTCATTTCGACAAATAGTGGAGCGCTTGATGGTATACAATATGCCAAGGAAATGATGCGTAACGATAATCTAGACTATGTGATTCTTGTTTCTGCTAATCAGTGGACAGACATGAGTTTTATGTGGTGGCAACAATTAAACTATGATAGTCAAATGTTTGTCGGTTCTGATTATTGTTCAGCACAAGTCCTCTCTCGTCAAGCATTGGATAATTCTCCTATAATATTAGGTAGTAAACAATTAAAATATAGCCATAAAACATTCACAGATGTGATGACTATTTTTGATGCTGCGCTTCAAAATTTATTATCAGACTTAGGACTAACCATAAAAGATATCAAAGGTTTCGTTTGGAATGAGCGGAAGAAGGCAGTTAGTTCAGATTATGATTTCTTAGCGAACTTGTCTGAGTATTATAATATGCCAAACCTTGCTTCTGGTCAGTTTGGATTTTCATCTAATGGTGCTGGTGAAGAACTGGACTATACTGTTAATGAAAGTATAGAAAAGGGCTATTATTTAGTCCTATCTTATTCGATCTTCGGTGGTATCTCTTTTGCTATTATTGAAAAAAGG

SEQ ID NO: 14590 - protein, 236 aa, Streptococcus agalactiae
MKGIEKQITPEGYAHVSASRFPFTVMNAAAGMLSIIFKITGPLSVISTNSGALDGIQYAKEMMRNDNLDYVILVSANQWTDMSFMWWQQLNYDSQMFVGSDYCSAQVLSRQALDNSPIILGSKQLKYSHKTFTDVMTIFDAALQNLLSDLGLTIKDIKGFVWNERKKAVSSDYDFLANLSEYYNMPNLASGQFGFSSNGAGEELDYTVNESIEKGYYLVLSYSIFGGISFAIIEKR

SEQ ID NO: 14591 - protein, 273 aa, Streptococcus agalactiae
TTGTTCGTTAAAGAAAGGATTCCCTTTATAGGTATCCCTTTCTTTAACGAACAATTTTGGAATATTAAGAAGTTCAGTAAAGAAAAGTGCGCTTATTTGGTAAAGAAACCTGATGTAAGAGAGATACGTAAAGCAATTAGCTGTCTTGAAAGAGACTATGATATCTATAAAAGTTATATGATAAGACTAAGCCAAGGAATTAAAGAAGAAGCAGAGGCATCTTTACAAAAAGCGGAGGCAGAAATTGAATCCTTTATCAGAAAAAGACAAAGT

SEQ ID NO: 14592 - protein, 91 aa, Streptococcus agalactiae
MFVKERIPFIGIPFFNEQFWNIKKFSKEKCAYLVKKPDVREIRKAISCLERDYDIYKSYMIRLSQGIKEEAEASLQKAEAEIESFIRKRQS

SEQ ID NO: 14593 - protein, 531 aa, Streptococcus agalactiae
TTGAATCCTTTATCAGAAAAAGACAAAGTTAACTATATTATGATTTATAAAAATAGGCAGTCTACATTGGAGAATAATTTATCTGGCGATCGGTTGATGAGATATCAACAAGCAAATAGACAGGTAAGCAAAGATAAACTGTTAACAGGGAGTTATTTTGTGTACCAATGCTTAAAAAAGTTAGGTTTTACCAATAAGATTTGTCAGGAATCTTTTTCTAGTGTTAGTAGTTATTTAATTGGTTTGCCAAAGGGGAAAATTAGTTACTCTAATTCTGGTGACTATCATATTCTAACCTATGCTCCCAGTGGTTCAACTGGGGTTGATATTGAGAAATACAAAGATAGATCAGAACAAACCTACCAAAACTACCTAGGAGAATCAGTTAGTAGTGATATGGATTCTAAATTATTATTTTATAAGGCATGGTTACAAAAAGAAATTTCCTATAAATGTGGGAAATCTATAGATATTACCTATCAAACAATGATAGATGGCTATATTTATGGGTATGGCTTTGATTATACTTTT

SEQ ID NO: 14594 - protein, 177 aa, Streptococcus agalactiae
MNPLSEKDKVNYIMIYKNRQSTLENNLSGDRLMRYQQANRQVSKDKLLTGSYFVYQCLKKLGFTNKICQESFSSVSSYLIGLPKGKISYSNSGDYHILTYAPSGSTGVDIEKYKDRSEQTYQNYLGESVSSDMDSKLLFYKAWLQKEISYKCGKSIDITYQTMIDGYIYGYGFDYTF

SEQ ID NO: 14595 - protein, 693 aa, Streptococcus agalactiae
ATGACCACTTTCAAAGATGGAAAGATGCCAGAATTGGTTGAACAAAAAGATGTTTCTTTGGATATAAACGATATGGACATGAGTAAGTTTAAAACTATTCGACTTGGACGAAAGGATTCTGAATTTAAGGGACAACTTATTGCAAAAACTGGAACAGTTGAATTAGATATGTTTTTCAAACAATCTCAAGACCCAGCTTCAATTATTAAAAAAATATACCTTATCCAAAATGGTGTTCCAAATGAATTGAAAAAATTTGACTCTAGTTTTGGTTTAACTGAAAGTCAGATAGATGGATACTATATTTATAAAGATGCAATTAACCTTAAATTTAAATTAACCAGTGGTGCAAGTCTTAAAGTTGTTTATAAAGGGCAAGAAGATCCATATAGTCATCAGAAAGAAGATATGACTAAAAAAGGTGAACAGCTCAGTCATTCAACTCAAGCCAATGAAAATACAGCAAAAGTAACCTTTGCTAATATTGACTGGTCACATTATAGTAAGGTTACTGTGAATGGAAAAGAAGTTGGTAAAGGTAGTGAGTTACCTTTAACTAAAGGATGGACAACATTTGTATTACATAAAACAGAAAATTCATTAAATGTTAAAAGTTTGATTATGGAGACGGGTAGTGTAAGTAAGAAAGTTCACAACTTCCCTTTAGTCCTAGATTTATCTAAAATAAGCATA

SEQ ID NO: 14596 - protein, 231 aa, Streptococcus agalactiae
MTTFKDGKMPELVEQKDVSLDINDMDMSKFKTIRLGRKDSEFKGQLIAKTGTVELDMFFKQSQDPASIIKKIYLIQNGVPNELKKFDSSFGLTESQIDGYYIYKDAINLKFKLTSGASLKVVYKGQEDPYSHQKEDMTKKGEQLSHSTQANENTAKVTFANIDWSHYSKVTVNGKEVGKGSELPLTKGWTTFVLHKTENSLNVKSLIMETGSVSKKVHNFPLVLDLSKISI

SEQ ID NO: 14597 - protein, 177 aa, Streptococcus agalactiae
TTGCTTGATAGATTAGGGAAAAAATATAAAATTTATACGGTTGAACCGCTCGGTTATGGGCTTAGTGATATGACAGATAAGCCACGTACGATTGAAAATATTACCAAAGAAAGTCGGTGTCAAAAATTTCTATCTTATGGCTCACTCGTTAGGTGGCATATACGGTCTAAATTATGC

SEQ ID NO: 14598 - protein, 59 aa, Streptococcus agalactiae
MLDRLGKKYKIYTVEPLGYGLSDMTDKPRTIENITKESRCQKFLSYGSLVRWHIRSKLC

SEQ ID NO: 14599 - protein, 567 aa, Streptococcus agalactiae; identical to SEQ ID NO: 14569

SEQ ID NO: 14600 - protein, 189 aa, Streptococcus agalactiae; identical to SEQ ID NO: 14570

SEQ ID NO: 14601 - protein, 210 aa, Streptococcus agalactiae
ATGAATAAAATAACGACATTATCAACCATCGCCCTGACTTTAATGCTTTGCGTTGGATGTTCTGCCAATAAAGATAATCAAAAAACTAAAACTGAGGATCCTAAGCAAGAAAACGTAACTGCAAATCCGAAGGAAGACAAGGCAACAGCAGCCAAGCGAATGAAAAGTACGAAAGAACTTGAAAAATATATAAGGCACAGAGAGCTTTAT

SEQ ID NO: 14602 - protein, 70 aa, Streptococcus agalactiae
MNKITTLSTIALTLMLCVGCSANKDNQKTKTEDPKQENVTANPKEDKATAAKRMKSTKELEKYIRHRELY

SEQ ID NO: 14603 - protein, 504 aa, Streptococcus agalactiae
ATGGGAGTTAGTGGTTTAGCTGTTCTACTAGCACTTTCTCGTAAAAAAGAGAAAGAGTTAAAACAGTTAGCTATTTTTTGTTTTGATGATACTGTCCACTTTGGACGAGGAATTCCTTTTCAAGAAGACGTTGACTCAGCTTTAATCAATTCCCCAATCAACGATATTTCATTTGATTATCGCCATATGTCTGACTTCATGGATTGGTTAGAAGAAAATTACTATGACACAAATCTAACCTATGTATCAAGGACACTTTACGGACAATACCTTTCAGAAAGAACTAAGTTACTTTTAGATAAACTCCCTGTCACGGTTATTAAAACAAGAGTGGATAAACTAAACTATTTATCAGATGAGCAACAATGGCAAGTCTATATTCAAGATAAGCTTTTTCCTGTCACATTTGATGAATTACACTTAGCTTGTGGTGCTCTGCCTGTTATAGAACCTTATCATTTGGAAGGGAAGACCGATTATATCAAAGACCCTTATCCTNNNNNT

SEQ ID NO: 14604 - protein, 168 aa, Streptococcus agalactiae
  VARIANT 167, 168: Xaa = Any Amino Acid
MGVSGLAVLLALSRKKEKELKQLAIFCFDDTVHFGRGIPFQEDVDSALINSPINDISFDYRHMSDFMDWLEENYYDTNLTYVSRTLYGQYLSERTKLLLDKLPVTVIKTRVDKLNYLSDEQQWQVYIQDKLFPVTFDELHLACGALPVIEPYHLEGKTDYIKDPYPXX

SEQ ID NO: 14605 - protein, 780 aa, Streptococcus agalactiae
ATGAAAAGATTACATAAACTGTTTATAACCGTAATTGCTACATTAGGTATGTTGGGGGTAATGACCTTTGGTCTTCCAACGCAGCCGCAAAACGTAACGCCGATAGTACATGCTGATGTCAATTCATCTGTTGATACGAGCCAGGAATTTCAAAATAATTTAAAAAATGCTATTGGTAACCTACCATTTCAATATGTTAATGGTATTTATGAATTAAATAATAATCAGACAAATTTAAATGCTGATGTCAATGTTAAAGCGTATGTTCAAAATACAATTGACAATCAACAAAGACTATCAACTGCTAATGCAATGCTTGATAGAACCATTCGTCAATATCAAAATCGCAGAGATACCACTCTTCCCGATGCAAATTGGAAACCATTAGGTTGGCATCAAGTAGCTACTAATGACCATTATGGGCATGCAGTCGACAAGGGGCATTTAATTGCCTATGCTTTAGCTGGAAATTTCAAAGGTTGGGATGCTTCCGTGTCAAATCCTCAAAATGTTGTCACACAAACAGCTCATTCCAACCAATCAAATCAAAAAATCAATCGTGGACAAAATTATTATGAAAGCTTAGTTCGTAAGGCGGTTGACCAAAACAAACGTGTTCGTTACCGTGTAACTCCATTGTACCGTAATGATACTGATTTAGTTCCATTTGCAATGCACCTAGAAGCTAAATCACAAGATGGCACATTAGAATTTAATGTTGCTATTCCAACACCAAGCATCATACACTATGGATTATGCAACAGGGAAATAACACTAAAT

SEQ ID NO: 14606 - protein, 261 aa, Streptococcus agalactiae; identical to SEQ ID NO: 1300

SEQ ID NO: 14607 - protein, 636 aa, Streptococcus agalactiae
ATGTTTTTAATCGATTTTATTTTACATATTGATACTCATATCTATGCTATGGCTAACACTGTTGGTAATTGGACCTATCTATTGCTCTTCCTCGTTATTTTCGTTGAAACTGGGGCTGTCATCTTTCCATTTTTACCAGGTGATAGTTTATTATTTGCTGCTGGAGCCCTTGCTGCAAATCCAAAAATGTCCTTCAATATTGTAACTTTTCTTATTATTTTCTTTATTGCAGCATTTATTGGTGATAGTTGCAACTTCTTGATTGGTCGTACATTTGGTTACCGTTTTATCAAACATCCTTTCTTTCGTCGTTTCATTAAAGAAAAAAATATCCGAGATGCTGAGCTTTATTTTGAGAAAAAAGGTACTGCTGCCATCATTTTAGGGCGCTATATCCCTATTATCAGAACCTTTGTTCCTTTTGTAGCAAGTATTAGTCAGCTCCCTCCAAAAGTATTTATCAAACGCGCCTTCATTGCAGCATTATCTTGGTCAGTTATTGCAACAGGTTCTGGTTTTCTCTTTGGTAATATTCCTTTTGTGAAGCAGCACTTCTCGCTTATTATCTTGGGAATTGTATTTGTTACCTTAATTCCTGTCCTTATTTCTGGTGTCAAATCATATCGGAACACTAAG

SEQ ID NO: 14608 - protein, 212 aa, Streptococcus agalactiae
MFLIDFILHIDTHIYAMANTVGNWTYLLLFLVIFVETGAVIFPFLPGDSLLFAAGALAANPKMSFNIVTFLIIFFIAAFIGDSCNFLIGRTFGYRFIKHPFFRRFIKEKNIRDAELYFEKKGTAAIILGRYIPIIRTFVPFVASISQLPPKVFIKRAFIAALSWSVIATGSGFLFGNIPFVKQHFSLIILGIVFVTLIPVLISGVKSYRNTK

SEQ ID NO: 14609 - protein, 654 aa, Streptococcus agalactiae
ATGTCCTATTTAACCTTTAAACACGTTGATTTTAAAACGGATGATAAGTTGGTTTTAAATGATATCAACTTTGCAATTGATGAAGGTGATTTTGTTTCTATTGTAGGGCCATCTGGAAGTGGTAAGAGTACTGTATTAAAATTAGCCAGTGGTTTAATGAGTCCTACTGCAGGTCATATTTTCTTTGATGGAAAAGATTTGAACCAATTAGAACCGATTGAAAGTCGAAAAATGATTTCTTACTGTTTTCAAACGCCACATTTATTTGGTAATACAGTGGAAGACAATATTAGTTTTCCTTACCACATTCGACACGAAAAAGTAGATTATAGACGCGTTGATGATTTATTTCAACGTTTTGAAATGGACCAGTCTTACCTGAAACAGGATGTCAAAAAACTATCAGGAGGAGAAAAGCAACGTATTGCTCTGATTAGGCAATTATTGTTTGAACCTAAAGTTTTACTCTTAGATGAAGTTACTTCGGCTTTAGACAATCATAATAAAGCTATTGTTGAAAAGGTTATTAAATCATTACATGACAAAGGAATAACGATTTTGTGGATTACGCATGATGAGGAACAGAGTCGTCGATTTGCCAATAAAGTCTTAAAAGTTGTCAATGGTAGTATTGAAGCAATGGAGGTTATAAAA

SEQ ID NO: 14610 - protein, 218 aa, Streptococcus agalactiae; identical to SEQ ID NO: 1304

SEQ ID NO: 14611 - protein, 428 aa, Streptococcus agalactiae
ATGAGCGGTGCAAATTCTATTTCTTTAATGTCATTACTAATGGCATCGTCATTAGTTTTGATTACTTTATTTTTTTCTTACTGGCAAAAGTTAAACCTAGAAAAAGAAGTGATTATTAGCGCTATCCGAGCAGTGATTCAATTATTAGCAGTGGGTTTTTTGCTAGACTATATATTTGGTTATCAAAATCCTATTTTCACAGCTCTTTTAATGCTATTCATGATTATTAATGCTTCTTATAACGCAGCTAAGCGTGGTAAAGGGATTAATAAAGGGTTTGTTATTTCATTTATAGCTATTGGGTCAGGGACTATAATCACTTTATCTGTCTTGATTTTTTCAGGAATTTTAAATTTGTTCCGAATCAAATGATTCCTGTAGGTGGTATGATTATTAGTAATTCTATGGTAGCAATCGGTTTGTGCTAT

SEQ ID NO: 14612 - protein, 143 aa, Streptococcus agalactiae
MSGANSISLMSLLMASSLVLITLFFSYWQKLNLEKEVIISAIRAVIQLLAVGFLLDYIFGYQNPIFTALLMLFMIINASYNAAKRGKGINKGFVISFIAIGSGTIITLSVLIFSGILKFVPNQMIPVGGMIISNSMVAIGLCY

SEQ ID NO: 14613 - protein, 351 aa, Streptococcus agalactiae
TTGTGCTATAAACAATTATTGTCCGAATTTAGAAGTAAACAAGAGGAAGTGGAGACAAAATTAGCTTTAGGAGCAGATATTTTGCCAGCTTCGATTGATATTATTCGTGATGTTATCAAAACTGGTATGGTACCTACAATTGATTCAGCTAAAACACTTGGGATTGTATCTTTGCCAGGGATGATGACAGGGTTAATTCTTGCTGGAACTTCACCTATCCAAGCGGTTAAATACCAAATGATGGTGACGTTTATGCTATTAGCAACGACTTCGATAGCTTCTTTTGTAGCTACTTATTTGGCTTATAAAATTTTCTTTAATAATCGTAAGCAATTAGTAGTAACAAAAGAT

SEQ ID NO: 14614 - protein, 117 aa, Streptococcus agalactiae
MCYKQLLSEFRSKQEEVETKLALGADILPASIDIIRDVIKTGMVPTIDSAKTLGIVSLPGMMTGLILAGTSPIQAVKYQMMVTFMLLATTSIASFVATYLAYKIFFNNRKQLVVTKD

SEQ ID NO: 14615 - protein, 814 aa, Streptococcus agalactiae
ATGATTTTAAAAATTTGTCGTGCAGCATATAGTTTACAATGGGGAGGTGTTTACCAATTAGCTTTGCTGGATTATCCTCGAATTAAGGCGTTTGAATTGGAAAGGATAGGAGCTTTCATAGCTTACGAGAAACAATATAAAAGAAAAACTGAGATACAATGTGACGATAAACATCTCCTCGCAAAAATTGTTCATTTTTTAAAATACAATAGTTTTACTTTTCCCTATATTCCCAAATATAGAGAAGCGGCAGCTACTTTTAATGAGGATGGATTAGTTTAACTTCTGATTTTTTAAGCCATACATGTACGATTGAAACTGCAAAACTAATTTTTAAAGAAGTAAAATCTTATCAGCAGTTAAAGCCTTTAATAAGCCTGCTGAAGTACTGGTAAAAGATAAGAGGAATGCTGCTGGAGACCCTAAAGATTACTTTGACTATGTGATGTTGAACTGGTCAAATACCAATTCTGGTTATCGTTTAGTAATGGAAAGATTGTTAGGCAAAGCACCATCTGAACAGGAGTTAACAGTAGGTTTTAAGCCAGGGGTCAGTTTTCATTTTACTTATCAAGATATCATCAATCATCCTGATTCTATTTTTGATGGTTATCATCCTGCTAAAATTAAAAATCAGCTTTCTTTAGCAGAACATTTAGTTGCATGTGTTATCCCAAAACATTATCAAGAAGATTATCAAAGCCTTGTGCCCAATGACTTGAAACACAGGGTTTATTATTTAGATTACTGTAACGAAACACTTTATGAGTGGAATCAAAAAGTTTATGATTTTCTTTGTCATTTGGAAAATAAA

SEQ ID NO: 14616 - protein, 272 aa, Streptococcus agalactiae; identical to SEQ ID NO: 1308

SEQ ID NO: 14617 - protein, 882 aa, Streptococcus agalactiae
ATGGATATTAGACAACTTACTTACTTTATTGCTGTTGCAGAAGCAAAAAATTATTCACGCGCTGCAAAAAGTCTTTTTGTGACCCAACCTACACTTTCACAATCCATTAAAAAATTAGAAGCAGAATTAAATACTATTTTATTCTTACAAAATGGTCGTCAACTCGCTTTAACTGAAGCAGGAGAAATTCTCTATGAGAAAGGACAATTGTTGATGACTAATGTTAATCAAATGGTTACGGAGATCCAGCAATTAAATCAAGAAAAAAAGGAAGGTGTCCGTGTAGGGCTTACTTCTCTTTTTGCTATTCAATTTATGAAACAGATTTCAACTTTTATGGCTACACATTCAAATGTTGAAGTATCTTTGATTCAAGATGGTTCCCGTAAATTACAAGAATTGTTAGCAAAAGGAAAGATCGATATTGGCTTATTGTCCTTTCCAAGTACCCGCAATGATATCACTATCGAACCACTGCAAACCTCAACTAAAGGATATAAAGTAAGCATTGTCATGCCAAAATCGCATCCTCTTGCAACACTTCCTGAAATTGAACTTAATGATTTAAGAGATTATAAAGTTGCCTCACTCAACGAACATTATATGCTAGGAGAGATGTTGCCTCGTAAATGTCGTGCTTTAGGATTTGACCCCCATATCGTCTTTAAACACAATGACTGGGAAGTTCTTATTCATAGTTTACAAGACCTCAATGCAGTCACTATTTTACCAAGTGAATTTGAAAGCATTAGCCAAGTTCAAGATTTATGCTGGGTCCCACTTAAGGATAAAAATAATTTTTATCCGATTGGTATTGCTTACCGAAATGATACTTCTTTTAGTCCTATGATTGAAGAATTTTTAAGTCTTTTAAAGACCAAT

SEQ ID NO: 14618 - protein, 294 aa, Streptococcus agalactiae
MDIRQLTYFIAVAEAKNYSRAAKSLFVTQPTLSQSIKKLEAELNTILFLQNGRQLALTEAGEILYEKGQLLMTNVNQMVTEIQQLNQEKKEGVRVGLTSLFAIQFMKQISTFMATHSNVEVSLIQDGSRKLQELLAKGKIDIGLLSFPSTRNDITIEPLQTSTKGYKVSIVMPKSHPLATLPEIELNDLRDYKVASLNEHYMLGEMLPRKCRALGFDPHIVFKHNDWEVLIHSLQDLNAVTILPSEFESISQVQDLCWVPLKDKNNFYPIGIAYRNDTSFSPMIEEFLSLLKTN

SEQ ID NO: 14619 - protein, 510 aa, Streptococcus agalactiae
ATGGGATTAAATTTAAAATTGAGACCAACCATAATACCAATAACAAGCCCCATCATACTTGTTGCAACTGCTGTTGCAGCGATTAAAGTTGCAAAGCCGCTCCACATTGGCAGTAAAGCTTTCATTAATTCTCCAAGGATTGCTCCTGGTATCAAGACAATAACAGTCCCTAAAGCTAAACCATTTAATACGTTCATTATAAACGATTTAGTTGTTTGTTTTTCGACAACATCCGACATAAGATGCCTCCTACTAATAATGATTGTTTGTGATTTCACTAACTATATTAACTATATCATAGCTATTTGCAAAAGGAAAATTGGAAAAAATTATATAAGTATAGCTTTTACTAATATTATTGTGGAAATAATCATAAAGGTCAGATTGATAGACTTGTGCTATACTATTACTAAGAAAAAAGGACAGATATTATGGATATTAGACAACTTACTTACTTTATTGCTGTTGCAGAAGCAAAAAATTATTCACGCGCTGCAAAAAGTCTTTTTG

SEQ ID NO: 14620 - protein, 170 aa, Streptococcus agalactiae
MGLNLKLRPTIIPITSPIILVATAVAAIKVAKPLHIGSKAFINSPRIAPGIKTITVPKAKPFNTFIINDLVVCFSTTSDIRCLLLIMIVCDFTNYINYIIAICKRKIGKNYISIAFTNIIVEIIIKVRLIDLCYTITKKKGQILWILDNLLTLLLLQKQKIIHALQKVFL

SEQ ID NO: 14621 - protein, 1054 aa, Streptococcus agalactiae
ATGTCGGATGTTGTCGAAAAACAAACAACTAAATCGTTTATAATGAACGTATTAAATGGTTTAGCTTTAGGGACTGTTATTGTCTTGATACCAGGAGCAATCCTTGGAGAATTAATGAAAGCTTTACTGCCAATGTGGAGCGGCTTTGCAACTTTAATCGCTGCAACAGCAGTTGCAACAAGTATGATGGGGCTTGTTATTGGTATTATGGTTGGTCTCAATTTTAAATTTAATCCCATTCAATCAGCATCACTAGGATTAGCGGTTATGTTTGCAGGTGGAGCTGCAACCTTCCTTAAAGGCGCTATTATGCTAAAAGGAACAGGCGATATCATTAACATGGGAATTACTGCTGCCTTAGGTGTCCTTTTGATCCATTTTATCTGACAAGACGAAATCATTCACTTTGATTGTCATTCCAACAGTAACACTCTTACTAGTTGGAGGAGTAGGTCATGTGTTATTACCTTATGTCAAAATGATTACCACCATGATTGGACAAGGGATTGCTTCATTACTTGGTTTACAACCTGTTTTGATGTCAATTTTAATTGCGATGATTTTCTGTTTCTTGATCGTATCTCCAATCACAACAGTTGGGATTGCTTTGGCAATTAGTTTGTCCGGAATTGGTTCTGGTGCTGCTAATTTAGGTATCTGTGCTGCTAGTTTTGGGCTTTGTATGGCTGGGTGGTCAGTCAATTCTAAGGGGACAGCCTTAGCGCATGTTTTAGGGTCTCCTAAGATTTCGATGGCTAATGTATTAGCAAAACCGAAGATTATGCTACCTATGATATCTTCAGCAGCAATACTAGGAATTCTCGGAGCTCTCTTTAATATTCAAGGAACACCAGCTAGTGCAGGTTTTGGTATCAGTGGTTTGATTGGACCGATTAATGCTCTTAATTTAGCAAAAGGTGGATGGTCAGTTATGAATATGTTATTGATAATTATAATATTTGTTGCTGCACCAATTATATTGAATTTTATTTTTAATTACCTCTTTATAAAAGTACTTAAAATTATTGATCCAATGGACTATAAATTAGATATT

SEQ ID NO: 14622 - protein, 352 aa, Streptococcus agalactiae
  VARIANT 127: Xaa = Any Amino Acid
MSDVVEKQTTKSFIMNVLNGLALGTVIVLIPGAILGELMKALLPMWSGFATLIAATAVATSMMGLVIGIMVGLNFKFNPIQSASLGLAVMFAGGAATFLKGAIMLKGTGDIINMGITAALGVLLIQXLSDKTKSFTLIVIPTVTLLLVGGVGHVLLPYVKMITTMIGQGIASLLGLQPVLMSILIAMIFCFLIVSPITTVGIALAISLSGIGSGAANLGICAASFGLCMAGWSVNSKGTALAHVLGSPKISMANVLAKPKIMLPMISSAAILGILGALFNIQGTPASAGFGISGLIGPINALNLAKGGWSVMNMLLIIIIFVAAPIILNFIFNYLFIKVLKIIDPMDYKLDI

SEQ ID NO: 14623 - protein, 990 aa, Streptococcus agalactiae
ATGAAACTCAAAGTATTTAATGTTAGAGAAGAAGAAGCAACATTAGCACAAGATTGGGCAAACCGAAATCATGTGGAACTTTCTATGAGTGAAGGACCTTTGACATTGGAAACTGTTAATGAGGTAGAAGGTTTTGATGGGATTGCTAATGCACAGATTGAGCCTTTAGATGATGCTATTTATCCTCTTCTCAAAGAAATGGGAATTAAGCAAATCGCTCAGCGCAGTGCTGGTGTTGATATGTATAATCTTGAGTTAGCTAAGCAACATGGTATTATCATTAGCAATGTGCCAAGTTACTCACCGGAGTCTATTGCAGAATTTACAGTGACAATCGCTCTTAACCTTATTCGAAAAGTTGAGCTTATTAGAGCTAATGTTCGTGAACAGAATTTTTCATGGACCTTGCCAATTCGAGGACGAGTCCTAGGTAACATGACTGTGGCTATAATAGGAACTGGTCGCATTGGTCTAGCGACTGCTAAAATTTTTAAAGGGTTCGGATGTCGTGTTATTGGTTATGATATTTACCATAATCCAATGGCAGATGGTATCCTTGAGTATGTCAATTCGGTAGAAGAAGCTGTTGAAGAAGCTGATCTTGTGTCCTTACATATGCCACCAACTGCTGAAAATACGCATCTATTTAATTTAGATATGTTTAAACAGTTTAAAAAAGGTGCTATTTTAATGAATATGGCACGTGGAGCATTGGTGGAAACCAAAGATCTTCTTGAGGCTTTAGATCAAGGGCTTTTGGAGGGAGCTGGTATTGATACTTATGAATTTGAGGGGCCATATATACCTAAAAATTGTCAAGGTCAAGACATTTCAGACAAGGATTTCCTAAGACTGATTAACCATCCGAAAGTAATATACACTCCTCATGCGGCTTATTATACAGATGAAGCGGTCAAAAATCTAGTAGAGGGTGCCTTAAATGCTTGTGTAGAAGTGATTGAAACGGGAACAACTACTACGAAAGTCAAC

SEQ ID NO: 14624 - protein, 330 aa, Streptococcus agalactiae; identical to SEQ ID NO: 1314

SEQ ID NO: 14625 - protein, 1548 aa, Streptococcus agalactiae
ATGGAGAAAACAATGGATATGGAACAACGTGAAGAAGTTGTATCTTATAACCGAGCGAAAGTATGGCAGTTAGTTATGTTTGCCATGAACAATGCTTCTACAAATATATACTTATTTACGTTTATGTTTGTTACCTATTTCTCAACTGGCGTTCTTGGCTCGGCAGCCATTTTTGTCAGTCAAATTATGGGTTATATCCGTATTTTTGATGGTTTTATTGATCCAGCTATTGGTATTATGATTGATAAAACTGATACAAAATTTGGTAAGTATCGTCCTATTTTGATTATTGGGAACGTTATTACGGCTTTGTCATTGATTTTTCTTCTTGCATTGAGAGGTGTCGATGAAAATATTCGTTTCCCATTATTTATCCTTGTTCTAATTATCCATAAAATTGGATACTCAATGCAACAGACAATAACTAAAGCAGGGCAAACAGCACTGACAAATGACCCTAAGCAACGTCCTATTTTTAATATCGTTGATGCAGTTATGACAACATCATTAATGACAGGCGGTCAGTTTGTCGTTTCAGTTTTCTTAGTACCAAAATTTGGTAATTTTACACCTCAATTCTTCAATGTCCTTATTTTTGGAACAATTCTTATTTCAGCTATTTTAGCAATCGTTGCAATTATTGGGATTTGGGCAAAAGACAGAAAAGAATTCTTTGGTTTAGGAGAGAATACCCAAAAGACTGCTCTAAAAGATTACTGGAAGGTGTTGAAAGGAAATAAACCGCTTCAGATATTATCCATTGCTGCAGCTTTGGTAAAATTTGCCATCCAATTCTTTGGCGATTCCGTTGTTATGGTGCTATTGTTTGGTATTTTATTTGGTAATTATGCTTTATCAGGACAATTCTCACTTCTTTTCATTGTTCCTGGTGTTATTATTAATATTTTGTTCTCAACAATTGCTCGTAAAAAAGGTCTTCGTTTTTCATATGTCAGAGCAATTCAGATCGGTATGATTGGTTTACTTGCTTTTGGTGCAGTTCTTTACGTTGGTAAGCCTGGTGACCTTAGTTTAATAAGCCTAAATCTTTATACTATTTTATTTATCGTTACTAATATTATTGCGAGATACGCTTCACAAGCACCTGCTAGTTTAGTATTGACTATGGGAGCAGATATTTCTGACTATGAAACTTCTGAATCCGGTCGTTATGTATCAGGAATGATTGGAACTATCTTCTCCTTAACAGATTCGATTGCTTCTTCATTTGCTCCTATGGTAGTAGGTTTTGTGTTAGCAGGAATTGGATTTTCAAAATCATTTCCAACTATCGAAACACCACTGCCCCCTGATTTAAAAATGGCAGCTATTAGTATCCTTGTGGCCATTCCATTTATAGCTTTGTCTATAGCTCTTCTTTTAATGAAATTTTACAAACTAGATAAAGAAGAAATGGTTCGTATTCAAGAGAAGATTCAAGTTATGAAAGCAGCAACTACTAAGGAACGTGCTAAAGATATTGCTCGTAATGTTCCTTTGACAGATATGGATTATGTTGATGTAACAAAATATCCTATTGATAAAGAT

SEQ ID NO: 14626 - protein, 516 aa, Streptococcus agalactiae
MEKTMDMEQREEVVSYNRAKVWQLVMFAMNNASTNIYLFTFMFVTYFSTGVLGSAAIFVSQIMGYIRIFDGFIDPAIGIMIDKTDTKFGKYRPILIIGNVITALSLIFLLALRGVDENIRFPLFILVLIIHKIGYSMQQTITKAGQTALTNDPKQRPIFNIVDAVMTTSLMTGGQFVVSVFLVPKFGNFTPQFFNVLIFGTILISAILAIVAIIGIWAKDRKEFFGLGENTQKTALKDYWKVLKGNKPLQILSIAAALVKFAIQFFGDSVVMVLLFGILFGNYALSGQFSLLFIVPGVIINILFSTIARKKGLRFSYVRAIQIGMIGLLAFGAVLYVGKPGDLSLISLNLYTILFIVTNIIARYASQAPASLVLTMGADISDYETSESGRYVSGMIGTIFSLTDSIASSFAPMVVGFVLAGIGFSKSFPTIETPLPPDLKMAAISILVAIPFIALSIALLLMKFYKLDKEEMVRIQEKIQVMKAATTKERAKDIARNVPLTDMDYVDVTKYPIDKD

SEQ ID NO: 14627 - protein, 1023 aa, Streptococcus agalactiae
ATGGCAAAAATTATTTCATTAGGTGAGGTTCTTTTGCGATTATCTCCACCTCAATATCACACACTGATGCAGGCTAATCACCTAAAATGCCAATTCGGTGGTTCAGAACTTAATGTCTTAGCAAGCCTTGCTCAACTAGGTTACCATGTAGGATTGGTCTCAGCTTTGCCTGATAATGATTTGGGCAAGATGGCAAGTCAATTTATATTGTCACAGCAAATTAGTCCAGCTGCTATAATTAAAAAAGAAGGACGACTAGGAATTTATTACTATGAACAAGGATTTTCGGTAAGAACAAATAAGGTTATCTACGATCGTAACTATTCATCTTTTTGGGAAAGTACCTTGAGTGATTATGATTTTACTTCTATTTTTAAGGGAGTGGATTGGTTTCATGTTTCTGGAATTACTCCAGCACTAACCAAGGACTTATATGAGGTGACTCGGTTCCTTATGACAAAAGCTAAAGAAGGAGGTGTAAAAGTATCGATTGATCTCAATTTTCGTGAGAGTTTATGGTCATCTTTTCAAGAGGCACGTGAGCAATTATCGCCACTATTAGGATTATTAGATGTTTGCTTTGGCTTAGAGCCGATTTATTTAGCTGGCGAAAGTGAAGATTTAAAAGATGAGTTGGGCTTATCCAGACCTTACCTTGATATTGAATTACTTGAAAAGATAACCCAAAAGATTGTCCAAGAATATGGGTTAGACTATATTGCCTTTACTCAAAGGGAAATGGAATATACTAATCAGTATATGTTAAAATCATATTTGTATCATAATAATATGTTATATCAAACTGATAAAACTGGCGTTGAAGTATTAGATCGTGTGGGGACAGGAGATGCCTTTGCTGCAGGTTTAATTCATGCGCTTCTGGAAAAAGAAACTCCTCAAAGGGCCTTAGAAATAGCTATGGCTACATTTAAATACAAACATACCATTCAAGGAGATATCAATATCATGACACGAGATGATATTGCTTACCTCATTGAAAAAGAAACAAATGATATTAAACGA

SEQ ID NO: 14628 - protein, 341 aa, Streptococcus agalactiae
MAKIISLGEVLLRLSPPQYHTLMQANHLKCQFGGSELNVLASLAQLGYHVGLVSALPDNDLGKMASQFILSQQISPAAIIKKEGRLGIYYYEQGFSVRTNKVIYDRNYSSFWESTLSDYDFTSIFKGVDWFHVSGITPALTKDLYEVTRFLMTKAKEGGVKVSIDLNFRESLWSSFQEAREQLSPLLGLLDVCFGLEPIYLAGESEDLKDELGLSRPYLDIELLEKITQKIVQEYGLDYIAFTQREMEYTNQYMLKSYLYHNNMLYQTDKTGVEVLDRVGTGDAFAAGLIHALLEKETPQRALEIAMATFKYKHTIQGDINIMTRDDIAYLIEKETNDIKR

SEQ ID NO: 14629 - protein, 1797 aa, Streptococcus agalactiae
ATGTTATATCCATTATTGACAAAAACAAGAAATACTTATGATTTAGGCGGTATTTGGAACTTTAAATTAGGAGAACATAATCCAAATGAATTACTACCTTCAGATGAAGTCATGGTTATCCCGACTTCATTTAATGATTTGATGGTAAGTAAAGAAAAACGTGATTATATAGGTGATTTTTGGTATGAAAAAGTCATTGAAGTACCTAAAGTATCAGAGGATGAAGAGATGGTGCTGCGTTTTGGCTCAGTGACACATCAAGCTAAAATTTATGTTGACGGTGTATTGGTAGGAGAGCATAAGGGAGGTTTTACTCCTTTTGAAGTTCTTGTTCCTGAATGTAAGTATAATAATGAGAAAATTAAGGTATCAATTTGTGCTAATAACGTTTTAGACTATACCACGCTTCCGGTCGGAAATTATAGTGAAATCATTCAAGAAGATGGTAGCATTAAGAAGAAAGTACGTGAGAATTTTGATTTCTTCAATTATGCAGGTGTGCATCGTCCTCTTAAGTTGATGATACGTCCTAAAAATCATATTTTTGATATTACAATTACAAGTCGTCTATCAGATGATTTACAGTCAGCAGATTTACATTTTTTAGTGGAGACTAATCAAAAGGTTGACGAAGTTAGAATTAGCGTTTTTGATGAAGATAACAAACTAGTGGGTGAAACGAAGGATAGCAGATTATTTCTTAGTGATGTCCATCTTTGGGAAGTTTTAAATGCCTATCTGTACACAGCGCGTGTTGAAATTTTTGTTGATAATCAACTCCAAGATGTCTATGAGGAAAATTTTGGTCTTAGAGAAATAGAAGTGACAAATGGTCAATTCCTATTGAATCGCAAACCTATTTATTTTAAAGGATTTGGTAAACATGAAGATACGTTCATTAATGGCAGAGGTTTGAATGAAGCTGCTAACTTAATGGATTTGAATCTTTTGAAGGATATGGGGGCAAACTCTTTTAGAACATCCCATTATCCTTATTCTGAAGAAATGATGCGTTTAGCAGATCGAATGGGAGTGTTAGTGATAGATGAGGTTCCAGCAGTAGGGTTATTTCAAAATTTTAACGCTTCCTTAGATTTGTCACCAAAAGATAATGGTACGTGGAATTTGATGCAAACAAAAGCGGCGCATGAACAAGCTATCCAAGAATTAGTGAAGCGTGATAAAAATCATCCTAGCGTCGTGATGTGGGTAGTCGCTAACGAACCGGCTAGTCATGAAGCGGGAGCACATGATTATTTTGAGCCATTAGTAAAACTTTATAAAGATTTAGACCCTCAAAAACGTCCTGTCACCTTGGTTAATATTTTAATGGCAACCCCAGATAGAGACCAAGTGATGGACCTGGTTGATGTTGTCTGCCTTAATCGTTACTATGGTTGGTACGTTGACCACGGTGATTTAACAAATGCAGAAGTAGGTATAAGAAAAGAGTTATTAGAATGGCAAGATAAATTTCCTGACAAACCAATTATCATAACGGAGTATGGCGCTGATACGTTACCGGGATTACATTCTACTTGGAATATTCCATATACAGAAGAATTTCAATGTGATTTTTATGAAATGAGTCATCGTGTTTTTGATGGTATTCCTAATTTAGTTGGTGAGCAAGTCTGGAATTTTGCAGACTTTGAAACTAATCTGATGATACTTCGTGTACAGGGGAATCACAAAGGTCTCTTTTCAAGGAATCGCCAGCCGAAACAAGTCGTCAAAGAATTTAAAAAACGCTGGATGACTATTCCTCATTACCATAATAAAAAAAATAGTGTAAAA

SEQ ID NO: 14630 - protein, 599 aa, Streptococcus agalactiae; identical to SEQ ID NO: 1322

SEQ ID NO: 14631 - protein, 669 aa, Streptococcus agalactiae
ATGGCTAGACCCTTAGTAGAACAAACAGCAGATCGTCTATTGCATTTAATTTTAGAAAGAGAATACCCTGTTGGTGCTAAGCTCCCCAATGAATATGAATTAGCAGAAGATCTAGATGTTGGTCGCAGCACAATCCGAGAAGCAGTCAGAAGTTTAGCAACGCGTAATATTTTAGAAGTCAGACAGGGCTCTGGAACATATATTAGTTCTAAAAAGGGTGTTTCTGAGGATCCATTAGGGTTCTCTCTAATAAAGGACACAGATAGGTTGACATCAGATCTCTTTGAACTACGCCTTTTATTGGAACCTCGAATAGCAGAGCTGGTAGCTTATAGAATTACAGATGATCAGTTACAATTACTCGAAAAGCTTGTTGGAGATATTGAAGATGCTGTTCACGCAGGCGATCCGAAACATTTACTTTTAGACGTGGAATTTCATTCCATGCTAGCTAAATACAGTGGTAATATTGCAATGGATAGCCTTTTGCCAGTCATCAACCAGTCAATTCATCTGATAAATGCGAATTATACAAATCGTCAGATGAAGTCGGATAGTTTAGAAGCACATAGAGAAATTATCAAAGCAATCCGAGAAAAAAATCCAGTAGCTGCACATGATGCTATGCTTATGCATATCATGAGTGTTAGACGTTCAGCGTTGAAAGCT

SEQ ID NO: 14632 - protein, 223 aa, Streptococcus agalactiae; identical to SEQ ID NO: 1324

SEQ ID NO: 14633 - protein, 615 aa, Streptococcus agalactiae
ATGTTAAATCAATTGAAAAACAACTATTTCTTTGCTGTTATTCGAGGGAAATCATCTGAGGATGCGCTCGAAATCGCAAAGCATGCTATTTTGGGTGGTATTCGGAATATTGAAGTAACTTTTTCGACTCCTGAAGCAAGCAAAGTCATCAAACAATTATCAGATGACTTTAAAAATAATAAAGAAATTATTGTGGGGGCCGGAACGGTCATGACAACTGAACTTGCTAAAGAGGCTATTGATGCTGGAGCTAAATTTTTGGTTAGCCCACACTTTGATTCAGATATTGCTAATTTAGCTAATGAAAACAAGGTTTATTATTTCCCAGGCTGTGCAACGGCAACAGAAATCGTGGTAGCTAGAAAGTATAAATGTCAGATTATAAAGCTTTTTCCAGGTGGAGTTGTGGGTCCAGGTTTTATCAAAGATATTCATGGTCCTATTCCAGATGTTGATTTAATGCCATCAGGTGGCGTCTCTGTTTCAAATGTAGTTGAATGGAGAAAAGCAGGAGCAGTTGCGGTTGGTGTTGGCTCAGCATTATCTAGTAAAGTAGCCACAGAAGGCTATGATAGTGTTACTAAAATAGCTAAACAGTTTGTTTCTGCACTTGAT

SEQ ID NO: 14634 - protein, 205 aa, Streptococcus agalactiae; identical to SEQ ID NO: 1326

SEQ ID NO: 14635 - protein, 1398 aa, Streptococcus agalactiae
ATGGCGTTTAATACTGAAACATTTATGTTAAAAAATCAAGCAGCTATACAGCTGTATGAAGAGGTCAAGAGACAACCTATTTTTGATTATCATTGCCACTTAGATCCAAAGGACATTTTTGAAGATCATATTTTTGATAATATTGTGGATTTGTGGCTTGGTGGTGACCACTATAAATGGCGTCTTATGAGGGCTAATGGTATTTCTGAAGCAGAAATTACAGGTCCAGCATCCAACCTTGAGAAATTTAAAGCATTTGCTAGAACACTAGAAAGAGCATACGGTAATCCTGTTTATCATTGGTCTGCTATGGAATTGAAAAATATCTTTGGTGTTAATGAGATTTTGACAGAATCAAATGCTGAGGAAATTTATCATCGTTTAAATCATTTCTTGAAAGAGCATAAAATAAGTCCTAGACGTTTAATTGCAGATAGCAAAGTTATGTTTATTGGTACTACAGACCACCCTCTTGATACTCTCGAGTGGCATAAAAAGTTGGCTGCTGATGAGAGTTTTAAAACAGTTGTTGCTCCGACATTTAGGCCAGATGAAGCTTTTATTGAACATCGACATTTTGTTGATTTTATTACTAAACTGGGTGACATTACTCAAAAAGAGATTACAGATTTTTCAACATTTATAGCAGCAATGGAAGAACGCATTGCGTATTTTGCTCAAAATGGTTGTAGGGCTAGCGATATCAGTTTTACGGAAATCGTCTTTGAACAAACTGATGAATTGGAGTTGAACGATTTATTTAATAAAGTTTGTGAAGGCTATATCCCAAATCAATCAGAAATCAGCAAATGGCAAACAGCTGTTTTTATGGAACTTTGCCGATTATATAAAAAATATGGTTTTGTAACACAGGTGCATTTTGGAGCTTTGAGAAATAATCATTCTACTATTTTTGAAAAATTGGGAGCTGACGTGGGTGTGGATTCACTTGGTGACCAAGTGGCTTTAACTGTTAATATGAACCGTTTATTGGATTCCTTGGTTAAAAAAGATAGTCTGCCTAAAATGATTTGGTATAATCTCAATCCAGCTTACAATATAGCAGTAGCTAACACTTTGGCAAATTTTCAAGCTAACGAACTTGGAGTGAGATCTTACCTTCAATTTGGTGCAGGTTGGTGGTTTGCAGATACTAAATTAGGGATGATTAGTCAAATGAATGCCTTAGCAGAGCAAGGCATGTTGGCGAATTTTATTGGTATGTTAACAGATTCTAGAAGTTTTCTATCTTATCAACGTCATGACTATTTTCGACGTATTTTATGTACCTACTTAGGAGAATGGATTGAAGAAGGAGAAGTTCCAGAAGATTATCAAGCTTTAGGAAGTATGGCTAAAGACATCGCTTATCAAAATGCAGTTAATTATTTTAAGAAC

SEQ ID NO: 14636 - protein, 466 aa, Streptococcus agalactiae
MAFNTETFMLKNQAAIQLYEEVKRQPIFDYHCHLDPKDIFEDHIFDNIVDLWLGGDHYKWRLMRANGISEAEITGPASNLEKFKAFARTLERAYGNPVYHWSAMELKNIFGVNEILTESNAEEIYHRLNHFLKEHKISPRRLIADSKVMFIGTTDHPLDTLEWHKKLAADESFKTVVAPTFRPDEAFIEHRHFVDFITKLGDITQKEITDFSTFIAAMEERIAYFAQNGCRASDISFTEIVFEQTDELELNDLFNKVCEGYIPNQSEISKWQTAVFMELCRLYKKYGFVTQVHFGALRNNHSTIFEKLGADVGVDSLGDQVALTVNMNRLLDSLVKKDSLPKMIWYNLNPAYNIAVANTLANFQANELGVRSYLQFGAGWWFADTKLGMISQMNALAEQGMLANFIGMLTDSRSFLSYQRHDYFRRILCTYLGEWIEEGEVPEDYQALGSMAKDIAYQNAVNYFKN

SEQ ID NO: 14637 - protein, 1044 aa, Streptococcus agalactiae
ATGGAAATGTCATTTAGGTGGTATGGTGAAGACGACCCCGTTACTTTAGAAAATATTGGTCAAATTCCAACAATGAAAGGGATTGTTACAGCGATATACGATGTACCAGTAGGAGAAGTTTGGTCACGTGAGCGCATTCAACAGCTGAAAGAAAAGGTAGAGGCAGCAGGGCTTAAAATTTCGGTTATCGAATCAGTACCTGTTCATGAAGATATCAAATTGGGACGTCCAACACGTGATCTCTTGATTGATAATTATATTCAAACCGTCAAAAATTTGGCTGCGGAAGGTATTGATACTATTTGTTATAATTTTATGCCAGTATTTGACTGGACACGCACTGATTTAGCATATCAATATCCAGATGGTTCCACAGCTTTGATATTTGATGAGACGGTTTCTAAAAAAATGGATCCAGTAAACGGTGAATTATCTTTGCCAGGATGGGATGCCAGCTATAGTAAAGAAGAAATGAAGGCTATCATGGATGCCTATGCTGAAATTGATGAGGAAAAACTTTGGGAAAATCTCACTTATTTTATTAAACGTATTATTCCTGAAGCGGAAGCCGTAGGCGTTAAAATGGCCATTCATCCGGATGACCCACCATATTCTATTTTTGGTTTACCTCGCATTATTACTGGGTTAGAGGCTATTGAGCGTTTTGTGAAATTGTACGATAGTAAAAGTAATGGCATCACTTTATGTGTGGGTTCTTACGCTTCTGATCCCCAGAATGATGTTTTAGAGATTTCGCGACGTGCTTTTGAGTTAGATCGTGTAAACTTTGTTCATGCTCGCAATATTAAATTAGGTGATGGAAAGTCATTTAAAGAATCGGCTCATCCATCAGAATACGGGTCAATAGACATGTATGAAGTTATTAAGTTATGCCATGAATTTGGGTTTGAGGGTGCTATTCGACCTGACCACGGGCGTATGATTTGGGGAGAAACAGGTCGTCCAGGATATGGCCTATACGATAGAGCTTTAGGAGCCACTTACGTTTCTGGTTTATACGAAGCTGTGATTAAAGGTTCAAAA

SEQ ID NO: 14638 - protein, 348 aa, Streptococcus agalactiae; identical to SEQ ID NO: 1330

SEQ ID NO: 14639 - protein, 837 aa, Streptococcus agalactiae
ATGTCAAAAACAATTACATTTACCAATAAAGTTGTCGTCATAACAGGTGCAGGCGGTGTTCTCTGTGGTTATATGGCTAAAGAATTTGCGAAAGCAGGCGCTAAAGTGGCATTATTAGATTTGAATCAAGAAGCTGCTCAAACATTTGCTGATGAAATTGTAGAAGAAGGTGGTATCGCTAAGGCTTATAAAGCTAACGTTTTGTCTAAAGAAAACCTTGAAGAAGTGCATCAAGCCGTTTTAGAGGATCTTGGACCAACTGATATTTTAGTTAATGGTGCAGGAGGCAACAATCCTAAAGCTACAACTGATAATGAATTTCACGAATTAGACTTACCTTCAGAAACAAAAACCTTCTTTGAGTTAGATGAAGCTGGTATTAGCTTTGTTTTTAACTTAAATTATTTAGGAACATTATTGCCAACGCAAGTATTTGCCCAAGATATGGTTGGACGTGAAGGAGCGAATATTATTAATATCTCTTCAATGAATGCTTTCACCCCTCTGACCAAAATACCAGCTTATTCTGGAGCTAAAGCAGCTATTAGTAACTTCACACAATGGCTAGCTGTTCATTTCTCAAAAGTTGGTATCCGTTGTAATGCTATTGCACCTGGTTTCTTGGTAACAAATCAGAACCGAAGCTTGTTATTTACTGAGGACGGTCAGCCAACTGCGCGTGCTGAGAAAATTCTTAATAATACACCAATGGGAAGATTTGGAGAAGCAAGTGAGCTGATTGGCGGATTGTTCTTTTTAGCAGATGAAAAATCATCAAGTTTTGTTAATGGCGTTGTCCTTCCGATTGATGGTGGATTTGCTGCTTACTCTGGTGTT

SEQ ID NO: 14640 - protein, 279 aa, Streptococcus agalactiae; identical to SEQ ID NO: 1332

SEQ ID NO: 14641 - protein, 810 aa, Streptococcus agalactiae
ATGGTAGATACAAATCACAAAATCGCTTTTTGCATAGATTCTGATGGTTGCGCAATGGATACAATGACATATAAGCATCAACTCTTTTTTGGTCCAATTGCTGCAGATATATTTGGGATATCAGAACAAGAAAGAACAAGTTTTTTAAAAGAGTGGGATAGAGTCAATCTTTATTCAAGAACTCGTGGAGTTAATCGGTTTGTGGGATTGGTTATGGGCCTTGAGTTTGCCGGAGTAGAACATATTGATAAATTAAAAGAATGGGTCGAAACAACAGACTCATTGTCCAATAATTCCTTAGAGTTAGCGCTTGCCAACGATTTTAGTAGAGATTTAGAGAAGGCTTTAGAATGGTCCAATGAAGTGAATCGCCAAATCAAAAATTATGAGGGAGATTCTTTAGCGTTTTCAGGTGTGTTAGAAAGTTTAGAACGATTAAGTCAATTTGGTAATGTTTATGTCGTGAGTTCTGCTAACAAGGAAGCTGTTTGGCAAGAGTGGGAAGAACAGGGATTGCTAAAGTATGTTGATGATATCTATTGTCAAGATAGAGGTAAAAAAGAAGATGTTATCGCCACTTTAATTGCAAGTGGTTACTGCCGTGAAACTATTTTGATGGTAGGAGATTCCCTGGGTGATCTGGCTGCAGCAGAACAAAATGGTATTGCATTTTACCCAGTACTTGTTGGTAAGGAAGTCAAATCATGGGAAATTCTTAGAGAAGATATTGGTGAAGCTTTTGCAAAAGGTCAATTCGAACAGCAAAGGCAAAAAGAATCTATTAATACCTTTTGGGCTAATTTAGATAAC

SEQ ID NO: 14642 - protein, 270 aa, Streptococcus agalactiae; identical to SEQ ID NO: 1334

SEQ ID NO: 14643 - protein, 1788 aa, Streptococcus agalactiae
ATGACACATTTAGTTGACTTAACAAAGAAACCCTTCAATCTAAATCAAGAAGCAATTGAGTGGATTGAAAAAACAATTAATGAGATGACATTGGATGAGAAAATTGGGCAACTTTTTTTCAATATGGGAGCTAGTCGTTCAGAAGAATATTTAACAGATGTTTTGGATCGGTATCATATTGCTGCTGTTCGCTATAATAGAGGTAGTTCAAGTGAAATCTATGATCAGAATTTAATTTTACAGACAAAGTCGAAATTGCCGATGTTGATTGCTGCAAATACAGAAGCTGGTGGAGACGGTGCTGTCACGGATGGAACTAAAGTTGGCGATGAAATAAAAGTGGCTGCTACAAATGATCCGAAATATGCTTATGAAATGGGAAGAATCGCAGGGATGGAGGCATCTGCTGTGGGTTGTAATGCTTCATTTTCTCCAATTGTAGATTTGACACGTAATTGGCGTAATCCTATCATAGCTAGTCGAAATTGGGGTGCTAACGTTGATCAAATTATTTCACTTTCAAAAGAGTATATGAAAGGAATCATGCAATATAATATTGTACCTTTCGCTAAACATTTTCCAGGGGATGGCATTGATGAGCGTGATCATCATTTGTCATTTGCTTCCAATCCTATGAGTAAAGAGGAGTGGATGTCGACATTTGGCCGCATTTATGGTGAATTGGCTGACGCAGGTTTACCAGGAGTCATGGCAGGTCACATACATTTACCAAACGTTGAAAAAGAAATGCATCCAGAGCGAGACCTTGATGATATGTTACCAGCTTCATTGAATAAAACACTTTTAGATGAGTTATTGAGAGGAGAGTTAGGTTATAATGGAGCTATTGTAACGGACGCTTCTCATATGGTTGGAATGACTGCTTCAATGCCAAGGAGAGATTTGTTGCCAACGGCGATTGAAGCAGGTTGTGATTTATTCTTATTCTTTAATGACCCTGATGAAGACATTCAATGGATGAAAGAAGGTTACGAAAAAGGTATTCTAACAGAGGAACGTCTCCATGACGCTTTACGTCGTACTCTCGGTCTAAAAGCGAAATTAGGCTTGCATAACTATGAGGGACGTCGCCAAGAACTCTTTATGCCTAAAGATAAGGCTATGGCTTTAATCAACACATTAGAGTCGCAAAAAATAGCTGATGAAGTTGCTGATAAAGCAGTAACTCTGGTAAAAGATAAACAAAAAGATATCTTTCCAGTAAATCCAGAACGTTATCGTCATATCTTACTTGTTAACGTTGAAGGATATAAGGGAGGTTTTGGTGCGATGATTGCTGGAAACAAGCAACGTGCATCGGATTACATGAAAGAGTTACTTGAGGCACGTGGCCATGAAGTAACTGTCTGGGAGTCTACCGAAGAGCGTATTATGAAATTGCCACAAGAGGAGCGGGCAGCAGCTATCGCTAATGTTTACGCACAAAAACAGCCAATCGCAAATCTAACAGAACACTATGACTTGATTATTAACTTGGTAGATGTCAATGCTGGAGGAACAACACAACGTATTATTTGGCCAGCAGCTAAAGGCACCCCTGATCAGCCTTTTTACGTTCATGAAATACCATCTATTGTGATTTCAGTACAACATGCATTTGCTTTAGCAGATATGCCACAGGTAGGGACTTATATTAATGCTTATGATGGGCTTCCTAGCACGATAAGTGCAGTAGTTGCGAAATTGGCTGGAGAATCAGAATTTACAGGAGTTTCACCAGTAGATGCTTACTGTGGTTTAATTGATACACATTTATGGCGCCAATGC

SEQ ID NO: 14644 - protein, 596 aa, Streptococcus agalactiae
MTHLVDLTKKPFNLNQEAIEWIEKTINEMTLDEKIGQLFFNMGASRSEEYLTDVLDRYHIAAVRYNRGSSSEIYDQNLILQTKSKLPMLIAANTEAGGDGAVTDGTKVGDEIKVAATNDPKYAYEMGRIAGMEASAVGCNASFSPIVDLTRNWRNPIIASRNWGANVDQIISLSKEYMKGIMQYNIVPFAKHFPGDGIDERDHHLSFASNPMSKEEWMSTFGRIYGELADAGLPGVMAGHIHLPNVEKEMHPERDLDDMLPASLNKTLLDELLRGELGYNGAIVTDASHMVGMTASMPRRDLLPTAIEAGCDLFLFFNDPDEDIQWMKEGYEKGILTEERLHDALRRTLGLKAKLGLHNYEGRRQELFMPKDKAMALINTLESQKIADEVADKAVTLVKDKQKDIFPVNPERYRHILLVNVEGYKGGFGAMIAGNKQRASDYMKELLEARGHEVTVWESTEERIMKLPQEERAAAIANVYAQKQPIANLTEHYDLIINLVDVNAGGTTQRIIWPAAKGTPDQPFYVHEIPSIVISVQHAFALADMPQVGTYINAYDGLPSTISAVVAKLAGESEFTGVSPVDAYCGLIDTHLWRQC

SEQ ID NO: 14645 - protein, 1083 aa, Streptococcus agalactiae
ATGTCAAAACTTAATCGTATACGCCATCACTTACATTCAGTCCAAGCTGAACTTGCTGTCTTTTCTGATCCTGTGACAGTCAACTATTTAACAGGTTTCTTTTGCGATCCCCATGAAAGACAAATGTTTTTATTTGTCTATGAAGATCGCGATCCTATTTTATTTGTACCAGCACTAGAAGTATCGCGTGCAAAACAAAGTGTACCATTTCCCGTCTTTGGTTACATAGATTCAGAAAATCCTTGGCAAAAAATAGCTAGCAACTTACCATCCTTTTCTGTTTCTAAAGTTCTAGCCGAATTTGATAATCTTAATGTTACTAAATTCCAAGGTCTCCAAACCGTTTTTGATGGTCATTTTGAAAACCTAACACCTTATATTCAAAACATGCGCCTAATTAAATCACGAGATGAAATTGAGAAAATGTTAGTCGCTGGAGAATTTGCTGATAAAGCTGTTCAAGTTGGATTTGACAATATCTCGCTAAACAACACTGAAACCGATATTATTGCTCAAATCGAATTTGAAATGAAAAAACAAGGTATCAATAAAATGAGTTTCGACACTATGGTTTTGACTGGCAATAATGCAGCAAATCCACATGGTATCCCAGGAACTAATAAAATCGAAAATAATGCTTTGTTATTATTTGATTTAGGTGTAGAAACACTAGGTTATACGTCAGATATGACCCGTACAGTAGCAGTGGGGAAACCTGATCAATTCAAAAAAGATATTTACCATTTATGTCTTGAAGCACATCAAGCGGCTATTGATTTTATTAAGCCAGGAGTCCTTGCTTCTGAAGTTGACGCAGCAGCAAGAAATGTTATTGAAAAGGCTGGTTATGGACAATACTTTAACCACCGCCTTGGTCATGGATTAGGTATGGATGTCCATGAATTTCCATCTATTATGGCTGGTAACGATATGGAGATTCAAGAAGGCATGTGCTTCTCTGTTGAACCAGGTATTTATATACCAGATAAAGTTGGTGTGCGAATTGAAGACTGCGGTTATGTGACTAAAACCGGCTTTGAAGTATTTACCAAAACACCCAAGGAACTACTCTATTTTGAAGGA

SEQ ID NO: 14646 - protein, 361 aa, Streptococcus agalactiae; identical to SEQ ID NO: 1338

SEQ ID NO: 14647 - protein, 945 aa, Streptococcus agalactiae; identical to SEQ ID NO: 5783

SEQ ID NO: 14648 - protein, 315 aa, Streptococcus agalactiae; identical to SEQ ID NO: 1340

SEQ ID NO: 14649 - protein, 1464 aa, Streptococcus agalactiae
ATGACAAATGAATTGATAATGCAAGCTTTTGAGTGGTATTTACCTAGTGATGGGAATCACTGGAAGAAATTAGAGGAGTCTATATCAGACCTTAAAAAACTTGGAATTAGTAAAATCTGGTTACCACCAGCATTTAAGGGAACTAGCAGTGATGATGTAGGATATGGTGTTTATGATCTCTTTGATTTAGGAGAATTTGACCAGAATGGAACAATTAGAACAAAATATGGTAGGAAAGAAGAGTATCTAAAGCTTATTAAGTCGTTAAAGGCAAATGGCATTAAACCGTTTGCAGATATCGTTCTTAACCATAAAGCCAATGGTGATCATAAAGAAAAATTTCAAGTCATCAAAGTCAATCCTGAAAATCGTCAAGAAGCATTAAGTGAACCCTATGAGATTGAAGGATGGACGGGATTTGATTTCCCAGGTAGACAGGGTGAGTACAATGATTTTAAATGGCACTGGTACCACTTTACTGGTTTAGATTACGATGCTAAAAATAATGAAACAGACATCTTTATGATTGTAGGCGATAATAAAGGTTGGGCAGACGATGATTTGATTGATGATGAAAATGGTAATTTCGATTATCTCATGTACAATGACATTGATTTTAAGCATCCTGAAGTTATAAAAAACTTACAAGATTGGGCTAAGTGGTTTATTGAAACTACAGGCATTGAAGGTTTTCGTTTGGATGCTGTGAAACATATCGATTCTTACTTTATTCAAACTTTCATTAATGATATTCGTACAAAAATAAAACCCGATTTAGAGGTCTTTGGCGAATATTGGAAATCTGACCAAACATCAATGAAGGACTATTTAGAGGCAACACAATTTCAATTTTCTCTTGTTGATGTCACCTTGCATATGAATTTTTTTGATGCCAGTCACCAAAACCGTGATTTTGATATGCGAACAATTTTTGATGATAGTCTTGTTATTGATAATCCTGAGTATGCTGTTACATTCGTAGAAAATCACGATACGCAAAGTGGACAAGCTCTAGAAAGTAGAGTGGAAGATTGGTTTAAACCTTTAGCTTATGGCTTGATACTTTTACGCCAACAAGGGACTCCATGTCTTTTTTATGGTGATTACTATGGCATTCAAGGAGAATTTGGCCAACCATCCTTTAAAGAGGTTATTGATAAAATGGCTGAGCTACGCCAAAACTATGTATTTGGCGAACAAGTCGATTACTTTACGCATTCAAATTGTATTGGTTGGACTTGTCTTGGGGATGAGGAACATAATTCTTGTTTAGCTGTGGTCCTAACAAATGGTGATCAGGGATGGAAACATATGGAAGTAGGGGAAATTTATGCAGGCAAAACTTTTGTTGATTATTTAGGCAATTGTGAACAAGAGGTTGTTATAGGAGATGATGGTTGGGGTGATTTTTTAGTTGCATCTGCGTCTATCTCGGCTTGGGTCCCTAAAATAGAGGAAGCTAAC

SEQ ID NO: 14650 - protein, 488 aa, Streptococcus agalactiae; identical to SEQ ID NO: 5786

SEQ ID NO: 14651 - protein, 996 aa, Streptococcus agalactiae; identical to SEQ ID NO: 5787

SEQ ID NO: 14652 - protein, 332 aa, Streptococcus agalactiae; identical to SEQ ID NO: 5788

SEQ ID NO: 14653 - protein, 1332 aa, Streptococcus agalactiae
ATGCGTATAGGTCTATTTACAGATACATACTTTCCCCAAGTTTCGGGAGTTTCAACAAGTATCCGAACTTTAAAGGAAGGGTTGGAGAAGGAAGGACACGAAGTTTATATTTTCACAACTACCGACCGTAATGTCAAACGTTTTGAAGACCCTACAATTATTCGTTTACCAAGTGTCCCTTTTATTTCTTTTACAGATCGTCGAGTAGTTTATAGAGGTTTAATTTCTGCTTATAGGATAGCTAAAGACTACGAACTTGATATTATTCATACTCAAACAGAATTCAGTTTAGGACTTTTAGGAAAATTAGTTGCAAAAGCTTTAAGAATACCTGTTGTGCATACTTATCATACTCAATATGAGGATTACGTTGGTTATATCGCAAAAGGCAAATTGATTAAGCCAAGTATGGTCAAATATATCATGCGTACCTACCTAAGTGATTTGGATGGTGTCATATGTCCTTCTCGAATTGTTCTCAATCTTCTAGATGGTTACGGTGTCAAAATTCCAAAACAAGTTATTCCGACAGGTATTCCTGTTGAGAACTATCGTCGAGAGGATATCTCTGAAGAAACAATCAAGAATCTACGAACGGAGCTTGGCCTTGCGGATAATGATACAATGCTATTGAGTTTATCACGGGTATCTTTTGAAAAAAATATTCAAGCAATCTTGATGCATTTATCAGCTGTCGTTGATGAAAATCCTCACGTAAAATTAGTGATAGTTGGAGATGGTCCTTATCTTTCAGATCTAAAAGAACTTGTTCACTCTTTAGAACTTGAAAATTCAGTTATTTTTACAGGTATGGTTGAGCATAGCCAAGTGGCTATCTACTATAAAGCATGTGATTTCTTTATTAGTGCTTCAACAAGTGAAACGCAAGGATTAACTTACATTGAGAGTCTGGCGAGTGGACGTCCAATCATTGCGCAAAGCAATCCTTATCTAGATGATGTTATTTCAGATAAAATGTTTGGAACTCTGTACAAGAAGGAAAGTGATTTGGCAGATGCTATCCTAGATGCAATAGCAGAGACACCCAAAATGACTCAAGAAGCTTATGAACAGAAATTATATGAGATTTCTGCTGAGAATTTCAGCAAGTCTGTATATGCTTTTTACCTAGACTTTCTGATTTCACAAAAAGCTAGTGTGAAAGAAAAAGTCTCTCTGACGATAGGAAATAAGGATAGCCATTCTACTCTTCGTTTTGTCAGAAAAGCGGTATATTTACCTAAGAAAGTTTTTACCTTTACAGGAAGAGCCTCTAAAAAAGTGGTAAAAGCACCTAAACGTCGTATTTCATCTATTCGAGATTTTTTAGAT

SEQ ID NO: 14654 - protein, 444 aa, Streptococcus agalactiae; identical to SEQ ID NO: 10220

SEQ ID NO: 14655 - protein, 1941 aa, Streptococcus agalactiae
ATGATTAAAATCACTTTCCCAGATGGTGCAATTCGTGAATTTGAATCTGGCATCACAACATTTGAAATTGCACAATCAATTTCTAACTCTTTAGCTAAAAAAGCTTTAGCTGGTAAATTTAATGGTCAACTTATTGATACAACACGTGCTATCGAAGAAGATGGTAGTATTGAGATTGTAACACCTGACCACGAAGATGCTTTAGGAGTTCTTCGTCACTCAGCAGCGCATTTATTTGCTCAAGCTGCAAAACGCCTTTTTCCAGACTTATGTTTAGGTGTAGGTCCAGCTATTCACGATGGTTTTTACTACGATACTGATAATAAATCAGGTCAAATTTCAAATGATGATCTTCCTCGTATTGAAGAAGAAATGAAAAAAATTGTTAAGGAAAATCACCCTTGTATTCGTGAAGAAATCAGTAAAGAAGAAGCGTTAGAACTTTTTAAAGATGACCCTTATAAAGTTGAATTAATTAGTGAACATGCTGAAGATGGTTTAACTGTTTATCGTCAAGGTGAATTTGTAGACCTTTGTCGTGGACCTCATGTCCCATCAACAGGACGTATTCAAGTCTTTCATCTTCTAAATGTCGCTGGGGCTTACTGGCGTGGTAACAGTGATAATGCTATGATGCAGCGTGTCTATGGTACTGCTTGGTTTGATAAAAAAGATTTGAAAGCATATCTTAAACGCCGTGAAGAAGCTAAGGAACGTGACCACCGCAAATTAGGTAAAGAACTTGATTTATTTATGGTTAATCCTGAAGTAGGTCAAGGATTGCCATTCTGGTTGCCAAATGGAGCAACTATTCGCCGCGAATTGGAACGTTACATTGTTGATAAGGAGATTGCTTCAGGTTATCAACACGTTTACACACCTCCGATGGCATCTGTTGAATTTTACAAGACTTCTGGGCACTGGGACCACTATCGTGAAGATATGTTCCCAACAATGGATATGGGAGATGGGGAGGAATTCGTTCTTCGTCCAATGAACTGCCCACACCATATTGAAGTTTATAAACATCATGTTCACTCATATCGTGAATTGCCAATTCGTATCGCTGAACTTGGTATGATGCACCGTTATGAAAAATCAGGGGCCCTCACAGGATTGCAACGTGTACGCGAAATGACACTCAACGATGCCCATATTTTCGTTACACCTGAGCAAATTAAAGATGAATTTCTTAAAGCTCTTAATCTCATAGCAGAAATTTATGAAGATTTTAACTTAACAGATTACCGTTTCCGCTTATCTTATCGTGACCCAGAAGATAAACATAAGTATTATGATAACGATGAGATGTGGGAAAATGCACAAGCTATGCTAAAAGAGGCTATGGATGATTTTGGATTAGATTATTTTGAAGCAGAAGGCGAAGCAGCCTTTTACGGTCCTAAATTGGATATCCAGGTGAAAACTGCTCTTGGTAATGAAGAAACATTATCTACTATCCAACTAGATTTCCTTCTTCCAGAACGCTTTGATCTTAAATACATCGGTGCAGATGGTGAAGAACATCGTCCAATTATGATTCACCGCGGTGGTATTTCAACAATGGAGCGATTTACAGCTATTTTAATTGAAACTTACAAAGGTGCCTTTCCAACTTGGCTTGCTCCACAACAAGTTTCTGTTATTCCAATTTCAAATGAAGCCCACATTGATTATGCTTGGGAAGTGGCTCGTGCCCTTAAAGATCGTGGTATTCGTGCTGAAGTGGATGACCGTAACGAAAAGATGCAATATAAGATTCGTGCGGCGCAAACCCAAAAAATTCCATATCAATTGATTGTTGGTGATAAGGAAATGGAAGAAAAAGCCGTAAATGTGCGTCGCTATGGAAGTAAAGCGACTGAAACAAAATCTATAGAGGAATTTGTAGAAAGTATTTTAGCTGATATTGCAAGAAAATCTAGACCTGACGAAGTTAAA

SEQ ID NO: 14656 - protein, 647 aa, Streptococcus agalactiae
MIKITFPDGAIREFESGITTFEIAQSISNSLAKKALAGKFNGQLIDTTRAIEEDGSIEIVTPDHEDALGVLRHSAAHLFAQAAKRLFPDLCLGVGPAIHDGFYYDTDNKSGQISNDDLPRIEEEMKKIVKENHPCIREEISKEEALELFKDDPYKVELISEHAEDGLTVYRQGEFVDLCRGPHVPSTGRIQVFHLLNVAGAYWRGNSDNAMMQRVYGTAWFDKKDLKAYLKRREEAKERDHRKLGKELDLFMVNPEVGQGLPFWLPNGATIRRELERYIVDKEIASGYQHVYTPPMASVEFYKTSGHWDHYREDMFPTMDMGDGEEFVLRPMNCPHHIEVYKHHVHSYRELPIRIAELGMMHRYEKSGALTGLQRVREMTLNDAHIFVTPEQIKDEFLKALNLIAEIYEDFNLTDYRFRLSYRDPEDKHKYYDNDEMWENAQAMLKEAMDDFGLDYFEAEGEAAFYGPKLDIQVKTALGNEETLSTIQLDFLLPERFDLKYIGADGEEHRPIMIHRGGISTMERFTAILIETYKGAFPTWLAPQQVSVIPISNEAHIDYAWEVARALKDRGIRAEVDDRNEKMQYKIRAAQTQKIPYQLIVGDKEMEEKAVNVRRYGSKATETKSIEEFVESILADIARKSRPDEVK

SEQ ID NO: 14657 - protein, 684 aa, Streptococcus agalactiae
GTGCAAGGTGATGACGAAACAATAGAGTTATTAAGGTCGTATTTAGAGGGAGCTCTTTATAAGGTTGTGATGGCTAGTGATGGTGAGGAGGCTTTTTCTTTATTTCAGCAACATCAGATTGATTTAGCAATCATAGATATTACGCTACCTAAAATAGATGGATATGAGTTGACGCGACTCATTCGTCAAGATAGTCAGATTCCTATTATTATGCTAGCAGCTAAGACAACAGATATGGACAGAATATTAGGATTGAATATTGGAGCAGATGATTTTATCACGAAACCGTTTAATTCTTTGGAGGTTTTAGCTCGAATTAATTCGCAACTGCGTCGTTACTATGAATTCAATAGTCTTGCCAAACCTAAAAATCAATTTATAAAGATAGGGGAATTGGAACTAGATGAGGAACATGTTGAACTAACTAAAAATGGTAAACATATCAAGTTGACTGCTACAGAATTTAAGATTCTTCATATCTTAATGTCATCACCAGGAAAGATTTATACTAAAACACAACTCTATGAGAAGATTAATGGTAGGTATTTAGAAGGTGATGAGACAACGATTATGGTGCATATTTCTAATATCCGTGACAAAATCGAAGATGATAGTAAATATCCTAAATATATAAAAACACTTAGAGGAGTAGGGTATAAAATCGAAAAACCGCAGTATCTTGTT

SEQ ID NO: 14658 - protein, 228 aa, Streptococcus agalactiae
MQGDDETIELLRSYLEGALYKVVMASDGEEAFSLFQQHQIDLAIIDITLPKIDGYELTRLIRQDSQIPIIMLAAKTTDMDRILGLNIGADDFITKPFNSLEVLARINSQLRRYYEFNSLAKPKNQFIKIGELELDEEHVELTKNGKHIKLTATEFKILHILMSSPGKIYTKTQLYEKINGRYLEGDETTIMVHISNIRDKIEDDSKYPKYIKTLRGVGYKIEKPQYLV

SEQ ID NO: 14659 - protein, 1017 aa, Streptococcus agalactiae
ATGGCAAAGACCGCTCTTAATATTCCTTTTACAGTTGAAGGGATAGAAAATTATTATCAAAATATAAAAATGATACTGTCTTTAGCAGATAAATGGAGCATACCTAAAGATGATCTATTACTCTTTTTAAAGGGACTCAAGGCTATTGATGATATAAAAGTTGGCTCTCCTATTTTTAAGTATTTTTGGACTTCTTTAAGTTTACAAGCACCCCTCAAAGCTTTAGAATTCGTGTTAGAGCAGGCTAAAATGCCAACTGAATTGTCAGGAGAATTATCAGAAACACAATACTTGGTCGCACAGTTTTCAGATGAGTTAGCTCCGCATGATGATTTCTGGATAGCCTTATCACAAGTTATTTATGATTCTTTTCCTGGGAATAGTCTAGCCGAAGATACTGTATTAAATAGGAAACTCCATCAATTCCGCTATTTGATTTCTAGTCAGCAAGCACAGTATGTTCGACGATACTTTAAAGATGTTGGTATGACTGATAGAGATGCTTTAGTAAACTACCTATCATGTTTAAGAGAACCAGATAGTATCGCCTACTATGAATCTGCTCGCTTGCATAATAAACGTCGGAGAAATGGTGAAATCTTTGGTTTCCCAGATGATGAGCCGGTTATTAATAGTAAGCTTTTAATTTCATTCCATACGGAATTTATTATTGATGACAAAGGAAACTTTTTAAACGAGATTGACGCAGAAGTAATCACACGTAATGGCATTATCAACGGTGCTAGCTTTAATTATGCTTTTAAAAATAATACACGTCATAAAGAATTAGATGTTGATCCTGTAAAGTTAGACCCAAAATTTCGAAACGATATGACTAGAGGTTATAGATCGCCAAATCTATCTAGAAGGAAATGGTTTTTCTTTAAAGAAGAGGATTACGATTGTAGTTATTTCAATAAAAAAGGATATTACGCATTTGGAAGGCGTAGTGCTAAGCAATCGGTTGATAAACAAGTCAAATACTTGAAGAAGGTTGTGCAGAAAATGCGCATCAAC

SEQ ID NO: 14660 - protein, 339 aa, Streptococcus agalactiae
MAKTALNIPFTVEGIENYYQNIKMILSLADKWSIPKDDLLLFLKGLKAIDDIKVGSPIFKYFWTSLSLQAPLKALEFVLEQAKMPTELSGELSETQYLVAQFSDELAPHDDFWIALSQVIYDSFPGNSLAEDTVLNRKLHQFRYLISSQQAQYVRRYFKDVGMTDRDALVNYLSCLREPDSIAYYESARLHNKRRRNGEIFGFPDDEPVINSKLLISFHTEFIIDDKGNFLNEIDAEVITRNGIINGASFNYAFKNNTRHKELDVDPVKLDPKFRNDMTRGYRSPNLSRRKWFFFKEEDYDCSYFNKKGYYAFGRRSAKQSVDKQVKYLKKVVQKMRIN

SEQ ID NO: 14661 - protein, 564 aa, Streptococcus agalactiae
ATGATTAAGAAAAATAAAGTTTTTTTAGGAGTTCTTTTAGTCCTTGTTGTTATCCTTGGAGGTGGTGTATTATTTTACCAATCACAATTCCAAAAGACAACTAATCAAGCGTTAGCTATTGCTTATAAAGATGCTAAAGTGGCTAAGAAGGATGTCATACATCAAAAAATTGACAAAGAATTTGAAAACTTTAGAGGGAGCTACGAAATTGAATTCAATACCAAAAGCGCAGAATACAGCTATCATGTAGATGCTAAGACTGGACAAATCCTTGAGCGGGACATGGATAATAATGGCTTTTCAAAATCGACTTCTCAGTCAAGTTCATCGTCAAGTCAAAAATCTCATAAAATAAGTCAAGAAGAAGCCAAAAAGATTGCATTTAAAGATGCTAATATAGAGGAATCAGAAGTCAGTAATCTTAAGATCAAAGAAGAAATTGAAAATGGAAAATCAGTTTATGATATTGACTTTGTGGACCTGAAAAATAAAAATGAAGTTGATTATCAAATTGATGCAGAAACTGGAAAAATCATTGAACGTTCTAGAGATCATATGAATGAT

SEQ ID NO: 14662 - protein, 188 aa, Streptococcus agalactiae; identical to SEQ ID NO: 5798

SEQ ID NO: 14663 - protein, 648 aa, Streptococcus agalactiae
ATGTCATCAGTCTTAACACTAACAAATATACTATTTCTCCTTCAAGGGTTCGGTTTAACCTTATATATATCTTTTATTTCCATTTTACTATCAATGTTTTTTGGAACTCTATTAGCAATTATGAGAAATAGCAAAAATCCTATCTGGAAATTAATAGCTAGTATCTATATCGAATTTGTCAGAAATGTTCCAAATCTACTTTGGATTTTTATCATTTTCTTAGTATTCCAGATGAAATCAGTCAGCGCTGGTATTACTTCGTTTACAATTTTTACCTCCGCTGCTTTAGCAGAAATTATTCGGGGAGGTTTAAATGGAGTTGATAAAGGACAGACAGAAGCTGGACTTTCTCAAGGATTCACTTATTTGCAAGTTTTCATTATTATTATTTTTCCACAAGCTTTTCGCAAAATGTTGCCAGCCATTATTTCTCAGTTTGTAACGGTTATAAAAGATACATCACTACTTTATTCTGTTATAGCTATTCAAGAAATCTTCGGAAAAAGTCAAATTCTAATGGGAAGATATTTCGAAGCTGGACAAGTTTTTACACTCTACGCTATTATAACTGCTGTCTATTTCATTACAAACTTTATCATCTCAAGTTTTTCACGTAAACTTTCAAAACGTTGGGAGCAAGCTACTGAG

SEQ ID NO: 14664 - protein, 216 aa, Streptococcus agalactiae; identical to SEQ ID NO: 5800

SEQ ID NO: 14665 - protein, 693 aa, Streptococcus agalactiae
ATGACTTTATTAAACATCAGTCCTTTTGCCATTTCAAGGTGGGGCGCTTTCTTTAACCATTTTGACCTATTCTTTAAAGGCTTCTTATATACTCTAGGTATTTCGTTTGGTGCACTCCTACTTGCTCTGATATTAGGAATTCTCTCTGGTGGTTTATCAACTTCTAAAAGTAAAGTTGGTAAGTTGATATCACGTATCTATGTTGAAGTTTTTCAAAACACACCTCTTTTGGTTCAAATGGTTTTTGTCTACTATGGACTAGCAATCATTAGTAATGGTCATATTATGATTAGTGCTTTTTTCACCGCTGTTTTGTGCGTTGGCCTATACCATGGTGCCTATATTTCTGAAGTTATTCGCTCAGGAATTGAAGCTGTCCCTAAAGGACAAACAGAGGCTGCTTTAGCTCAAGGATTCACAGCTAATCAAACCATGCAACTTATCATTTTGCCTCAAGCTATCAGAACAATTTTACCACCAATGACCAACCAAGTTGTTAACCTAATCAAGAATACCTCTACCGTAGCAATCATTTCTGGAGCCGATATCATGTTTTTAGCTAAGGCCTGGGCTTATGATACGACTAATTATATCCCAGCTTTTGCAGGAGCTGCTATCTTCTATTTTGTTATTTGTTTCCCACTAGCAAGCTGGGCAAGAAAACAAGAAGAATTAAATAAGAAAACTTATTCT

SEQ ID NO: 14666 - protein, 231 aa, Streptococcus agalactiae
MTLLNISPFAISRWGAFFNHFDLFFKGFLYTLGISFGALLLALILGILSGGLSTSKSKVGKLISRIYVEVFQNTPLLVQMVFVYYGLAIISNGHIMISAFFTAVLCVGLYHGAYISEVIRSGIEAVPKGQTEAALAQGFTANQTMQLIILPQAIRTILPPMTNQVVNLIKNTSTVAIISGADIMFLAKAWAYDTTNYIPAFAGAAIFYFVICFPLASWARKQEELNKKTYS

SEQ ID NO: 14667 - protein, 797 aa, Streptococcus agalactiae
ATGCTGAGACGAAAAAGATTAACGCTCTATCTATTATCCTGATTTTCATTTTCCTGTTATTTTATCCCAACTCAACGTCAGCTAATCAATTATCAGAAATCAAAAAATCGGGTGTCCTTAAAGTTGGAGTCAAGCAAGATGTGCCTAACTTTGGTTATTATAATGCTGAGACGAATCAATACGAAGGAATGGAAATTGATATTGCCAAAAAAATTGCCAAATCCTTAGGCGTCAAACCAGTTTTTGTACCGACAACTGCACAAACCAGAGAGCCTCTGATGGACAATGGGCAAATTGATATTCTAATCGCAACATACACTATCACGCCCGAAAGAAAAGCTAACTATAATATTTCTAAAGCTTATTATCACGATGAAATTGGATTTTTGGTGCGTAAAAATAGTCATATCAAAACTATAAAAGAATTGGATGGTAAACACATTGGTGTGGCTCAAGGTGCCACTACAAAAGTCAATTTAGAAAAATATGCTAAAGAACACAAGCTAAAATTTAGCTATGCTCAATTAGGGAGTTTCCCAGAATTAGCGATATCGCTGTACGCTAATCGTATTGATGCTTTTTCAGTTGATAAATCTATCCTTAGCGGCTACCTTAGCCCTCATACAACCATATTAAAAGAAGGGTTCAATACGCAAGAATACGGTATTGCAACCAGTAAACAGGACAAAGTCTTGATTCCCTACGTTAATAAGTTACTGGTATCATGGGAAAAAGATGGTAGTTTAAAACACATTTATCAAAAATTTAAGCTTAAACCCGCTAAAGTAAAAAAAGAA

SEQ ID NO: 14668 - protein, 266 aa, Streptococcus agalactiae
  VARIANT 14: Xaa = Any Amino Acid
MLRRKRLTLYLLSXIFIFLLFYPNSTSANQLSEIKKSGVLKVGVKQDVPNFGYYNAETNQYEGMEIDIAKKIAKSLGVKPVFVPTTAQTREPLMDNGQIDILIATYTITPERKANYNISKAYYHDEIGFLVRKNSHIKTIKELDGKHIGVAQGATTKVNLEKYAKEHKLKFSYAQLGSFPELAISLYANRIDAFSVDKSILSGYLSPHTTILKEGFNTQEYGIATSKQDKVLIPYVNKLLVSWEKDGSLKHIYQKFKLKPAKVKKE

SEQ ID NO: 14669 - protein, 753 aa, Streptococcus agalactiae
ATGTCACTCATATCTTATAAGAATGTTAACAAGTATTATGGAGATTATCACGCCCTTCGTCAGATTAATTTGGAAATAGAGCCAGGGCAAGTGGTTGTTCTATTAGGACCTTCTGGATCAGGTAAATCAACACTCATTAGAACAATGAACGCTCTCGAATCTATTGACGATGGTAGTTTGGTCGTGAATGGACATGAATTAGCAAATATTTCATCTAAAGAATTGGTCAACCTCCGTAAAGAAGTTGGTATGGTTTTTCAACATTTTAACCTTTATCCCCACAAAACCGTGTTAGAAAATATTACATTAGCTCCTATTAAAGTATTAAAACAATCTAAAAAAGAAGCTATGGAAATTGCTGAAAAATATTTAAAATTTGTCAATATGTGGGAAAGAAAAGATTCCTACCCATCTATGCTATCAGGTGGTCAAAAACAAAGAATTGCTATTGCTAGAGGGCTTGCCATGCATCCAAAACTCCTCCTCTTTGATGAGCCTACCTCTGCCCTTGATCCCGAAACCATCGGAGACGTTCTTTCAGTGATGCAAAAATTGGCAAATGACGGAATGAATATGGTCGTTGTAACTCATGAAATGGGATTCGCACGAGAAGTTGCTGATCGTATTATTTTTATGGCTGACGGGGAAATTTTAGTAGATACTACGGATGTGCAAGACTTTTTTGATAATCCCACAGAACCACGTGCCAAACAATTTTTAAGAAACATTATCAACCATACCAGTACTGACCTT

SEQ ID NO: 14670 - protein, 251 aa, Streptococcus agalactiae
MSLISYKNVNKYYGDYHALRQINLEIEPGQVVVLLGPSGSGKSTLIRTMNALESIDDGSLVVNGHELANISSKELVNLRKEVGMVFQHFNLYPHKTVLENITLAPIKVLKQSKKEAMEIAEKYLKFVNMWERKDSYPSMLSGGQKQRIAIARGLAMHPKLLLFDEPTSALDPETIGDVLSVMQKLANDGMNMVVVTHEMGFAREVADRIIFMADGEILVDTTDVQDFFDNPTEPRAKQFLRNIINHTSTDL

SEQ ID NO: 14671 - protein, 708 aa, Streptococcus agalactiae
ATGAAAAAAATACTTATCGTTGATGATGAAAAACCAATTTCAGATATTATCAAATTTAATTTAACCAAAGAAGGATATGAAACGGCGACAGCTTTCGATGGCCGTGAAGCTTTAGTACAATATGCAGAATTTCAACCAGATTTAATCATTTTGGATTTAATGCTCCCTGAACTAGATGGTTTAGAAGTGGCTAAGGAAGTTCGTAAAACCAGCCATATTCCTATTATTATGCTTTCCGCAAAAGACAGTGAGTTTGACAAAGTCATTGGTTTAGAAATCGGTGCAGATGATTATGTTACTAAACCTTTTTCAAATCGTGAACTTTTGGCACGGGTCAAAGCACATTTACGACGTACTGAAAATATTGAAACAGCTGTAGCAGAAGAAAGTGCTCAAAATGCTTCTTCAGATATTACTATTGGTGAGTTGCAAATTTTACCAGACGCCTTTATTGCTAAGAAACGTGGCGAAGAAATTGAATTAACGCACCGAGAATTTGAATTACTTCACCATTTAGCGACACATATAGGACAAGTCATGACACGCGAACATTTATTGGAAACGGTTTGGGGATATGATTATTTTGGAGATGTCCGTACAGTTGATGTGACGGTGAGACGTTTACGTGAAAAGATTGAAGATACTCCTGGTCGTCCAGAATATATTTTGACTCGACGTGGTGTAGGTTATTACATGAAGTCTTATGAA

SEQ ID NO: 14672 - protein, 236 aa, Streptococcus agalactiae; identical to SEQ ID NO: 1364

SEQ ID NO: 14673 - protein, 1347 aa, Streptococcus agalactiae
ATGAATAATAGTGCTGCAAATATTAGGTCGTTTGAGCTAGCCTTACTTTTTTTACTAGTTTTTGTTGCTGTCTATTTTGTTTATCTAGCGGTTAGAGATTTTAAAATGTCTAAAGATATCCGGCTTTTGAATTGGAAAGTCAGAGATTTGATAGCAGGAAATTATTCAGATAGTATTCTAATTCAAGGTGATGCAGATTTGGTAGAATTAGGGGAAAGTCTAAATGATTTATCTGATGTCTTCCGAATGGCACATGATAACTTAGAACAAGAAAAGAATCGCTTAGCGAGTATCTTAACTTATATGACTGACGGTGTGCTGGCTACAGATCGTTCAGGAAAAATCGTTATGATTAATGAGACAGCCCAACAGCAGTTCAATCTAGCATATGATGAAGCTTTATCAATGAATATTGTTGATATGTTAGGGTCGGGAAGTCCATATTCGTTCCAAGATTTAGTCTCTAAGACGCCAGAGGTAGTTCTTAATAGACGTGATGAAAATGGTGAATTTGTTACCTTACGGATTCGATTTGCTTTGAACCGTCGTGAAAGTGGTTTTATTTCCGGTTTAGTTGCAGTATCACACGATGCTACTGAGCAAGAGAAAGAAGAGCGTGAAAGAAGACTTTTTGTATCTAATGTTTCTCATGAACTTCGTACACCTTTGACATCTGTAAAATCTTATTTAGAAGCTTTAGATGAGGGAGCGCTCAATGAAGAAGTTGCTCCAAGCTTCATTAAGGTATCTCTAGATGAAACAAATCGTATGATGCGTATGATATCAGATTTATTAAGTTTATCGCGCATTGATAATGAAGTAACGCATTTAGATGTTGAAATGACGAATTTTACAGCTTTCATGACCTCAATTTTGAATCGATTTGATCAGATTAGAAATCAAAAAACAGTCACAGGAAAAGTTTATGAAATTGTCAGAGATTATCCTCTTAAGTCAATTTGGGTGGAAATTGATACAGATAAGATGACTCAAGTGATTGATAACATTTTAAATAATGCAGTCAAGTATTCACCAGATGGTGGTAAGATTACAGTTAATCTACGCACAACTAAAACGCAGATGATTTTATCAATATCAGACCAAGGCTTAGGTATTCCCAAAAAAGATTTACCTCTCATTTTTGATCGTTTTTATCGTGTTGATAAGGCGAGAAGTCGTCAACAGGGTGGGACTGGACTTGGTTTGTCAATTGCAAAAGAAATTGTTAAGCAGCATAAGGGATTTATTTGGGCTAAGAGTGAGTATGGTAAAGGGTCTACTTTTACAATCGTCTTGCCTTATGATAAAGATGCTGTAACTTATGAAGAATGGGAGGACGTTGAAGAT

SEQ ID NO: 14674 - protein, 449 aa, Streptococcus agalactiae
MNNSAANIRSFELALLFLLVFVAVYFVYLAVRDFKMSKDIRLLNWKVRDLIAGNYSDSILIQGDADLVELGESLNDLSDVFRMAHDNLEQEKNRLASILTYMTDGVLATDRSGKIVMINETAQQQFNLAYDEALSMNIVDMLGSGSPYSFQDLVSKTPEVVLNRRDENGEFVTLRIRFALNRRESGFISGLVAVSHDATEQEKEERERRLFVSNVSHELRTPLTSVKSYLEALDEGALNEEVAPSFIKVSLDETNRMMRMISDLLSLSRIDNEVTHLDVEMTNFTAFMTSILNRFDQIRNQKTVTGKVYEIVRDYPLKSIWVEIDTDKMTQVIDNILNNAVKYSPDGGKITVNLRTTKTQMILSISDQGLGIPKKDLPLIFDRFYRVDKARSRQQGGTGLGLSIAKEIVKQHKGFIWAKSEYGKGSTFTIVLPYDKDAVTYEEWEDVED

SEQ ID NO: 14675 - protein, 807 aa, Streptococcus agalactiae
ATGTCAGAAATAGGATTTAAATATAGTATCTTAGCTTCAGGTTCAACTGGAAATTGTTTTTATATTGAGACACCCCAAAAACGTCTTTTAATTGACGCTGGTTTAACAGGCAAGAAAGTGACTAGCCTTCTTGCAGAAATTAATCGTAAACCAGAAGATTTAGATGCTATACTAGTTACCCATGAACATTCTGACCACATTAAAGGTGTTGGCGTATTGGCTAGGAAATATCACCTTGATATTTATGCCAATGAGCAGACGTGGAAAGTTATGGATGAGCGTAACATGTTAGGCAAAGTTGATGTTAGTCAAAAGCATGTTTTTGGACGCGGTAAAACCTTAACTTTCGGGGATTTAGATATTGAGAGCTTTGGTGTAAGTCATGATGCTGTGGATCCCCAATTTTACCGTATGATGAAAGATGATAAGAGCTTTGTGATGTTGACAGATACAGGATATGTTAGCGACCGAATGGCAAGCTTGATTGAGAATGCAGATGGTTATTTGATCGAGTCAAATCACGACATTGAGATTCTACGTTCGGGTTCTTATCCTTGGACACTTAAGCAACGTATTTTATCAGATAAAGGACATTTATCTAATGAAGATGGTTCAGAAACCATGATTCGCACTATAGGTAACCGTACTAAACACATCTATTTAGGACACTTGAGTAAGGAAAATAATATTAAGGAACTTGCTCACATGACTATGGAAAACAATTTAATGAGAGCTGACTTTGGTGTGGGCACAGATTTTTCTGTTCACGATACTTCACCTGATTCAGCTACCCCACTGACGAGGATT

SEQ ID NO: 14676 - protein, 269 aa, Streptococcus agalactiae; identical to SEQ ID NO: 5814

SEQ ID NO: 14677 - protein, 366 aa, Streptococcus agalactiae
TTGAAAAAGATTTTTTACATTAGTTTAGGATTTATTAGTTTAGGGATAGGCATTGCAGGTATTGTCTTGCCAGTAGTTCCAACGACTCCATTAGTATTGCTTTCAGCTTTTTGCTTTTCGAGAAGCTCTGAAAAATTTGATATTTGGTTGCGTCAAACTAAAGTTTATAAATACTACGCTGCAGATTTTGTTGAAAGCAGAAGTATTGCCCCAGCGCGTAAAAAGTCAATGATTTGGCAAATTTATATCTTGATGGGGATTTCAATATATTTTGCTCCTCTAATGTGGCTCAAACTGGGATTATTGATTGGAACTATTGTAGGAACTTATGTGCTTTTTTATGTAGTACCTGATAAAATTGATGAA

SEQ ID NO: 14678 - protein, 122 aa, Streptococcus agalactiae; identical to SEQ ID NO: 1370

SEQ ID NO: 14679 - protein, 684 aa, Streptococcus agalactiae
ATGAAAGAATTAAGATCAAAGCTGGAAAAAGACTATGGTATTGTTTTTGCTAATCAAGAATTATTAGATACAGCTTTTACCCATACATCATACGCAAATGAGCATCGCCTCCTAAACATTTCACATAATGAACGTTTGGAATTTTTAGGAGACGCTGTTCTACAATTACTTATTTCACAGTATCTTTTTACAAAGTACCCTCAAAAGGCAGAAGGTGATTTATCAAAATTACGTTCAATGATTGTTCGTGAGGAAAGTCTTGCAGGTTTTTCACGTCTATGTGGCTTTGATCACTATATTAAACTTGGAAAAGGAGAAGAAAAATCTGGTGGACGTAATCGTGACACTATTTTAGGAGATTTATTTGAGGCTTTTTTAGGAGCTTTATTATTGGATAAAGGTGTTGAAGTGGTTCATGCCTTTGTTAACAAGGTAATGATCCCTCACGTTGAAAAAGGGACCTATGAGCGTGTTAAAGATTACAAGACAAGCTTGCAAGAATTACTTCAATCTCATGGGGATGTAAAAATAGATTATCAAGTTACTAATGAAAGTGGTCCAGCACATGCAAAGGAATTTGAGGTGACTGTATCTGTCAACCAAGAAAATTTGAGCCAAGGAATTGGACGATCAAAGAAAGCTGCTGAACAAGACGCTGCCAAAAATGCTTTAGCAACGTTACAA

SEQ ID NO: 14680 - protein, 228 aa, Streptococcus agalactiae; identical to SEQ ID NO: 1372

SEQ ID NO: 14681 - protein, 2580 aa, Streptococcus agalactiae
ATGCCAGACGTCATATTTGCTGGTACAGAAAATCGTAAGCCCCTTAATTATGCGCAAGTGAGTGTTACTTTAGATAACAGCGACCACTTTATCGAAAATATAGCTGACGAAGTTCGAGTTGAACGTCGTATTTTTCGAAACGGAGATAGTGAATATTTAATAGATGGACGCAAAGTTCGCTTACGTGATATTCATGATTTATTTATGGATACTGGATTAGGGAGAGATTCTTTTTCTATTATTTCCCAAGGACGCGTTGAAGCTATTTTTAATAGTAAACCAGAAGAGCGCCGTGCCATATTTGAAGAAGCCGCTGGTGTTCTGAAATACAAAACACGTAAGAAAGAAACACAATCCAAATTAGAACAAACTCAAGGGAACTTAGATCGCTTAGAGGATATTATTTATGAATTGGACATGCAAGTCCAACCATTAGAAAAACAAGCAAGTATTGCTAAGCGTTTTTTAGTATTAGATGAGGAACGACAAGGACTCCACTTATCTATTTTGATTGAAGATATTTTACAACATCAATCAGATTTAACTACTGTTGAGGAAAAGCTATTGACAGTAAGAGAAGAGTTAGCAACTTATTACCAACAACGTCAGTCCCTTGAAGATGAAAATCAATCGTTAAAACAGAAACGTCACCATTTATCTGAAGAAATTGAGGTTAAACAGTTAGCTCTTTTAGACGTTACAAAGTTAAAGTCAGATTTGGAACGCCAAATTGATCTGATTCGTTTAGAGTCAAGCCAAAAGGCTGAAAAGAAAGAAGAGGCAGGTCAACGCTTAGCAGAGTTAGAAGTTAAAGCTAAAGATTGTAATGACCAGATTACCCAAAAAAATATAGAGTTAACTACTCTGTCGGAAAAAATAGCCCAAATAAGATCAGAAATTGTTAGTATAGAAAGTTCCTTAGAGCGTTTTTCAACTAATCCGGATCAGGTTATTGAAAAACTTCGAGAAGACTTTGTTACCTTGATGCAAGAAGAAGCCGACACTTCAAACGCTTTAACAGCTTTACTAGCTGATATAGAGAATCAAAAACAAGCTTCTCAAGCTAAATCTCAAGAAATACAAGAAGTTAGCAAAAATTTAGAAGTATTAAAAAGTAACGCAAAGGTAGCATTGGAACGATTTGAGGCTGCAAAGAAGAATGTTCGTCAGTTATTATCTCACTACCAAGATTTAGGTCAAACCTTGCAAAATCTAGAAGGTGAGTATAAGAATCAGCAGTCAATTTTATTTGATCATTTAGATGAAATCAAATCAAAGCAAGCACGTATTTCGAGTTTAGAATCTATTTTGAAAAATCATAGTAATTTCTATGCTGGAGTGAAGTCAGTTCTACAGGCTAAGGACCAGCTTGGAGGTATCATAGGTGCTGTTAGTGAGCATCTTAGCTTTGACAAACATTACCAAACAGCATTGGAGATAGCTTTGGGAGGTAGCAGCCAACACATCATTGTTGAAGACGAGAGTGCTGCCAAACGTTCAATTGCTTTTTTAAAGAAAAACCGCCAAGGTAGAGCGACATTTCTGCCTTTAACTACAATAAAACCAAGAGAATTAGCACAACATTATCTCTCAAAATTACAAAGTTCTCAAGGGTTTTTAGGAATAGCTAGTGAATTGGTAACCTATGATCAACGCTTGTCAAACATTTTTAAAAATAACTTAGGGTTAACTGCTATTTTTGATACGGTTGATAATGCTAATGTAGCTGCAAGACAATTGAATTATCAAGTACGTTTAGTAACCTTAGATGGAACAGAGTTACGCCCTGGAGGGTCGTACTCAGGGGGAGCAAATCGTCAAAATAATACTGTTTTTATCAAGCCTGAATTGGATAATCTAAAAAAAGAATTGAAACAGGCACAAAGTAAACAGTTAATTCAAGAAAAAGAAGTTGCCGCATTGTTAGAGCAACTCAAAGAGAAACAAGAAACCTTAGCACAACTTAAGAATGATGGAGAACAAGCTCGTCTTGAGGAACAAAGAGCTGATATAGAGTATCAACAACTATCAGAAAAGCTTGCTGATTTAAATAAACTATATAATGGCTTGCAATTAAGCAGCGGGGCGTTGGAACAAACTACTTCTGAAAATGAAAAAAATCGTTTAGAAAAAGAACTTGAACAATTTGCTATTAAAAAAGAAGAGTTGACAACTTCAATTGCTCAAATTAAGGAAGATAAAGATTCAATTCAAGAAAAAGTCAATAATCTAACAACATTATTGTCAGAGGCACAGCTAGAAGAACGTGATTTGCTAAACGAGCAGAAATTTGAACGTGCCAACTGTACACGTCTAGAGATTACCTTGTCTGAAATAAAACGTGACATTAGTAATTTACAAACGTTACTAAGCCATCAGGACAGTCAATTAGACAAAGAAGAGCTTCCACGTATAGAAAAACAGTTGCTACAAGCAAATAAGAGAAGAGAAAATGACGAAGAAAAGCTTGTGAGTCTCCGTTTTGAATTGGAGGATTGTGAAGCTGCTTTAGATGATTTAGCTGCTTCTCTGGCTAAAGAAGGAAAAAAAATGAAAGCCTTATTCGTCAGCAAGCTCAAT

SEQ ID NO: 14682 - protein, 860 aa, Streptococcus agalactiae
MPDVIFAGTENRKPLNYAQVSVTLDNSDHFIENIADEVRVERRIFRNGDSEYLIDGRKVRLRDIHDLFMDTGLGRDSFSIISQGRVEAIFNSKPEERRAIFEEAAGVLKYKTRKKETQSKLEQTQGNLDRLEDIIYELDMQVQPLEKQASIAKRFLVLDEERQGLHLSILIEDILQHQSDLTTVEEKLLTVREELATYYQQRQSLEDENQSLKQKRHHLSEEIEVKQLALLDVTKLKSDLERQIDLIRLESSQKAEKKEEAGQRLAELEVKAKDCNDQITQKNIELTTLSEKIAQIRSEIVSIESSLERFSTNPDQVIEKLREDFVTLMQEEADTSNALTALLADIENQKQASQAKSQEIQEVSKNLEVLKSNAKVALERFEAAKKNVRQLLSHYQDLGQTLQNLEGEYKNQQSILFDHLDEIKSKQARISSLESILKNHSNFYAGVKSVLQAKDQLGGIIGAVSEHLSFDKHYQTALEIALGGSSQHIIVEDESAAKRSIAFLKKNRQGRATFLPLTTIKPRELAQHYLSKLQSSQGFLGIASELVTYDQRLSNIFKNNLGLTAIFDTVDNANVAARQLNYQVRLVTLDGTELRPGGSYSGGANRQNNTVFIKPELDNLKKELKQAQSKQLIQEKEVAALLEQLKEKQETLAQLKNDGEQARLEEQRADIEYQQLSEKLADLNKLYNGLQLSSGALEQTTSENEKNRLEKELEQFAIKKEELTTSIAQIKEDKDSIQEKVNNLTTLLSEAQLEERDLLNEQKFERANCTRLEITLSEIKRDISNLQTLLSHQDSQLDKEELPRIEKQLLQANKRRENDEEKLVSLRFELEDCEAALDDLAASLAKEGKKMKALFVSKLN

SEQ ID NO: 14683 - protein, 381 aa, Streptococcus agalactiae
ATGGAGAAAACAATGGATATGGAACAACGTGAAGAAGTTGTATCTTATAACCGAGCGAAAGTATGGCAGTTAGTTATGTTTGCCATGAACAATGCTTCTACAAATATATACTTATTTACGTTTATGTTTGTTACCTATTTCTCAACTGGCGTTCTTGGCTCGGCAGCCATTTTTGTCAGTCAAATTATGGGTTATATCCGTATTTTTGATGGTTTTATTGATCCAGCTATTGGTATTATGATTGATAAAACTGATACAAAATTTGGTAAGTATCGTCCTATTTTGATTATTGGGAACGTTATTACGGCTTTGTCATTGATTTTTCTTCTTGCATTGAGAAGTGTCGATGAAAATATTCGTTTCCCATTATTTATCCTTGTC

SEQ ID NO: 14684 - protein, 127 aa, Streptococcus agalactiae
MEKTMDMEQREEVVSYNRAKVWQLVMFAMNNASTNIYLFTFMFVTYFSTGVLGSAAIFVSQIMGYIRIFDGFIDPAIGIMIDKTDTKFGKYRPILIIGNVITALSLIFLLALRSVDENIRFPLFILV

SEQ ID NO: 14685 - protein, 264 aa, Streptococcus agalactiae
ATGTTAAAATCATATTTGTATCATAATAATATGTTATATCAAACTGATAAAACTGGCGTTGAAGTATTAGATCGTGTGGGGACAGGAGATGCCTTTGCTGCAGGTTTAATTCATGCGCTTCTGGAAAAAGAAACTCCTCAAAGGGCCTTAGAAATAGCTATGGCTACATTTAAATACAAACATACCATTCAAGGAGATATCAATATCATGACACGAGATGATATTGCTTACCTCATTGAAAAAGAAACAAATGATATTAAACGA

SEQ ID NO: 14686 - protein, 88 aa, Streptococcus agalactiae
MLKSYLYHNNMLYQTDKTGVEVLDRVGTGDAFAAGLIHALLEKETPQRALEIAMATFKYKHTIQGDINIMTRDDIAYLIEKETNDIKR

SEQ ID NO: 14687 - protein, 183 aa, Streptococcus agalactiae
TTGAAAAAGAAACAAATGATATTAAACGATAGTGTAAAAGGAGAGTGTATGTTATATCCATTATTGACAAAAACAAGAAATACTTATGATTTAGGCGGTATTTGGAACTTTAAATTAGGAGAACATAATCCAAATGAATTACTACCTTCAGATGAAGTCATGGTTATCCCGACTTCATTTAAA

SEQ ID NO: 14688 - protein, 61 aa, Streptococcus agalactiae
MKKKQMILNDSVKGECMLYPLLTKTRNTYDLGGIWNFKLGEHNPNELLPSDEVMVIPTSFK

SEQ ID NO: 14689 - protein, 105 aa, Streptococcus agalactiae
ATGGCTACATTTAAATACAAACATACCATTCAAGGAGATATCAATATCATGACACGAGATGATATTGCTTACCTCATTGAAAAAGAAACAAATGATATTAAACGA

SEQ ID NO: 14690 - protein, 35 aa, Streptococcus agalactiae
MATFKYKHTIQGDINIMTRDDIAYLIEKETNDIKR

SEQ ID NO: 14691 - protein, 702 aa, Streptococcus agalactiae
ATGTTATATCCATTATTGACAAAAACAAGAAATACTTATGATTTAGGCGGTATTTGGAACTTTAAATTAGGAGAACATAATCCAAATGAATTACTACCTTCAGATGAAGTCATGGTTATCCCGACTTCATTTAATGATTTGATGGTAAGTAAAGAAAAACGTGATTATATAGGTGATTTTTGGTATGAAAAAGTCATTGAAGTACCTAAAGTATCAGAGGATGAAGAGATGGTGCTGCGTTTTGGCTCAGTGACACATCAAGCTAAAATTTATGTTGACGGTGTATTGGTAGGAGAGCATAAGGGAGGTTTTACTCCTTTTGAAGTTCTTGTTCCTGAATGTAAGTATAATAATGAGAAAATTAAGGTATCAATTTGTGCTAATAACGTTTTAGACTATACCACGCTTCCGGTCGGAAATTATAGTGAAATCATTCAAGAAGATGGTAGCATTAAGAAGAAAGTACGTGAGAATTTTGATTTCTTCAATTATGCAGGTGTGCATCGTCCTCTTAAGTTGATGATACGTCCTAAAAATCATATTTTTGATATTACAATTACAAGTCGTCTATCAGATGATTTACAGTCAGCAGATTTACATTTTTTAGTGGAGACTAATCAAAAGGTTGACGAAGTTAGAATTAGCGTTTTTGATGAAGATAACAAACTAGTGGGTGAAACGAAGGATAGCAGAATTATTTCT

SEQ ID NO: 14692 - protein, 234 aa, Streptococcus agalactiae
MLYPLLTKTRNTYDLGGIWNFKLGEHNPNELLPSDEVMVIPTSFNDLMVSKEKRDYIGDFWYEKVIEVPKVSEDEEMVLRFGSVTHQAKIYVDGVLVGEHKGGFTPFEVLVPECKYNNEKIKVSICANNVLDYTTLPVGNYSEIIQEDGSIKKKVRENFDFFNYAGVHRPLKLMIRPKNHIFDITITSRLSDDLQSADLHFLVETNQKVDEVRISVFDEDNKLVGETKDSRIIS

SEQ ID NO: 14693 - protein, 297 aa, Streptococcus agalactiae
GTGAAACGAAGGATAGCAGAATTATTTCTTAGTGATGTCCATCTTTGGGAAGTTTTAAATGCCTATCTGTACACAGCGCGTGTTGAAATTTTTGTTGATAATCAACTCCAAGATGTCTATGAGGAAAATTTTGGTCTTAGAGAAATAGAAGTGACAAATGGTCAATTCCTATTGAATCGCAAACCTATTTATTTTAAAGGATTTGGTAAACATGAAGATACGTTCATTAATGGCAGAGGTTTGAATGAAGCTGCTAACTTAATGGATTTGAATCTTTTGAAGGATATNNNNNTTAAT

SEQ ID NO: 14694 - protein, 99 aa, Streptococcus agalactiae
  VARIANT 96, 97, 98: Xaa = Any Amino Acid
MKRRIAELFLSDVHLWEVLNAYLYTARVEIFVDNQLQDVYEENFGLREIEVTNGQFLLNRKPIYFKGFGKHEDTFINGRGLNEAANLMDLNLLKDXXXN

SEQ ID NO: 14695 - protein, 189 aa, Streptococcus agalactiae
GTGGGGACAGGAGATGCCTTTGCTGCAGGTTTAATTCATGCGCTTCTGGAAAAAGAAACTCCTCAAAGGGCCTTAGAAATAGCTATGGCTACATTTAAATACAAACATACCATTCAAGGAGATATCAATATCATGACACGAGATGATATTGCTTACCTCATTGAAAAAGAAACAAATGATATTAAACGA

SEQ ID NO: 14696 - protein, 63 aa, Streptococcus agalactiae
MGTGDAFAAGLIHALLEKETPQRALEIAMATFKYKHTIQGDINIMTRDDIAYLIEKETNDIKR

SEQ ID NO: 14697 - protein, 258 aa, Streptococcus agalactiae
TTGAAAAAGAAACAAATGATATTAAACGATAGTGTAAAAGGAGAGTGTATGTTATATCCATTATTGACAAAAACAAGAAATACTTATGATTTAGGCGGTATTTGGAACTTTAAATTAGGAGAACATAATCCAAATGAATTACTACCTTCAGATGAAGTCATGGTTATCCCGACTTCATTTAATGATTTGATGGTAAGTAAAGAAAAACGTGATTATATAGGTGATTTTTGGTATGAAAAAGTCATTGAAGTANNNNNT

SEQ ID NO: 14698 - protein, 86 aa, Streptococcus agalactiae
  VARIANT 85, 86: Xaa = Any Amino Acid
MKKKQMILNDSVKGECMLYPLLTKTRNTYDLGGIWNFKLGEHNPNELLPSDEVMVIPTSFNDLMVSKEKRDYIGDFWYEKVIEVXX

SEQ ID NO: 14699 - protein, 771 aa, Streptococcus agalactiae
ATGGGAGTGTTAGTGATAGATGAGGTTCCAGCAGTAGGGTTATTTCAAAATTTTAACGCTTCCTTAGATTTGTCACCAAAAGATAATGGTACGTGGAATTTGATGCAAACAAAAGCGGCGCATGAACAAGCTATCCAAGAATTAGTGAAGCGTGATAAAAATCATCCTAGCGTCGTGATGTGGGTAGTCGCTAACGAACCGGCTAGTCATGAAGCGGGAGCACATGATTATTTTGAGCCATTAGTAAAACTTTATAAAGATTTAGACCCTCAAAAACGTCCTGTCACCTTGGTTAATATTTTAATGGCAACCCCAGATAGAGACCAAGTGATGGACCTGGTTGATGTTGTCTGCCTTAATCGTTACTATGGTTGGTACGTTGACCACGGTGATTTAACAAATGCAGAAGTAGGTATAAGAAAAGAGTTATTAGAATGGCAAGATAAATTTCCTGACAAACCAATTATCATAACGGAGTATGGCGCTGATACGTTACCGGGATTACATTCTACTTGGAATATTCCATATACAGAAGAATTTCAATGTGATTTTTATGAAATGAGTCATCGTGTTTTTGATGGTATTCCTAATTTAGTTGGTGAGCAAGTCTGGAATTTTGCAGACTTTGAAACTAATCTGATGATACTTCGTGTACAGGGGAATCACAAAGGTCTCTTTTCAAGGAATCGCCAGCCGAAACAAGTCGTCAAAGAATTTAAAAAACGCTGGATGACTATTCCTCATTACCATAATAAAAAAAATAGTGTAAAA

SEQ ID NO: 14700 - protein, 257 aa, Streptococcus agalactiae
MGVLVIDEVPAVGLFQNFNASLDLSPKDNGTWNLMQTKAAHEQAIQELVKRDKNHPSVVMWVVANEPASHEAGAHDYFEPLVKLYKDLDPQKRPVTLVNILMATPDRDQVMDLVDVVCLNRYYGWYVDHGDLTNAEVGIRKELLEWQDKFPDKPIIITEYGADTLPGLHSTWNIPYTEEFQCDFYEMSHRVFDGIPNLVGEQVWNFADFETNLMILRVQGNHKGLFSRNRQPKQVVKEFKKRWMTIPHYHNKKNSVK

SEQ ID NO: 14701 - protein, 114 aa, Streptococcus agalactiae
ATGGCTAATGGTATTCCAGAAGCTAAGGCAACAGCAAAAGCGACAACTATTTGTAATAACGATGAGTCTGGAGTTGCCGAAGCAGTTGGGAAATATATTTTAAGTGAGGAAAAT

SEQ ID NO: 14702 - protein, 38 aa, Streptococcus agalactiae
MANGIPEAKATAKATTICNNDESGVAEAVGKYILSEEN

SEQ ID NO: 14703 - protein, 576 aa, Streptococcus agalactiae
ATGGGATTATTTGACCGCCTATTTGGACATAAGAAAAAAGATAAAGAACTAGAAATTGAAGCATCAGAATCTGTTGTTTTAGAAAATGAAGATTCAGTTATTGATAAAGAGGAAAGCAGCAACTTTTCGAAGGAGTCAACTTTGAATCGAACCTCTGAAGTCCCTGTCGCAGAAGATGATTCTTTCTTAGAATTAGAAAGAGATACAGCATTGTCAGAATCACATCAACCAGTTACCTCTGAAATTCATCCTTTAGAGTCAGAAGATACCTCTGAAATTCCTGTAAAAGAAGACGATAGTTTTTTAGAACTAGAAGATAGGGCTAAGACAAAGGTGGCAGATACTTCTGAGGTAGGAAATGTAGTTCCTGATTCCACGACTCTTTCTGACAATGTTTCTGCTAAATCTGAGGCATCTTTTAGTGATGAGGAGCAATCAAGTGATAGTCAGGCTTCAGAGCAGTTTTCAGAAACTCCCCTTCCAGAAGAGATGTCTAGTGGAAAAACTGAGGTACAAACAGAGTCAGAGGATACATCTGCGGCTGATGCTTTTTTAGCAGATTACTATGCTAAAACG

SEQ ID NO: 14704 - protein, 192 aa, Streptococcus agalactiae
MGLFDRLFGHKKKDKELEIEASESVVLENEDSVIDKEESSNFSKESTLNRTSEVPVAEDDSFLELERDTALSESHQPVTSEIHPLESEDTSEIPVKEDDSFLELEDRAKTKVADTSEVGNVVPDSTTLSDNVSAKSEASFSDEEQSSDSQASEQFSETPLPEEMSSGKTEVQTESEDTSAADAFLADYYAKT

SEQ ID NO: 14705 - protein, 563 aa, Streptococcus agalactiae
ATGAAAATGCATAGTCACCTACATGGTAAAATAGCTAAATCAACAAGCCCAATGATTTTAGTATTTCCCGTTTTAGTAGGTTTGTTAGTACTACAGTTAGTTTAGACTCGACCACAGTCTCTGCCAAGGGATATAATTTCCCTCTAGCAGCCGGCTCTACTGGTACTGTCAGTCAAGATGGGACACGCGTTCAATATTTGAAACCAGATACCAGCACTTATTTTACTTCTTCAGCCTATGAAAAAGAAATGCAAAAAGAGCTTAAAAAATATAAAGGCTCTGGTACATTAACCATCACAACTGAAAACTACATGGAAGTTATGGAACTAATTTATCTCTATCCCGAGCAATTCATGGATCGCCAAATACAATATACTGGGTTTGTTTATAACGAACCCAAACACGAAGGATATCAATTTATTTTCCGCTTTGGAATCATTCATTGTATTGCTGATTCAGGAGTTTATGGTCTACTAACAACTGGAAATCAAAAAAGTTATCCGGACAATACTTGGGTAACTGTTAGAGGTACAATTAAATCCGAGTATAATCANNNNNTTAAT

SEQ ID NO: 14706 - protein, 188 aa, Streptococcus agalactiae
  VARIANT 31, 185, 186, 187: Xaa = Any Amino Acid
MKMHSHLHGKIAKSTSPMILVFPVLVGLLVXTVSLDSTTVSAKGYNFPLAAGSTGTVSQDGTRVQYLKPDTSTYFTSSAYEKEMQKELKKYKGSGTLTITTENYMEVMELIYLYPEQFMDRQIQYTGFVYNEPKHEGYQFIFRFGIIHCIADSGVYGLLTTGNQKSYPDNTWVTVRGTIKSEYNXXXN

SEQ ID NO: 14707 - protein, 1268 aa, Streptococcus agalactiae
TTGGAACAAACTACTTCTGAAAATGAAAAAAATCGTTTAGAAAAAGAACTTGAACAATTTGCTATTAAAAAAGAAGAGTTGACAACTTCAATTGCTCAAATTAAGGAAGATAAAGATTCAATTCAAGAAAAAGTCAATAATCTACAACATTATTGTCAGAGGCACAGCTAGAAGAACGTGATTTGCTAAACGAGCAGAAATTTGAACGTGCCAACTGTACACGTCTAGAGATTACCTTGTCTGAAATAAAACGTGACATTAGTAATTTACAAACGTTACTAAGCCATCAGGACAGTCAATTAGACAAAGAAGAGCTTCCACGTATAGAAAAACAGTTGCTACAAGCAAATAAGAGAAGAGAAAATGACGAAGAAAAGCTTGTGAGTCTCCGTTTTGAATTGGAGGATTGTGAAGCTGCTTTAGATGATTTAGCTGCTTCTCTGGCTAAAGAAGGACAAAAAAATGAAAGCCTTATTCGTCAGCAAGCTCAATTAGAGTCACAATGTGAACAATTATCTCAACAATTGATGATATTCTCACGTCAATTATCAGAAGACTATCAGATGACATTGGATGAAGCGAAGGTAAAAGCAAATGTCTTGGAAGATATTTTGATGGCGCGTGAACAATTGAAATCTCTACAAGCTAAAATTAAAGCTTTAGGACCTGTTAATATTGATGCAATTGCTCAATTTGAAGAAGTTCATGAACGATTGACCTTCCTTAACACACAGCGAGACGACTTAGTTCATGCCAAAAATTTATTACTAGAGACGATTACAGATATGGATGATGAAGTTAAGACTCGTTTTAAATCGACATTTGAAGCCATTCGTCATAGTTTCAAAGAAACCTTTGTACAGATGTTTGGTGGAGGTTCTGCGAACCTTATTCTGACAGAAGGTGATTTATTATCAGCTGGGGTTGATATTTCGGTTCAACCTCCTGGTAAAAAAATCCAGTCTTTAAACTTGATGTCAGGTGGTGAAAAAGCATTATCAGCGTTAGCATTATTATTTGCCATTATCCGTGTTAAGACAATTCCATTTGTCATCTTGGATGAAGTTGAGGCCGCTTTAGATGAAGCAAATGTTAAGCGATTTGGCGATTATCTTAATCGATTTGATAAATCAAGTCAATTTATCGTTGTTACTCACCGAAAAGGGACTATGTCTGCTGCTGATAGTATCTATGGGGTAACGATGCAGGAATCAGGCGTTTCCAAAATTGTTTCTGTAAAATTAAAAGAAGCTCAAGAAATGACCAAT

SEQ ID NO: 14708 - protein, 423 aa, Streptococcus agalactiae
MEQTTSENEKNRLEKELEQFAIKKEELTTSIAQIKEDKDSIQEKVNNLTTLLSEAQLEERDLLNEQKFERANCTRLEITLSEIKRDISNLQTLLSHQDSQLDKEELPRIEKQLLQANKRRENDEEKLVSLRFELEDCEAALDDLAASLAKEGQKNESLIRQQAQLESQCEQLSQQLMIFSRQLSEDYQMTLDEAKVKANVLEDILMAREQLKSLQAKIKALGPVNIDAIAQFEEVHERLTFLNTQRDDLVHAKNLLLETITDMDDEVKTRFKSTFEAIRHSFKETFVQMFGGGSANLILTEGDLLSAGVDISVQPPGKKIQSLNLMSGGEKALSALALLFAIIRVKTIPFVILDEVEAALDEANVKRFGDYLNRFDKSSQFIVVTHRKGTMSAADSIYGVTMQESGVSKIVSVKLKEAQEMTN

SEQ ID NO: 14709 - protein, 795 aa, Streptococcus agalactiae
ATGATAAAATTAGTAGCAACCGATATGGACGGTACATTCTTAGATGAAAACGGTACCTATGATAAAAAACGTTTAGCAAATGTGCTAAAAAAATTTAAAGAACAAGGAATTGTCTTTACGGCAGCAAGTGGGCGTTCCTTATTATCACTTGAACAATTATTTGCTGACTTTCGTGATCAGATGGCTTTTATAGCAGAAAACGGAAGTGCAGCAGTCTTATTTAATCGCTTGGCATATGAACAGCACTTGAGTCGAGAACAATACTTAGATATTATTGACCATTTGAGTAAGAGCCCTTATATGGAGAATAATGAATATGTCTTATCTGGCAAGGATGGTGCATATATTCTAAGTGATGCCAATCCAGATTATATTGAATTCATCACTCATTATTATGATAATTTGCAAAAAGTTTCTCACTTTGAAGATGTTGATGATATTGTTTTCAAAGTAACGGCTAACTTTACTGAAGAGACTGTTAGACAAGCTGAGGAGTGGGTAAATCAAGCTATACCGTATGCCACAGCAGTGACAACAGGTTTTAAATCCATTGATATTATTCTAAGCTCAGTTAATAAACGAAATGGTTTAGAGCACCTCTGTGAACAATACGGTATTAGAGCAGAAGAAGTCTTATCTTTTGGTGACAATATTAATGATTTAGAAATGCTAGAGTGGTCAGGAAAAGCTATCGCAACAGAAAATGCTAGACCAGAAGTTAAAGAGATAGCAGATTGTATTATAGGTCATCACAATGATCAAGCTGTAATGGCTTATTTAGAAAGTATGGTGGAT

SEQ ID NO: 14710 - protein, 265 aa, Streptococcus agalactiae
MIKLVATDMDGTFLDENGTYDKKRLANVLKKFKEQGIVFTAASGRSLLSLEQLFADFRDQMAFIAENGSAAVLFNRLAYEQHLSREQYLDIIDHLSKSPYMENNEYVLSGKDGAYILSDANPDYIEFITHYYDNLQKVSHFEDVDDIVFKVTANFTEETVRQAEEWVNQAIPYATAVTTGFKSIDIILSSVNKRNGLEHLCEQYGIRAEEVLSFGDNINDLEMLEWSGKAIATENARPEVKEIADCIIGHHNDQAVMAYLESMVD

SEQ ID NO: 14711 - protein, 822 aa, Streptococcus agalactiae
ATGTTGGATATTAAAATACTTGCCTTAGATTTAGATGGCACTTTATTTACAACAGATAAGAAAGTTTCAGAAGAAAATAAAGTGGCCTTAAAAGCAGCTAGAGAAAAAGGTATAAAAGTTGTTATTACAACAGGGCGTCCTTTAAAAGCAATTGGTAATTTGTTAGAGGACCTAGAGTTAGTATCTGATGAAGATTACAGCATTACTTTTAACGGTGGTTTAGTTCAACAAAATACAGGGAAAATCTTAGCTAAAACTGCAATGACACGACAAGAAGTGGAAGATATCCATGAGGAGTTGTATCAAGTGGGTTTGCCAACAGATATCTTAAGTGAGGGAACGGTATATAGTATTGCTAACAAGGGACACCATTCTCAATATCATTTAGCCAACCCACTCTTAGAATTTATAGAAGTTGATGATTTAGAGCAAGTGCCAAAGGATGTAGTTTATAATAAAATTGTTAGTGTTATTGATGCTACATATCTTGATCAACAAATTGCTAAACTTCCTGATAGACTTAAAGTTGACTATGAAATGTTTAAATCACGTGATATCATTTTAGAATTGATGCCTAAAGGTGTTCATAAAGCAGTCGGCTTAGAACTACTGACAAAACACCTTGGGTTAGATAGTAGTCAAGTTATGGCAATGGGAGATGAAGCAAATGATTTATCAATGCTAGAGTGGGCAGGCTTAGGAGTTGCAATGGCTAATGGTATTCCAGAAGCTAAGGCAACAGCAAAAGCGACAACTATTTGTAATAACGATGAGTCTGGAGTTGCCGAAGCAGTTGGGAAATATATTTTAAGTGAGGAAAAT

SEQ ID NO: 14712 - protein, 274 aa, Streptococcus agalactiae
MLDIKILALDLDGTLFTTDKKVSEENKVALKAAREKGIKVVITTGRPLKAIGNLLEDLELVSDEDYSITFNGGLVQQNTGKILAKTAMTRQEVEDIHEELYQVGLPTDILSEGTVYSIANKGHHSQYHLANPLLEFIEVDDLEQVPKDVVYNKIVSVIDATYLDQQIAKLPDRLKVDYEMFKSRDIILELMPKGVHKAVGLELLTKHLGLDSSQVMAMGDEANDLSMLEWAGLGVAMANGIPEAKATAKATTICNNDESGVAEAVGKYILSEEN

SEQ ID NO: 14713 - protein, 1608 aa, Streptococcus agalactiae
ATGGGATTATTTGACCGCCTATTTGGACATAAGAAAAAAGATAAAGAACTAGAAATTGAAGCATCAGAATCTGTTGTTTTAGAAAATGAAGATTCAGTTATTGATAAAGAGGAAAGCAGCAACTTTTCGAAGGAGTCAACTTTGAATCGAACCTCTGAAGTCCCTGTCGCAGAAGATGATTCTTTCTTAGAATTAGAAAGAGATACAGCATTGTCAGAATCACATCAACCAGTTACCTCTGAAATTCATCCTTTAGAGTCAGAAGATACCTCTGAAATTCCTGTAAAAGAAGACGATAGTTTTTTAGAACTAGAAGATAGGGCTAAGACAAAGGTGGCAGATACTTCTGAGGTAGGAAATGTAGTTCCTGATTCCACGACTCTTTCTGACAATGTTTCTGCTAAATCTGAGGCATCTTTTAGTGATGAGGAGCAATCAAGTGATAGTCAGGCTTCAGAGCAGTTTTCAGAAACTCCCCTTCAAGAAGAGATGTCTAGTGGAAAAACTGAGGTACAAACAGAGTCAGAGGATACATCTGCGGCTGATGCTTTTTTAGCAGATTACTATGCTAAACGTAAAGCAATTGAGAAAGAAATCTCGTCTAATTCGCTGTCAACAGATGAGTCAGAACTTTCTGAGGCACAGGAAGTTTTATCGCAATCACAGGCAGACACTATAAAAGCTGAGAGTCAAGAGGAAAAATATAATCGTAGCCTGAAAAAAACACGCACAGGTTTTAGTGCACGCCTTAATGCTTTCCTTTCTAACTTCCGTCGTGTTGACGAAGAGTTCTTTGAAGAATTAGAAGAAATGTTAATCTTATCTGACGTTGGGGTAAATGTTGCAACACAGTTAACTGAAGACCTTCGTTATGAAGCAAAATTAGAGAATGCCAAGAAATCAGAGGATTTAAAACGTGTTATCGTTGAAAAATTAGTTGAAATCTACGAAAAAGATGGTATTTATAATGAGGCTATCAATTTCCAAGAAGGTTTAACCGTAATGCTTTTTGTAGGTGTTAATGGTGTTGGAAAAACGACATCTATAGGTAAGTTAGCTCATCAATACAAGTCTCAAGGGAAAAAAGTTATGTTAGTAGCAGCTGATACTTTCCGTGCAGGTGCTGTGGCTCAACTAGTAGAATGGGGACGCCGTGTTGATGTACCAGTTGTCACTGGAGAAAAAAAAGCAGATCCGGCTAGCGTTGTCTTTGATGGCATGGAAAAAGCCGTTGCTCAAGGCGTTGATGTCTTGTTAATTGATACAGCAGGACGTTTGCAAAATAAAGAAAACCTTATGGCAGAGTTGGAAAAAATTGGACGTATTATTAAGCGTGTCGTACCAGATGCTCCCCACGAAACTTTGCTTGCTTTAGATGCATCTACAGGACAAAATGCTTTAAGTCAAGCTAAAGAGTTCTCGAAAATTACACCATTAACTGGCCTTATTCTGACTAAAATTGATGGTACTGCTAAGGGTGGTGTGGTACTGGCTATTCGTCAAGAACTAGATATTCCTGTTAAATTCATTGGTTTCGGCGAAAAAATCGATGATATTGGTGAATTTAATTCAGAAGATTTCATGCGTGGCCTTCTGGAAGGAATTTTA

SEQ ID NO: 14714 - protein, 536 aa, Streptococcus agalactiae
MGLFDRLFGHKKKDKELEIEASESVVLENEDSVIDKEESSNFSKESTLNRTSEVPVAEDDSFLELERDTALSESHQPVTSEIHPLESEDTSEIPVKEDDSFLELEDRAKTKVADTSEVGNVVPDSTTLSDNVSAKSEASFSDEEQSSDSQASEQFSETPLQEEMSSGKTEVQTESEDTSAADAFLADYYAKRKAIEKEISSNSLSTDESELSEAQEVLSQSQADTIKAESQEEKYNRSLKKTRTGFSARLNAFLSNFRRVDEEFFEELEEMLILSDVGVNVATQLTEDLRYEAKLENAKKSEDLKRVIVEKLVEIYEKDGIYNEAINFQEGLTVMLFVGVNGVGKTTSIGKLAHQYKSQGKKVMLVAADTFRAGAVAQLVEWGRRVDVPVVTGEKKADPASVVFDGMEKAVAQGVDVLLIDTAGRLQNKENLMAELEKIGRIIKRVVPDAPHETLLALDASTGQNALSQAKEFSKITPLTGLILTKIDGTAKGGVVLAIRQELDIPVKFIGFGEKIDDIGEFNSEDFMRGLLEGIL

SEQ ID NO: 14715 - protein, 891 aa, Streptococcus agalactiae
ATGTCAGAATTGCTAGATAAGATATCATCTCGGAACAATATGCTCGAAGCTTACAAGCAAGTGAAATCAAACAAAGGTTCTGCTGGTATCGATGGGGTCACTATCGAGCAGATGGATGACTATCTTCACCAAAATTGGCGAGAAACCAAGAAACTCATCAAAGAGAGGAGCTATAAACCTCAACCGGTTCTCAGGGTTGAAATCCCAAAACCAAACGGAGGAGTTCGTAACCTAGGTATCCCGACGGCTATGGATAGAATGATTCAGCAGGCCATCGTTCAAGTTTTGAGTCCACTCTGCGAAAAACATTTTTCAGAGTATAGCTATGGGTTCAGACCCAATCGCTCCTGCGAAACAGCCATTGTTCAGCTACTTGAGTATTTAAACGATGGCTACGAGTGGATTGTGGACATTGACTTGGAAAAGTTCTTCGATACTGTTCCGCAAGACAGATTGATGTCCCTGGTTCATAATATCATTCAAGATGGCGATACGGAGTCACTGATTCGTAAGTACTTCCATTCGGGAGTTGTTATTAACGGACAGCGACATAAGACTTTAGTCGGGACACCTCAAGGCGGGAATCTATCACCCCTCCTATCTAATATTATGCTTAATGAGTTAGACAAAGGGTTGGAAAAGCGAGGTCTTCGCTTTGTCCGTTACGCCGATGACTGTGTCATCACTGTCGGAAGCGAAGCAGCTGCTAAGCGGGTCATGCATTCGGTCAGTAGCTATATTGAGAAGCGATTAGGGTTGAAAGTCAACATGACTAAGACCAAGATTGTCAGACCGAACAAACTCAAATACCTCGGATTTGGTTTCTGGAAATCTCCAAAAGGTTGGAAGTGTCGTCCTCACCAAGACAGCGTTCAGGCTTTAAGCGAAAAC

SEQ ID NO: 14716 - protein, 297 aa, Streptococcus agalactiae
MSELLDKISSRNNMLEAYKQVKSNKGSAGIDGVTIEQMDDYLHQNWRETKKLIKERSYKPQPVLRVEIPKPNGGVRNLGIPTAMDRMIQQAIVQVLSPLCEKHFSEYSYGFRPNRSCETAIVQLLEYLNDGYEWIVDIDLEKFFDTVPQDRLMSLVHNIIQDGDTESLIRKYFHSGVVINGQRHKTLVGTPQGGNLSPLLSNIMLNELDKGLEKRGLRFVRYADDCVITVGSEAAAKRVMHSVSSYIEKRLGLKVNMTKTKIVRPNKLKYLGFGFWKSPKGWKCRPHQDSVQALSEN

SEQ ID NO: 14717 - protein, 810 aa, Streptococcus agalactiae
ATGATTCGATTTCTTATTCTTGCTGGTTATTTTGAATTAAGCATGTATTTAAAGTTATCAGGTAAACTAAATCAGTATATTAATACTCATTATACCTATTTGGCCTATATTTCAATGGTCCTATCTTTTATTTTAGCAATTGTACAACTAATTATTTGGGTTAAAAATATGAAAATGCATAGTCACCTACATGGTAAAATAGCTAAATCAACAAGCCCAATGATTTTAGTATTTCCCGTTTTAGTAGGTTTGTTAGTACCTACAGTTAGTTTAGACTCGACCACAGTCTCTGCCAAGGGATATAATTTCCCTCTAGCAGCCGGCTCTACTGGTACTGTCAGTCAAGATGGGACACGCGTTCAATATTTGAAACCAGATACCAGCACTTATTTTACTTCTTCAGCCTATGAAAAAGAAATGCAAAAAGAGCTTAAAAAATATAAAGGCTCTGGTACATTAACCATCACAACTGAAAACTACATGGAAGTTATGGAACTAATTTATCTCTATCCCGAGCAATTCATGGATCGCCAAATACAATATACTGGGTTTGTTTATAACGAACCCAAACACGAAGGATATCAATTTATTTTCCGCTTTGGAATCATTCATTGTATTGCTGATTCAGGAGTTTATGGTCTACTAACAACTGGAAATCAAAAAAGTTATCCGGACAATACTTGGGTAACTGTTAGAGGTACAATTAAATCCGAGTATAATCAATTGTTACAACAAAACTTACCAGTCTTACACATTGAAGAGTCTCGTCAAGTTTCTAAACCTAATAATCCTTATGTTTATCGTGTCTTT

SEQ ID NO: 14718 - protein, 270 aa, Streptococcus agalactiae; identical to SEQ ID NO: 5828

SEQ ID NO: 14719 - protein, 900 aa, Streptococcus agalactiae
ATGGATATCTTTAATCAATTACCGGATAGTGTCCTTCAATGGTTTGCCATTTTCATTTCCATTATTATTGAGGCACTTCCTTTTGTTTTGCTTGGAACTATTTTATCAGGAATTATTGAAGTCTTTATAACACCTGATATAGTCAATAAGTTCTTACCGAAAAATAAATTTCTCAGAGTCTTATTTGGAACCTTCGTTGGCTTTGTCTTTCCTTCTTGCGAATGTGGTATCATTCCTATTATTAATCGATTCCTTGAAAAGAAAGTGCCTTCATACACGGCAGTTCCGTTTCTTGCTACTGCTCCTATTATTAATCCTATTGTTTTATTTGCGACCTACTCAGCATTTGGAAATTCTATACGCTTCCTGATATTACGCTTTGTAGGTGCTACCATTGTAGCCATTGCTTTAGGAGTCATGCTTGCCTTTTTAGTAGATGATAATATTCTAAAAGAAGACGCTAAACCTACTCATTTTCATGATTATTCTGATAAGAAGTGGTATCAAAAAATCTTTCTAGCCTTAGCTCATGCCATCGATGAATTTTTTGACACAGGACGCTATCTAGTATTTGGCACTTTAATTGCTTCAGCTATGCAAATTTATTTACCAACTCGAGTTCTTACTACTATCGGACACAGCCCTATCACAGCCATCTTAGTTATGATGTTGCTTGCTTTCATCTTGTCATTGTGTAGTGAAGCTGACGCTTTTATAGGTGCTTCTTTATTATCAACCTTTGGAATCGCGCCAGTGATGGCTTTCCTTTTAATTGGACCCATGATTGATATTAAGAATTTAATGATGATGGTAAATTCTTTTAAAACAAGGTTTATTGTCCAATTCATTAGTGTATCTTCTCTTATTATTATTATCTATTGTTTATTTGTGGGGGTAATA

SEQ ID NO: 14720 - protein, 300 aa, Streptococcus agalactiae; identical to SEQ ID NO: 1386

SEQ ID NO: 14721 - protein, 126 aa, Streptococcus agalactiae; identical to SEQ ID NO: 5831

SEQ ID NO: 14722 - protein, 42 aa, Streptococcus agalactiae; identical to SEQ ID NO: 1388

SEQ ID NO: 14723 - protein, 1041 aa, Streptococcus agalactiae
ATGATTGAATTAGGTATTACAACATTCGGAGAGACAACAATCCTTGAAGAAACAAACCAAAGCTATTCACATCCTGAGAGGATTCGCCAATTAGTTGCTGAGATTGAACTAGCTGATCAAGTTGGTTTAGATGTATATGGTATTGGAGAGCACCATCGTGAAGATTTTGCGGTCTCTGCACCCGAAATTATCCTAGCAGCAGGAGCGGTTAGAACTAATAATATCCGTTTATCTAGTGCAGTAACGATTCTCTCTTCCAATGATCCTATTCGCGTCTATCAGCAATTTTCAACGATTGACGCACTTTCAAATGGTAGAGCAGAAATTATGGCAGGGCGTGGTTCCTTTATTGAGTCTTTTCCATTGTTTGGATACGATTTAGCGGATTATGATGATTTATTTAATGAAAAAATGGATATGTTGTTAGCAATTAACTCAGCGACAAATCTCGATTGGAAAGGTCATTTGACACAAACAGTTAATGAGCGACCAATTTATCCAAGAGCATTACAAAGACAGTTATCAATATGGGTGGCAACAGGAGGAAATGTTGATTCTACAATTCGTATTGCAGAACAAGGTTTGCCAATTGTTTATGCAACTATTGGTGGGAATCCCAAAGCCTTTCGTCAATTGGTCCATATTTATAAAGAAGTTGGTAGTCGTAATGGACACAAACCAGAACAACTAAAAGTTGCTGCTCACTCTTGGGGATGGATTGAAGAGGATAATCAAACCGCTATTGACCGTTATTTTTTCCCTACGAAACAGACCGTCGATAATATTGCTAAGGGACGCCCTCATTGGTCTGAAATGACTAAAGAGCAGTATTTACGTTCAGTAGGTCCAGAAGGTGCTATTTTTGTAGGAAGTCCTGAAGTGGTTGCACATAAAATTATAGGACTTGTTGAAGCGCTTGAGTTAGACCGTTTTATGTTACATCTACCAGTTGGCTCTATGCCTCACAAAGACGTCCTAAATGCCATCAAACTTTATGGTGAGGAAGTAGCACCAATTGTTCGAAAATATTTTGAAAAGAAT

SEQ ID NO: 14724 - protein, 347 aa, Streptococcus agalactiae
MIELGITTFGETTILEETNQSYSHPERIRQLVAEIELADQVGLDVYGIGEHHREDFAVSAPEIILAAGAVRTNNIRLSSAVTILSSNDPIRVYQQFSTIDALSNGRAEIMAGRGSFIESFPLFGYDLADYDDLFNEKMDMLLAINSATNLDWKGHLTQTVNERPIYPRALQRQLSIWVATGGNVDSTIRIAEQGLPIVYATIGGNPKAFRQLVHIYKEVGSRNGHKPEQLKVAAHSWGWIEEDNQTAIDRYFFPTKQTVDNIAKGRPHWSEMTKEQYLRSVGPEGAIFVGSPEVVAHKIIGLVEALELDRFMLHLPVGSMPHKDVLNAIKLYGEEVAPIVRKYFEKN

SEQ ID NO: 14725 - protein, 2292 aa, Streptococcus agalactiae
TTGTTCGAAAATATTTTGAAAAGAATTAAAGCAGACCTGGTCTGTTTTTTATTGTTAGATTATAAAAACGCTATCTTGAAATCGCTTTTTAAAACTCTTCGTAAGTCAAAAATATGCTATAATAAAAGCGTTATGGAAAATTTAAATATTACACAAATTGCTATTGATTTAGGTATTAAAGCGTCACAAATCGAAAAGGTTTTAGAATTAACAGATGAAGGAAATACTATTCCTTTTATTGCCCGTTATCGTAAAGAAATGACAGGTAATTTGGATGAAGTTCAAATCAAATCAATTATTGACCTTGATAAGAGTATGACAGCTCTTTCAGATCGTAAAACTACGGTCTTAGCCAAAATTGAAGAACAAGGAAAGTTGACTCAAGAACTCAAAAAGGCTATTGAAGAAGCAACTAAACTAGCAGATGTTGAGGAACTCTACCTACCTTATAAAGAAAAACGTCGTACGAAAGCTACGATTGCACGTGAAGCAGGTCTTTTTCCTTTAGCACGTCTTATTTTACAAAATAAGGATAACCTTGAGGAAGAAGCTCAAAACTATCTTACAGATGGTTTTGAGACAACTACGAAGGCCCTTTCTGGAGCAGTAGATATTCTTATCGAAGCTTTTTCTGAGGATAATAAATTACGTTCATGGACATATAATGAGATCTGGAACTACAGCTCAATCACTGCAGTTGTTAAAGATGAGTCACTTGATGAAAAACAGGTCTTCAAAATCTACTATGACTTTTCTGAAAAAATAAGTAAACTCCATGGCTATCAAGTTTTAGCATTGAATCGTGGTGAGAAAATGGGTGTTCTTAAGGTTAATTTTGAGCATAACCTTGAAAAAATGTTTCGCTTTTTTGCTGTTCGATTTAAAGAAACTAGCCAATATATAGATGACCTTATTGTACAGACTGTCAAGAAAAAAATTGTTCCAGCTATGGAACGCCGTATCCGTACAGAACTAAGTGAAGGAGCAGAAGATGGTGCAATTTCACTGTTTTCAGAGAATCTTCGTAACTTATTGTTAGTCTCACCGCTTAAGGGGAAAATGGTGTTAGGTTTTGACCCTGCCTTTCGTACAGGAGCAAAATTAGCAGTAGTAGACCAAACTGGAAAATTAATGACAACACAAGTGATTTATCCAGTTCCTCCAGCTAATCAAGCAAAAATCGAACAATCAAAAATAGAGTTAGCAAAACTTATCAAAGAATTCAATATAGAAATTATTGCTATAGGGAATGGAACAGCGAGTCGTGAATCAGAAGCATTTGTTGCAGAAGTTTTACAAGATTTTCCAGACGTATCCTATGTGATTGTTAACGAAAGTGGTGCCTCTGTTTATTCAGCCTCAGAATTGGCACGTCATGAATTTCCAGACTTAACAGTTGAAAAACGTTCGGCTATCTCAATTGCAAGACGTCTGCAAGACCCGTTAGCAGAACTAGTCAAAATTGATCCAAAATCTATTGGTGTGGGTCAATATCAACATGATGTTAGTCAAAAAAAATTAGCAGAAAATCTTGATTTTGTTGTTGAAACTGTAGTTAACCAAGTAGGTGTTAATGTTAATACAGCAAGTCCAGCCTTGTTAGCTCACGTTTCAGGTTTAAATAAAACAATATCTGAAAATATTGTTAAATATCGTGAAGAGAATGGGCAAATTAAGTCACGTGCTGAAATTAAGAAAGTACCCAGATTAGGAGCAAAAGCTTTTGAGCAAGCTGCTGGATTCTTACGTATTCCTAATGCTAAAAATTTCTTGGATAATACAGGCGTTCACCCTGAGTCTTATGAAGCTGTTAAAAAGTTGCTTGACCAACTGACTATCAAAGAATTAGATGATCTTGCAAAAGAGAAGTTACAACACCTTGACTTAATTGCAACAGCAGAAAGTATTGGGGTAGGTCAAGAAACATTAAAAGACATTATAGAAGATCTTTTGAAACCAGGTCGTGATTTGCGTGATGATTTTGAAGCGCCTGTTTTGAGACATGATGTTTTAGATGTCAGTGATTTAAAAGTTGGACAGGAATTGCAAGGAACTGTTCGAAACGTCGTTGATTTTGGTGCTTTTGTTGATATTGGTGTTCATGAAGATGGTCTAATCCACCAGTCTCGCCTTATTAAGCGAAAACGCGATAAAAAAACTAGAAAAATGCCTCCTTTACCACATCCAAGCAAATATCTCTCTGTTGGTGATATTGTAACTGTTTGGGTTGTAGAGGTAGATGCGGAGCGTGGCAGAATTGGACTTAGTCTTATCAAGCCAGACGGACTTGAC

SEQ ID NO: 14726 - protein, 764 aa, Streptococcus agalactiae
MFENILKRIKADLVCFLLLDYKNAILKSLFKTLRKSKICYNKSVMENLNITQIAIDLGIKASQIEKVLELTDEGNTIPFIARYRKEMTGNLDEVQIKSIIDLDKSMTALSDRKTTVLAKIEEQGKLTQELKKAIEEATKLADVEELYLPYKEKRRTKATIAREAGLFPLARLILQNKDNLEEEAQNYLTDGFETTTKALSGAVDILIEAFSEDNKLRSWTYNEIWNYSSITAVVKDESLDEKQVFKIYYDFSEKISKLHGYQVLALNRGEKMGVLKVNFEHNLEKMFRFFAVRFKETSQYIDDLIVQTVKKKIVPAMERRIRTELSEGAEDGAISLFSENLRNLLLVSPLKGKMVLGFDPAFRTGAKLAVVDQTGKLMTTQVIYPVPPANQAKIEQSKIELAKLIKEFNIEIIAIGNGTASRESEAFVAEVLQDFPDVSYVIVNESGASVYSASELARHEFPDLTVEKRSAISIARRLQDPLAELVKIDPKSIGVGQYQHDVSQKKLAENLDFVVETVVNQVGVNVNTASPALLAHVSGLNKTISENIVKYREENGQIKSRAEIKKVPRLGAKAFEQAAGFLRIPNAKNFLDNTGVHPESYEAVKKLLDQLTIKELDDLAKEKLQHLDLIATAESIGVGQETLKDIIEDLLKPGRDLRDDFEAPVLRHDVLDVSDLKVGQELQGTVRNVVDFGAFVDIGVHEDGLIHQSRLIKRKRDKKTRKMPPLPHPSKYLSVGDIVTVWVVEVDAERGRIGLSLIKPDGLD

SEQ ID NO: 14727 - protein, 474 aa, Streptococcus agalactiae
ATGCGGAGCGTGGCAGAATTGGACTTAGTCTTATCAAGCCAGACGGACTTGACTAATTATGTTAAGAAGGTGTCTATAGAAGATTTTGGATGTCAGTTTTTACATACTGCACATTGGAATAATCGCTTAAGAACAACCGGAGGACGCTTCTTTCCAAACGATAGACACCTTGACTTTAATCCCAAAATTTATCGTGAGTTTGGTATTGATATTTTTCGTAAGATTGTAAGACATGAGCTTTGCCATTATCATCTCTATATACAAGGTAAAGGATATCGACATAGGGATAAAGCTTTTAAAGAGTTACTAGAAAAAGTCGATGGCTTACGATATACCCCTAGAGTTACGGCTGTTAAAGTGAATTATCATCATTACTCTTGCCAATCTTGTGGTCAAGTATACCGACGTAGGAGACGTGTTAATTTACGCAAGTTTGCTTGTGGTTATTGTCATGGTCGCTTGATAGAGAGTTTT

SEQ ID NO: 14728 - protein, 158 aa, Streptococcus agalactiae
MRSVAELDLVLSSQTDLTNYVKKVSIEDFGCQFLHTAHWNNRLRTTGGRFFPNDRHLDFNPKIYREFGIDIFRKIVRHELCHYHLYIQGKGYRHRDKAFKELLEKVDGLRYTPRVTAVKVNYHHYSCQSCGQVYRRRRRVNLRKFACGYCHGRLIESF

SEQ ID NO: 14729 - protein, 261 aa, Streptococcus agalactiae; identical to SEQ ID NO: 5839

SEQ ID NO: 14730 - protein, 87 aa, Streptococcus agalactiae; identical to SEQ ID NO: 5840

SEQ ID NO: 14731 - protein, 132 aa, Streptococcus agalactiae; identical to SEQ ID NO: 5841

SEQ ID NO: 14732 - protein, 44 aa, Streptococcus agalactiae; identical to SEQ ID NO: 5842

SEQ ID NO: 14733 - protein, 933 aa, Streptococcus agalactiae
ATGGCAGTTACTGTTCAAATGTTAGTTGACCGCTTAAAGTTAAATGTCATCTATGGTGATGAACATCTATTATCTAAGCGGATTACAACAGCTGACATTTCACGTCCTGGTCTAGAAATGACAGGGTATTTTGATTATTATGCACCAGAGCGTTTGCAACTTGTTGGTATGAAAGAGTGGTCATATTTAATGGCTATGACAGGACATAATCGTTATCAAGTGTTACGTGAGATGTTCCAAAAAGAAACACCAGCTATTGTTGTAGCACGTGATTTAGAAATTCCAGAAGAGATGTATGAGGCGGCTAAAGATACCGGTATTGCTATTCTTCAAAGTAAGGCCCCTACAAGTCGTTTATCAGGTGAAGTTTCTTGGTATTTAGATTCTTGCTTAGCTGAGAGGACAAGTGTTCATGGTGTCTTGATGGATATCTATGGTATGGGTGTTCTGATTCAAGGAGATTCCGGTATTGGTAAGAGTGAGACAGGACTAGAGCTAGTTAAGCGAGGACATCGTTTGGTAGCAGATGACCGTGTTGATGTTTATGCTAAAGACGAAGAGACGCTTTGGGGAGAGCCTGCTGAGATATTACGTCATTTACTTGAAATTAGAGGTGTGGGAATCATTGATATTATGAGCCTATATGGAGCTAGTGCGGTTAAAGATTCATCGCAAGTGCAATTAGCTATATACCTTGAAAACTTTGAAACTGGAAAAGTTTTTGATAGACTCGGAAATGGCAATGAAGAGATCGAATTATCTGGAGTTAAGGTTCCTCGGATACGTATTCCTGTTAAAACAGGCCGAAACGTGTCAGTAGTTATTGAAGCAGCGGCTATGAATCACAGAGCTAAACAAATGGGGTTTGATGCTACCCAGACTTTTGAGGATCGTTTAACACATTTGATTAGTCAGAACGAGGTCAATGATGAT

SEQ ID NO: 14734 - protein, 311 aa, Streptococcus agalactiae; identical to SEQ ID NO: 1396

SEQ ID NO: 14735 - protein, 771 aa, Streptococcus agalactiae
ATGATTAATCCAGTAGCAATACAATTAGGCCCCTTTTCTATTCGCTGGTATGCTATTTGCATAGTGTCTGGTATGTTGTTAGCAGTTTACTTAGCAATGAAAGAGGCCCCTCGTAAGAACATTAAGTCGGATGATATTCTAGATTTCATTCTCATGGCTTTTCCACTATCCATTGTTGGAGCTCGTATTTATTATGTTATCTTCGAATGGGCTTATTACTCTAAGCACCCAGTAGAGATTATCGCCATTTGGAACGGTGGTATTGCTATTTACGGAGGGTTAATTACCGGAGCCATTCTCCTTGTGATTTTTTCATATCGTCGCTTGATTAATCCCATTGATTTTCTGGATATTGCTGCTCCAGGAGTGATGATTGCCCAAGCCATAGGTAGATGGGGGAATTTTATTAATCAAGAAGCATACGGTAGGGCAGTAAAAAATCTGAATTACTTACCAAACTTTATAAAAAATCAAATGTATATTGATGGAGCTTACCGAGTACCTACATTTTTATATGAGTCTCTTTGGAACTTCCTAGGTTTTGTCATCATCATGTCTATTCGTCATCGACCGCGCACTTTAAAACAAGGTGAAGTGGCATGTTTTTATTTAGTTTGGTATGGATGTGGACGGTTCATTATTGAAGGGATGAGGACAGATAGCCTTTATTTGGCGGGTTTGCGCGTGTCACAATGGTTATCAGTTATTTTAGTTATTATCGGAATTGTCATGATTATTTATCATCGTCGTGAACAACATATTTCATATTAT

SEQ ID NO: 14736 - protein, 257 aa, Streptococcus agalactiae
MINPVAIQLGPFSIRWYAICIVSGMLLAVYLAMKEAPRKNIKSDDILDFILMAFPLSIVGARIYYVIFEWAYYSKHPVEIIAIWNGGIAIYGGLITGAILLVIFSYRRLINPIDFLDIAAPGVMIAQAIGRWGNFINQEAYGRAVKNLNYLPNFIKNQMYIDGAYRVPTFLYESLWNFLGFVIIMSIRHRPRTLKQGEVACFYLVWYGCGRFIIEGMRTDSLYLAGLRVSQWLSVILVIIGIVMIIYHRREQHISYY

SEQ ID NO: 14737 - protein, 396 aa, Streptococcus agalactiae; identical to SEQ ID NO: 5847

SEQ ID NO: 14738 - protein, 132 aa, Streptococcus agalactiae; identical to SEQ ID NO: 5848

SEQ ID NO: 14739 - protein, 429 aa, Streptococcus agalactiae
ATGAGTAAATTATTTAAAACTTTAGTTATCAGTGCTGCATCAGGTGCAGCAGCTGCTTATTTTTTAACAACAAAAAAAGGAAAAGAGCTAAGGAAAAATGCAGAAAAATTCTATGGAGAATATAAAGAAAATCCAGAAGAATATCATCAAATAGCTAAAGATAAAGCAAGTGAATATTCAAATTTAGCTGTTGATACTTTTAAAGATTATAAAGGTAAATTTGAATCAGGTGAATTGACAACAGAGGATATCGTCTCAGCCGTTAAGGAAAAAAGCGGAGAAGTAGTTGACTTTGCTAATGATTTTGTCAATCAAGCTAAATCAAAATTCTCAGACGAGGATACTGCTAAAAAAGAAGATAAGGCTCCTGAAACAAAAGTAGAAGATATTGTCATTGATTATAAAGAAAACACAGAAGATAAAGAAAAA

SEQ ID NO: 14740 - protein, 143 aa, Streptococcus agalactiae; identical to SEQ ID NO: 1402

SEQ ID NO: 14741 - protein, 273 aa, Streptococcus agalactiae
ATGTCATCACCACTTAAGCAAGAGCAAACTCACGAAAGCAAAACAGAGCAAGCTCAACCAAAATTTCAAGTATTTCAAGAATTTGATCACAGTGCTAAGTTGCGTGAGCTAGTCTTTTTTGCTCGTATCGCTCTCTTCAGTATAACCACTGTGCTAATCTCTTTCTTATTACTAGCACTAAGTTTAACACCTGTGTGGAGTTTCTTACTAGCGATGCTGGCAAGTCTAGCAGTTACATCTGCAGTCTCTTCATTCATTTGGTCACTCAGACAA

SEQ ID NO: 14742 - protein, 91 aa, Streptococcus agalactiae; identical to SEQ ID NO: 5852

SEQ ID NO: 14743 - protein, 909 aa, Streptococcus agalactiae
TTGACAGCGACAGCTGAATCTATTGAACAAGTAAAGCAATTGCTAGCAATAGGAATTGACCGCATCTACGTAGGGGAAGAAAATTACGGTCTTCGTTTACCACATTCATTTTCAGACGATGAATTGCGTGAAATCGCTAAATTGGTACATGATGCTGGTAAAGAATTGACAGTAGCTTGTAATGCACTCATGCATCAAGAAATGATGGATAATATCAAACCATTTTTGGAGTTGATGAAAGAAATTAATGTGGATTATTTGGTAGTTGGTGATGCAGGAGTATTTTATATCAACAAGCGTGATGGTTATAACTTCAAACTTATCTACGACACTTCTGTATTCGTTACATCAAGTCGTCAAGTTAATTTTTGGGGACAACATGGAGCAGTAGAAACGGTTTTAGCACGTGAAATACCTTCTGAAGAACTTTTTAAGATGTCTGAGAACCTTGAATTTCCTGCTGAGATTTTAGTTTATGGGGCTTCTGTAATTCATCACTCTAAGCGTCCGTTATTGCAAAACTATTATAATTTTACTCATATCACTGATGAAAAAACACGTGAGCGTGGTCTTTTTTTAGCAGAACCAGGTGATCCAGAAAGTCACTATTCTATTTACGAAGATAAGCATGGGACTCATATTTTTATTAACAATGATATCAATATGATGACTAAAGTGACTGAACTAGTTGAACATCACTTTACTCACTGGAAATTAGATGGTATTTATTGTCCAGGAGATAATTTTGTTGCTATTGCTGAAATTTTTGTCGAAACAGCTCGTTTGATTGAAAATGGAACATTCACTCAGGATCAGGCTTTCTTGTTTGATGAACGAATTAGAAAACTGCACCCTAAAGGACGTGGTTTAGATACTGGATTTTATGATTTTGACCCATCAACAGTAAAA

SEQ ID NO: 14744 - protein, 303 aa, Streptococcus agalactiae
MTATAESIEQVKQLLAIGIDRIYVGEENYGLRLPHSFSDDELREIAKLVHDAGKELTVACNALMHQEMMDNIKPFLELMKEINVDYLVVGDAGVFYINKRDGYNFKLIYDTSVFVTSSRQVNFWGQHGAVETVLAREIPSEELFKMSENLEFPAEILVYGASVIHHSKRPLLQNYYNFTHITDEKTRERGLFLAEPGDPESHYSIYEDKHGTHIFINNDINMMTKVTELVEHHFTHWKLDGIYCPGDNFVAIAEIFVETARLIENGTFTQDQAFLFDERIRKLHPKGRGLDTGFYDFDPSTVK

SEQ ID NO: 14745 - protein, 1284 aa, Streptococcus agalactiae
ATGTCTAATGTAAAAAAACGCCCTGAGGTTTTATCACCTGCAGGAACACTAGAAAAATTAAAAGTTGCTATTGATTATGGAGCAGATGCTGTATTTGTTGGAGGTCAAGCGTATGGTCTTCGAAGTAGAGCTGGTAACTTTTCTATGGAAGAGTTACAAGAGGGAATAAACTATGCTCATGCGAGAGATGCTAAAGTTTATGTAGCGGCTAATATGGTTACTCATGAAGGTAATGAGCTTGGGGCAGGTCCGTGGTTTCGTGAATTACGTGATATGGGACTAGATGCAGTCATTGTTTCAGATCCTGCTCTTATTGTTATTTGTGCTACAGAAGCACCAGGTTTAGAAATTCATTTGTCAACTCAAGCCTCTTCCACGAACTATGAAACTTTTGAATTTTGGAAAGAGATGGGGCTTACTCGTGTCGTATTAGCACGTGAGGTTACTATGGCAGAGTTGGCTGAAATCAGGAAGAGGACAGATGTTGAGATAGAAGCATTTGTTCATGGCGCGATGTGTATTTCATACTCAGGACGATGTGTTCTATCAAACCATATGAGCCATCGTGATGCTAATCGTGGCGGTTGCTCTCAGTCATGTCGTTGGAAATATGACCTCTACGATATGCCATTTGGACAAGAACGTCAATCGTTAAAAGGCGAGATTCCAGAACCTTTCTCAATGTCAGCTGTGGATATGTGTATGATTGAGCATATTCCAGATATGATTGAAAATGGCGTAGATAGTTTAAAAATAGAAGGACGTATGAAATCCATTCATTATGTTTCTACAGTAACTAATTGCTATAAAGCTGCTGTAGATGCCTATATGGAAAGTCCAGAAGCTTTTGAAGCTATTAAAGAAGACTTGATTGATGAACTTTGGAAGGTTGCACAACGCGAATTAGCAACAGGTTTTTACTACCATACACCAACTGAAAACGAACAACTCTTTGGAGCTCGTCGTAAAATTCCTCAATACAAATTTGTTGGGGAAGTGGTTTCATTTGACAATGCTAAAATGGAGGCTACAATTCGTCAGCGTAATGTTATTATGGAAGGAGATCGCGTAGAATTCTATGGTCCTGGCTTCCGTCACTTTGAATGTTTTATTGAAGGTCTGCGCGATGCTGAAGGAAATAAAATAGACCGTGCTCCAAATCCGATGGAATTATTAACCATAACATTACCAAATCCAGTAAAAAAAGGGGATATGATTCGTGCTTGTAAAGAAGGATTAGTGAACCTTTATCAAAATGATGGTACTAGCAAGACTATAAGAGCT

SEQ ID NO: 14746 - protein, 428 aa, Streptococcus agalactiae; identical to SEQ ID NO: 5856

SEQ ID NO: 14747 - protein, 126 aa, Streptococcus agalactiae
ATGTCAGAATTTACATTTGAAATTGTTGAGAAGTTATTGGTCCTATCTGAAAATGAAAAAGGTTGGACAAAAGAGTTGAATCGTGTTAGTTTCAACGGAGCGCCAGCTAAATTTGANNNNNTTAAT

SEQ ID NO: 14748 - protein, 42 aa, Streptococcus agalactiae
  VARIANT 39, 40, 41: Xaa = Any Amino Acid
MSEFTFEIVEKLLVLSENEKGWTKELNRVSFNGAPAKFXXXN

SEQ ID NO: 14749 - protein, 117 aa, Streptococcus agalactiae
ATGGATTTATTACCATACCATTCCAATCCAGTAAAAAAGGGGGATATGATTCGTGCTTGTAAAGAAGGATTAGTGAACCTTTATCAAAATGATGGTACTAGCAAGACTATAAGAGCT

SEQ ID NO: 14750 - protein, 40 aa, Streptococcus agalactiae
  VARIANT 5, 8: Xaa = Any Amino Acid
MDLLXIPXPIPVKKGDMIRACKEGLVNLYQNDGTSKTIRA

SEQ ID NO: 14751 - protein, 210 aa, Streptococcus agalactiae
ATGTCAGAATTTACATTTGAAATTGTTGAGAAGTTATTGGTCCTATCTGAAAATGAAAAAGGTTGGACAAAAGAGTTGAATCGTGTTAGTTTCAACGGAGCGCCAGCTAAATTTGATTTGCGTACATGGAGTCCAGATCATACAAAAATGGGTAAAGGTATCACTTTATCTAATGAAGAATTTAAAGTCATTTTAGATGCTTTTCGTAAA

SEQ ID NO: 14752 - protein, 70 aa, Streptococcus agalactiae; identical to SEQ ID NO: 1410

SEQ ID NO: 14753 - protein, 795 aa, Streptococcus agalactiae
ATGATTAGACATTCATTTAAAAGTAAGATGTTATTGTTAGTCTTTATCTTAACAATAATAGTGAATTATTTATCCGCAACAGGTTTGTTAACAGGGAACAGTCAAAAGAGTCTGTCTGATCGTTATCAAACGCTCTTGACACCAGCACCATTAGCCTTTTCAATTTGGTCAGTCATCTATTTATTGACCTTTTTAGTAATATTAAGAGCTATATTCAGTAAGAGTCAATCTTACCAAGATAACTTTGCTAGCATTTTTCCATACTTTTTGGGTCTTCTATTAGTTAATAATATATGGACTGTATTTTTTACGAGCAATTTGATTGGCCTATCAACAATAATAATTTTTGCTTACTGTATTCTTCTGGTTATCATTATCAAGATACTAAGTAAAAATAAATCAAAATTACTGCTTAGAATAACATTTGGAATTCATGCAGGATGGTTGCTAGTTGCGTCATTGGTCAATTTAGCGGTCTACTTAGTTAAAATTGATTTTAATTACCCATTACCAAAGGTATATATAGCTATCATTGCCTTGATTTTTATAACTGTTTTAAGTCTTTACCTGGCTAGGGTATTACAAAATGCTTACTTAATCTTATCCGTTTTTTGGGCTTGGTTGATGGTTTTTAAAGCACATTTAGAAGGAAATTTTCAACACCTATATTTTAGTTTCCAAATTTTATCTTTGATTGCAGCAATTATCCTTGGCGTATCGTTTTTCATCATCGGTTATTATAATGTCAAGGAGAGGTACAAGCAAAAACGTACTAGTCCTTACTCACGGGTTCTT

SEQ ID NO: 14754 - protein, 265 aa, Streptococcus agalactiae
MIRHSFKSKMLLLVFILTIIVNYLSATGLLTGNSQKSLSDRYQTLLTPAPLAFSIWSVIYLLTFLVILRAIFSKSQSYQDNFASIFPYFLGLLLVNNIWTVFFTSNLIGLSTIIIFAYCILLVIIIKILSKNKSKLLLRITFGIHAGWLLVASLVNLAVYLVKIDFNYPLPKVYIAIIALIFITVLSLYLARVLQNAYLILSVFWAWLMVFKAHLEGNFQHLYFSFQILSLIAAIILGVSFFIIGYYNVKERYKQKRTSPYSRVL

SEQ ID NO: 14755 - protein, 1338 aa, Streptococcus agalactiae
ATGAATCAAAATCATTCCGTCAAAAGATCCTTATCCGAAGTTAATCAGAGCGTTGAGGTTCCTCACAATAGCTCTTTTTGGAACACTTTAAGAGCTTTTCTTGGACCTGGAGCTTTGGTTGCAGTTGGTTATATGGATCCAGGTAACTGGATTACTAGCGTTATTGGTGGAGCTACCTATCGTTACTTACTATTGTTTGTTGTTTTAGTATCTTCTTTGATGGCGATGCAATTACAACAAATGGCTGGCAAGCTTGGTATTGTTACACGACAGGACTTAGCACAAGCAACAGCTTCTCGACTCCCAAAACCGCTTCGTTACCTGCTATTTATTATCATTGAGTTAGCCCTTATCGCTACTGATTTAGCAGAAGTCATTGGCTCTGCCATTGCTCTTCACTTATTATTTGGCTGGCCCCTGTTACTGTCTATCATGATTACTATTTTGGATGTATTCTTACTTTTACTCTTAATGAAGTTAGGCGTCCAAAAAATTGAAGCCTTTGTTTCTGTTCTCATATTGACAATTTTGATAATCTTTACATATTTAGTTGTTTTATCACAACCTGATTTAGATGCTATGTTCAAAGGATTTTTACCACACCATGAGCTTTTTAACATATCACATGAAGGGAAAAATAGTCCTTTAACCCTCGCTCTTGGCATTATCGGCGCAACAGTCATGCCACATAATCTTTATTTACATTCTTCTTTATCTCAGACTAGACGCGTGGATTATCATAATAAATCTTCAATAAAAAAAGCTGTACGTTTCATGACCTTAGATTCTAACATTCAGCTATCACTTGCATTTGTCGTGAATTCGCTACTATTAGTTTTAGGAGCTAGTCTATTTTATGGGCATGCTAATGATATCAGTGCCTTTTCTCAAATGTATCTTGCCTTATCTGATAAAACTATTACTGGTGCAGTAGCCAGTTCTTTCCTTTCTACCCTTTTTGCAGTTGCCCTACTAGCAAGTGGTCAAAATTCAACAATTACAGGTACTTTAACAGGACAAATCGTTATGGAAGGTTTCCTTCACTTCAAATTACCTCAATGGTTAATAAGGCTTTGTACTAGATTATTAACTCTTCTTCCAATTTTTGCTATCGCCCTACTAGTTGGAGGCGAAGAAAATACGTTAGATCAACTAATCGTCTATTCACAAGTTTTTCTTTCCTTAGCTTTACCATTTTCAATCTTTCCATTGATTTATTTCACATCGCAAAAATCAATTATGGGAGAGCATGCTAATACTAAATGGAATACCTATTTAGCATACCTTATCGCTATCATTTTAACATTACTCAATTTGAAATTAATCATGGATTTACTT

SEQ ID NO: 14756 - protein, 446 aa, Streptococcus agalactiae
MNQNHSVKRSLSEVNQSVEVPHNSSFWNTLRAFLGPGALVAVGYMDPGNWITSVIGGATYRYLLLFVVLVSSLMAMQLQQMAGKLGIVTRQDLAQATASRLPKPLRYLLFIIIELALIATDLAEVIGSAIALHLLFGWPLLLSIMITILDVFLLLLLMKLGVQKIEAFVSVLILTILIIFTYLVVLSQPDLDAMFKGFLPHHELFNISHEGKNSPLTLALGIIGATVMPHNLYLHSSLSQTRRVDYHNKSSIKKAVRFMTLDSNIQLSLAFVVNSLLLVLGASLFYGHANDISAFSQMYLALSDKTITGAVASSFLSTLFAVALLASGQNSTITGTLTGQIVMEGFLHFKLPQWLIRLCTRLLTLLPIFAIALLVGGEENTLDQLIVYSQVFLSLALPFSIFPLIYFTSQKSIMGEHANTKWNTYLAYLIAIILTLLNLKLIMDLL

SEQ ID NO: 14757 - protein, 1086 aa, Streptococcus agalactiae
ATGGCATTAGCCTTGAAAGAGGCTGAGAAAGGTATGGGGTTCGTTGCTCCCAACCCATTAGTAGGTGCTGTTATTGTTAAAGATGATCGTATAATTTCCAAAGGTTATCATAAACGATTTGGAGATTTACATGCGGAAAGACAGGCTATTAAAAATGCTGATGAGGATATCTCTGGAAGTACTCTGTACGTGACTTTAGAACCATGCTGTCATGTGGGTAAGCAACCACCTTGTACTGAAGCTCTTATTAAATCTGGTATCAAAAAAGTAGTAGTTGGAAGTTTAGATCCAAATCCTTTAGTTTCAGGAAAAGGGATTGCCTTGTTAAGAAAAGAAGGTTTAAATGTTGAAGTTGGTATCCTAAGAGAAGAATGCGATGCTCTGAATGAAAGATTTATTTTTCACATGACCTATAAGCAGCCTTTTGTTTATTTGAAATATGCTATGACTTTAGATGGGAAGATAGCTACAAAGACGGGCGATTCTAAGTGGATATCCAATGAGCACTCAAGACAATCTGTTCAGAAATTGAGGCAAAAATGTAGTGCTATTATGGTCGGTATCAATACTGTATTAGCTGATAATCCACGTTTAACTTGCCGTATTCCTAAAGGTGAAGCGCTTGTGAGGATCGTATGTGATAGTCAGTTGAAGATACCTTTAGACTCTTACCTAGTTAAGAGCGCTAAAACAATACCAACATGGATTGCAACATGTTCAGATAATCTTGCTCAGCAACAAACATTAAAAGAAATGGGTTGCCGTTTGATTAAGGTCCCAAGAAAAGATGGAAAGCTGGATTTGAAAGTATTAATGACTATTTTAGGACAAGAAGGGATTGATAGCCTTCTTATTGAAGGAGGAAGTAGTTTACATTTTTCAGCTTTAGAAGCTGGTATTGTTAACAGACTAATTGTTTTTATTGCACCCAAAATAATAGGAGGTCTGAAAGCAAAAACAGCTATTTCTGGAGAAGGCTTGGATTGGCTTAACCAAGCTTTCAGAGTAAAAGATATTGAACTTAGTCGTATGGATTCTGACGTTGTTATTGAAGGAAAGGTAGAACATTATGTTTACAGGAATTAT

SEQ ID NO: 14758 - protein, 362 aa, Streptococcus agalactiae
MALALKEAEKGMGFVAPNPLVGAVIVKDDRIISKGYHKRFGDLHAERQAIKNADEDISGSTLYVTLEPCCHVGKQPPCTEALIKSGIKKVVVGSLDPNPLVSGKGIALLRKEGLNVEVGILREECDALNERFIFHMTYKQPFVYLKYAMTLDGKIATKTGDSKWISNEHSRQSVQKLRQKCSAIMVGINTVLADNPRLTCRIPKGEALVRIVCDSQLKIPLDSYLVKSAKTIPTWIATCSDNLAQQQTLKEMGCRLIKVPRKDGKLDLKVLMTILGQEGIDSLLIEGGSSLHFSALEAGIVNRLIVFIAPKIIGGLKAKTAISGEGLDWLNQAFRVKDIELSRMDSDVVIEGKVEHYVYRNY

SEQ ID NO: 14759 - protein, 624 aa, Streptococcus agalactiae
ATGGGTCAAGTCAGTCGTATTCGGAATGGCATAAAATCCCAACAATTAAGTATTGATGTTCCCAAACTAGTCCCTTTATTAAGAAAAGGGGATAGCGTAGCTGTTAATGGTGTTTGTTTGACAGTCCTTGACAAAAGTGAAAAAGCTTTTATAGCAGACGTCATGCCAGAAAGTATGATGCGAACAAGCTTAGCTGCTTTACGACTTCATTCTAAAGTTAACTTAGAATTAGCACTCAGAAGTGACTCAAGGTTAGGGGGGCATTTTGTTCTTGGACATGTGGATGGGGTTGGAAAAATAGAAAAAATCCAAAAGGATGATATTGCTGTCAGATTTTCAATTGATGCTCCGCCCAGTATTATGTCTTATATTATAGAGAAAGGTTCGGTGGCTCTAGATGGGATTAGCCTAACGGTGGTATCATTTACAGAGCATTCTTTTGAAGTTTCGGTCGTTCCCCACACGATGGCTCAAACTAATTTATCCTTAAAAAAGGTTGGGGATTTATTAAATATCGAAGTGGATGTTTTAGGCAAATATGCTGAGAAATTTTTAGCACCGACTAATAGAACTAATCACACTTCATCAGTAATGGATTGGTCTTTTTTATCAGAAAATGGCTAC

SEQ ID NO: 14760 - protein, 208 aa, Streptococcus agalactiae
MGQVSRIRNGIKSQQLSIDVPKLVPLLRKGDSVAVNGVCLTVLDKSEKAFIADVMPESMMRTSLAALRLHSKVNLELALRSDSRLGGHFVLGHVDGVGKIEKIQKDDIAVRFSIDAPPSIMSYIIEKGSVALDGISLTVVSFTEHSFEVSVVPHTMAQTNLSLKKVGDLLNIEVDVLGKYAEKFLAPTNRTNHTSSVMDWSFLSENGY

SEQ ID NO: 14761 - protein, 1191 aa, Streptococcus agalactiae
ATGGCCTTTAGTCCAATAAAAAAACTTTTACAAGACATCAAATCAGGGGAAATGGTAGTTTTGATGGATGACGAAAATAGAGAGAATGAAGGGGACCTTATTTGTGCGGCTGAAATGGTGACAAAAGAGTCGATTAATTTTATGGCTAAATTTGGGAAAGGATTAATTTGCTTACCTCTGTCTAATTACTATGCTGAAAAGTTAGAATTAGCTCAAATGGCTAGCCATAATACTGATAATCATGAAACAGCTTTTACCATATCCATTGATCATCTATCAACTAGTACTGGGATTTCTGCGGAAGATAGAGCTTTGACAGCTAAGATGGTTGCTAACGACAGTAGCAAAGCTAAAGACTTTAGACGTCCTGGGCACTTATTTCCCTTGTTAGCTAAGGAAGGAGGTGTTTTAGCTAGAAATGGACATACTGAAGCAACCGTTGATCTATGTCGTTTAGCTGGATTAAAGGAATGTGGACTTTGTTGTGAAATAATGGCTGAAGATGGTAGTATGATGAGAAAGGATGAGTTATTAGCATTTGCTCAAAAGCACGATTTAGCTATCGCTACCATAAAACAATTGCAAGACTATAGACGTCAAGAAGAGGGAGGGGTGGTTAGAGAAATTGAGATTCAGCTACCAACGCAATTCGGCCATTTTAAGGCTTATGGATATAGTGAAGTTGTGGCAAATAAGGAACATGTTGCCCTTGTTAAAGGGGATATTAGTAGTGGTGAAGATGTTTTATGTCGTTTACACTCAGAATGTTTGACAGGTGATGTCTTTCATTCCTTGAGATGTGATTGTGGGGAACAACTGGCTAATGCACTCCAACAAATAGAGGCTGAAGGTCGTGGCGTCCTTCTTTATATGAGACAGGAAGGTCGAGGAATTGGTTTGATTAATAAGTTAAAAGCTTATCATTTGCAAGAAGAAGGCTTAGATACTTTAGAAGCTAATTTGGCTTTAGGTTTTGAAGGAGATGAGAGAGACTATGGAGTTAGTGCTCAACTTTTAAAAGATTTAGGTATAAATTCTATAAACTTACTAACCAATAATCCAGATAAAATCCAACAACTTGAAGCAGAAGGAATTTGCGTCAAAAACAGAGTGCCATTACAGGTGGCAGCAACAGCTTATGACCTTAATTATTTAAAAACTAAAAAAGAAAAAATGGGACATCTTTTAGAT

SEQ ID NO: 14762 - protein, 397 aa, Streptococcus agalactiae
MAFSPIKKLLQDIKSGEMVVLMDDENRENEGDLICAAEMVTKESINFMAKFGKGLICLPLSNYYAEKLELAQMASHNTDNHETAFTISIDHLSTSTGISAEDRALTAKMVANDSSKAKDFRRPGHLFPLLAKEGGVLARNGHTEATVDLCRLAGLKECGLCCEIMAEDGSMMRKDELLAFAQKHDLAIATIKQLQDYRRQEEGGVVREIEIQLPTQFGHFKAYGYSEVVANKEHVALVKGDISSGEDVLCRLHSECLTGDVFHSLRCDCGEQLANALQQIEAEGRGVLLYMRQEGRGIGLINKLKAYHLQEEGLDTLEANLALGFEGDERDYGVSAQLLKDLGINSINLLTNNPDKIQQLEAEGICVKNRVPLQVAATAYDLNYLKTKKEKMGHLLD

SEQ ID NO: 14763 - protein, 468 aa, Streptococcus agalactiae
ATGACAATTATTGAAGGACAATTAGTGGCAAACGAAATGAAAATAGGAATCGTAGTCTCACGTTTCAATGAATTGATTACATCTAAATTATTATCAGGAGCAGTAGATGGACTGTTGAGACATGGTGTTTCAGAAGAAGATATAGATATTGTATGGGTACCCGGTGCTTTTGAAATCCCCTATATGGCTAGAAAAATGGCATTATATAAAGATTATGATGCTATTATCTGTCTTGGGGTAGTCATTAAAGGCAGCACTGATCATTATGATTATGTTTGTAATGAGGTGACAAAAGGTATTGGTCATTTAAATAGCCAGTCAGATATCCCTCATATCTTTGGTGTTCTAACAACGGATAATATCGAACAAGCTATTGAGAGGGCAGGAACAAAAGCAGGAAATAAAGGTTATGATTGTGCTCTTTCGGCTATTGAAATGGTAAACCTTGATAAAAAATTGCGTGAGCGA

SEQ ID NO: 14764 - protein, 156 aa, Streptococcus agalactiae; identical to SEQ ID NO: 1422

SEQ ID NO: 14765 - protein, 1488 aa, Streptococcus agalactiae
ATGTCTAACCAACATATTGAAGAATTAAATGACCAACAGATTGTTCGTCGTGAAAAAATGGCTGCTTTGACTGAACAAGGCATTGATCCTTTTGGTAAACGATTTGAACGTACAGCAACATCTGGTCAATTAAATGAAAAATACGCTGACAAATCAAAAGAAGACTTGCACGACATTGAAGAAACTGCTACAATCGCTGGTCGTTTAATGACTAAGCGCGGTAAGGGGAAAGTTGGCTTTGCGCATATCCAAGATCGCGAAGGTCAAATTCAAATTTATGTCCGTAAGGATTCTGTTGGCGAAGAAAACTACGAAATCTTTAAAAAAGCTGATTTAGGTGACTTCCTTGGTGTTGAAGGGCAAGTAATGCGTACAGATATGGGAGAACTTTCTATCAAGGCTACTCATATTACTCACCTTTCAAAAGCACTCCGTCCACTTCCTGAAAAATTCCACGGCCTAACTGATATTGAAACAATCTATCGTAAACGTCATCTTGATTTAATCTCAAATCGTGACAGCTTTGACCGTTTTGTAACACGCTCAAAAATCATTTCAGAAATTCGTCGCTTTATGGATAGCAATGGTTTCTTAGAGGTTGAAACACCTGTTCTTCATAATGAAGCTGGTGGTGCTTCTGCTCGCCCATTTATCACACATCACAATGCACAAGACATTGACATGGTTCTTCGTATCGCAACTGAATTGCATCTAAAACGTCTTATTGTAGGTGGTATGGAGCGTGTTTATGAAATCGGACGTATTTTCCGTAATGAAGGGATGGATGCAACCCACAATCCAGAGTTCACATCTATTGAAGCCTACCAAGCCTATGCTGACTACCAGGATATTATGGACTTGACAGAAGGTATTATCCAGCATGTTACAAAAACTGTAAAAGGTGATGGACCAATCAATTATCAAGGCACAGAAATTAAAATTAATGAACCATTCAAACGTGTTCATATGGTTGATGCGGTTAAAGAAATCACTGATATTGACTTCTGGAAAGAAATGACTCTTGAAGAAGCACAAGCTTTGGCACAAGAAAAAAATGTTCCTCTTGAAAAACATTTCACAACAGTTGGTCACATCATTAACGCCTTCTTCGAAGAATTCGTTGAAGACACTTTAATTCAACCAACTTTTGTCTTTGGTCATCCAGTCGAAGTGTCTCCACTTGCTAAGAAAAATGATACAGACCCTCGTTTTACAGACCGTTTCGAACTCTTTATCATGACTAAAGAATATGCTAATGCTTTTACAGAATTAAATGACCCAATTGATCAGCTATCTCGCTTTGAAGCACAAGCATCTGCTAAAGAACTTGGCGATGATGAAGCAACTGGAGTTGATTACGATTATGTTGAAGCACTTGAATATGGTATGCCACCTACTGGTGGACTAGGTATTGGTATCGACCGTCTCTGTATGCTGTTAACTGACACAACAACTATCCGAGACGTCCTACTTTTCCCTACAATGAAA

SEQ ID NO: 14766 - protein, 496 aa, Streptococcus agalactiae
MSNQHIEELNDQQIVRREKMAALTEQGIDPFGKRFERTATSGQLNEKYADKSKEDLHDIEETATIAGRLMTKRGKGKVGFAHIQDREGQIQIYVRKDSVGEENYEIFKKADLGDFLGVEGQVMRTDMGELSIKATHITHLSKALRPLPEKFHGLTDIETIYRKRHLDLISNRDSFDRFVTRSKIISEIRRFMDSNGFLEVETPVLHNEAGGASARPFITHHNAQDIDMVLRIATELHLKRLIVGGMERVYEIGRIFRNEGMDATHNPEFTSIEAYQAYADYQDIMDLTEGIIQHVTKTVKGDGPINYQGTEIKINEPFKRVHMVDAVKEITDIDFWKEMTLEEAQALAQEKNVPLEKHFTTVGHIINAFFEEFVEDTLIQPTFVFGHPVEVSPLAKKNDTDPRFTDRFELFIMTKEYANAFTELNDPIDQLSRFEAQASAKELGDDEATGVDYDYVEALEYGMPPTGGLGIGIDRLCMLLTDTTTIRDVLLFPTMK

SEQ ID NO: 14767 - protein, 900 aa, Streptococcus agalactiae
ATGATTACTTCAATTGTTTTTGATGTTGATGATACAATTTACGATCAACAAGCACCTTACCGTATTGCTGTGGAGAAATGCTTTCCTGATTTTGATATGAGCGCTATTAACCAAGCTTATATTCGCTTTCGTCATTATTCAGATATTGGCTTTCCACGAGTAATGGCTGGTGAATGGACAACAGAATATTTTCGTTTCTGGCGATGCAAAGAAACGCTTTTAGAGTTTGGTTATCGTGAAATTGATGAAGCTACTGGTATTTATTTTCAAGAAATATACGAACATGAACTTGAAAATATTACAATGCTCGATGAGATGCGTATGACACTTGACTTTTTGAAATCAAAAAATGTACCAATGGGAATTATTACAAATGGCCCTACGGAACATCAATTGAAAAAAGTTAAAAAATTGGGACTTTATGACTATGTTGATCCAAAACGTGTTATAGTTAGTCAAGCAACTGGTTTTCAAAAGCCTGAAAAGGAGATTTTTAATTTAGCAGCAGAGCAATTTGATATGAACCCTTCAACTACACTTTATGTGGGTGATTCATATGATAATGATATTATGGGTGCATTTAATGGTGGTTGGCATTCTATGTGGTTCAACCATAGAGGACGTTCTTTAAAACCGGGAATTAAACCAGTTTATGATGTTGCTATTGATAACTTTGAGCAATTATTCGGTGCTGTTAAAGTGTTGTTTGACTTACCTGATAATAAATTTATTTTTGATATCAACGATAAAAGTAATCCAGTCCTTGAAATGGGACTTAATAATGGTTTAATGATGGCATCAGAGCGTCTGCTTGAGAGTAATATGAGCGTTGACAAAGTTGTTATTTTACTGCGCCTAACTGCAAAACAGGAAAAAGTATTACGCATGAAGTATGCTAGA

SEQ ID NO: 14768 - protein, 300 aa, Streptococcus agalactiae
MITSIVFDVDDTIYDQQAPYRIAVEKCFPDFDMSAINQAYIRFRHYSDIGFPRVMAGEWTTEYFRFWRCKETLLEFGYREIDEATGIYFQEIYEHELENITMLDEMRMTLDFLKSKNVPMGIITNGPTEHQLKKVKKLGLYDYVDPKRVIVSQATGFQKPEKEIFNLAAEQFDMNPSTTLYVGDSYDNDIMGAFNGGWHSMWFNHRGRSLKPGIKPVYDVAIDNFEQLFGAVKVLFDLPDNKFIFDINDKSNPVLEMGLNNGLMMASERLLESNMSVDKVVILLRLTAKQEKVLRMKYAR

SEQ ID NO: 14769 - protein, 639 aa, Streptococcus agalactiae
ATGAAATTTTATCTTGTTAGACACGGAAAAACACAATGGAATTTAGAAGGGCGTTTCCAAGGTGCTAACGGAGACTCACCTCTCCTTGAAGAAGCTATTGAAGAATTAGAAGAACTTGGACAATACCTATCATCTATTCATTTTGATGCTGTTTATTCTAGCGACTTAGGTCGTGCTAGAGATACTGTTAATATCCTCAATGATGCTAATTCATGCCCAAAAGAAATCCACTATACTTCTCAGCTTCGTGAATGGGCATTGGGAACTTTAGAGGGTTGTAAAATTGCAACTATGCAAGCTATCTATCCTCGTCAAATGACCGCATTTTATCAAAATCCCTTACAATTTAAACATGACATGTTCGGTGCAGAATCTCTTTATCAGACAACGCATCGTGTAGAGAGTTTCTTACGTTCTTTAGCTTCAAAAAATTACGACAAGGTCCTTATTGTAGGACATGGAGCAAATCTAACTGCGTCTATTCGTTCCTTACTGGGTTATCAATATGGTAGTTTACACTACAAAGATAAACTTGATAATGCCAGCCTCACAATCATAGAAACTCATGATTTTAAAGACTTCAACTGTCTGACTTGGAACGATAAATCTTATTTAAGGCAAGAGGTCAAAATGACACAC

SEQ ID NO: 14770 - protein, 213 aa, Streptococcus agalactiae
MKFYLVRHGKTQWNLEGRFQGANGDSPLLEEAIEELEELGQYLSSIHFDAVYSSDLGRARDTVNILNDANSCPKEIHYTSQLREWALGTLEGCKIATMQAIYPRQMTAFYQNPLQFKHDMFGAESLYQTTHRVESFLRSLASKNYDKVLIVGHGANLTASIRSLLGYQYGSLHYKDKLDNASLTIIETHDFKDFNCLTWNDKSYLRQEVKMTH

SEQ ID NO: 14771 - protein, 471 aa, Streptococcus agalactiae
ATGAGTAAAAAGAATAAAATCAAAAAAACTTTAGTTGATCAAATTTTAGATAAAGCAAAAATCGAACATGATAGTCTACAATTGGATGCTTTACAGGGAGATTTACCCAACGGTATTCAAAAACAAGATATCTTTAAGACATTAGCGCTAATCGGTGATAAAACTGGTCCCATAATAGGTATCTTACCTCTCACCGAGCATTTATCCGAAAAAAAGTTAGCTAAAATTTCAGGAAACAAAAAGGTACAAATGATACCTCAAAAAGATCTCCAGAAAATAACAGGTTATATTCACGGAGCAAATAATCCAATTGGAATTCGCCAAAAACATAATTACCCTATTTTTATCGATACTATCGCTTTAGAAAAACAAGAACTCATTGTCTCTGCAGGAGAAATTGGACGTTCTATTCGTATTAATAGTGAGGTTCTTGCAGATTTCGTAAATGCTAAATTTGCCGATATAAAGGAA

SEQ ID NO: 14772 - protein, 157 aa, Streptococcus agalactiae; identical to SEQ ID NO: 1430

SEQ ID NO: 14773 - protein, 615 aa, Streptococcus agalactiae
ATGGAAATACTGATTGCAGGTGGTAGTGGTTTTCTAGGGAAGCAGATAATAAAAGCAGCGCTTACAAAAGGGCATAAGGTGGCTTACTTATCAAGGCATGAAGGTAAAGGTGATATATTTAAGGATCCTAGATTAACCTACATTAAGGGAGATATTACAGAAGCTGATAAGATTCATTTAGAACATAGAAATTTTGATATATTAATTGACTGTATTGGAGCGATTAAGCCCAATCAACTAGATGAGCTTAACGTTAAAGCAACCCAAAAAGCAGTAGCACTCTGTCACAAAAATCAAATACCAAAGTTAGTTTACATTTCAGCCAATAGCGGCTATTCAGCTTACATTAAAAGTAAAAGGAAGGCAGAGCAGATAATCAAAGCAAGCGGTCTGGATTATCTTTTTGTAAGACCAGGTTTGATGTATGGTGAAGAGCGACCTCTCTCGATTTTCCAAGCCAAGTGTATAAAATTATTTAGTCATTTGCCTTTCTTAGGTATTGTTGTACAAAAAGTCTTTCCAACTAAGGTTGTGATAGTGGCAGAAGCAATCGTTACTTCGCTTAGGAAAAAACCAACTCAAAAAATCCTTTCTATTGAAGAATTAAATAATAAA

SEQ ID NO: 14774 - protein, 205 aa, Streptococcus agalactiae
MEILIAGGSGFLGKQIIKAALTKGHKVAYLSRHEGKGDIFKDPRLTYIKGDITEADKIHLEHRNFDILIDCIGAIKPNQLDELNVKATQKAVALCHKNQIPKLVYISANSGYSAYIKSKRKAEQIIKASGLDYLFVRPGLMYGEERPLSIFQAKCIKLFSHLPFLGIVVQKVFPTKVVIVAEAIVTSLRKKPTQKILSIEELNNK

SEQ ID NO: 14775 - protein, 411 aa, Streptococcus agalactiae
ATGAAAGAAGAGGCTCAGATATTTTATAAGAATGCAGCTCCTTACAAACCAACTTTTTATTGGATTGACGTAGAAGAGGAGACAATGTCTAACATGAATAAAGGTGTCCAAGCATTCCGAAAAGAGTTAAAAAGACTTGGTGCTAAAAATGTTGGTATCTACATCGGTACTTACTTTATGACTGAGCAAGGTATCTCTGTAAAAGGATTTGACGCTGTTTGGATTCCAACTTATGGTAGCGATTCTGGATACTATGAAGCAGCTCCACAAACTGAACTTAAATACGATTTACACCAATACACCTCTCAAGGTTATCTACCAGGATTCAATCAACCGCTTGATTTAAATCAAATTGCAGTTAATAAAGACAAGAAGAAAACTTATGAGAAACTTTTTGGAAAAGTAAAAGAT

SEQ ID NO: 14776 - protein, 137 aa, Streptococcus agalactiae
MKEEAQIFYKNAAPYKPTFYWIDVEEETMSNMNKGVQAFRKELKRLGAKNVGIYIGTYFMTEQGISVKGFDAVWIPTYGSDSGYYEAAPQTELKYDLHQYTSQGYLPGFNQPLDLNQIAVNKDKKKTYEKLFGKVKD

SEQ ID NO: 14777 - protein, 772 aa, Streptococcus agalactiae
ATGAGAAGAAGAATTAAACCTATTGTTGTTGCGGTTTTTTTCAGTTTATTTGGACTTTTATTAATTATTGGTCATTTACATTCGACAAATACTTTGAAAAAAGAATTAGTTGAAGCTAAAAAGACAATTCCATCCGTAAAAGCTTCAAAAGTACCGCAAAAATCAACATCATCGAAAGATAAAGAGTTTGTTCTTAAACCGATTATCGATGTCTCTGGTTGGCAACTTCCTAAGGAGATTGATTACGATACGCTTTCAAAAAATATTTCAGGTGTTGTTATTCGTATCTTTGGTGGATCAAAGATATCTAAGACTAATAACGCTGCTTATACAACTGGAATCGATAAATCGTTTAAGACCCATATCAAAGAATTTCAAAAGCGAAATATCCCAGTAGCTGTCTACAGTTATGCACTTGGTTCAAGTGTTAAAGAAATGAAAGAAGAGGCTCAGATATTTTATAAGAATGCAGCTCCTTACAAACCAACTTTTTATTGGATTGACGTAGAAGAGGAGACAATGTCTAACATGAATAAAGGTGTCCAAGCATTCCGAAAAGAGTTAAAAAGACTTGGTGCTAAAAATGTTGGTATCTACATCGGTACTTACTTTATGACTGAGCAAGGTATCTCTGTAAAAGGATTTGACGCTGTTTGGATTCCAACTTATGGTAGCGATTCTGGATACTATGAAGCAGCTCCACAAACTGAACTTAATACGATTTACACCAATACACCTCGGTTATCTACCAGGATTCAATCAACCGCTGATT

SEQ ID NO: 14778 - protein, 259 aa, Streptococcus agalactiae
  VARIANT 239: Xaa = Any Amino Acid
MRRRIKPIVVAVFFSLFGLLLIIGHLHSTNTLKKELVEAKKTIPSVKASKVPQKSTSSKDKEFVLKPIIDVSGWQLPKEIDYDTLSKNISGVVIRIFGGSKISKTNNAAYTTGIDKSFKTHIKEFQKRNIPVAVYSYALGSSVKEMKEEAQIFYKNAAPYKPTFYWIDVEEETMSNMNKGVQAFRKELKRLGAKNVGIYIGTYFMTEQGISVKGFDAVWIPTYGSDSGYYEAAPQTELXYDLHQYTSQVIYQDSINRLI

SEQ ID NO: 14779 - protein, 226 aa, Streptococcus agalactiae
ATGAGAAGAAGAATTAAACCTATTGTTGTTGCGGTTTTTTTCAGTTTATTTGGACTTTTATTAATTATTGGTCATTTACATTCGACAAATACTTTGAAAAAAGAATTAGTTGAAGCTAAAAAGACAATTCCATCCGTAAAAGCTTCAAAAGTACCGCAAAAATCAACATCATCGAAAGATAAAGAGTTTGTTCTTAACCGATATCGAGTCTCTGGTTGGCAATTCT

SEQ ID NO: 14780 - protein, 76 aa, Streptococcus agalactiae
  VARIANT 66, 68: Xaa = Any Amino Acid
MRRRIKPIVVAVFFSLFGLLLIIGHLHSTNTLKKELVEAKKTIPSVKASKVPQKSTSSKDKEFVLXPXIESLVGNS

SEQ ID NO: 14781 - protein, 522 aa, Streptococcus agalactiae
ATGATAAAGAATTCAACTTTAACTAAATTGACTAGAGTAGCTATATTATCTGCTTTGTGTGTTGTGTTGAGATATGCTTTTGCGCCTCTGCCTAACATTCAGCCAATTACTGCCATTTTTTTGATTACAGTTGTCTTATTCGATTTAAAAGAAGGTGTAGCTACTGTAACTGTAACAATGCTAGTTTCTTCTTTTTTAATGGGCTTTGGGCCATGGGTCTTTTTGCAAATCATTTCCTTCACTTTAATTTTATGCTTGTGGAAATTTCTGATATATCCGCTGACAAAAGCTGTATGTTTTGGTAAAATAACGGAGGTAGTACTTCAAACTTTCTTTGCAGGAGGGTTAGGGGTTGTTTATGGCGTCATTATTGATACCTGTTTTGCTTGGTTATATCATATGCCTTGGTGGACTTATGTATTAGCAGGACTTAGTTTTAATATGGCACACGCTTTATCAACTTGTTTATTTTATCCTCTTTTGTTACCGATTTTAAGGAGATTTAGGAATGAAAAAATACAT

SEQ ID NO: 14782 - protein, 174 aa, Streptococcus agalactiae
MIKNSTLTKLTRVAILSALCVVLRYAFAPLPNIQPITAIFLITVVLFDLKEGVATVTVTMLVSSFLMGFGPWVFLQIISFTLILCLWKFLIYPLTKAVCFGKITEVVLQTFFAGGLGVVYGVIIDTCFAWLYHMPWWTYVLAGLSFNMAHALSTCLFYPLLLPILRRFRNEKIH

SEQ ID NO: 14783 - protein, 387 aa, Streptococcus agalactiae
ATGAAAAAATACATTAAATTATTCTTGCTAACAGTATTCGCTACGACTTTAGTAGCTTGCGGGCAACCATCTACATCGAATAAGACAACAACTAGCTCAACGTTAGAAGTTGGTAAGGTTGAATTGGTTGTTAAAGAAGATACGAACGTGTTAAGTGAAAAGGTTGTTTACCATAAAGGTGACACTGTTTTGGATGTGCTTAAAGCTAACTATAAAGTTAAAGAAAAAGATGGTTTCATTACTTCAATTGATGGCATCAGCCAAGATGAAACCAAAGGGCTTTATTGGATGTTCAAGGTCAATAATAAATTAGCTCCTAAGGCAGCAAACCAAATTAAAGTTAAAAAGAACGACAAAATTGAATTTTATCAGGAAGTTTACAAAAAA

SEQ ID NO: 14784 - protein, 129 aa, Streptococcus agalactiae; identical to SEQ ID NO: 1436

SEQ ID NO: 14785 - protein, 1797 aa, Streptococcus agalactiae
ATGGAACTTAAAAAACGCTCTGAATTCCCTGAAAATGAGCTTTGGGATCTGACTGCTCTCTACAAAGATCGTCAAGATTTTTTACTGGCTATTGAAAAAGCTCTTGAGGATATCAAGGTTTTCAAAAAAAATTACGAGGGAAAACTTAATTGTGTTGAGGATTTTACTAGTGCCCTTATGGAAATCGAGCATATTTATATCCAGATGAGTCACATTGATACCTATGCTTTTATGCCTCAAACTACTGACTTTAGCAACGAAGAGTTTGCACAAATTTCTCAAGCAGGATCAGACTTCGCAACTAAAGCTAATGTACTACTTTCTTTCTTTAATACTGCCCTAGCAAATGCAGATATAAAGATTTTAGATTCTTTAGAAAATAACCCTCATTTCAAAGCAACTATTCGCCAAGCTAAAATTCAAAAGCAACACTTATTAAGTCCAGAAGTCGAAAAAGCTTTGACAAACTTAAATGAAGTCCTAAATACACCATATGATATTTATACTAAAATGCGTGCTGGCGATTTTGATATGGAAGATTTTGAAGTTGACGGAAAAACCTACAAAAATAGTTTTGTAACTTATGAAAATTACTTTCAAAATCACGAAAATGCAGAGATACGTGAAAAATCCTTCCGTTCATTCTCGAAAGGTCTACGTAAGCACCAAAATGCTGCAGCTGCGGCTTATCTTGCAAAAGTCAAATCTGAAAAGTTAATTGCTGATATGCGTGGTTACGATAGTGTTTTTGATTATCTTCTTTCCGAACAAGAAGTTGACCGTTCAATGTTTGACAGACAAATTGATCTTATCATGGATGAATTTGGTCCAGTAGCTCAACGATTCCTCAAACATATCGCCGATGTTAATGGTATTGAAAAGATGACTTTTGCAGATTGGAAATTAGACATTGATAACGAACTTAATCCCGAAGTAAGTATCAATGATGCTTATGACTTAGTAATGAAATCAGTTGCTCCTTTAGGAAAAGAATATTCCCAAGAGGTTGAGCGCTATCAAAAAGAGCGTTGGGTTGATTTTGCAGCTAACGCTAATAAAGATTCTGGAGGATATGCTGCGGATCCTTACAAAGTTCATCCCTATGTACTCATGAGCTGGACGGGGCGTATGAGCGATGTCTACACACTTATTCATGAGATTGGACATTCTGGTCAATTTATCTTCTCAGATAATCACCAAAGTTTTTTCAATACTCACATGTCCACTTACTATGTTGAAGCTCCATCTACTTTTAACGAACTTTTACTTAGTGACTACTTAGAAAACCAATTTGATACAGCACGTCAAAAACGCTTTGCTCTTGCACATCGCTTAACTGATACTTACTTCCACAATTTCATTACTCACTTACTTGAAGCTGCTTTCCAACGTAAAGTTTACACTCTAATTGAGGAGGGAGAAACTTTTGGAGCAGAACAATTAAATGCTATTATGAAGGAAGTATTAACACAATTCTGGGGAGATGCTATTGAAATAGATGACGATGCTGCTTTGACATGGATGAGACAAGCTCATTACTACATGGGGCTCTATAGCTATACTTACTCTGCTGGTTTAGTAATCTCGACAGCCGGCTATCTCAATCTCAAAAATAATCCAAACGGAGCAAAAGAGTGGTTAGCATTCTTGAAATCTGGTGGGAGCTGTACCCCTTTAGAAACAGCCCTATTAATCGGTGCTGATATTTCTACTGATAAGCCTCTACGCGATACTATTAATTTCTTATCTAACACTGTAGATCAAATTATTAATTATAGTAATCTTATTAAACAAGGC

SEQ ID NO: 14786 - protein, 599 aa, Streptococcus agalactiae
MELKKRSEFPENELWDLTALYKDRQDFLLAIEKALEDIKVFKKNYEGKLNCVEDFTSALMEIEHIYIQMSHIDTYAFMPQTTDFSNEEFAQISQAGSDFATKANVLLSFFNTALANADIKILDSLENNPHFKATIRQAKIQKQHLLSPEVEKALTNLNEVLNTPYDIYTKMRAGDFDMEDFEVDGKTYKNSFVTYENYFQNHENAEIREKSFRSFSKGLRKHQNAAAAAYLAKVKSEKLIADMRGYDSVFDYLLSEQEVDRSMFDRQIDLIMDEFGPVAQRFLKHIADVNGIEKMTFADWKLDIDNELNPEVSINDAYDLVMKSVAPLGKEYSQEVERYQKERWVDFAANANKDSGGYAADPYKVHPYVLMSWTGRMSDVYTLIHEIGHSGQFIFSDNHQSFFNTHMSTYYVEAPSTFNELLLSDYLENQFDTARQKRFALAHRLTDTYFHNFITHLLEAAFQRKVYTLIEEGETFGAEQLNAIMKEVLTQFWGDAIEIDDDAALTWMRQAHYYMGLYSYTYSAGLVISTAGYLNLKNNPNGAKEWLAFLKSGGSCTPLETALLIGADISTDKPLRDTINFLSNTVDQIINYSNLIKQG

SEQ ID NO: 14787 - protein, 2793 aa, Streptococcus agalactiae
TTGTCCCACCCGAAATTAGAAAGTAGTAGCAATAAAGAAATCATTACCGAAGAGGTCGGTTTACTGAAGCAGCTTTTGGATGAAGCAACGCAAAAATTGATTGGTAGTGAATCATTTGACAAGATTGAAAAAATAGTTTCATTATCATCAACTGACGATTATACTGGTTTGAAGGAAACTATTTCGGCTTTAAGCAACGAGGAGATGGTTATTGTTTCTCGTTACTTCTCTATTTTGCCGCTCTTAATTAATATTTCAGAAGACGTTGATTTAGCATATGAAATTAATTATAAAAATAATCTTAACCAAGATTACCTAGGAAAGTTATCAACGACTATTGATGTTGTAGCTGGCCATGAAAATGCTAAAGATATTCTTGAACACGTCAATGTTGTGCCTGTGCTAACAGCTCATCCTACTCAGGTGCAGCGTAAAACGGTGCTCGAATTAACGTCTAAGATTCATGATTTATTACGTAAATACAGAGATGTCAAAGCAGGAATCGTGAATCAAGAAAAATGGTATGCTGACTTGCGTCGTTACATCGGCATTATCATGCAAACAGACACTATTCGCGAGAAAAAATTGAAAGTCAAAAATGAGATAACCAATGTAATGGAATATTACAACCGTTCTCTTATTAAAGCAGTTACCAAATTAACAGCAGAATATAAGGCACTGGCAGCTAAAAAAGGTATTCACTTAGAGAATCCTAAGCCTCTGACTATGGGGATGTGGATTGGTGGTGATAGAGATGGCAATCCCTTTGTAACTGCTGAGACACTAAGATTATCAGCTATGGTACAAAGTGAAGTGATTATTAACCATTATATTGAGCAGCTAAATGAACTTTATCGTAATATGTCACTTTCAATAAGTCTAACTGAAGTCTCTCCCGAACTTGTTACGTTGGCAAACCAGTCACAAGATAATTCAGTATATAGGGAAAATGAACCTTATCGTAAAGCTTTCAATTTTATCCAAGATAAACTAGTACAAACCCTACTAAATTTAAAAGTTGGTTCTTACCCAAAAGAGAAATTTGTTAGTCGCCAAGAATCTTCTGGTATTGTAGGAAGGTATATAAAATCACATATCGCTCAAGTAGCTTCTGACATACAGACAGAAGAACTACCAGCATACGCTACTGCTGAGGAGTTTAAACAAGATTTGTTACTTGTGAAGCAATCTTTAGTTCAACATGGACAAGATTCTCTTGTCGATGGCGAATTAGCTTGTCTTATTCAAGCAGTAGATATCTTTGGATTTTATTTAGCTACTATTGATATGCGTCAAGATTCTAGTATTAATGAAGCTTGTGTAGCAGAATTATTGAAGTCTGCCAATATTGTAGATGATTACAGTTCTCTTTCAGAAGAAGAAAAATGTCAACTTCTCTTAAAAGAATTAACAGAAGATCCTAGAACATTATCTTCTACGCATACTCCTAAATCCGAGTTACTTCAAAAAGAATTGGCTATTTTCCAAACAGCACGTGAGTTAAAAGATCAATTGGGTGAAGACATTATAAAACAGCATATCATTTCTCACACAGAGAGCGTTTCGGATATGTTTGAGTTAGCTATCATGTTAAAAGAAGTTGGACTAATTGATGCCAATCAAGCTCGCATTCAGATTGTACCGTTATTTGAAACCATCGAAGATTTGGATAATTCACGTGATATTATGACCCAGTATCTACATTATGGATTAGTAAAAAAATGGATTACAACTAACAACAATTATCAAGAAATAATGCTAGGTTATTCAGATAGTAATAAAGATGGTGGCTATTTATCATCTGGTTGGACTCTATATAAAGCTCAAAATGAGCTAACAAAAATAGGTGAAGAAAACGGTATTAAAATCACATTTTTCCACGGTCGTGGTGGAACTGTTGGTCGTGGTGGTGGTCCATCTTATGAAGCTATCACATCACAACCTTTTGGTTCAATCAAAGATCGAATTCGCCTAACAGAGCAAGGTGAAATCATTGAGAATAAATATGGTAATCAAGATGCAGCCTATTATAACCTTGAAATGCTTATTTCAGCTTCCATAGACCGCATGGTAACACGTATGATTACTAACCTTAATGAAATTGATAATTTCCGTGAGACAATGGATGGTATTGTGGCTGAAAGTAATGCCGTTTATAGAAATTTAGTTTTTGATAATCCTTATTTCTATGACTATTTCTTTGAAGCAAGTCCAATTAAAGAGGTATCAAGTTTAAATATTGGTTCTCGGCCAGCAGCACGTAAAACAATTACAGAAATTTCAGGTTTACGTGCAATTCCATGGGTATTTTCATGGTCACAAAATCGTATTATGTTTCCGGGTTGGTATGGTGTTGGGTCAGCCTTCAAGCAATTTATTGAACAAGATGAGGCAAACTTAGCAAAATTACAAACCATGTATCAAAAATGGCCATTCTTTAATTCTCTTTTATCTAATGTAGATATGGTTTTATCAAAATCAAATATGAATATTGCGCTTCAGTATGCTCAGTTAGCTGGAAGTAAAGAAGTTCGAGATGTTTTTAATATCATCCTTAATGAATGGCAGTTAACTAAAGATATGATTTTAGCTATTGAACAGCATGATAATTTATTAGAAGAAAACCCAATGTTACATGCAAGTTTAGATTATCGTTTGCCATATTTCAATGTTTTGAATTATGTTCAAATTGAATTGATTAAACGTCTTCGTAGTAACCAACTAGATGAAGACTATGAGAAGTTGATTCATATTACTATTAATGGTATTGCAACAGGTTTACGAAATTCAGGT

SEQ ID NO: 14788 - protein, 931 aa, Streptococcus agalactiae
MSHPKLESSSNKEIITEEVGLLKQLLDEATQKLIGSESFDKIEKIVSLSSTDDYTGLKETISALSNEEMVIVSRYFSILPLLINISEDVDLAYEINYKNNLNQDYLGKLSTTIDVVAGHENAKDILEHVNVVPVLTAHPTQVQRKTVLELTSKIHDLLRKYRDVKAGIVNQEKWYADLRRYIGIIMQTDTIREKKLKVKNEITNVMEYYNRSLIKAVTKLTAEYKALAAKKGIHLENPKPLTMGMWIGGDRDGNPFVTAETLRLSAMVQSEVIINHYIEQLNELYRNMSLSISLTEVSPELVTLANQSQDNSVYRENEPYRKAFNFIQDKLVQTLLNLKVGSYPKEKFVSRQESSGIVGRYIKSHIAQVASDIQTEELPAYATAEEFKQDLLLVKQSLVQHGQDSLVDGELACLIQAVDIFGFYLATIDMRQDSSINEACVAELLKSANIVDDYSSLSEEEKCQLLLKELTEDPRTLSSTHTPKSELLQKELAIFQTARELKDQLGEDIIKQHIISHTESVSDMFELAIMLKEVGLIDANQARIQIVPLFETIEDLDNSRDIMTQYLHYGLVKKWITTNNNYQEIMLGYSDSNKDGGYLSSGWTLYKAQNELTKIGEENGIKITFFHGRGGTVGRGGGPSYEAITSQPFGSIKDRIRLTEQGEIIENKYGNQDAAYYNLEMLISASIDRMVTRMITNLNEIDNFRETMDGIVAESNAVYRNLVFDNPYFYDYFFEASPIKEVSSLNIGSRPAARKTITEISGLRAIPWVFSWSQNRIMFPGWYGVGSAFKQFIEQDEANLAKLQTMYQKWPFFNSLLSNVDMVLSKSNMNIALQYAQLAGSKEVRDVFNIILNEWQLTKDMILAIEQHDNLLEENPMLHASLDYRLPYFNVLNYVQIELIKRLRSNQLDEDYEKLIHITINGIATGLRNSG

SEQ ID NO: 14789 - protein, 1266 aa, Streptococcus agalactiae
ATGAAAATTGATAAAAGGCATCTTCTGAATTATTCCATCCTCATTCCCTATTTGATATTGTCTATTCTAGGCTTAATTGTAATTTATTCGACAACTAGTGCAACTCTAATTCAGCTTGGAGCTAACCCTTTTCGTTCAGTAATCAACCAGGGTGTCTTTTGGGCAGTCAGTTTGGTTGCAATTATCTTTATCTATAAACTGAAACTAAATTTTTTGAAAAATTCTAAAGTGTTGACTATGGCAGTATTGGTAGAAGTATTTTTGCTACTAATAGCGCGCTTTTTCACACAAGAAGTTAATGGAGCACATGGTTGGATTGTTATTGGTCCTATTAGTTTTCAACCTGCTGAATATTTAAAAGTTATCATTGTATGGTATTTAGCGTTTACTTTTGCTCGAAGGCAAAAAAAGATAGAAATATATGATTATCAAGCTTTGACAAAAGGGAGATGGCTTCCGAGATCACTAAGCGACCTAAAAGATTGGCGATTTTATTCTTTATTTATGATTGGTTTGGTAATTGCACAACCTGATTTAGGAAATGGTTCGATAATTGTTCTAACGGTCATTATTATGTACTGTATTAGTGGTATTGGTTATCGATGGTTTTCAGCTTTACTTGGTCTAATCGTCGTGGGGTCAACTTTATTTATCGGAACTATTGCAGTTGTTGGAGTTGAGACAATGGCTAAAGTCCCTGTCTTTGGTTATGTAGCTAAGCGATTTAATGCTTTTTTTGACCCATTTAAAGATTTAACAGATTCAGGACACCAGTTGGCTAATTCATATTATGCAATGAGCAACGGTGGCTGGTTTGGTCGAGGACTTGGGAATTCTATTGAAAAATTAGGGTACTTACCAGAAGCAACAACAGACTTTGTCTTTTCAATTGTTATTGAGGAATTAGGAGTTATTGGTGCAGGGTTTATTTTAGCTTTGGTTTTCTTCTTAATTTTACGTATTATGCACGTAGGTATAAAGGCTAAAGATCCTTTCAACTCAATGATCGCTCTTGGTATTGGAGCAATGCTATTGATGCAAGTTTTTGTTAACATTGGTGGTATTTCTGGGTTAATCCCCTCAACTGGAGTGACATTTCCTTTCTTATCCCAAGGAGGGAACAGCCTCTTGGTACTTTCTGTAGCTATCGGATTCGTGCTTAATATTGATGCTAACGAGAAAAAGGAACTCATAATGAAAGAAGCAGAAGAGCAATATAAGCCACAAGAAAAAAATGAAAAAATAATCAACCTTGATGCCTTTAAA

SEQ ID NO: 14790 - protein, 422 aa, Streptococcus agalactiae; identical to SEQ ID NO: 1442

SEQ ID NO: 14791 - protein, 1194 aa, Streptococcus agalactiae
ATGGCAAAAGAAAAATACGATCGTAGTAAACCACACGTTAACATTGGTACAATCGGACACGTTGACCACGGTAAAACTACTTTAACAGCAGCTATCACAACTGTATTGGCACGTCGCTTGCCTACTTCAGTTAACCAACCAAAAGATTACGCTTCTATCGATGCTGCTCCAGAAGAGCGCGAACGCGGAATCACAATCAACACTGCACACGTTGAGTACGAAACTGAAAAACGTCACTATGCCCACATCGACGCTCCAGGACACGCGGACTACGTTAAAAACATGATTACTGGTGCTGCTCAAATGGACGGAGCTATCCTTGTAGTTGCTTCAACTGATGGACCAATGCCACAAACTCGTGAGCACATCCTTCTTTCACGTCAAGTTGGTGTTAAACACCTTATCGTATTCATGAACAAAGTTGACCTTGTTGATGATGAAGAATTGCTTGAATTGGTTGAAATGGAAATTCGTGACCTTCTTTCAGAATACGACTTCCCAGGTGATGACCTTCCAGTTATCCAAGGTTCAGCTCTTAAAGCACTTGAAGGCGATGAAAAATACGAAGACATCATCATGGAATTGATGAGCACTGTTGATGAGTACATTCCAGAACCAGAACGTGATACTGACAAACCTTTACTTCTTCCAGTCGAAGATGTATTCTCAATCACTGGACGTGGTACAGTTGCTTCAGGACGTATCGACCGTGGTACTGTTCGTGTCAACGACGAAGTTGAAATCGTTGGTATTAAAGAAGATATCCAAAAAGCAGTTGTTACTGGTGTTGAAATGTTCCGTAAACAACTTGACGAAGGTCTTGCAGGGGACAACGTTGGTGTTCTTCTTCGTGGTGTTCAACGTGATGAAATCGAACGTGGTCAAGTTCTTGCTAAACCAGGTTCAATCAACCCACACACTAAATTTAAAGGTGAAGTTTACATCCTTTCTAAAGAAGAAGGTGGACGTCATACTCCATTCTTCAACAACTACCGTCCACAATTCTACTTCCGTACAACTGACGTAACAGGTTCAATCGAACTTCCAGCAGGAACAGAAATGGTTATGCCTGGTGATAACGTTACTATCGAAGTTGAATTGATTCACCCAATCGCCGTAGAACAAGGTACTACTTTCTCAATCCGTGAAGGTGGACGTACTGTTGGTTCAGGTATCGTTTCAGAAATCGAAGCT

SEQ ID NO: 14792 - protein, 398 aa, Streptococcus agalactiae; identical to SEQ ID NO: 1444

SEQ ID NO: 14793 - protein, 756 aa, Streptococcus agalactiae
ATGTCACGTAAACCATTTATCGCTGGTAACTGGAAAATGAATAAAAATCCAGAAGAAGCAAAAGCATTCATCGAAGCAGTAGCTTCTAAATTACCATCATCAGAACTTGTTGAAGCAGGGATTGCTGCTCCAGCACTTACTTTATCAACAGTTCTTGAAGCAGCTAAAGGTTCAGAATTGAAAATCGCTGCTCAAAATAGCTATTTTGAGAATTCAGGTGCATTCACTGGTGAAAACAGCCCTAAAGTATTGGCTGAAATGGGTACAGACTACGTTGTTATCGGTCACTCAGAACGTCGTGATTATTTCCATGAAACTGACCAAGATATCAACAAAAAAGCAAAAGCTATCTTTGCTAATGGTTTGACTCCAATCATTTGTTGCGGTGAGTCTCTTGAAACTTACGAAGCTGGTAAAGCGGTTGAATTCGTAGGTGCTCAAGTTTCAGCAGCTCTTGCAGGTTTGTCAGAAGAGCAAGTATCATCACTTGTTATCGCTTACGAACCAATCTGGGCTATTGGTACTGGTAAATCAGCAACTCAAGACGACGCACAAAACATGTGTAAAGCAGTTCGTGACGTTGTTGCAGCAGACTTCGGTCAAGCAGTTGCTGACAAAGTTCGCGTTCAATACGGTGGTTCAGTTAAACCTGAAAACGTTGCAGAATATATGGCTTGCCCAGACGTTGACGGTGCCCTTGTAGGTGGAGCTTCACTTGAAGCAGAAAGCTTCCTTGCCTTATTAGATTTTGTTAAA

SEQ ID NO: 14794 - protein, 252 aa, Streptococcus agalactiae; identical to SEQ ID NO: 1446

SEQ ID NO: 14795 - protein, 690 aa, Streptococcus agalactiae; identical to SEQ ID NO: 10327

SEQ ID NO: 14796 - protein, 230 aa, Streptococcus agalactiae; identical to SEQ ID NO: 1448

SEQ ID NO: 14797 - protein, 2043 aa, Streptococcus agalactiae
ATGTTGAATCGTAAAAAAAGGTATCGTCTCACTGTAAAAAAGCAAAATGCTAGCATACCTAGACGATTAAATCTTCTATTTTTTATTATTGTTTTATTATTTACTGTTCTAATTCTTCGTTTAGAGCAAATGCAGATTGGGCAACAATCATTTTACATGAAAAAACTGACAGCTCTTACGAGTTATACAGTGAAAGAATCAAAAGCGAGAGGTCAGATTTTTGATGCTAAGGGAGTTGTCTTAGTTGAAAATGATGAACGTCCTACTGTGGCGTTTTCTAGAGGAAACAATATTTCATCTCAGTCTATCAAAGAGTTAGCGAATAAATTATCACATTACATTACCTTAACCGAAGTTGCTTCAAGCGATAGAGCAAAGAGAGATTATTATTTAGCAGATAAAGCCAACTACAAAAAAGTTGTTGAAAGTTTACCAGATTCTAAACGTTACGATAAATTTGGTAACCATCTAGCCGAATCAACCGTATATGCAAATGCAGTTGCTGCAGTTCCAGTGAGCGCTATTAACTATTCTGAAGATGAGTTAAAAGTGGTTGCCTTATTTAACCAAATGAATGCGACACCAACGTTTGGTTCAGTGAAATTAAGTACAGGTGAATTAAGTGATGATCAAATCAAGAAACTGGATGCTGATAAGAAGGAACTGTTAGGAATTTCTGTAACAAGTAATTGGCATCGTCGTAAAAAAGGAACTTCTTTATCGGATATATTAGGTACTATTTCTACAGAAAAGGCAGGTTTACCAAGAGAAGAAGTTAAAAAATATTTGAAAAAAGGCTATTCACTGAATGACCGAGTGGGAACTTCTTACCTTGAAAAACAATATGAAGATGACTTACAAGGAATCAGACAAATTCGCAAAGTAGTTGTTAATAAAAAAGGTAAAGTTGTTTCAGATAATATTACGCAAGAAGGTAAGTCAGGAAGAAATCTTAAATTAACGATTGATCTTAATTACCAAAACAAAGTAGAAAGTATCTTGAAACAATACTATGGCAGTGAATTATCTAGTGGGCGCGCTAGTTTTTCCGAAGGGATGTATGCAGTTGCTATAGAACCTTCAACTGGTAAAGTGTTAGCAATGGCTGGGCTGAAAAATGATCATGGGAATTTAGTTGATGACAGCCTAGGCACTATTGCTAAGAATTTCACGCCAGGATCTGTTGTGAAAGGTGCGACGCTATCATCAGGATGGGAAAATAAAGTTCTTAGAGGAAATGAAGTGCTTTATGACCAAGAAATTGCTAATATACGGTCATGGTTTACACGAGGTTTGACTCCAATATCTGCGGCACAAGCGCTAGAGTATTCATCTAATACTTATATGGTTCAAGTAGCACTTCGTTTAATGGGACAAGACTATAATACAGGAGATGCTTTAACTGATCGAGGCTATCAAGAAGCAATGGCTAAACTAAGGAAAACTTACGGCGAATATGGTTTAGGGGTTTCTACAGGATTAGATTTACCTGAATCAGAAGGTTATGTACCTGGAAAATACAGCTTAGGAACAACTCTAATGGAATCGTTCGGTCAGTATGATGCCTATACACCAATGCAACTTGGTCAGTATATCTCAACTATTGCGAATAATGGGAATCGTTTAGCACCTCACGTGGTTTCAGATATCTATGAAGGGAATGATTCTAATAAGTTCGCTCAATTGGTTCGTTCAATCACTCCTAAAACACTAAATAAGATAGCTATCTCAGATCAAGAGTTAGCCATTATTCAAGAAGGTTTTTATAACGTTGTCAATAGTGGAAGTGGCTATGCAACTGGTACGTCAATGAGGGGGAATGTGACAACCATTAGTGGTAAAACTGGTACCGCTGAAACATTTGCTAAAAATATAAATGGACAAACAGTTTCTACCTACAACTTAAACGCTATTGCCTACGATACTAATCGTAAAATAGCAGTAGCGGTAATGTATCCGCATGTTACAACTGATACAACAAAATCCCATCAATTAGTTGCACGAGATATGATTGATCAATATATTTCACAGTTCACAGGACAA

SEQ ID NO: 14798 - protein, 681 aa, Streptococcus agalactiae
MLNRKKRYRLTVKKQNASIPRRLNLLFFIIVLLFTVLILRLEQMQIGQQSFYMKKLTALTSYTVKESKARGQIFDAKGVVLVENDERPTVAFSRGNNISSQSIKELANKLSHYITLTEVASSDRAKRDYYLADKANYKKVVESLPDSKRYDKFGNHLAESTVYANAVAAVPVSAINYSEDELKVVALFNQMNATPTFGSVKLSTGELSDDQIKKLDADKKELLGISVTSNWHRRKKGTSLSDILGTISTEKAGLPREEVKKYLKKGYSLNDRVGTSYLEKQYEDDLQGIRQIRKVVVNKKGKVVSDNITQEGKSGRNLKLTIDLNYQNKVESILKQYYGSELSSGRASFSEGMYAVAIEPSTGKVLAMAGLKNDHGNLVDDSLGTIAKNFTPGSVVKGATLSSGWENKVLRGNEVLYDQEIANIRSWFTRGLTPISAAQALEYSSNTYMVQVALRLMGQDYNTGDALTDRGYQEAMAKLRKTYGEYGLGVSTGLDLPESEGYVPGKYSLGTTLMESFGQYDAYTPMQLGQYISTIANNGNRLAPHVVSDIYEGNDSNKFAQLVRSITPKTLNKIAISDQELAIIQEGFYNVVNSGSGYATGTSMRGNVTTISGKTGTAETFAKNINGQTVSTYNLNAIAYDTNRKIAVAVMYPHVTTDTTKSHQLVARDMIDQYISQFTGQ

SEQ ID NO: 14799 - protein, 594 aa, Streptococcus agalactiae; identical to SEQ ID NO: 10331

SEQ ID NO: 14800 - protein, 198 aa, Streptococcus agalactiae; identical to SEQ ID NO: 1452

SEQ ID NO: 14801 - protein, 1044 aa, Streptococcus agalactiae
ATGTCAAAAGAAACATTGATCTTGCTTTACGGTGGTCGCTCTGCGGAACGTGAAGTATCTGTACTGTCTGCAGAAAGCGTCATGCGTGCTATTAATTATGATAAATTTTTTGTTAAAACTTATTTTATCACGCAAGTAGGTCAATTTATTAAAACACAAGAATTTGATGAAATGCCATCTTCAGATGAAAAGTTAATGACAAACCAAACTGTTGATTTAGACAAAATGGTTCGTCCAAGTGATATCTATGATGATAATGCAATTGTTTTCCCCGTTTTACATGGACCAATGGGGGAAGATGGTTCTATCCAAGGATTTTTAGAAGTTTTAAGGATGCCTTATGTTGGGACTAATATTCTATCTTCAAGCGTGGCTATGGATAAAATTACAACAAAACAAGTCCTTGCAACAGTAGGTGTACCTCAGGTTGCATATCAAACTTATTTTGAGGGTGATGATTTGGAACATGCGATTAAACTCTCTTTAGAAACTTTAAGTTTCCCAATTTTTGTAAAACCGGCTAATATGGGGTCATCAGTAGGTATTTCAAAAGCGACAGATGAATCCTCACTTCGCTCTGCAATTGACTTAGCTCTCAAGTATGATAGCCGTATTTTGATTGAACAAGGCGTGACAGCTCGTGAAATTGAAGTAGGTATTTTAGGCAATAATGATGTTAAGACAACTTTTCCTGGCGAAGTTGTTAAAGACGTCGATTTCTATGACTATGACGCCAAATATATTGATAATAAAATTACTATGGATATTCCAGCTAAAGTTGATGAAGCAACTATGGAAGCAATGCGTCAATATGCAAGTAAAGCTTTTAAAGCAATCGGGGCTTGTGGTTTATCACGCTGTGATTTCTTTTTGACGAAAGATGGACAAATCTTCTTAAACGAACTGAATACAATGCCCGGTTTTACTCAGTGGTCAATGTATCCTCTGCTTTGGGAAAATATGGGGCTAACTTATAGTGATTTGATTGAAAAGTTAGTTATGTTAGCTAAAGAAATGTTTGAAAAACGTGAGAGTCATTTAATT

SEQ ID NO: 14802 - protein, 348 aa, Streptococcus agalactiae; identical to SEQ ID NO: 1454

SEQ ID NO: 14803 - protein, 1365 aa, Streptococcus agalactiae
ATGAAGCTTAGTTTGCATGAAGTTGCTAAAGTAGTTGGCGCTAAAAATCAAGTATCAGAGTTTGAAGACGTTCCCCTGGGAAATATTGAATTTGATAGTCGTAATATCAGTGAAGGTGACTTATTTCTTCCCTTAAAAGGAGCAAGAGATGGACATGAGTTTATAGAGATGGCTTTTGATAATGGAGCAATAGCAACCATTTCAGAGAAGGAAATAGAGGGTCATCCTTATCTTTTAGTGTCTGATGCACTTAAAGCATTTCAAGTCTTGGCACAGTATTATATTGAAAAGATGAACGTTGATGTTATTGCAGTAACTGGCTCAAATGGTAAGACAACAACTAAAGATATGATAGCTGCAATCTTATCAACCACATATAAGACTTATAAAACACAAGGAAACTACAATAACGAGATTGGCTTACCATATACTGTGCTACACATGCCAGAAGATACTGAAAAAATTGTTTTGGAGATGGGACAGGATCATCTTGGAGATATCCATGTGTTATCTGAAATTGCAAAACCACGTATTGCTGTTGTTACTTTGATTGGTGAAGCACACTTAGAATTTTTTGGTAGTCGAGAAAAGATTGCAGAAGGGAAAATGCAAATCACAGATGGTATGAGTTCAGATGGCATATTAATTGCACCGGGAGATCCAATTATTGATCCATATCTTCCAGCAAACCAGATGACTATTCGTTTTGGCCATGACCAAGAATTGCAAGTGACAGAACTCAAAGAAGAAAAACATTCCTTAACTTTTAAAACTAATGCTTTGGAGCACCAATTACGTATACCAGTACCTGGTAAGTACAATGCAACTAATGCGATGGTCGCTGCCTATGTTGGAAAATTATTAGCAGTAGCAGAAGAAGATATAGTGGATGCTCTAGAAAATCTTCAACTAACTCGTAATCGCACCGAATGGAAGAAATCAGCCAATGGAGCAGATATTTTATCAGATGTTTACAATGCTAACCCAACGGCTATGCGATTGATACTAGAAACCTTTTCAGCTATTCCCAATAATGATGGTGGAAAGAAGATTGCTCTTTTAGCTGATATGAAAGAACTGGGAGAACAATCTGTGGATTTACATAATCAAATGATTATGAGTATCAGACCTGACTCTATTGATACTTTGATTTGTTATGGCCAGGATATTGAGGGGTTAGCTCAATTAGCAAGCCAGATGTTCCCAATTGGTAAAGTGTATTTCTTTAAAAAGAATCAAGAAGTGGATCAGTTTGATCAATTGCTTGCAAAAGTAAAAGATACTCTTAAGGAGAAAGATCAAATATTATTAAAAGGTTCTAACTCAATGAATCTTTCTAAAATAGTTGATATTCTTGAAGTAGGA

SEQ ID NO: 14804 - protein, 455 aa, Streptococcus agalactiae
MKLSLHEVAKVVGAKNQVSEFEDVPLGNIEFDSRNISEGDLFLPLKGARDGHEFIEMAFDNGAIATISEKEIEGHPYLLVSDALKAFQVLAQYYIEKMNVDVIAVTGSNGKTTTKDMIAAILSTTYKTYKTQGNYNNEIGLPYTVLHMPEDTEKIVLEMGQDHLGDIHVLSEIAKPRIAVVTLIGEAHLEFFGSREKIAEGKMQITDGMSSDGILIAPGDPIIDPYLPANQMTIRFGHDQELQVTELKEEKHSLTFKTNALEHQLRIPVPGKYNATNAMVAAYVGKLLAVAEEDIVDALENLQLTRNRTEWKKSANGADILSDVYNANPTAMRLILETFSAIPNNDGGKKIALLADMKELGEQSVDLHNQMIMSIRPDSIDTLICYGQDIEGLAQLASQMFPIGKVYFFKKNQEVDQFDQLLAKVKDTLKEKDQILLKGSNSMNLSKIVDILEVG

SEQ ID NO: 14805 - protein, 1163 aa, Streptococcus agalactiae
ATGCTAGGATCAACTTATGCTTGGAGTGTGTTTCGTAACCCAATTATCTCAGAGACTGGTTGGGATATTTCATCAGTTTCATTCGCTTTTAGTTTGGCTATTTTTTGTCTAGGAATGTCTGCAGCTTTTATGGGACACTTAGTAGAGCGTTTTGGTCCTAGGATAATGGGAATGATTTCTGCTATTTTATATGGAGCAGGGAATGTGTTAACAGGCTTAGCCATTGAAACTCAGCAGTTATGGTTACTGTATGTTGCATACGGTATTTTAGGAGGAATCGGACTTGGTTCAGGTTATATTACTCCAGTATCGACTATTATTAAATGGTTTCCTGATAGGAGGGGACTAGCAACAGGATTCGCTATTATGGGATTGGCTTTGCTTCTTTAGTAACAAGTCCGCTTGCACAATCCTTACTGATTAGGATTGGTGTGGGTAAAACGTTTTATATTTTGGGATTAGTATATTTTTTTGTCATGATGATTGCCTCACAATTTATTAAACAACCACCTCAGGAAAAAATAACTATTTTGACTCACGATGGTAAAAAGAATGCTATGAATTCACAAATTATCACTGGATTAAAAGCAAACGTCGCTATAAAATCAAAAACCTTTTACATCATTTGGTTGACCTTGTTTATTAATATTTCGTGTGGCTTAGGTTTAATATCAGCAGCTTCACCAATGGCACAAGATTTAGCAGGCTATTCCGCAGAATCTGCAGCCTTATTAGTAGGGGTACTAGGGATATTTAACGGTTTTGGACGTCTGTTATGGGCAAGTCTCTCTGACTACATTGGACGCCCGTTGACCTTTATAATATTATTTATTGTGAACTTTATTATGACTTCTAGTTTATTTTTGTCATTCAATGCTATTGTATTTGCAATAGCGATGTCTATTTTAATGACTTGTTATGGTGCAGGTTTTTCCTTATTACCTGCTTATCTAAGTGATATTTTTGGAACAAAGGAATTAGCTACTTTACATGGTTATAGTTTAACAGCATGGGCAATAGCAGGTCTGTTTGGGCCCCTATTGTTATCAAAGACATATTCATGGGGAAATTCCTATCAATTGACATTAATGGTTTTTGGTTTTTTATTCTTATTCGGATTATTGTTATCTCTATATTTAAGAAAATTAACAACTAAAGTTGTG

SEQ ID NO: 14806 - protein, 388 aa, Streptococcus agalactiae
  VARIANT 125: Xaa = Any Amino Acid
MLGSTYAWSVFRNPIISETGWDISSVSFAFSLAIFCLGMSAAFMGHLVERFGPRIMGMISAILYGAGNVLTGLAIETQQLWLLYVAYGILGGIGLGSGYITPVSTIIKWFPDRRGLATGFAIMGXGFASLVTSPLAQSLLIRIGVGKTFYILGLVYFFVMMIASQFIKQPPQEKITILTHDGKKNAMNSQIITGLKANVAIKSKTFYIIWLTLFINISCGLGLISAASPMAQDLAGYSAESAALLVGVLGIFNGFGRLLWASLSDYIGRPLTFIILFIVNFIMTSSLFLSFNAIVFAIAMSILMTCYGAGFSLLPAYLSDIFGTKELATLHGYSLTAWAIAGLFGPLLLSKTYSWGNSYQLTLMVFGFLFLFGLLLSLYLRKLTTKVV

SEQ ID NO: 14807 - protein, 684 aa, Streptococcus agalactiae
ATGATAGAATTCTTTTCTAATATCAGAACAGAGATTCCGCAGATGCCTTTACTTATCCATAGTTTGATTTTATCTGTCTTACCTTTTCTGATGTGGCTGACTTTGGTTAATAGAGATAAGCCTTTGTATAAAACTATTTGGAGTATCCTTTTAGGACTTCAGTTAATTACGATTTATACTTGGTTTTTCTGGGCAAAATTGCCTTTATCTGAAAGTCTTCCCCTTTACCATTGTCGAATAGGCATGTTTGTCGTTCTCTTAGCGAGGCCTAGAATATTAAAGGATTATTTCGCATTGTTAGGAGTAGTAGGTGGAGTATTGGCAATGATTCACCCAGACTTTTACCCTTACCAGTTTCTACATGTGACTAATATTTTCTTCTTTATTGGACATTTTGCTTTATTTGTCCTTAGTTTACTACATCTGATGACACAGTCCAATTTGGACAAATTAAATCCAAAATTGATTATACAACTAACGCTTCTCATTAATATGTCTTTGATTTTTATTAACCTCTTGACTGGGGGAAATTATGGCTTTATGATGAAGACACCAATACTAGGAATAACAAATCCCTTTTTAAACCTTTTGATAGTGACAACTCTATTAAGTTTTCTCGTCCTATTTGTTAAACAAATTTTCCAAAAAGTGAGAATGAGAGCTAGTTTTAAAACAGAAGAATCT

SEQ ID NO: 14808 - protein, 228 aa, Streptococcus agalactiae
MIEFFSNIRTEIPQMPLLIHSLILSVLPFLMWLTLVNRDKPLYKTIWSILLGLQLITIYTWFFWAKLPLSESLPLYHCRIGMFVVLLARPRILKDYFALLGVVGGVLAMIHPDFYPYQFLHVTNIFFFIGHFALFVLSLLHLMTQSNLDKLNPKLIIQLTLLINMSLIFINLLTGGNYGFMMKTPILGITNPFLNLLIVTTLLSFLVLFVKQIFQKVRMRASFKTEES

SEQ ID NO: 14809 - protein, 558 aa, Streptococcus agalactiae
ATGAAAATTGATAAAAGGCATCTTCTGAATTATTCCATCCTCATTCCCTATTTGATATTGTCTATTCTAGGCTTAATTGTAATTTATTCGACAACTAGTGCAACTCTAATTCAGCTTGGAGCTAACCCTTTTCGTTCAGTAATCAACCAGGGTGTCTTTTGGGCAGTCAGTTTGGTTGCAATTATCTTTATCTATAAACTGAAACTAAATTTTTTGAAAAATTCTAAAGTGTTGACTATGGCAGTATTGGTAGAAGTATTTTTGCTACTAATAGCGCGCTTTTTCACACAAGAAGTTAATGGAGCACATGGTTGGATTGTTATTGGTCCTATTAGTTTTCAACCTGCTGAATATTTAAAAGTTATCATTGTATGGTATTTAGCGTTTACTTTTGCTCGAAGGCAAAAAAAGATAGAAATATATGATTATCAAGCTTTGACAAAAGGGAGATGGCTTCCGAGATCACTAAGCGACCTAAAAGATTGGCGATTTTATTCTTTATTTATGATTGGTTTGGTAATTGCACAACCTGATTTAGGAAATGGTTCGATAATGTTC

SEQ ID NO: 14810 - protein, 186 aa, Streptococcus agalactiae
MKIDKRHLLNYSILIPYLILSILGLIVIYSTTSATLIQLGANPFRSVINQGVFWAVSLVAIIFIYKLKLNFLKNSKVLTMAVLVEVFLLLIARFFTQEVNGAHGWIVIGPISFQPAEYLKVIIVWYLAFTFARRQKKIEIYDYQALTKGRWLPRSLSDLKDWRFYSLFMIGLVIAQPDLGNGSIMF

SEQ ID NO: 14811 - protein, 577 aa, Streptococcus agalactiae
ATGGCAGCAAGTGCCACAAGGTTTCCGTTTTGTAGCAACCGTTGTAGATAGTCAGACGCGTGTCTTGCCGGGAAAATTGGTAACTTTGTCAGAGGTGACAACTGGTCAGCCTAAAATTATTGCAAGTGTAAAAACGAATGATGCCGGACAAGCTATTTTTAATAATCTCCCTATAAAACGTAACCTTAGTGTGTCTGTTGATGGACAAGTAAAAGGATATACTATTCGAACTGACGTAGCAGGCTCTAGTAAAGCAGCTAGTTTTACAGCAACAGGAGTAGGGACAAATGAGCCAACGTATTCAAAAAAAACCATAGACATTACAGTGAGAGACCAAAATGCTGAACCTGTTTCAGGCAGGACAGTTACCTTAAAAACACATGCTGGTCGTGAGATTGCTAGCTTGGTTTCTGGTGACAATGGATTAACTCGCTTTACTGATCGTTTACTAGATGGAACATTCTACCAATATTTTGTTGATGGGAAAAAATTGGTGATATTGTACCTGGAGAATCAAGAAGTGCATATGTTAATGTTGCACCTAAAAAAGATTATTTTACCTTTACAGTCACTGCTT

SEQ ID NO: 14812 - protein, 193 aa, Streptococcus agalactiae
  VARIANT 6: Xaa = Any Amino Acid
MAASAXQGFRFVATVVDSQTRVLPGKLVTLSEVTTGQPKIIASVKTNDAGQAIFNNLPIKRNLSVSVDGQVKGYTIRTDVAGSSKAASFTATGVGTNEPTYSKKTIDITVRDQNAEPVSGRTVTLKTHAGREIASLVSGDNGLTRFTDRLLDGTFYQYFVDGKKLVILYLENQEVHMLMLHLKKIILPLQSLL

SEQ ID NO: 14813 - protein, 481 aa, Streptococcus agalactiae
TTGACTGATATTACTGATGGTAAAGCAGTAGCGCTTGCTTCTTTAAAAACGAATGATAATGGACAAGCTATCTTTACCAACCTACCATTATCAAGAAATATCAGTGTTTCAATTGATGGAAAATCAAAGGGCTATACTCTTCGAACTGATGTAGCAGGCTCTCATAAAGCGGCTGCATTCTATGTAGATGGTAAAGGTACCAAAGCACCTCAATTTAGTGCAGAAGCAGCGGTTGTAACTATTTACGATGCTAATGGAAATACTATAGCAAACCAAGAAGTGACATTAACTAATTCAAATGGGACAATTGTTGCAAAAGGTTTGACTGAAAAAGATGGCAAAGCAAGGTTCGCCAATAAATTAATGGGAGGAACGTTATACAATATTTTTGTAAATGGTATTGAGATGCCTAAAACTGCCCTTGTTGGTAGTGATGTCAGTGTTTTTCTACAGAAACATAAGAAAGAAAACCTGTTACTCC

SEQ ID NO: 14814 - protein, 162 aa, Streptococcus agalactiae
  VARIANT 153, 154: Xaa = Any Amino Acid
MTDITDGKAVALASLKTNDNGQAIFTNLPLSRNISVSIDGKSKGYTLRTDVAGSHKAAAFYVDGKGTKAPQFSAEAAVVTIYDANGNTIANQEVTLTNSNGTIVAKGLTEKDGKARFANKLMGGTLYNIFVNGIEMPKTALVGSDVSVFLTDXXLRKKTCYS

SEQ ID NO: 14815 - protein, 192 aa, Streptococcus agalactiae
TTGGATAAAGAAATGAACCAAGAGAAGGAAAAGGAGCTCTTAGATACTCCAAAACCAGTACCACCTACTTCGAAACCAACAGCACCAATTAAAAATAAAAAGGACGATTCCCCTAAGAAGTTTACGAAAAGTCAACCTTCTAGTTTGAAAGTCAGTGTTAAGGCTATAGGTGCTAAGCCAAAAGCTNNNNNT

SEQ ID NO: 14816 - protein, 64 aa, Streptococcus agalactiae
  VARIANT 63, 64: Xaa = Any Amino Acid
MDKEMNQEKEKELLDTPKPVPPTSKPTAPIKNKKDDSPKKFTKSQPSSLKVSVKAIGAKPKAXX

SEQ ID NO: 14817 - protein, 1539 aa, Streptococcus agalactiae
ATGACATTACAAGACGAAATCAAAAAACGCCGTACTTTTGCCATCATCTCTCACCCGGATGCTGGTAAGACGACTATTACTGAGCAATTATTATATTTTGGTGGTGAAATTAGAGAAGCAGGGACAGTAAAAGGGAAAAAATCAGGTACTTTTGCAAAGTCCGACTGGATGGATATTGAAAAGCAACGGGGTATCTCTGTTACTTCATCTGTTATGCAATTTGATTACGCGGGTAAACGTGTTAATATTTTGGATACACCTGGACATGAGGATTTCTCGGAAGATACATACCGGACCTTAATGGCTGTGGATGCAGCTGTCATGGTTGTAGATTCGGCTAAAGGTATTGAGGCTCAAACTAAAAAACTTTTTGAAGTTGTTAAGCATCGTAATATTCCGGTTTTTACGTTTATTAATAAATTGGACCGTGATGGACGTGAGCCACTGGATTTGCTTGAAGAGTTAGAAGAAGTACTAGGTATTGCTTCTTATCCAATGAATTGGCCAATTGGTATGGGGAAATCATTTGAAGGGCTTTATGATTTACATAATAAACGTTTAGAACTCTATAAAGGAGACGAGCGTTTTGCAAGTATTGAAGACGGTGATCAGCTGTTTGCCAATAATCCATTTTATGAACAAGTCAAAGAAGATATTGAACTTCTTCAAGAAGCAGGTAATGACTTTTCAGAACAAGCTATTCTTGATGGTGACCTAACTCCAGTATTCTTTGGCTCTGCCCTTACGAACTTTGGAGTTCAGACTTTTCTTGATACTTTCTTGGAGTTTGCTCCAGAACCTCATGGTCACAAGACTACAGAAGGTAATGTTATTGACCCCTTAGCTAAAGATTTTTCAGGTTTTGTCTTTAAAATTCAAGCTAACATGGACCCACGTCATCGCGACCGTATTGCTTTTGTTCGTATTGTTTCTGGTGAATTTGAGCGCGGCATGGGAGTTAATTTGACACGCACTGGTAAAGGCGCTAAGCTCTCCAATGTTACTCAATTTATGGCAGAATCACGAGAAAATGTGACGAATGCTGTTGCTGGGGATATTATCGGGGTTTATGATACAGGAACTTATCAAGTTGGGGATACCTTAACGGTTGGGAAAAATAAATTTGAATTTGAACCATTACCAACTTTTACCCCAGAATTATTTATGAAAGTATCAGCAAAAAATGTTATGAAGCAGAAATCATTCCACAAGGGTATTGAGCAATTAGTACAAGAAGGAGCAATCCAGCTTTATAAGAATTATCAGACAGGCGAATACATGCTGGGGCTGTGGGTCACTTCAGTTTGAAGTTTTTAACATCGTATGGAAGGTGAATACAATGCTGAAGTTGTTATGACACCAATGGGTAAAAAGACTGTACGTTGGATTAACTCAGACGATTTAGACGAACGCATGTCCTCAAGCCGAAATATTTTAGCAAAAGATCGTTTTGACCAACCAGTTTTCCTATTTGAAAATGATTTTGCACTTCGCTGGTTTGCTGATAAGTATCCTGATGTGAAGCTTGAAGAAAAAATG

SEQ ID NO: 14818 - protein, 514 aa, Streptococcus agalactiae
  VARIANT 434: Xaa = Any Amino Acid
MTLQDEIKKRRTFAIISHPDAGKTTITEQLLYFGGEIREAGTVKGKKSGTFAKSDWMDIEKQRGISVTSSVMQFDYAGKRVNILDTPGHEDFSEDTYRTLMAVDAAVMVVDSAKGIEAQTKKLFEVVKHRNIPVFTFINKLDRDGREPLDLLEELEEVLGIASYPMNWPIGMGKSFEGLYDLHNKRLELYKGDERFASIEDGDQLFANNPFYEQVKEDIELLQEAGNDFSEQAILDGDLTPVFFGSALTNFGVQTFLDTFLEFAPEPHGHKTTEGNVIDPLAKDFSGFVFKIQANMDPRHRDRIAFVRIVSGEFERGMGVNLTRTGKGAKLSNVTQFMAESRENVTNAVAGDIIGVYDTGTYQVGDTLTVGKNKFEFEPLPTFTPELFMKVSAKNVMKQKSFHKGIEQLVQEGAIQLYKNYQTGEYMLGAVGHXQFEVFKHRMEGEYNAEVVMTPMGKKTVRWINSDDLDERMSSSRNILAKDRFDQPVFLFENDFALRWFADKYPDVKLEEKM

SEQ ID NO: 14819 - protein, 378 aa, Streptococcus agalactiae
ATGGGAATTTTTTCGGGATTAATGGGAAATGCTTCACAAGTGGATACCGATAAAGTCGAGAATCAGTTATCTGATATTCTGATTCCAGGTGAACAGGTTGATTTAGCTTATACTTTAATTCGTGATTTGATTGTTTTTACTAATTATCGTTTAATTTTAGTCGATAAACAGGGGGTGACAGGTAAAAAGGTTTCTTATAATTCTATACCTTATGCTTCTATATCACGTTTTACAGTGGAAACTAGTGGTCATTTTGATTTAGATGCTGAGTTAAAGATTTGGATATCATCAGCAATAGAACCAGCAGAAGTACTTCAGTTTAAGAACGACCGTAACATAGTGAGTATACAGAAAGCTTTGGCGATAGCTGTTTTAAAA

SEQ ID NO: 14820 - protein, 126 aa, Streptococcus agalactiae
MGIFSGLMGNASQVDTDKVENQLSDILIPGEQVDLAYTLIRDLIVFTNYRLILVDKQGVTGKKVSYNSIPYASISRFTVETSGHFDLDAELKIWISSAIEPAEVLQFKNDRNIVSIQKALAIAVLK

SEQ ID NO: 14821 - protein, 732 aa, Streptococcus agalactiae
ATGATAATAGAATTAAAGAGTGTTGGGAAAATTTTTCCAAAATCACAGTTTAGATTAGATGATATTTCTTTTAATATAGCAGAAGGCGAGATAGTTGGTCTGATTGGTTCTAATGGTACTGGAAAGAGTACTATTTTGAAGATGATTAATGGCTTAATCCCTTATGATAAAGGAAATATTTATTATCAAGGAAAAGAAGTGAAGTCTTTTTCTGATAATAAGTTACGTCAGATGCGTAAAGATATTGCTTATATTTTTCAAAATCATAATTTGTTAGCAGGAGAAAGTGTATATTATCATCTAGCTTTAGTTTATAAATTAAATCATCAAAAAGTAAATCATGACGCAATTAATGATATCTTAGATTTTTTAGGTTTGATGGATTTAAAACAGGTGAAATGCCATAGTTTGAGTGGTGGGCAGCAACAAAAAGTTGCAATCGCTATGGCTGTTTTGCAAAAACCGAAACTTATTCTATGTGATGAGATCAGCTCTGCCTTAGATACTAATAGTGAAAAAGAGATATTTAACTTGTTGTCTGATCTTCGTGAAAAATATGGTATCTCTATCTTGATGATTGCTCATCACCTATCTCTTTTAAAACAATATTGTGATCGTGTAATGATTTTGGATCACCAGACTATTGTAGATACTGTTGTTCCAGTGAAAGCAACTCTGAATCAATTAAAGTCAAACTACGTAGATCAAGTAAAGGAGTTTTTGTTACATGAT

SEQ ID NO: 14822 - protein, 244 aa, Streptococcus agalactiae
MIIELKSVGKIFPKSQFRLDDISFNIAEGEIVGLIGSNGTGKSTILKMINGLIPYDKGNIYYQGKEVKSFSDNKLRQMRKDIAYIFQNHNLLAGESVYYHLALVYKLNHQKVNHDAINDILDFLGLMDLKQVKCHSLSGGQQQKVAIAMAVLQKPKLILCDEISSALDTNSEKEIFNLLSDLREKYGISILMIAHHLSLLKQYCDRVMILDHQTIVDTVVPVKATLNQLKSNYVDQVKEFLLHD

SEQ ID NO: 14823 - protein, 659 aa, Streptococcus agalactiae
ATGATTGACATTATTGAAAAACATGGCGAAGGTATCTTAAAATCATTTTGGGAAACCAATTTAATGTTAGGGTTAACCTTGATTCTTTGTTTTCTAATTGCTTTTCCAACAGGTATTTTATTGTTTTCATTGAGAAAGTCTTACTTGATTAAACATTCTTTAGCCTATCAACTACTAAATTTATTTTTAGGTACGTTACGGAGTGTCCCTTTCCTTATTTTTATTTTTATCTTAATCCCTCTCAATCGATTAATTTTTGGGACCTCATTTGGAACGATAGCGGCAATCTTACCTCTTACTTTGGTTTCAGTCAGTTTGTATGCACGTTATGTGGAACAAGCTTTATTAAATATACCTCAAGTTGTTGTAGATCGAGCTCTCAGTCTAGGGGCTAACAAGAGACAGATAATTTATTATTTTTTAATCCCCCCATCAAGATTGACCTTGTTTTATCATTTACTGCAACGGCTATAAGTATTCTTGGCTACTCGACAATAATGGGAGTTATTGGTGCAGGAGGTTTGGGTGAATATGCCTATCGTTTTGGCTATCCAGAGTATGACTACCCAGTTATGTACTTGATTGGTGGCTTATTTATAATATATGGGGTTATCCTACAGAAGTTTGGCTATTTTTATAGCAACCGCTACTCCAGAAAA

SEQ ID NO: 14824 - protein, 220 aa, Streptococcus agalactiae
MIDIIEKHGEGILKSFWETNLMLGLTLILCFLIAFPTGILLFSLRKSYLIKHSLAYQLLNLFLGTLRSVPFLIFIFILIPLNRLIFGTSFGTIAAILPLTLVSVSLYARYVEQALLNIPQVVVDRALSLGANKRQIIYYFLIPSIKIDLVLSFTATAISILGYSTIMGVIGAGGLGEYAYRFGYPEYDYPVMYLIGGLFIIYGVILQKFGYFYSNRYSRK

SEQ ID NO: 14825 - protein, 161 aa, Streptococcus agalactiae
ATGGGAGTTTTGGTGCAGGAGGTTTGGGTGAATATGCCTATCGTTTTGGCTATCAAGAGTATGACTACCCAGTTATGTACTTGATTGTTGTCTTATTTATAATATATGTGTTTATCTTACAGAGTTTGGGCTATTTTATAGCAAACCGCTACTCAAGAAAA

SEQ ID NO: 14826 - protein, 54 aa, Streptococcus agalactiae
MGVIGAGGLGEYAYRFGYQEYDYPVMYLIVVLFIIYVFILQSLGYFIANRYSRK

SEQ ID NO: 14827 - protein, 846 aa, Streptococcus agalactiae
ATGAAAAAATTACTTTCCCTAACATGTCTAATCATGATGTCTTTATGTTTAGTGGCATGTACTAAGCAAGCAATGTCGTCTAAGCAAGCAATGTCGTCTAAGCAAATTAAAGATAAGAATAGTAAAGAAAAGGTGATTACTGTTGCAACTTACAGCAAACCTACATCTACCTTTTTAGATTTGATTAAAGATAATGTAAAAGAAAAAGGATATACTTTAAAGGTTGTCATGGTCTCTGACTATATTCAGGCTAACATTGCTTTAGAAAACAAAGAACATGATGCTAACCTTTTACAACATGAATTTTTCATGAGTATCTTTAATAAGGAAAATGATGGTCATCTAGTGTCAATTACACCAATTTATCATTCATTGGCTGGTTTTTATGGTCAACATTTGAAAAATATTGCCGAGCTTAAAGACGGTGCTAAGGTAGCGATTCCGTCTGATCCTGCCAATATGACTAGAGCTCTGCTATTATTGCAAGAAAAGAAACTTATCACCTTAAAGAATACGTCCAAAAAGACCAAGGCTATCGAAGATATTATTACTAACCCTAAAAAATTACGAATTGAACCTGTAGCATTACTTAACCTCAATCAGGCCTATTTTGAATATGACCTTGTCTTTAATTTCCCTGGATATGTGACAAAAATCAATCTAGTTCCTAAAAGGGATAGATTATTATATGAGAAAAAACCAGATATCCGTTTTGCAGGTGCCTTGGTAGCTCGTGAAGATAATAAAAATAGTGATAAAATAAAAGTACTTAAAGAAGTACTAACAAGTAAAGAGATTCGTCACTATATCACTAAGGAGATTCCAAGTGAAGCAGACGTTGCGTTC

SEQ ID NO: 14828 - protein, 282 aa, Streptococcus agalactiae
MKKLLSLTCLIMMSLCLVACTKQAMSSKQAMSSKQIKDKNSKEKVITVATYSKPTSTFLDLIKDNVKEKGYTLKVVMVSDYIQANIALENKEHDANLLQHEFFMSIFNKENDGHLVSITPIYHSLAGFYGQHLKNIAELKDGAKVAIPSDPANMTRALLLLQEKKLITLKNTSKKTKAIEDIITNPKKLRIEPVALLNLNQAYFEYDLVFNFPGYVTKINLVPKRDRLLYEKKPDIRFAGALVAREDNKNSDKIKVLKEVLTSKEIRHYITKEIPSEADVAF

SEQ ID NO: 14829 - protein, 1584 aa, Streptococcus agalactiae
TTGAAATTTACAGAACTTAACTTATCGCAAGATATTCTTTCAGCGGTAGAAAAAGCAGGCTTTGTAGAGCCATCACCAATCCAAGAAATGACTATCCCACTTGCTCTTGAAGGCAAAGATGTCATTGGTCAAGCGCAGACAGGTACAGGAAAAACTGCAGCTTTTGGGTTACCAACTTTAAATAAAATTCATACTGAAGATAATACTATTCAAGCACTTATTATTGCTCCTACACGTGAACTTGCAGTACAATCACAAGAAGAATTGTTCCGTTTTGGACGCGATAAAGGTGTTAAGGTCCGCTCTGTTTATGGTGGGTCAAGTATTGAAAAACAAATCAAGGCATTACGTTCAGGAGCACACGTTGTTGTTGGAACTCCAGGTCGATTACTTGATTTAATTAAACGTAAAGCACTTAAACTTAATCACATCGAAACTCTTATTCTTGATGAAGCAGACGAAATGCTTAACATGGGATTTTTAGAGGACATTGAAGCAATCATTAGTCGTGTACCAGAAGCACGTCAAACTCTTTTATTCTCAGCGACAATGCCTGATCCAATCAAACGTATCGGGGTTAAATTCATGAAAGATCCTGAGCATGTTAAAATTAAAGCAACTGAATTAACTAATGTGAATGTTGATCAGTATTATGTTCGCGTTAAGGAAAATGAAAAATTCGATACTATGACACGTTTGATGGACGTTGATCAACCAGAATTGTCAATTGTCTTTGGACGTACGAAACGTCGTGTAGATGAATTAACTCGTGGTCTAAAATTACGTGGTTTCCGAGCAGAAGGAATTCATGGAGACTTAGATCAAAATAAACGTCTTCGTGTTATCAGAGACTTTAAAAATGACCATATTGATATTCTTGTTGCCACAGATGTTGCTGCGCGTGGTTTAGATATTTCAGGCGTTACACATGTTTACAACTATGATATTCCCCAAGATCCAGAAAGTTATGTTCACCGTATTGGACGTACTGGTCGTGCTGGTAAATCTGGTCAATCTATCACTTTTGTTTCACCAAACGAAATGGGATATTTGACAATTATTGAAAACTTAACTAAAAAACGTATGACTGGAATGAAGCCTGCTACTGCAAGCGAAGCATTTCAGGCTAAGAAAAAAGTTGCATTGAAACGTATTGCACGTGACTTTGAGGATCAAGAATTAGTTTCTAAATTTGATAAATTTAAAGCCGATGCTTTAGAATTAGCAACTCAATATACACCAGAAGAACTTGCTCTTTATGTCTTAAGCTTAACAGTTCAGGATCCAGAATCGTTACCAGAAGTTGAAATCACACGTGAAAAACCATTACCATTTAAACCATCAGGTGGTGGCTTTAAAGGTAAAGGTGGACGAGGTAATGGCCGTGGTGGCGATCGTCGACGCAATGATCGTGGTGATCGTCGTGGAAATCGTGACCGTGATGATCGTGGAGGTCGTCGTGATTTTAAACGTCGTGATGATAAGTTCAAGAAAGATAATCGTCGTCAAGAAAATAAAAAACCTCATAAAAACACTTCAAGTGAAAAACAAACTGGATTTGTTATTCGCAACAAAGGCGATAAA

SEQ ID NO: 14830 - protein, 528 aa, Streptococcus agalactiae
MKFTELNLSQDILSAVEKAGFVEPSPIQEMTIPLALEGKDVIGQAQTGTGKTAAFGLPTLNKIHTEDNTIQALIIAPTRELAVQSQEELFRFGRDKGVKVRSVYGGSSIEKQIKALRSGAHVVVGTPGRLLDLIKRKALKLNHIETLILDEADEMLNMGFLEDIEAIISRVPEARQTLLFSATMPDPIKRIGVKFMKDPEHVKIKATELTNVNVDQYYVRVKENEKFDTMTRLMDVDQPELSIVFGRTKRRVDELTRGLKLRGFRAEGIHGDLDQNKRLRVIRDFKNDHIDILVATDVAARGLDISGVTHVYNYDIPQDPESYVHRIGRTGRAGKSGQSITFVSPNEMGYLTIIENLTKKRMTGMKPATASEAFQAKKKVALKRIARDFEDQELVSKFDKFKADALELATQYTPEELALYVLSLTVQDPESLPEVEITREKPLPFKPSGGGFKGKGGRGNGRGGDRRRNDRGDRRGNRDRDDRGGRRDFKRRDDKFKKDNRRQENKKPHKNTSSEKQTGFVIRNKGDK

SEQ ID NO: 14831 - protein, 264 aa, Streptococcus agalactiae
ATGATTAAAGTTCCTGCTTATATGTATGTTTTAGAATGTTCAGATGGAACACTTTATACAGGTTATACTACAGATGTCAAGCGCCGTCTCAATACACACAATACCGGAAAAGGTGCTAAATATACTCGTGCGAGATTGCCAGTAAAACTTCTTTATTCTGAAGCTTTTAATAGCAAACAAGAAGCAATGAGGGCAGAAGCATTATTTAAACAAAAGACTCGGAAAGCAAAATTGACTTATATTAAACAACATAAAAATGAACAA

SEQ ID NO: 14832 - protein, 88 aa, Streptococcus agalactiae
MIKVPAYMYVLECSDGTLYTGYTTDVKRRLNTHNTGKGAKYTRARLPVKLLYSEAFNSKQEAMRAEALFKQKTRKAKLTYIKQHKNEQ

SEQ ID NO: 14833 - protein, 762 aa, Streptococcus agalactiae
ATGATAGATACAATTTTAAAAGAAAATGAACGCATTGATCAGCTTTTTTCAACTGATGTCAAAATCATCCAAAACAAAGAAGTTTTTTCCTACTCCATAGATAGTGTTTTATTGTCTCGGTTCCCTAAACTTCCTTCTCGTGGTCTTATCGTTGACTTATGCAGTGGTAATGGTGCTGTCGGTTTGTTTGCCAGCACCAAAACAAGTGCGACAATTATAGAGATCGAACTACAAGAGCGCCTTGCGGATATGGCTAAGCGTTCAATTAAGCTCAATAAATTGGAAAAACAGGTTACTATGATTAATGATGATTTAAAAAATCTTCTTGATCATGTTCAACGTTCAAACGTTGATTTAATGCTTTGCAATCCACCTTATTTCAAAGCAAGCGAAACCTCTAAAAAAAATCTAAGCCCGCATTATCTCCTTGCAAGACATGAAATAACAACAAACCTTAGAGAGATTTGTCAAATTGCTCAACATGCTCTAAAAACAAAAGGACGTATCGCTATGGTACATCGTCCAGACCGTTTCCTTGAAATTATTGATACGATGCGTCAGTTCAATTTAGCACCTAAACGTATCCAATTTGTTTATCCAAAATTAGGAAAGGATGCTAATATGCTTTTAATTGAAGCTATTAAAGATGGCTCGACAGAAGGTATGAAAATACTTCCTCCTCTTGTTGTTCATCAAGATAATGGAGACTATACTGAGACTATTTTTGATATATATTTCGGGGAAAACGGAAAATCTCATGAT

SEQ ID NO: 14834 - protein, 254 aa, Streptococcus agalactiae
MIDTILKENERIDQLFSTDVKIIQNKEVFSYSIDSVLLSRFPKLPSRGLIVDLCSGNGAVGLFASTKTSATIIEIELQERLADMAKRSIKLNKLEKQVTMINDDLKNLLDHVQRSNVDLMLCNPPYFKASETSKKNLSPHYLLARHEITTNLREICQIAQHALKTKGRIAMVHRPDRFLEIIDTMRQFNLAPKRIQFVYPKLGKDANMLLIEAIKDGSTEGMKILPPLVVHQDNGDYTETIFDIYFGENGKSHD

SEQ ID NO: 14835 - protein, 738 aa, Streptococcus agalactiae
ATGTTCTATACTTACTTACGTACTTTAGTTATGTTCTTGATTTGGGTGGCTAATGGTAATGCGCACTATCATAATGAAGATAAAATGTTAAAAGATGATGAAAATTATATTTTAGTAGCTCCACACAGAACATTTTGGGATCCTGTGTACATGGCTTTTGCTGCTAGACCCAAACAGTTTGTTTTTATGGCCAAAAAAGAATTATTCACGAATCGTTTGTTTGGTTGGTGGATTAAAATGTGCGGTGCTTTCCCTATTGATCGTGAAAAGCCAGGGCAAGACGCTATTCGATATCCTGTAAAGATGCTGAAAAATAGTAACCGTTCTTTGGTGATGTTTCCGAGTGGAAGCCGCCACTCCAAAGATGTCAAAGGAGGCGTAGCTGTTATTGCAAAAATGGCAAAAGTCAGAATTATGCCAGCAGCATATAGAGGTCCTATGGTTTTTAAAAATCTATTAAAGGGGCATCGTGTTGATATGAATTTTGGTAACCCTATTGATGTTTCTGATATTAAGCGTATGGATGCCGAAGGGATTGCAGAAGTATCTCGTCGTATTCAGGAAGAATTTGATCGTTTAGATAGAGAAAATGAAACTTATGATGATGGTAAGAAATTAAATCCATTGACTTATATTTATCGTCTACCTTTAGCAATTATAGCTATTGTCTTGCTTGTCCTAACTCTAATTTTTAGTTATTTAGCAAGCTTTGTGTGGGATCCACAAAAACATCTAAAA

SEQ ID NO: 14836 - protein, 246 aa, Streptococcus agalactiae
MFYTYLRTLVMFLIWVANGNAHYHNEDKMLKDDENYILVAPHRTFWDPVYMAFAARPKQFVFMAKKELFTNRLFGWWIKMCGAFPIDREKPGQDAIRYPVKMLKNSNRSLVMFPSGSRHSKDVKGGVAVIAKMAKVRIMPAAYRGPMVFKNLLKGHRVDMNFGNPIDVSDIKRMDAEGIAEVSRRIQEEFDRLDRENETYDDGKKLNPLTYIYRLPLAIIAIVLLVLTLIFSYLASFVWDPQKHLK

SEQ ID NO: 14837 - protein, 617 aa, Streptococcus agalactiae
ATGTTTGAAATAGTATTGGAAAAAATTAAATCGCATAAATGGGAGACAACAGGAATTATTGTAGGACTCTTATTGTTTGGAATTTTGGGTTTAAATCATTTTGGCACTCATCATAAAGAAGACGATTTAAATATCAATTTAGAGAAAAAAGTATCAACTATAACAGAAAAAAAGGTACCAATGATTAGTCACGTCAAAGATAAAGTATCTAATCAAGTAACGGTTGACGTAAAAGGGGCAGTCAATCATCCAGGTGTTTATAGTTTGCCTTCTCAAAGTCGTGTAACAGATGCGATTAAGCGTGCAGGTGGACTAAGCAATCTCGCTGATAGTAAATCCGTTAATCTAGCACAGAAATTACAAGATGAGACGGTTATCTATGTTGCTCAAAAAGGTGAAAAAATAACTGTTGTGGAAGAGGAGAAAGCAAATAATATTGCTACTCAGGGAAATAGTAAGGGGAAAATTAATCTTAATAAAGCAGATTTATCAAGTCTTCAGACCATATCAGGCGTTGGAGCTAAAAGAGCTCAAGATATTTTAGATTATCGTGATAGTCAAGGTGGTTTTAAAACTATTGATGACCTCAAAATGTATCAGGTATTGGTGAGAAACAC

SEQ ID NO: 14838 - protein, 206 aa, Streptococcus agalactiae
MFEIVLEKIKSHKWETTGIIVGLLLFGILGLNHFGTHHKEDDLNINLEKKVSTITEKKVPMISHVKDKVSNQVTVDVKGAVNHPGVYSLPSQSRVTDAIKRAGGLSNLADSKSVNLAQKLQDETVIYVAQKGEKITVVEEEKANNIATQGNSKGKINLNKADLSSLQTISGVGAKRAQDILDYRDSQGGFKTIDDLKMYQVLVRKH

SEQ ID NO: 14839 - protein, 2007 aa, Streptococcus agalactiae
ATGATGTCCATATCAAGAGCCACATATAGCCAGATTAAAGTGCGTATTGATACTATTTCTATCAATGGTGATGTTTTATCATTCCAGGCAGATGCTTCAGGTAACACTTATCAAGCTTTTTACACATTAAAAAATAAAAGTGAGAAAGATTATTTTCAAAATCTTGATAATAATATAATGATAATTGCAGATATCAAACTTGAAGAAGCAGAGGAGAGAAGGCATTTTAATGGCTTTGATTATCGTCAGTATTTAAAAAGACATGGAATTTATCGTATCGCCAAAGTGACAAAGATAAAACAGATACGCTTATTTCAACATAGGTCTTTCTTTGATCTTATGTTTAAGTGGCGTAGAAGTGCAATTGTTATTAGTCAAACTTTTCCAAATCCTATGCGTCACTATATGTCAGGGCTTTTGTTTGGATATCTAGATAAGACCTTTGATGACATGTCCGATTTATATAGTAGTCTAGGTATTATACATTTATTTGCTTTGTCAGGTATGCAAGTAGGTTTTTTTCTCGGTATTTTTCGTTATATCTGTCTACGTATTGGCTTACGTCTAGACCATGTTTGGTTACTTCAAATACCATTCTCGCTAATTTATGCTGGTTTAACAGGCTTTAGTATCTCAGTCGTTAGGGCACTTATTCAATCTTTATTATCACATAGCGGTGTCAAGAAAGATGAGAACTTTGCTCTCTGCTTGTTAATTTGTCTTATCTCTCTCCCCCACTCACTTTTGACTACGGGAGGAGTTCTTAGCTTTGCTTATGCTTTTATACTTACGATGACCTCCTTTGATCATTTTTCGAGTATAAAAAAAGTAGCTATCGAATCTTTGACAGTCTCTGTAGGAATTCTTCCCATACTAACCTACTATTTTTCGGGTTTTCAACCAATATCAATTATATTAACAGCACTTTTATCTTTTGCATTTGATATTATATTTTTGCCTTTATTAACTGTTATATTTGTCTTATCACCGTTCGTTAAATTAAGTTGTATTAATAGTTTGTTTGAAATCCTAGAAGTATTATTAAAATGGACTGGGCAACTGTTTCCAAGACCACTTATTTTTGGAAAGCCCAGCCTTTTTCTTTTAATAGTCATGATTATAATTTTGGGATTACTTTATGATTATTATCATTCTAAATGTTTTCGTTATTGCTCCCTTCTTATTATCTTTACCTTGTTTTTTATCACTAAGAATCCAATTACTAACGAGGTTGCGATTTTAGATGTTGGACAAGGAGATAGTATTTTAGTGAGGGATTGGTTAGGAAAAACAATTTTAATTGATACTGGGGGAAGGGTGAGATTTGAACAGCCTGAAGAATGGAAACAAAAAGTAAACCAGTCTAATGCTGAGAGAACGCTCATTCCTTACTTGAAAAGCAGAGGTATTAGCAAGATAGATAATTTAGTGATAACTCATACCGATACAGATCATATGGGGGATATGGAAGTTATCTCAAAGCATTTTAAAGTTGCACGTTTGATTACAAGTTCAGGTTCTTTAACGAATTCGCAGTACGTTAAGCGTTTATCAAAGATAGGAGTAGCTGTAAAATCTATAGAAGCTGGTGATAAACTTTCTGTCATGGGAAGTTATTTACAAGTACTTTACCCATGGCACAAGGGTGATGGAAAAAATAATGATTCAATTGTTTTATATGGACATTTATTAGGAAAAGGCTTCTTATTTACCGGTGATTTGGAGGAAGAGGGAGAAAAGCAGTTATTAGAAGCTTATCCTAATTTATCAGTAGATATCCTTAAAGCAGGACATCATGGTTCTAAGGGCTCATCAAGTCTATCCTTTCTGAAAAAGTTGTCTCCTAGTGTGGTTCTAGTGTCAGCTGGTAAAAATAATCGTTACCAGCATCCTCATCAAGAGACTTTACAAAGGTTCCAAAAGATTAAAAGCAAGATTTTCCGAACGGATCAATCAGGTACAATTAGGCTAACAGGATGGTGGAAGTGGCATATTCAGACAGTTCGT

SEQ ID NO: 14840 - protein, 671 aa, Streptococcus agalactiae
MMSNIKESBHISQIKVRIDTISINGDVLSFQADASGNTYQAFYTLKNKSEKDYFQNLDNNIMIIADIKLEEAEERRHFNGFDYRQYLKRHGIYRIAKVTKIKQIRLFQHRSFFDLMFKWRRSAIVISQTFPNPMRHYMSGLLFGYLDKTFDDMSDLYSSLGIIHLFALSGMQVGFFLGIFRYICLRIGLRLDHVWLLQIPFSLIYAGLTGFSISVVRALIQSLLSHSGVKKDENFALCLLICLISLPHSLLTTGGVLSFAYAFILTMTSFDHFSSIKKVAIESLTVSVGILPILTYYFSGFQPISIILTALLSFAFDIIFLPLLTVIFVLSPFVKLSCINSLFEILEVLLKWTGQLFPRPLIFGKPSLFLLIVMIIILGLLYDYYHSKCFRYCSLLIIFTLFFITKNPITNEVAILDVGQGDSILVRDWLGKTILIDTGGRVRFEQPEEWKQKVNQSNAERTLIPYLKSRGISKIDNLVITHTDTDHMGDMEVISKHFKVARLITSSGSLTNSQYVKRLSKIGVAVKSIEAGDKLSVMGSYLQVLYPWHKGDGKNNDSIVLYGHLLGKGFLFTGDLEEEGEKQLLEAYPNLSVDILKAGHHGSKGSSSLSFLKKLSPSVVLVSAGKNNRYQHPHQETLQRFQKIKSKIFRTDQSGTIRLTGWWKWHIQTVR

SEQ ID NO: 14841 - protein, 807 aa, Streptococcus agalactiae
ATGACTATCAAACGTATTTTTTGTGACATGGATGGTACACTATTAAATAGTGAAGGACAAGTGAGTAAAAGTAACGCTACCTTAATACGTGAGGCAGCGATTCCAGTAACTTTAGTGTCTGCTAGGGCACCTATGGAAATGAAGGATGCCGTAGATGCACTTCAATTAGGAGGAGTCCAAGTTGCTTTTAATGGAGGATTGATTTATAGAATAGGAGATAATAATCAAGTTCTACCTATTCATACACAAATCATTAAAAAAAGCACAGTAAAACAATTGCTAAGAGGAATACGGTTCCATTTTCCTCAAGTTAGTTTATCTTATTACGATCTTAATAACTGGTATTGTGATAAAATAGATGAAGGAATCCGATACGAACATAGTTTAACTCAACAATGCCCAACGTTTATTCATAATGAGGATCAGTTTTTAGAAGGTCACACAAATACTTTTAAAATTATGATGATTACTTTCGATGAAGCAAATATGCTAGAATTAGAAAAATATCTTCAAAGTTTGGAGTTACCAGAAATCACTATTCAACGTTCAGGTAAAGCGTATCTTGAAATTACACATCTCTTAGCCAAAAAATCTAAAGGAATTGCTTACATCCTTCAAAAAGAGCAGTTAGCTAGAGAAGAAACGGCTGCATTTGGAGATGGACATAATGATTTGCCTATGCTTGAAATGGTAGGTTACCCTATTGTTATGGATAATGCTTTTGATGATATCAAAGCGATAGCATATCAACTAACTAAGTCTAATGATGAAGACGGAGTGGGATATGGGATTCAAAAATTTTTAAAG

SEQ ID NO: 14842 - protein, 269 aa, Streptococcus agalactiae; identical to SEQ ID NO: 5936

SEQ ID NO: 14843 - protein, 942 aa, Streptococcus agalactiae
ATGACAAGTATTAGTGATATAGCTAAAAAGGCAGGTGTTGCTAAATCAACGGTTTCCCGTGTTATCAATCATCACCCACATGTTTCTGATGAGACGCGACAAAAAGTAATGGCTCTTATCACCGAATTGGATTATATACCAAATCAACTAGCGCGGGATTTAAGTCGAGGCAAAACACAAAAAATAGGTGTCGTCATTCCCCACACGCGCCATCCTTATTTTACACAATTAATAAATGGCCTATTAGATGCTGCTAAAACTACCGACTATCAACTTGTTGTGATGCCTTCGGATTACAACCAAGAATTAGAACTTTCCTACTTGAAACAGCTCAAGATGGAAGCTATTGATGCTTTAATATTCACTTCAAGAGCAATTAGCCTCGACATTATTGAAACTTATGCAAAATATGGACGAATAGTAGTTTGTGAAAAATTGCAGGAATATAATCATCTATCCTCTGCTTACCTTGATCGCTATTCTTCATTTCTAGAGGCATTTTCTGATATGAAGTTACGAGGTTTGGAGCACTTAGTTTTATTATTTTCAAGGAATAATGAATCCTCTGCTACCTATCAATCCGCATTATTAGCTTATCAAGAGGTCTATGGGCAACTATCCTCTCCATATATGGTAGTTGGGAATGTTCATGACTTTAATGATGGACTAAATTTATCTTATCAATTGGTAAAAGAAGTTAGTATAGATGGTATATTAGCTACAAGTGATGAAGTTGCGGCAGGGCTAATAAAAGGTTATGAAGAAAGTAGGAAAAAATGTCCTTATATTATTGGTCAGGAATGTTTATTAGTTGGGCAACTTTTGAAACTCCCAACAATTGACCACAAATCCTATTATTTAGGGAAATTAGCTTTTAAACAGGCTTTAGCTGAAAAGATTAGTCAAGAAGTTTTATTCTCAGAGTTTTTATCTCAAGATAAT

SEQ ID NO: 14844 - protein, 314 aa, Streptococcus agalactiae
MTSISDIAKKAGVAKSTVSRVINHHPHVSDETRQKVMALITELDYIPNQLARDLSRGKTQKIGVVIPHTRHPYFTQLINGLLDAAKTTDYQLVVMPSDYNQELELSYLKQLKMEAIDALIFTSRAISLDIIETYAKYGRIVVCEKLQEYNHLSSAYLDRYSSFLEAFSDMKLRGLEHLVLLFSRNNESSATYQSALLAYQEVYGQLSSPYMVVGNVHDFNDGLNLSYQLVKEVSIDGILATSDEVAAGLIKGYEESRKKCPYIIGQECLLVGQLLKLPTIDHKSYYLGKLAFKQALAEKISQEVLFSEFLSQDN

SEQ ID NO: 14845 - protein, 990 aa, Streptococcus agalactiae
ATGAAAAACTATCGAAAACTTATTGTACTACTACTTCTAATCTTTTTTGCCATTTTTATGGGAGCATATGCTTACACGCATATTGTTGAAAAAAGATCCCTAACTAGCAATACTATTGAAAAAACTCTACCTGTGGTAAATCAGATTAAGCCTCAAACCATTAAAGAATACCAAAATTACTTAACTAAGGTAGCTAAACGTAATGTTCTTCCTGTAGACATTCCTCAGGCATTAAATAATGAAAAGGTAGAAATTACTGCTACTGATGGCATGCAAACATTCACTTGGAATGATAAAAATAATCCTAAGCAAAAGGTTATCTTCTATGTTCATGGAGGATCATATATCCATCAAGCTTCCGAATTACAATATATTTTTGTCAATAAACTAGCTAAAAAATTAGATGCAAAAGTTGTCTTTCCTATTTACCCTAAAGCTCCTACATATAATTATAGTGATGCTATCCCCAAAATTAAAAAATTATACCAAAATACATTAGCTAGCGTCACATCTCACAAACAGATTATCCTAGTAGGTGAAAGTGCAGGCGGAGGCCTTGCTTTAGGTATTGCTGATAACCTTGTCACGGAGCATATCAAACAACCAAAAGAAATTATTTTAATATCACCATGGTTAGATATTGCTACTAATAATCCAAAGATTGAAAAAGTTCAAAAAAAAGATCCCCTTCTTAAAGCTTGGCAATTACAACAAGTAGCTCCTTACTGGGCAAATGGAAAAAAGAATTTTAAAAATCCTCAAGTTAGTCCTCTTTACAGTAGCCAATTTAACAAGATGGCTCCAATATCATTTTTTATAGGAACGCACGATATTTTCTACCCCGATAATCAATTATTACATCAAAAATTAGCAAAAGAAAACATTAAACACCACTATATCGTTGGTCAAAAAATGAACCACGTTTATCCAGTCTTACCGATTCCTGAAGCAGAGACTGCTTTCAAACAAATGCTTAAAATTATCAATCAT

SEQ ID NO: 14846 - protein, 330 aa, Streptococcus agalactiae
MKNYRKLIVLLLLIFFAIFMGAYAYTHIVEKRSLTSNTIEKTLPVVNQIKPQTIKEYQNYLTKVAKRNVLPVDIPQALNNEKVEITATDGMQTFTWNDKNNPKQKVIFYVHGGSYIHQASELQYIFVNKLAKKLDAKVVFPIYPKAPTYNYSDAIPKIKKLYQNTLASVTSHKQIILVGESAGGGLALGIADNLVTEHIKQPKEIILISPWLDIATNNPKIEKVQKKDPLLKAWQLQQVAPYWANGKKNFKNPQVSPLYSSQFNKMAPISFFIGTHDIFYPDNQLLHQKLAKENIKHHYIVGQKMNHVYPVLPIPEAETAFKQMLKIINH

SEQ ID NO: 14847 - protein, 726 aa, Streptococcus agalactiae
ATGTTTCACAGAGAAGATTTTTCAAAAGCATTATTAAAAAAAGCTTTGCAGCCCGGTATGAGAGTTATGGATATTGGTTGTGGTAGTGGGGAATTAACGCGTTTGGCTGCTGATATCGTTGGTAAAGAAGGTGATGTTGTAGGAATTGATATTAATGAGCAACTTTTATGGCAAGCTAGACATGATAATGGCTATGCTAATGTTAGTTATCAAAATGCAGATTTAGCAGCACTTTCCTCCTTTGAAACAAAAAGTTTTGATGCTATTATTGGACGTCGTGTATTAATGTATCAAAAAAATCCAAAGAAAGTAATAGAAAGTTTAACACCTTTGTTAAAGCAAAATGGTTTTTATGTTTTTCAAGAAAGTGATGCAATGTGTTTAGAACTAGCTAAGCCTAGCTTTGTAAATATGAATAAAATACAATCACTAATCTGGCAAACTGTTGAGAAGGAAGGAGGACACATTCATATTGGAAGTCAACTTGAGCAATTAATGTTAGAAGCAGGCTTAATCGTTGACCATTTTGTATCAGAAAATGTCATTCAAACGTCACAAACTGGTACAGATCTATCTTGGCTACTAAATATCATGAAAGAAAGAATACAAAAATATAGTGACCTTCAGGGGTTAGAAGATGTCAATTTACAAAAAGAATTAGAAGAGAATAATGACCATTTTATCCGAGATTGTCAATTTGGAATTATTTCTCATAGAGTTGATGAA

SEQ ID NO: 14848 - protein, 242 aa, Streptococcus agalactiae
MFHREDFSKALLKKALQPGMRVMDIGCGSGELTRLAADIVGKEGDVVGIDINEQLLWQARHDNGYANVSYQNADLAALSSFETKSFDAIIGRRVLMYQKNPKKVIESLTPLLKQNGFYVFQESDAMCLELAKPSFVNMNKIQSLIWQTVEKEGGHIHIGSQLEQLMLEAGLIVDHFVSENVIQTSQTGTDLSWLLNIMKERIQKYSDLQGLEDVNLQKELEENNDHFIRDCQFGIISHRVDE

SEQ ID NO: 14849 - protein, 942 aa, Streptococcus agalactiae
ATGAAAGAGAAGCTATTTCAGGTAATTGGATTCAATAAAGACGATTTAGCCTATTCTTATTTTGATTTAAGTGAAGAAGAATATCAAAATGCGGAATTAGACTTAGAAAGTTTACCTTTTTTATCAGACTACAAGGTTGTTATTTTTGATCAGTTTCAAGATATTACAACTGATAAAAAAACTTATTTAGATGAACAAGCAATGAAGCGCTTGGAAGCCTACTTGCAGAATCCTGTAGATACTACGAGACTTGTTATTTGTGCTCCAGGAAAACTTGATGGAAAACGTCGACTTGTAAAGTTATTGAAACGTGATGCTCGTGTTTTAGAGGCTAATACTTTAAAAGAATCAGATTTAAAGACGTATTTTCAAAAATATGCTCACCAAGAAGGATTAGTTTTTGAAGCAGGTGTTTTTGATGAGTTATTGATTAAGTCTAACTATGATTTTAGTGATACTTTAACTAATATCGCTTTCTTAAAGTCATATAAAACAGACGGTCATATTTCGTCTAATGATGTTAGAGAGGCTATCCCTAAAAGCCTGCAAGATAATATATTTGATTTGACTCAAGATGTCTTACTTGGTAGGATAGATTTAGCGCGTGATTTAGTAAGAGATTTACGTCTACAAGGCGAAGACGAAATCAAATTGATTGCAATCATGTTAGGACAGTTTCGGATGTTTTTGCAAGTTAAAATATTGGCTAGTAAAGGAAAGTCAGAGAGTCAAATTGTTTCTGAACTATCCCATTACATAGGACGTAAAATCAACCCTTATCAAGTAAAATTTGCTGTCAGAGATTCTAGAAACCTTCCCCTTGCTTTTTTAAAAGAAGCGATTAGGATTTTAATCGAGACTGACTATGCTATTAAAAGAGGGACTTATGATAAGGATTATCTCTTTGATTTAGCCTTATTAAAAATTGCTCATAAAAAGCCC

SEQ ID NO: 14850 - protein, 314 aa, Streptococcus agalactiae
MKEKLFQVIGFNKDDLAYSYFDLSEEEYQNAELDLESLPFLSDYKVVIFDQFQDITTDKKTYLDEQAMKRLEAYLQNPVDTTRLVICAPGKLDGKRRLVKLLKRDARVLEANTLKESDLKTYFQKYAHQEGLVFEAGVFDELLIKSNYDFSDTLTNIAFLKSYKTDGHISSNDVREAIPKSLQDNIFDLTQDVLLGRIDLARDLVRDLRLQGEDEIKLIAIMLGQFRMFLQVKILASKGKSESQIVSELSHYIGRKINPYQVKFAVRDSRNLPLAFLKEAIRILIETDYAIKRGTYDKDYLFDLALLKIAHKKP

SEQ ID NO: 14851 - protein, 606 aa, Streptococcus agalactiae
ATGGCAATTATTTTACCAGATTTACCCTATGCATATGATGCGCTTGAGCCACATATTGATGCTGAGACAATGACACTACATCATGATAAGCACCATGCAACTTATGTTGCTAATGCAAATGCTGCTCTTGAGAAACATCCTGAAATTGGAGAAGACTTAGAGGCGCTCTTAGCTGATGTTTCTCAAATTCCAGAAGATATTCGTCAGGCAGTCATCAATAACGGTGGTGGACATCTTAACCACGCTCTTTTCTGGGAATTGATGTCACCAGAAGAAACTCAAATTTCACAAGAGTTATCTGAAGACATTGATGCAACTTTTGGTTCATTTGAAGACTTTAAAGCTGCTTTCACAGCAGCAGCAACAGGACGTTTTGGTTCAGGTTGGGCTTGGCTTGTTGTTAATGCTGAAGGCAAACTTGAAGTGCTTTCAACTGCCAATCAAGATACTCCAATTATGGAAGGTAAGAAACCTATTTTAGGACTTGATGTATGGGAGCATGCTTATTACTTAAACTATCGTAATGTTCGTCCTAACTACATCAAAGCTTTCTTTGAAATTATTAACTGGAATAAAGTAAATGAACTTTACCAAGCTGCTAAAGCT

SEQ ID NO: 14852 - protein, 202 aa, Streptococcus agalactiae
MAIILPDLPYAYDALEPHIDAETMTLHHDKHHATYVANANAALEKHPEIGEDLEALLADVSQIPEDIRQAVINNGGGHLNHALFWELMSPEETQISQELSEDIDATFGSFEDFKAAFTAAATGRFGSGWAWLVVNAEGKLEVLSTANQDTPIMEGKKPILGLDVWEHAYYLNYRNVRPNYIKAFFEIINWNKVNELYQAAKA

SEQ ID NO: 14853 - protein, 849 aa, Streptococcus agalactiae
ATGATTATAAAACGCGTATTAAATCATAATGCAGTCATATCAGTAACACATCAAGGATTAGATGTGTTACTGATGGGGAAAGGAATTGCATTTAAGAAAAGAATAGGTGATAGGATTAATAGCGATGCTATTGAGAAGTCATTTGTTTTAAAAAATAGTGATAACATGAACCGTTTTACGGAGTTATTTATTACTGTTCCAGAAGAAGTAGTTGCATGTTCAGAACGAATTATCAACCTAGGTAAAATCAAATTGGGTAAGAACTTAGATGAAATTCTTTATATCAATTTGACAGATCATATTCATTCGGCTATTGAAAGACATGAACAAAGAATGGTTATCCAAAATCCACTAAGGTTGGAAATCCAGCGTTACTATCCTGATGAATACTCCATTGGGATGAAGGCTCTGGAACTTATAAAGGATGAATTGGGTATTTGTTTAACAATTGATGAGTCAGCTTTTATTGCTATGCACTTTGTAAATGCTGGATTGGATAATCCGTTTAATGAAGCGCATAAAATCACTGAGATTGTATCTTACATTGAACAGAAAGTAAAAATAGATTTTCGAACAGAACTAGATGAAAGTTCAATTGATTATTATCGTTTCATGACACATACCAAATTATTTGCTCAACGCGTTTTATCAGGAATGAAATACGAAGATGATGATGCTGATTTACTTTTGGTAGTTAAGAAAAAATATCCGAGAGAATATAAATGTGTTAAAGAGATCGGCAACAATATGGCTATCCAATACCAATATCAACTTAATTCAAGTGAACTCCTATATCTGACGGTGCATGTTAAACGATTAGTTAAAAATTTAAAGGAGATATCAGATGAC

SEQ ID NO: 14854 - protein, 283 aa, Streptococcus agalactiae
MIIKRVLNHNAVISVTHQGLDVLLMGKGIAFKKRIGDRINSDAIEKSFVLKNSDNMNRFTELFITVPEEVVACSERIINLGKIKLGKNLDEILYINLTDHIHSAIERHEQRMVIQNPLRLEIQRYYPDEYSIGMKALELIKDELGICLTIDESAFIAMHFVNAGLDNPFNEAHKITEIVSYIEQKVKIDFRTELDESSIDYYRFMTHTKLFAQRVLSGMKYEDDDADLLLVVKKKYPREYKCVKEIGNNMAIQYQYQLNSSELLYLTVHVKRLVKNLKEISDD

SEQ ID NO: 14855 - protein, 1866 aa, Streptococcus agalactiae
ATGACTAAATACCAAGAGACTGCTAAAGCTATTTTAGCAGCAGTAGGGGGAGAAAAAAATATTCAACACGTAACCCACTGTGTGACACGATTACGATTAGTTTTAGACAATGATGAAATTGTCAACGATCAGGTTATTAAAACTATTCCGAATGTTATCGGTGTTATGCGTAAAAATGATCAATACCAAATTATTTTGGGAAATGATGTCAATAATTATTATAATGCTTTTTTGGCCTTAGGTCATTTTGAAAATACTACCAGAGAATTTTCATCACAAAAAAAGAGTTCAATATTTGAGAAATTAATTGAAACGATTGCAGGAGTCATTAAGCCGCTTATACCTGCTCTTCTAGGAGGAGGTATGCTCAAGGTTATAGGTATTTTGCTCCCTATGCTCGGTATAACAAGCTCTAGTTCTCAAACAGTAGCTTTTATCAATTTTTTTGGTGATGCCGCTTATTATTTTATGCCAATAATGATTGCTTATTCAGCTGCGTCACGATTTAAAGTTACACCTGTATTAGCTGCTACAGTAGGAGGGATTCTCTTACACCCTGCTTTTGTGACAATGGTAGCTGAAGGAAAACCATTATCTTTCTTTGGAGCTCCGGTTACACTGGCTAGTTATGGTTCTTCTGTTATTCCAATCTTAATTATGGTTTTTCTTATGCAATACATTGAGAGATGGATTAATAAAATTGTTCCTAGTGTAATGAAGAGCTTTTTACAACCGACTTTGATTATTCTCATTTCTGGCTTTTTAGCCTTAGTGGTCGTGGGGCCACTGGGAGTAATTATTGGTAAAGGATTGTCTAGTGCAATGCTTTCGATTTACCATGTGGCACCATGGTTAGCTTTAGCTATTCTTGGTGCTATTATGCCATTGGTTGTTATGACAGGAATGCACTGGGCATTTGCTCCAATCTTTTTAGCTGCTTCTGTTACGACACCAGATGTTTTGATTTTACCAGCAATGTTAGCTTCTAATTTAGCTCAAGGTGCAGCTTCCCTTGCTGTTGCAGTTAAGGCTAAACAAAAACAGACACGTCAGGTGGCCTTTGCAGCAGGTTTATCAGCACTACTAGCTGGTATCACAGAACCTGCACTTTATGGTGTCACACTGAAATTCAAGAAGCCTTTATACGCTGCAATGATATCAGGTGGTTTAGTAGGAGCTTATATTGGATTAGTTAATATTGCTTCCTATACATTTGTAGTGCCATCTATTATTGGTTTGCCACAATACATCAATCCACAGGGGGGCAATAATTTCAGTAATGCTGTTATTGTAGCAATAGCTACTATTATTTTGACTTTCATTATTACATGGTTCTTGGGAATTGATGAAGGAGAAAACGAAAAAAGTAGTATTAATGCTCAAGAGTACACACATATTAGAAGTGGTTTATCAAAAAAAGAGACATTGTATTCACCTATGGTAGGCAATGTATTACCTTTATCTAAAGTACCCGATGAAACATTTTCATCTAAATTACTAGGTGAAGGTTTAGCAATCACTCCTAGTGTGGGTGAAGTTTATGCACCATTTGATGGTGAAATTATAAGTTTATTTCCTACAAAACATGCCATTGCCTTAAAGGATGATAAGGGAGTTGAAGTGTTAATCCATATTGGAATAGATACTGTAGAACTAAATGGAGAAGGTTTTGAACAATTGGTTAAAGTTGGCGATTTTGTTAAACGAGGACAGTTACTTTTGCGAATGGATATTGATTTTATTAGTTCAAAGGGGTATTCTCTTATTAGTCCAGTTGTAGTTACAAATTCAATTGACCAACTTGAAATTATCGTTAAAGACGAAGAGACAATGGTTACAAATGAAGATGATTTACTTGTAATTCTT

SEQ ID NO: 14856 - protein, 622 aa, Streptococcus agalactiae
MTKYQETAKAILAAVGGEKNIQHVTHCVTRLRLVLDNDEIVNDQVIKTIPNVIGVMRKNDQYQIILGNDVNNYYNAFLALGHFENTTREFSSQKKSSIFEKLIETIAGVIKPLIPALLGGGMLKVIGILLPMLGITSSSSQTVAFINFFGDAAYYFMPIMIAYSAASRFKVTPVLAATVGGILLHPAFVTMVAEGKPLSFFGAPVTLASYGSSVIPILIMVFLMQYIERWINKIVPSVMKSFLQPTLIILISGFLALVVVGPLGVIIGKGLSSAMLSIYHVAPWLALAILGAIMPLVVMTGMHWAFAPIFLAASVTTPDVLILPAMLASNLAQGAASLAVAVKAKQKQTRQVAFAAGLSALLAGITEPALYGVTLKFKKPLYAAMISGGLVGAYIGLVNIASYTFVVPSIIGLPQYINPQGGNNFSNAVIVAIATIILTFIITWFLGIDEGENEKSSINAQEYTHIRSGLSKKETLYSPMVGNVLPLSKVPDETFSSKLLGEGLAITPSVGEVYAPFDGEIISLFPTKHAIALKDDKGVEVLIHIGIDTVELNGEGFEQLVKVGDFVKRGQLLLRMDIDFISSKGYSLISPVVVTNSIDQLEIIVKDEETMVTNEDDLLVIL

SEQ ID NO: 14857 - protein, 1425 aa, Streptococcus agalactiae
ATGACGATTTTTCCTAAACATTTTCTATGGGGAGGTGCAGTTGCTGCCAATCAGGTAGAGGGTGCATTTAGAACAGATGGCAAAGGTTTATCTGTACAAGATGTACTTCCAAATGGTGGTCTAGGCGATTTTACCGCCAAACCTACTCCAGACAATTTGAAGCTAGAAGCAATTGATTTTTATCATAACTATAAAAATGATATAAAACTGTTTGCAGAGATGGGCTTTAAAGTTTTTAGAACCTCTATTGCCTGGTCTCGAATTTTTCCAAATGGTGATGATAGTGCTCCAAACGAAGCTGGCTTACAATTTTATGATAATTTATTTGACGAGTTGCTTAAATATAATATCGAGCCTTTGGTTACCTTATCTCATTATGAAACACCGCTTCATCTTGCAAAGACCTATAATGGTTGGGCTGATAGACGTTTGATAGCATTTTTTGAGAAATTTGCTCAAACAGTCATGGAGCGTTATAAAGATAAGGTAAAATATTGGTTAACTTTTAATGAAGTGAATTCTATTTTACATATGCCTTTCACCAGTGGTGCTATTATGGCCGACAAATCACAACTAAGTCCTCAGGAGCTTTATCAAGCTATTCATCATGAATTAGTAGCATCGGCTAGAGTGACAAAATTAGGGCGTTCTATCAACCCTAATTTTAAAATTGGCTGTATGATTCTGGCTATGCCAGCTTATCCTATGACATCTGATCCAAGAGATGTTCTGGCTGCAAGACAATTTGAACAACATAATCTGCTATTTTCAGATATACATGTCAGAGGTAAATATCCCACTTATATTCAGTCCTATTTCAAAAATAATGGTATTGAAATTAAATTTGAAGAAGGAGATGAGGAAGTATTGGCACAAAATACAGTAGATTTCCTATCGTTTAGTTACTATATGAGCGTGACACAAGCTTATGACTTTGAAAATTATCAAAGTGGTCAGGGAAATATCCTTGGAGGCCTGACTAATCCTTATTTAACAACTTCAGAATGGGTATGGCAAATCGATCCCATAGGGCTACGCCTAGTCTTAAATCAGTATTATGAACGTTATCAGATTCCGTTGTTTATTGTAGAAAATGGATTGGGAGCAAAAGATCAATTGATAGAAACACTAGACGGTGATTATACTGTCGAAGATGATTATCGTATTGATTATATGAATCAACATTTAGTTCAAGTTGCTAAAGCTATTGAAGATGGTGTTGAAATAATGGGATATACATCTTGGGGATGCATTGATTGTGTATCCATGTCTACAGCTCAACTAAGTAAACGTTATGGTCTAATATATGTTGATCGAAATGATGATGGAACAGGGAGTCTACAACGTTACAAGAAGAAGTCATTTGGTTGGTACCAAAAAGTGATTAAGACAAATGGCCAATCATTGTTTGAACATCATAACAGA

SEQ ID NO: 14858 - protein, 475 aa, Streptococcus agalactiae
MTIFPKHFLWGGAVAANQVEGAFRTDGKGLSVQDVLPNGGLGDFTAKPTPDNLKLEAIDFYHNYKNDIKLFAEMGFKVFRTSIAWSRIFPNGDDSAPNEAGLQFYDNLFDELLKYNIEPLVTLSHYETPLHLAKTYNGWADRRLIAFFEKFAQTVMERYKDKVKYWLTFNEVNSILHMPFTSGAIMADKSQLSPQELYQAIHHELVASARVTKLGRSINPNFKIGCMILAMPAYPMTSDPRDVLAARQFEQHNLLFSDIHVRGKYPTYIQSYFKNNGIEIKFEEGDEEVLAQNTVDFLSFSYYMSVTQAYDFENYQSGQGNILGGLTNPYLTTSEWVWQIDPIGLRLVLNQYYERYQIPLFIVENGLGAKDQLIETLDGDYTVEDDYRIDYMNQHLVQVAKAIEDGVEIMGYTSWGCIDCVSMSTAQLSKRYGLIYVDRNDDGTGSLQRYKKKSFGWYQKVIKTNGQSLFEHHNR

SEQ ID NO: 14859 - protein, 1092 aa, Streptococcus agalactiae
ATGAAATTAAGAAAACAACTCGCACAACAAATCGTTACCTCTATCAAAGATGTTTGTCAACAAGATATTAATTTTATTAATACCAAAGGAATCATTTTCGCTAGTACCAATCCAAAACGTGTTGGAGAATTCCATGAAATTGGTTTAAAAGTAGCACAGACAGGACAAATGATTGAAGTAACAGATCAAGAATCTTATTTTGGGACACAAGCAGGGATCAATATTCCTTTCTATTATAATTGTGAATTATTAGCTACTATTGGGATTAGTGGAAACCCCAACCAAGTAGGAAAATATGCTTTACTTGCTCAAAAAATGACTCGACTCATCTTAAAAGAGCATGAATTAGATTATCTGGATTTCGGGCGAAAAAACGAAGCTTCTATTGTCTTACACCATCTTGTTGAAGGCAGAGAGTTAGACTACTATTACCTCAATCAATTTTTAAACCAATACCACCTATCAGAAAAAACTGACTATCGTCTACTCACTTTTGAAATCAATAGTCAAAAACAAAAATTACTCTTAAGTCAATCTGAAATGTCACTCTTGAACTTTTTTGATAAACTTGACACTGCTATTTATACCTTTAATTATCCCAATCAATACTGGCTTTTACTTTCTGACCAGATGTTTGACTATTATTATCCAAATATCCTATCAAAGTTTGAATGCGAAAAGGGTCTCTATAAAGTTGGTATCGGACAAAAATCATCTTTATCACTTTTAAAAAGATCATATGAAACGTCTATCTTAGCCCTGAAAGCTTTAAAAGGTCAACAAAAGGTCAACCTCGTCGACGACCTTGATCTTGAACTGTTATTAACAAGTATTGATTCTAATATTAAACAATATGTGCTAAATAAAGCGCTTGTAAACTTATCTAAAAATGATAAGATCTTGCTTAACTCATATTTTAAGCATAATCTATCATTAAAAGAATGTAGTCAGGAACTTTTTATCCATAAAAATACTGTTCAATATAGGTTAAATAAGATTTATGAATCAACGCAACTCAATCCAAGAAACTTTAAGGATGCAACTTTATTGTATCTAGCACTTAAATCAGAAGATATTTACCTTCATAAATTA

SEQ ID NO: 14860 - protein, 364 aa, Streptococcus agalactiae
MKLRKQLAQQIVTSIKDVCQQDINFINTKGIIFASTNPKRVGEFHEIGLKVAQTGQMIEVTDQESYFGTQAGINIPFYYNCELLATIGISGNPNQVGKYALLAQKMTRLILKEHELDYLDFGRKNEASIVLHHLVEGRELDYYYLNQFLNQYHLSEKTDYRLLTFEINSQKQKLLLSQSEMSLLNFFDKLDTAIYTFNYPNQYWLLLSDQMFDYYYPNILSKFECEKGLYKVGIGQKSSLSLLKRSYETSILALKALKGQQKVNLVDDLDLELLLTSIDSNIKQYVLNKALVNLSKNDKILLNSYFKHNLSLKECSQELFIHKNTVQYRLNKIYESTQLNPRNFKDATLLYLALKSEDIYLHKL

SEQ ID NO: 14861 - protein, 1140 aa, Streptococcus agalactiae
ATGAAGGTAGTAGTAGCTATTGATTCTTTGAAAGGGAGTCTTTCTTCTTTAGAAGCTGGCAATGCTATAAAGGAGTCAATTAATGAAGTAATCCCAGGGGCGGATGTGGAAGTACATCCATTAGCAGACGGGGGAGAAGGAACTGTTGAAGCTTTGACGCTAGGTATGGGGGGGACGATCGAAATAATCCCTGTTAAGGGGCCTCTTGGAGAAAAAGTACATGCGAGTTATGGTATTATTCCACAGCGTCAGTTAGCTATTATTGAAATGGCTGCAGCTGCTGGTATTACCCTAATTGCTACTGAAGAGAGAAATCCTCTCCACACAACCACTTATGGAGTTGGAGAAATGATAAATGATGCTATAAGTAAAGGCTGTAGGCACTTTATTATTGGTATTGGAGGTAGTGCTACTAATGATGGTGGGGCAGGTATGCTACAAGCTTTGGGATATGCATTATTAGATAAAGATAATCAAGAAATCAGTTTGGGAGCACAAGGATTGGCAGATTTAAAATCTATCTCTACTGATAAGGTTATTGAGGAATTAAAAGAATGCGATTTTAAAATTGCATGTGATGTAACAAATCCTTTATGTGGTGCTCAAGGTTGTAGTTCGATTTTTGGACCGCAAAAAGGTGCTGATGAAGATATGATTACAAAAATGGATACTTGGTTAAGTAATTATGCTACTTTAGCTACTTCAGTTAGTGAAAAAGCAGATGCAACTATTGAAGGAACAGGTGCAGCGGGTGGGCTTGGATTTGCCTTTTTAGCCTTTACAAATGCCACCTTAGAACCTGGTATTGATATTATTCTATCAGAAATTAACATAGAAAAAGCGATTTCTGAAGCTGATTTAGTAGTTACTGGTGAAGGTCGTTTGGATGGGCAAACGGTGATGGGAAAAGCTCCAATTGGCGTAGCAAAATTAGCTAAAAAATATGGTAAGAAAGTAGTGGCATTCTCTGGATCTGTCACCGAAGATGCTATACTTTGTAATCAACATGGTATTGATGCTTTTTTTCCAATCGTACGACGCCTTATCAGCTTAGATGAGGCTATGTCTAAAGAGGTAGCTTATAAAAATATGAAAGAAACTGCTACTCAAGTCTTTAGATTAATCAATTTGTATAATCAT

SEQ ID NO: 14862 - protein, 380 aa, Streptococcus agalactiae
MKVVVAIDSLKGSLSSLEAGNAIKESINEVIPGADVEVHPLADGGEGTVEALTLGMGGTIEIIPVKGPLGEKVHASYGIIPQRQLAIIEMAAAAGITLIATEERNPLHTTTYGVGEMINDAISKGCRHFIIGIGGSATNDGGAGMLQALGYALLDKDNQEISLGAQGLADLKSISTDKVIEELKECDFKIACDVTNPLCGAQGCSSIFGPQKGADEDMITKMDTWLSNYATLATSVSEKADATIEGTGAAGGLGFAFLAFTNATLEPGIDIILSEINIEKAISEADLVVTGEGRLDGQTVMGKAPIGVAKLAKKYGKKVVAFSGSVTEDAILCNQHGIDAFFPIVRRLISLDEAMSKEVAYKNMKETATQVFRLINLYNH

SEQ ID NO: 14863 - protein, 1254 aa, Streptococcus agalactiae
ATGGAAGCTACATTTACAACAACAGGGGCTTTAATAGGATTAGCGCTTGCTATTTTACTGATTATCAAAAAAGTTCATCCTGCCTATAGTCTCATTCTTGGAGCATTAGTTGGTGGTTTGATTGGTGGCGGTGATTTAGTTACAATTGTTAATACTATGGTATTAGGTGCGCAAGGGATGATGTCATCCATATTACGCATTTTAACGTCAGGGATTTTAGCGGGTGCTTTAATTAAAACCGGATCAGCTGAAAAAATTGCAGAAAGTATCATTAAAAAATTAGGACAACAGCGAGCCATCACAGCTTTAGCCATCGCAACAATGATTATTTGTGCAGTAGGTGTCTTTATTGATATTGCAGTTATTACAGTTGCTCCGATTGCATTAGCAATAGGTAAAAAAGCTAATCTTTCTAAATCTAGCATACTGTTAGCAATGATTGGTGGTGGTAAGGCTGGGAATATTATTTCACCCAATCCTAATACAATTGCTGCTTCAGAAGCATTTAAGGTTGATTTAACAAGCTTAATGGTACAAAATATTATTCCTGCAATTGCAGCTTTAGTAGTTACGATTATATTAGCAAAGATTGTTTCCAAGAAAAATAACGATATTTCTTATGATAGTGAGGAGCAAGTGGGCTCTGATCTGCCAGCATTCTTACCGGCTATTTCTGGTCCACTTGTGGTTATCTGCTTATTAGCTCTTCGTCCTTTATTTGGAATCACTATTGATCCCTTGATTGCACTGCCGTTGGGTGGTCTAATTAGTATTTTAGCAACAGGTTACCTAAAAGAAACGGTACCGTTTGTTGAATACGGTTTATCAAAAGTTGTTGGCGTTTCAATTCTTTTGATTGGAACAGGTACACTTTCAGGTATTATTAAAGCATCTAATCTACAATTTGATATGATTCATCTCCTTGAATTTTTAAATATGCCGACCTTTATCCTTGCCCCACTCTCAGGTATTTTTATGGGAGCAGCAACAGCATCAACGACTTCTGGAACAACTATTGCTTCACAAACGTTTGCTGAAACCTTGATTAAATCAGGGGTACCGGCGGTTTCGGGTGCAGCTATGATTCACGCAGGTGCGACTGTTCTGGATTCGCTACCTCATGGATCCTTCTTCCATGCGACAGGCGGAGCTGTCAATATGGCTATAAAAGAACGTATGAAACTAATTAGCTATGAAGCTTTGATTGGATTAACTAGCACAATAGTTGCTGTCGTTTACTATTGTTTCTTTGGG

SEQ ID NO: 14864 - protein, 418 aa, Streptococcus agalactiae
MEATFTTTGALIGLALAILLIIKKVHPAYSLILGALVGGLIGGGDLVTIVNTMVLGAQGMMSSILRILTSGILAGALIKTGSAEKIAESIIKKLGQQRAITALAIATMIICAVGVFIDIAVITVAPIALAIGKKANLSKSSILLAMIGGGKAGNIISPNPNTIAASEAFKVDLTSLMVQNIIPAIAALVVTIILAKIVSKKNNDISYDSEEQVGSDLPAFLPAISGPLVVICLLALRPLFGITIDPLIALPLGGLISILATGYLKETVPFVEYGLSKVVGVSILLIGTGTLSGIIKASNLQFDMIHLLEFLNMPTFILAPLSGIFMGAATASTTSGTTIASQTFAETLIKSGVPAVSGAAMIHAGATVLDSLPHGSFFHATGGAVNMAIKERMKLISYEALIGLTSTIVAVVYYCFFG

SEQ ID NO: 14865 - protein, 1062 aa, Streptococcus agalactiae
GTGAAACAAACAAAGAAAGAATTTATTTTAGGATTAACCATTATTATTACCCTTACTTTATTAATCATGCTGATTTTTTTAGTAATGTTTAATAAGTCCAGTAACTCTAAGTTGAAGCAGACAAAAGATAGAAGAATATTATCTACTTCAACCACAAGGACATCCAGTAGCTCACATGATCAAAAAATTGTAGAAAAGTCTCTTGAAAAAAAGAAAATGGTCATGGAACAAGATATGGAATTGATGAATGCCTATAGGCTCTATTATGATTATGCCCATTTGTCCTTGAAAGAGGTTGTTCTGGCCTATATGTCTGAATATGGCATTGAAAAAAATAGTGTTGCTTTTTCTTATAAAAATTTAAAAACAGGACAAAGGGACGCTATGAATGATACTCAGGCTATGACAGCAGGGAGCACCTATAAGTTACCTCTTAACATGTTGGTAGTAGATGCAGTGGTCAAGGGCAAGTTGTCCATGGAAGAACGCTTTGATATTACCGAGACTGACTATGAATATATTGGTGAACATAATAATTATGTTGCTGCTTTCTCGGGGGCAATGTCTATTGATGATATGCAAAAATACTCTTTAGTTTATTCAGAAAATACACCCGCCTATGCTTTAGCTGAGCGTATTGGTGGCATGGATAGTGCTTATTCAAAGTTTGGTCGTTATGGCCAATCTAAAGGAGACATCAAAAATATACAAAAAAACGGTAATAAAGTGACAACAGATTACTATATTCAAGTGCTAGACTATCTCTGGAAACATCGTAAAAAGTATAATAGTTTAATTACTTATTTAGAAGAAGCTTTTCCAACGGATTATTATCGTGCTTTGATACCATCTGATGTTGTTGTTGCTCAAAAGCCAGGGTATGTCCGTGAGGCGTTGAATGTTGGAGCAATTGTCAAAGAAGAAGTGCCTTATATCGTTGCTATTTATACTGCAGGTTTAGGTGGCTCTACTCAGGAAGATTCAGAAATTAATGGAGTGGGACTATATCAGCTAGAACAATTATGTTTTGTTATTAATCAATGGCATCGTGTTAATATGAAT

SEQ ID NO: 14866 - protein, 354 aa, Streptococcus agalactiae
MKQTKKEFILGLTIIITLTLLIMLIFLVMFNKSSNSKLKQTKDRRILSTSTTRTSSSSHDQKIVEKSLEKKKMVMEQDMELMNAYRLYYDYAHLSLKEVVLAYMSEYGIEKNSVAFSYKNLKTGQRDAMNDTQAMTAGSTYKLPLNMLVVDAVVKGKLSMEERFDITETDYEYIGEHNNYVAAFSGAMSIDDMQKYSLVYSENTPAYALAERIGGMDSAYSKFGRYGQSKGDIKNIQKNGNKVTTDYYIQVLDYLWKHRKKYNSLITYLEEAFPTDYYRALIPSDVVVAQKPGYVREALNVGAIVKEEVPYIVAIYTAGLGGSTQEDSEINGVGLYQLEQLCFVINQWHRVNMN

SEQ ID NO: 14867 - protein, 441 aa, Streptococcus agalactiae
ATGATAATGAGTAATCGAAGTATTTTAGACGAGCGATTATGTTTTACGGTTAGTGAAACACATCGACTTTTCAATAAATTTTACCAAAAAGCTTTGGATGAATTTCAATTGACTTATCTCCAATACGTTATCTTGTTAGTCCTTTGGGAAGAGGATCATCGGCATATGAAGGAACTTAGTTATGCACTATCTCTTAATTCGAATACCCTAACTCCAGTTTTAAAGCGTATGGAAAATCGTGGGTGGATTGTACGAGAAAAACCAAGAGATGACAAAAGGCAACTCATTATTCATCTAAGTAACAAAGGTATTGAGTCACAAGATGCCGTTGTCAATGCGGTGCAATCGTGCGGGTATTTTTTCTCAGAAATTAGTCCTGAATCTTATCAAAAAACTGTTTCTGCCCTTTCTTCACTTAATCAAGTTATAAAATCACATTTA

SEQ ID NO: 14868 - protein, 147 aa, Streptococcus agalactiae; identical to SEQ ID NO: 1506

SEQ ID NO: 14869 - protein, 1026 aa, Streptococcus agalactiae
ATGAATACAAACGATTTTGATTTTTATTTACCAGAAGAACTTATTGCCCAAACACCACTTGAAAAAAGAGACGCTTCTAAACTATTAGTCATTGATCATAAGAATAAGACGATGACAGATAGCCATTTCGATCATATCTTAGATGAACTCAAGCCTGGTGACGCTTTAGTAATGAATAACACACGTGTTCTGCCCGCTCGCCTTTATGGTGAAAAGCCAGATACACACGGCCATGTAGAGTTATTACTTCTCAAAAATACAGAGGGCGATCAATGGGAAGTGCTTGCTAAACCCGCTAAACGCTTACGCGTAGGGAACAGAGTTTCATTTGGTGATGGTCGGTTAATAGCAACAGTCACAAAGGAATTAGAACATGGTGGGCGTATTGTAGAATTCTCATATGATGGTATTTTTCTAGAAGTCCTTGAAAGTTTGGGCGAAATGCCACTTCCGCCATATATTCATGAAAAACTAGAAGATCGTGACCGCTATCAGACTGTGTATGCAAAAGAAAATGGTTCTGCTGCTGCACCAACAGCCGGTCTTCATTTTACAAAAGAACTATTGGAAAAAATTGAAACAAAAGGTGTGAAGCTTGTCTATTTGACGCTTCACGTTGGACTTGGAACTTTCCGTCCTGTTTCAGTTGATAATCTTGATGAACACGAAATGCATTCTGAGTTTTACCAATTATCTAAAGAAGCTGCTGATACTCTCAATGCAGTTAAAGAATCTGGTGGACGTATTGTAGCTGTTGGTACAACTTCTATTCGCACATTAGAGACAATTGGTTCTAAATTCAATGGTGAATTAAAAGCCGACTCAGGGTGGACAAATATTTTTATCAAGCCTGGTTATCAGTTCAAGGTTGTAGACGCTTTTTCAACCAACTTTCACTTACCAAAGTCTACTCTTGTCATGTTAGTATCAGCATTTGCTGGACATGACTTTGTACTAGAAGCTTACAACCATGCAGTTGAAGAACGATATCGTTTCTTCAGTTTTGGTGATGCTATGTTTGTTAAG

SEQ ID NO: 14870 - protein, 342 aa, Streptococcus agalactiae
MNTNDFDFYLPEELIAQTPLEKRDASKLLVIDHKNKTMTDSHFDHILDELKPGDALVMNNTRVLPARLYGEKPDTHGHVELLLLKNTEGDQWEVLAKPAKRLRVGNRVSFGDGRLIATVTKELEHGGRIVEFSYDGIFLEVLESLGEMPLPPYIHEKLEDRDRYQTVYAKENGSAAAPTAGLHFTKELLEKIETKGVKLVYLTLHVGLGTFRPVSVDNLDEHEMHSEFYQLSKEAADTLNAVKESGGRIVAVGTTSIRTLETIGSKFNGELKADSGWTNIFIKPGYQFKVVDAFSTNFHLPKSTLVMLVSAFAGHDFVLEAYNHAVEERYRFFSFGDAMFVK

SEQ ID NO: 14871 - protein, 678 aa, Streptococcus agalactiae
ATGAAAGAAGCAAAAAATTTTTCCCAACAATTGAATATTTTAAGAGCTGGTGTTCTTGGTGCTAATGATGGTATCATCTCTGTAGCTGGTGTTGTTATTGGTGTTGCGAGTGCAACTCATAACCTTTGGATTATTTTTTTATCAGCAGCTTCCGCGATTTTAGCTGGTGCATTTTCTATGGCTGGCGGGGAGTATGTTAGTGTTTCTACTCAAAAAGATACTGAACAAGCAGCAGTTGCGCGTGAAGAGAAACTACTAGAAAATAATCCAGAACTTGCCAAAAAATCCTTAGTTGATATCTACTTAGCAAAAGGAGAAAGTCACGAACATGCTCAATGGCTAGTTGACAAGGCTTTTTCAAAGAATGCTATTGAGCATTTAGTTGAAGAAAAATATGGTATTGAGTTCGGTGAATATACAAGCCCCTGGCATGCTGCTATATCTAGTTTTATAGCTTTTGCCATCGGATCAATTTTTCCAACTATAACTATTCTGTTATTACCATTTTCGGTACGAATTGTAGGAACGGTAATAATTGTTATTGTTTCACTATTATCAACTGGTTATGTAAGTGCTAAGTTAGGCCAAGCCCCTACAGTACCTGCCATGCGTCGAAATGTGATGATTGGTTGTTTGACAATGTTGGCAACCTATGTCATTGGACAATTATTTTCAATA

SEQ ID NO: 14872 - protein, 226 aa, Streptococcus agalactiae; identical to SEQ ID NO: 5966

SEQ ID NO: 14873 - protein, 699 aa, Streptococcus agalactiae
ATGAGAGTTATTACAGTTAAGAACGACATTGAGGGGGGAAAAATTGCATTTACTCTTTTAGAAGAGAAAATGAAAACTGGTGCTCAAACTTTAGGATTGGCAACAGGAAGTAGCCCAATCACCTTTTACGAAGAGATTGTAAAAAGTAACCTTGATTTTTCAAATATGGTTTCTATTAACCTTGATGAATATGTTGGAATTGCCGCAAGTAATGATCAAAGTTACTCTTATTTTATGCATAAACATCTTTTTGATGCTAAACCTTTTAAGGAAAATAACCTTCCAAACGGCTTGGCTAAAGATTTGAAAAAAGAAATAAAACGATACGATGCTGTCATAAATGCTAATCCAATTGATTTTCAAATTCTTGGAATTGGTCGTAACGGTCATATTGGTTTTAATGAACCAGGTACACCTTTTGATATTACAACACATGTGGTTGACTTAGCTCCAAGTACAATTGAAGCTAATAGTCGTTTCTTTAATAGTATTGATGATGTACCAAAGCAAGCCTTATCAATGGGTATAGGTTCTATTATGAAATCAAAAACAATCGTATTAGTGGCGTATGGTATTGAAAAAGCAGAAGCGATTGCAAGTATGATTAAAGGACCTATCACAGAAGATATGCCAGCAAGTATCCTCCAAAAACATGATGATGTTGTGATTATTGTGGATGAAGCAGCGGCATCAAAGTTG

SEQ ID NO: 14874 - protein, 233 aa, Streptococcus agalactiae
MRVITVKNDIEGGKIAFTLLEEKMKTGAQTLGLATGSSPITFYEEIVKSNLDFSNMVSINLDEYVGIAASNDQSYSYFMHKHLFDAKPFKENNLPNGLAKDLKKEIKRYDAVINANPIDFQILGIGRNGHIGFNEPGTPFDITTHVVDLAPSTIEANSRFFNSIDDVPKQALSMGIGSIMKSKTIVLVAYGIEKAEAIASMIKGPITEDMPASILQKHDDVVIIVDEAAASKL

SEQ ID NO: 14875 - protein, 954 aa, Streptococcus agalactiae
ATGGGACTTTTAGTAGATGGCAAATGGGTTGATCAATGGTATGATACTGCATCAACTGGTGGTAAATTCGTCCGAACCGTTACACAATTCCGTCATTGGGTTACTAAAGATGGTTCAGCAGGGCCTAGTGGGGATGCAGGTTTTAAAGCAGAATCTGGACGATATCATCTCTACGTTTCACTAGCCTGCCCTTGGGCATCACGTGTATTAATCATGAGAAAGCTTAAAAATCTAGAATCTCATATCTCTATCTCCATTGTTAACCCTTTAATGTTGGAGAATGGTTGGACTTTTCAAGAATATAAAGGCGTTATTCCTGATATGATTAACCAAAGCCAATACCTTTACCAAATCTATCAAGCAAGTCAAAGTGATTATACAGGACGCGTGACAGTCCCTGTTCTTTGGGATAAAAAATGCCATACAATCGTTAACAATGAATCATCTGAAATTATGCGCATGTTAAATACTGCATTTAATCATATTACTGGAAATACTGACGATTACTATCCCGATTCCTTACAAGGACAAATTGACGAAATGAATAATTTTATTTATCCAAAAATAAATAATGGTGTCTATAAAGCTGGTTTTGCTACTTCTCAGAACGTTTATCAAAAGGAAGTTGAAACCTTATTCACAGCTTTAGATCAGTTAGAAAAACACTTATCTGATAACCATTATCTTGTTGGAGAACAATTTACCGAAGCTGATATTCGCCTTTTCACAACTTTAGTTCGCTTTGACACCGTTTATTATGGTCATTTTAAATGTAATTTAAAAGCGCTACATGATTACCCACATTTATGGCATTATACAAAACGTATTTACAACCTACCTGGAATTGCTGAGACAATTAATTTTGATCATATCAAAAAACACTATTACGGTAGCCATAAAACCATTAACCCTACCGGTATTATTCCAGCTGGACCTAACTTAGACTGGACAATT

SEQ ID NO: 14876 - protein, 318 aa, Streptococcus agalactiae
MGLLVDGKWVDQWYDTASTGGKFVRTVTQFRHWVTKDGSAGPSGDAGFKAESGRYHLYVSLACPWASRVLIMRKLKNLESHISISIVNPLMLENGWTFQEYKGVIPDMINQSQYLYQIYQASQSDYTGRVTVPVLWDKKCHTIVNNESSEIMRMLNTAFNHITGNTDDYYPDSLQGQIDEMNNFIYPKINNGVYKAGFATSQNVYQKEVETLFTALDQLEKHLSDNHYLVGEQFTEADIRLFTTLVRFDTVYYGHFKCNLKALHDYPHLWHYTKRIYNLPGIAETINFDHIKKHYYGSHKTINPTGIIPAGPNLDWTI

SEQ ID NO: 14877 - protein, 717 aa, Streptococcus agalactiae
ATGCGTTTAGATAAATTATTAGGTCAGGCAGGATTTGGGTCTAGAAATCAGGTTAAGAAATTAATTCGTTCTAGGCAAGTTTCTGTAGATGGTCAAATTGTTACAAAGGATAATGTTATTGTAGATAGTGGTCTACAATCGATTTTTGTAGGAAAAGAGAGAGTCTGCCTAAAAGAAAGTTCTTATTACCTTCTTTATAAGCCATCAGGAGTTGTTTCAGCAGTTAGAGATTCAGAACATAAAACAGTCATAGACTTAATTAGCGAAAAAGATAAGGTGGAGGGATTGTATCCGATTGGTCGTCTAGATCGTGATACGGAAGGGCTTTTAATAATCACGAATAATGGTCCACTGGGTTACCGAATGTTACATCCAAAACACCACGTTGCAAAAACGTATTATGTTGAAGTAAATGGTTTCTTGGAAAGAGATGCTATTACCTTTTTTGAAGAAGGAGTTGTATTTGACGATGGAACAAAGTGTAAACCAGCTGAATTAACGATTGATACGGCTAATAATGACAAAAGTACCGCAAGAATAACTATCACAGAAGGGAAATTTCACCAAGTAAAAAAGATGTTTCTTGCATATGGCGTTAAAGTTATATACTTGAGGCGTATTTCTTTTGGTGACTTGAGGCTTGATATGAATTTGAAACCAGGTCAGTATCGTAGATTGAGAGATTCAGAGGCAGCTATCTTAAAAAGGTATTTAGAT

SEQ ID NO: 14878 - protein, 239 aa, Streptococcus agalactiae
MRLDKLLGQAGFGSRNQVKKLIRSRQVSVDGQIVTKDNVIVDSGLQSIFVGKERVCLKESSYYLLYKPSGVVSAVRDSEHKTVIDLISEKDKVEGLYPIGRLDRDTEGLLIITNNGPLGYRMLHPKHHVAKTYYVEVNGFLERDAITFFEEGVVFDDGTKCKPAELTIDTANNDKSTARITITEGKFHQVKKMFLAYGVKVIYLRRISFGDLRLDMNLKPGQYRRLRDSEAAILKRYLD

SEQ ID NO: 14879 - protein, 633 aa, Streptococcus agalactiae
TTGAATTCAAAACTTTCATTGAAATTGACTATTTTATCGATTTCTATCTTTTTGATGTCTCACTTAGCAATTGCTCCTGCAATTCCTAAATTGTATGCCTTTTACCATACTCAAAACCCTCATATTGGACTAGCTTCAGTAGAGAGTTTAGTTACTATTCCAGCTATGATGATTACTATTTTTGTTATTTTGAGTAATTTTGTAGTCACAAAACTTGGCAAAAAAAACACGGTCTTACTTGGTTTATGTTTAATCTTAATGTCTGGGTTTATCTCATTTTTTACAAGTAATTTTTCACTTGCGATGGCTAGTCGACTACTTTTGGGTATTGGTATTGGTCTCTATAATTCGCTATCAATTAGTATCATAACGGATTTATATGAGGCTGATGAGAGAGCCAGTATGATTGGTCTTAGAACAGCATCACTTAATATCGGTAAAGCCTTAACTACATTTATTGTTGGATTGGTTTTAGCTATTGGTGTGAATTATATTTATTTGGTTTACCTTTGGTTATTCCTGTTTTCTTTTTCTTTTGGAAAATGTTCCAGAGGTTGAAAATCAAAACATACCCTTAAAGCTAGTACAACATTTGATACTAAAGCGGGTTTGTTGATGCTCATNNNNNTTAAT

SEQ ID NO: 14880 - protein, 212 aa, Streptococcus agalactiae
  VARIANT 171, 190, 209, 210, 211: Xaa = Any Amino Acid
MNSKLSLKLTILSISIFLMSHLAIAPAIPKLYAFYHTQNPHIGLASVESLVTIPAMMITIFVILSNFVVTKLGKKNTVLLGLCLILMSGFISFFTSNFSLAMASRLLLGIGIGLYNSLSISIITDLYEADERASMIGLRTASLNIGKALTTFIVGLVLAIGVNYIYLVYLXVIPVFFFFWKNVPEVENQXHTLKASTTFDTKAGLLMLXXXN

SEQ ID NO: 14881 - protein, 911 aa, Streptococcus agalactiae
ATGACTAAATACCAAGAGACTGCTAAAGCTATTTTAGCAGCAGTAGGGGGAGAAAAAAATATTCAACACGTAACCCACTGTGTGACACGATTACGATTAGTTTTAGACAATGATGAAATTGTCAACGATCAGGTTATTAAAACTATTCCGAATGTTATCGGTGTTATGCGTAAAAATGATCAATACCAAATTATTTTGGGAAATGATGTCAATAATTATTATAATGCTTTTTTGGCCTTAGGTCATTTTGAAAATACTACCAGAGAATTTTCATCACAAAAAAAGAGTTCAATATTTGAGAAATTAATTGAAACGATTGCAGGAGTCATTAAGCCGCTTATACCTGCTCTTCTAGGAGGAGGTATGCTCAAGGTTATAGGTATTTTGCTCCCTATGCTCGGTATAACAAGCTCTAGTTCTCAAACAGTAGCTTTTATCAATTTTTTTGGTGATGCCGCTTATTATTTTATGCCAATAATGATTGCTTATTCAGCTGCGTCACGATTTAAAGTTACACCTGTATTAGCTGCTACAGTAGGAGGGATTCTCTTACACCCTGCTTTTGTGACAATGGTAGCTGAAGGAAAACCATTATCTTTCTTTGGAGCTCCGGTTACACTGGCTAGTTATGGTTCTTCTGTTATTCCAATCTTAATTATGGTTTTTCTTATGCAATACATTGAGAGATGGATTAATAAAATTGTTCCTAGTGTAATGAAGAGCTTTTTACACCGACTTTGATTATTCTCATTTCTGGCTTTTTAGCCTTAGTGGTCGTGGGGCCACTGGGAGTAATTATTGGTAAAGGATTGTCTAGTGCAATGCTTTCGATTTACCATGTGGCACCATGGTTAGCTTTAGCTATTCTTGGTGCTATTATGCCCATGGTTGTTATGACAGGAATGNNNNNT

SEQ ID NO: 14882 - protein, 304 aa, Streptococcus agalactiae
  VARIANT 244, 303, 304: Xaa = Any Amino Acid
MTKYQETAKAILAAVGGEKNIQHVTHCVTRLRLVLDNDEIVNDQVIKTIPNVIGVMRKNDQYQIILGNDVNNYYNAFLALGHFENTTREFSSQKKSSIFEKLIETIAGVIKPLIPALLGGGMLKVIGILLPMLGITSSSSQTVAFINFFGDAAYYFMPIMIAYSAASRFKVTPVLAATVGGILLHPAFVTMVAEGKPLSFFGAPVTLASYGSSVIPILIMVFLMQYIERWINKIVPSVMKSFLXPTLIILISGFLALVVVGPLGVIIGKGLSSAMLSIYHVAPWLALAILGAIMPMVVMTGMXX

SEQ ID NO: 14883 - protein, 285 aa, Streptococcus agalactiae
TTGAAGAGTCATTCTACTAATGAGAAGACTTTGAAAGATTTTAAAGTTAAGGTAGCAGATTTCACAAATTCTCTCATTTCAAGCATTCCCTCACTAAACCTTTCGGAGTTGCACTTAACCCAAGAAGAAAAAGCCATTCAGTTTACATCTTCTGATTCGGAAATCATTAAAAAAGTAAGCAATGAAAGAACTCTGTATTTAAATACTAATTTATTGAATCGTCTTTTTGAAGCTAGGAAAAATAGAGATGAAGCCAAAAATAAAGTTAATCAATTAAAANNNNNT

SEQ ID NO: 14884 - protein, 95 aa, Streptococcus agalactiae
  VARIANT 94, 95: Xaa = Any Amino Acid
MKSHSTNEKTLKDFKVKVADFTNSLISSIPSLNLSELHLTQEEKAIQFTSSDSEIIKKVSNERTLYLNTNLLNRLFEARKNRDEAKNKVNQLKXX

SEQ ID NO: 14885 - protein, 306 aa, Streptococcus agalactiae
TTGCTTAAATATAATATCGAGCCTTTGGTTACCTTATCTCATTATGAAACACCGCTTCATCTTGCAAAGACCTATAATGGTTGGGCTGATAGACGTTTGATAGCATTTTTTGAGAAATTTGCTCAAACAGTCATGGAGCGTTATAAAGATAAGGTAAAATATTGGTTAACTTTTAATGAAGTGAATTCTATTTTACATATGCCTTTCACCAGTGGTGCTATTATGGCCGACAAATCACAACTAAGTCCTCAGGAGCTTTATCAAGCTATTCATCATGAATTAGTAGCATCGGCTAGAGTGACAAAT

SEQ ID NO: 14886 - protein, 102 aa, Streptococcus agalactiae
MLKYNIEPLVTLSHYETPLHLAKTYNGWADRRLIAFFEKFAQTVMERYKDKVKYWLTFNEVNSILHMPFTSGAIMADKSQLSPQELYQAIHHELVASARVTN

SEQ ID NO: 14887 - protein, 417 aa, Streptococcus agalactiae
TTGGCGTTTCATTCTTTTGATTGGACCAGGTACACTTCAGGGTATATTAAAGCATCTAATCTACAATTTGATATGATTCATCTCCTTGAATTTTTAAATATGCCGACCTTTATCCTTGCCCCACTCTCAGGTATTTTTATGGGAGCAGCAACAGCATCAACGACTTCTGGAACAACTATTGCTTCACAAACGTTTGCTGAAACCTTGATTAAATCAGGGGTACCGGCGGTTTCGGGTGCAGCTATGATTCACGCAGGTGCGACTGTTCTGGATTCGCTACCTCATGGATCCTTCTTCCATGCGACAGGCGGAGCTGTCAATATGGCTATAAAAGAACGTATGAAACTAATTAGCTATGAAGCTTTGATTGGATTAACTAGCACAATAGTTGCTGTCGTTTACTATTGTTTCTTTGGG

SEQ ID NO: 14888 - protein, 139 aa, Streptococcus agalactiae
MAFHSFDWTRYTSGYIKASNLQFDMIHLLEFLNMPTFILAPLSGIFMGAATASTTSGTTIASQTFAETLIKSGVPAVSGAAMIHAGATVLDSLPHGSFFHATGGAVNMAIKERMKLISYEALIGLTSTIVAVVYYCFFG

SEQ ID NO: 14889 - protein, 438 aa, Streptococcus agalactiae
GTGAAACAAACAAAGAAAGAATTTATTTTAGGATTAACCATTATTATTACCCTTACTTTATTAATCATGCTGATTTTTTTAGTAATGTTTAATAAGTCCAGTAACTCTAAGTTGAAGCAGACAAAAGATAGAAGAATATTATCTACTTCAACCACAAGGACATCCAGTAGCTCACATGATCAAAAAATTGTAGAAAAGTCTCTTGAAAAAAAGAAAATGGTCATGGAACAAGATATGGAATTGATGAATGCCTATAGGCTCTATTATGATTATGCCCATTTGTCCTTGAAAGAGGTTGTTCTGGCCTATATGTCTGAATATGGCATTGAAAAAAATAGTGTTGCTTTTTCTTATAAAAATTTAAAAACAGGACAAAGGGACGCTATGAATGATACTCAGGCTAGACAGCAGGGAGCACCTATAANNNNNTTAATTAAT

SEQ ID NO: 14890 - protein, 146 aa, Streptococcus agalactiae
  VARIANT 142, 143: Xaa = Any Amino Acid
MKQTKKEFILGLTIIITLTLLIMLIFLVMFNKSSNSKLKQTKDRRILSTSTTRTSSSSHDQKIVEKSLEKKKMVMEQDMELMNAYRLYYDYAHLSLKEVVLAYMSEYGIEKNSVAFSYKNLKTGQRDAMNDTQARQQGAPIXXLIN

SEQ ID NO: 14891 - protein, 336 aa, Streptococcus agalactiae
ATGATTCTAGCTATGGGAATAGGTAATGTGCTATTTGCTTTAGCTAATAATCAGATCATTTTTATCGTAGCTAGTATTTTAATAGGAGCTAGTTTTGTTGGCACCATGTCTTCTGTATTCTTTTATATTTCAAAAAACTATGCAAAAGAACATAATAACTTTATCACAAGCCTTGCCTTAACAGCTGGTAATATAGGAGTTATTTTGACACCGCTTATTTTAACGAAACTTCCAAGCCAGCTACATCTGGAACCTTTTATAACACCATTTTTAATAACAAGTGGGCTGATGGTGATTAATGTCTTTGTTTACCTAGTTTTAATGTCAAAAAATAAA

SEQ ID NO: 14892 - protein, 112 aa, Streptococcus agalactiae
MILAMGIGNVLFALANNQIIFIVASILIGASFVGTMSSVFFYISKNYAKEHNNFITSLALTAGNIGVILTPLILTKLPSQLHLEPFITPFLITSGLMVINVFVYLVLMSKNK

SEQ ID NO: 14893 - protein, 945 aa, Streptococcus agalactiae
ATGTTAATTGCTAAAGACAAACAAGGAAATTTAATTAATCTACTCGAGTCTCATCCGGGAAAGGGACAGTATTTTTGTCCAACTTGTTGTTCAGCTGTAAGGTTAAAAGCAGGTCGAATCATGAGAAGACACTTTGCACATATTAGTCTAAAAAATTGTCAGTTTCATCATGAAAATGAGTCTAATGAGCACTTGCAATTAAAAGCAAAGTTATATATGAGTTTAAGTAGAGAGAATGAAACTATGCTCGAGCATCATTTGCCAGAAATTAATCAGATTGCAGATTTATTTGTGAATGAGACATTGGCTTTAGAAGTTCAGTGTAGCCGACTATCAGAGCAGCGACTCAGGGAGCGAACAAAAGCATATCTACAGGCAGACTTTCAAGTGAGATGGTTACTAGGGGAAAAACTCTGGTTAAAGCATCGTTTAACAAATCTACATAAACAATTTTTACAATTTTCTCAAAGTATCGGATTTCATATTTGGGAGTTAGATTTGAGGTTAGAAGTACTGAGACTAAAATATTTGATTTACGAAGATTTACGCGGACATGTCTATTACTTAAGTAAAACTTGCCCTCTTAGTGGAGACGTTCTAGCATTTTTGAAGTGGCCATACCAATCAAAAAATCTAAATTTTTATAAGGTTAAACAAGACAGAAATATCAGAGATTATGTGCGTCAGCAGTTACGCTATGGCAATCAATTTTGGTTACGAAAACAAGAAAAGGCCTACCTTTCTGGTCAGAATCTATTAACCCAAGAGCTAATGATGTTTTTTCCTCAAATACAGCCACCACGTGTAGATACTGATTTTTGTCAAATAACAAATTCTCTGACATCGTTTTATCAGAATTTTACAAATTATTATCAAAAAAATAAGAATAACTTGGACCAAACACTTTATCCCCCTGTATTTTATGATAAAATAGTCACTAAGAAT

SEQ ID NO: 14894 - protein, 315 aa, Streptococcus agalactiae
MLIAKDKQGNLINLLESHPGKGQYFCPTCCSAVRLKAGRIMRRHFAHISLKNCQFHHENESNEHLQLKAKLYMSLSRENETMLEHHLPEINQIADLFVNETLALEVQCSRLSEQRLRERTKAYLQADFQVRWLLGEKLWLKHRLTNLHKQFLQFSQSIGFHIWELDLRLEVLRLKYLIYEDLRGHVYYLSKTCPLSGDVLAFLKWPYQSKNLNFYKVKQDRNIRDYVRQQLRYGNQFWLRKQEKAYLSGQNLLTQELMMFFPQIQPPRVDTDFCQITNSLTSFYQNFTNYYQKNKNNLDQTLYPPVFYDKIVTKN

SEQ ID NO: 14895 - protein, 1801 aa, Streptococcus agalactiae
ATGTCAGACAATCGCTCACATATTGAAGAAAAATACCAATGGGATTTAACTACTGTCTTTGCGACTGATGAGTTATGGGAAACTGAAGTGGTAGAGCTTACTCAAGCCATCGATGACGCAAAGGGTTTTTCAGGTCATCTGTTGGACTCAAGCCAATCTTTATTGGAGATTACGGAGGTTGAACTAGAGTTATCTCGCCGTTTAGAAAAAGTTTATGTCTATGCTTCAATGAAAAATGACCAAGACACCACTGTTGCGAAATATCAAGAATTTCAAGCGAAAGCGACAGCGCTCTATGCAAAATTTAGTGAAACATTTTCGTTTTACGAGCCAGAACTATTGCAACTTTCAGAGTCTGATTACCAGTCATTCCTTTTAGAAATGCCTGACTTGCAAAAATATGATCATTTCTTTGAGAAAATATTTGCAAATAAACCTCATGTCTTATCTCAAAACGAAGAAGAATTGTTAGCTGGTGCTAGTGAGATTTTTGGAGCAGCTGGTGAGACATTTGAAATCCTTGATAATGCAGATATGGTCTTCCCAGTTGTAAAAAATGCAAAAGGTGAGGAAGTTGAGCTTACACATGGTAATTTCATTTCCCTTATGGAATCTAGCGATAGGACGGTTCGAAAAGAAGCATATCAAGCTATGTATAGCACATATGAACAATTCCAGCATACTTACGCTAAAACATTACAAACAAATGTGAAATCTCAAAATTTTAAGGCTCGTGTGCATCATTATCAATCAGCACGCCAATCAGCTCTATCTGCCAATTTATCCAGAAGAGGTCTACGAAACTCTAATTAAGACAGTTAATCATCATTTACCGCTCTTACATCGGTATATGAAGTTGCGTCAAAAAGTTCTTGGGCTAGATGATTTGAAGATGTATGACGTATATACACCCCTTTCTCAAATGGATATGAGTTTTACTTATGATGAAGCTCTAAAAAAATCAGAGAAGGTTCTGGCTATTTTTGGCGAAGCATATTCTGAACGTGTTCATCGTGCTTTTACTGAACGTTGGATTGATGTCCATGTTAACAAAGGAAAGAGGTCAGGCGCTTATTCAGGTGGATCTTATGACACTAATGCTTTCATGCTTCTTAACTGGCAAGATACTTTAGACAATCTTTATACGCTGGTGCATGAAACTGGACATAGTCTACACTCGACGTTTACTCGTGAAAATCAACCTTATGTTTATGGTGATTATTCTATTTTCCTAGCTGAAATTGCATCAACAACAAATGAAAATATATTAACAGAAACCCTTTTGAAAGAAGTTAAAGATGATAAAAATCGCTTTGCAATTCTCAATCATTATTTGGACGGTTTCAAAGGAACAATTTTTAGACAAACACAGTTCGCTGAATTCGAACATGCCATTCATGTAGCTGATCAGGAGGGGCAAGTACTAACTAGCGAATACTTAAACAACCTTTACGCTGAGCTTAATGAAAAATATTATGGTTTGACTAAAGAAGATAATCATTTTATTCAATATGAATGGGCAAGAATTCCACACTTTTACTACAATTATTATGTTTTCCAATATGCAACCGGCTTCGCAGCAGCAAATTATTTAGCAGAGCGTATTGTAAACGGTAATCCGGAGGATAAAGAGGCCTACCTAAATTACCTTAAAGCTGGGAATTCAGATTACCCTCTAAACGTCATTGCTAAAGCCGGTGTTGATATGACTAGTGCAGACTATCTGGATGCAGCTTTTAGAGTATTTGAAGAGCGTTTAGTGGAACTGGAAAATCTTGTAGCAAAAGGCGTCCATAATGAT

SEQ ID NO: 14896 - protein, 601 aa, Streptococcus agalactiae
MSDNRSHIEEKYQWDLTTVFATDELWETEVVELTQAIDDAKGFSGHLLDSSQSLLEITEVELELSRRLEKVYVYASMKNDQDTTVAKYQEFQAKATALYAKFSETFSFYEPELLQLSESDYQSFLLEMPDLQKYDHFFEKIFANKPHVLSQNEEELLAGASEIFGAAGETFEILDNADMVFPVVKNAKGEEVELTHGNFISLMESSDRTVRKEAYQAMYSTYEQFQHTYAKTLQTNVKSQNFKARVHHYQSARQSALSANFIPEEVYETLIKTVNHHLPLLHRYMKLRQKVLGLDDLKMYDVYTPLSQMDMSFTYDEALKKSEKVLAIFGEAYSERVHRAFTERWIDVHVNKGKRSGAYSGGSYDTNAFMLLNWQDTLDNLYTLVHETGHSLHSTFTRENQPYVYGDYSIFLAEIASTTNENILTETLLKEVKDDKNRFAILNHYLDGFKGTIFRQTQFAEFEHAIHVADQEGQVLTSEYLNNLYAELNEKYYGLTKEDNHFIQYEWARIPHFYYNYYVFQYATGFAAANYLAERIVNGNPEDKEAYLNYLKAGNSDYPLNVIAKAGVDMTSADYLDAAFRVFEERLVELENLVAKGVHND

SEQ ID NO: 14897 - protein, 624 aa, Streptococcus agalactiae
ATGAAAAAGCTTACTTTTATTTGGGATTTAGATGGGACATTAATAGATTCGTATGTACCAATTATGGAAGCTCTTGAAGAAACCTATCGTCATTTTGGCTTAATATTTGATAAAGAATTAATCCATGAATATATTTTACAGGAATCAGTGGGGCAATTATTGGTAAACCTTTCAGAGGAAGAGCAAATACCTCATGAAAAACTGAAAGCATATTTTACAAAAGAACAAGAAAGTCGAGATTCTAAAATACATTTAATGCCATATGCAAAAGAGATTTTAGAATGGACCAAAGAACAAGATATTCCCAATTTTATGTATACACATAAAGGAGCAAGTACGCATTCAGTGTTGGAAACCTTGCAGATCTCTCATTATTTTGATGAAATTTTAACTGGTGTTTCGGGATTCGAGCGAAAACCACATCCACAAGGGATTAATTATTTAGTTAAACGATATTCTTTAGATAAATCAATGACTTATTACATAGGAGATCGTCCACTAGATTTGGAGGTTGCTCAAAATGCTGGTATAAAATCCATAAACTTAAGGTTAGAGAATTCCAAAGAAAACTATAATATTTCAAGTCTCAAAGATATAATATCACTTGATTTCACTCGTTTGGAT

SEQ ID NO: 14898 - protein, 208 aa, Streptococcus agalactiae; identical to SEQ ID NO: 5984

SEQ ID NO: 14899 - protein, 669 aa, Streptococcus agalactiae
ATGCGCCGTCCAGTAGTTAAAGAAGAAATTGTTCAATATATGCGTCAGCACCAAAAACAAAATAATGGCTGTTTAGCAGAGTTAGAAGCATTTGCTAAACAGGAAAATATCCCCATTATACCTCATGAAACAGCGACTTATTTTCGTTTTTTGATGCAAACATTACAACCTAAGCACATTTTAGAAATCGGAACAGCTATTGGTTTTTCGGCCCTTTTGATGGCAGAAAATGCTCCTGAAGCAAAGATAACAACAATCGATCGTAATGAAGAGATGATTGCCTTGGCTAAGGAAAACTTTGCAAAATATGATAATCACAATCAGATAACCCTTTTGGAAGGCGATGCTGTGGATGTGTTACAAACATTGGATAAATCTTACGATTTTGTATTTATGGATTCTGCTAAGTCTAAATATATCGTTTTTTTACCTCAAGTATTAAAGCATTTAGATGTTGGAGGAGTAGTTGTTTTAGATGATATTTTCCAAGGTGGAGATATTGCAAAACCTATCGATGAAGTGAGAAGGGGTCAGCGAACTATCTACCGAGGTCTGCAACGTTTATTTGACTCGACTTTGCAACATCCTGATTTAACTGCTACTTTGGTACCTTTGGGAGATGGTTTATTGATGATTCGTAAAAATGCAGATCATATTGTACTAGAAGAT

SEQ ID NO: 14900 - protein, 223 aa, Streptococcus agalactiae; identical to SEQ ID NO: 10414

SEQ ID NO: 14901 - protein, 927 aa, Streptococcus agalactiae
ATGAAAACAAGATCAAAACTTGCAGCAGGCTTTTTGACACTTATGTCAGTTGCCACATTAGCTGCCTGCTCAGGTAAAACATCAAATGGAACAAATGTTGTTACAATGAAGGGCGACACTATTACAGTCTCTGATTTTTATGATCAAGTAAAAACATCAAAAGCTGCACAACAATCAATGCTTACATTGATCCTCTCACGTGTTTTTGATACACAGTATGGTGATAAAGTTTCAGATAAAAAAGTATCAGAAGCTTATAATAAGACAGCTAAAGGCTATGGTAATTCATTTTCAAGCGCACTTTCACAAGCAGGTTTGACTCCGGAAGGTTACAAACAACAAATTCGCACAACTATGCTTGTGGAATATGCTGTAAAAGAAGCAGCTAAGAAAGAATTAACAGAAGCAAACTATAAAGAAGCATATAAAAACTATACTCCTGAAACTTCTGTACAAGTAATCAAATTGGATGCAGAAGATAAAGCTAAATCTGTCCTTAAAGATGTAAAGGCTGATGGAGCTGATTTTGCAAAGATTGCAAAAGAAAAAACAACAGCTACTGATAAAAAAGTTGAGTATAAATTTGATTCTGCAGGGACAAGCCTCCCTAAAGAAGTTATGTCAGCAGCCTTTAAGCTAGATAAAAATGGTGTTTCAGATGTGGTTTCAACGGTTGATTCAACAACTTATAAAACAAGTTACTACATCATTAAAGTAACTGATAAGACAGAGAAAAAATCTGATTGGAAATCTTACAAAAATCGCTTAAAAGAAGTTATTCTTAAGGATAAAACAAGCGATAGATCCTTCCAAAATAAAGTGATTTCAAAAGCCTTAGAAAAAGCTAACGTTAAGATTAAAGATAAAGCATTTGCAGGCATCTTATCACAATATGCTACAACAAGTGGTTCATCATCACTTAAAAAA

SEQ ID NO: 14902 - protein, 309 aa, Streptococcus agalactiae; identical to SEQ ID NO: 5988

SEQ ID NO: 14903 - protein, 483 aa, Streptococcus agalactiae
ATGGCTACTTTTCAAATTAAAGAAAAAATGTTTTCTCTAGGCGGTAAATTTACTATTACAGACCTGACTGGGCTTCCCTGTTATCACGTTGAAGGAAGTTTGTTCCCTCTACCTAAGACTTTTAAAGTCTTTGACGAAGAGGAACATCTCATTAGTCAGATTGAGAAGAAGGTTTTAAGTTTTTTACCAAAGTTTAATGTGACATTAGCCAATGGGAATCATTTCACGATTAAGAAAGATTTCTCATTTTTGAAACCTCATTACACCATTGAAGACCTTGATATGGAAGTTAAGGGAAATTTTTGGGATATGGATTTCCAACTCTTAAAAGACAATCAAGTTATAGCAAACATATCTCAACAGTGGTTTCGTATGACTTCAACTTATCAGGTAGAAGTTTACAGTGAAACTTACAACGATTTGACAATTTCGCTTGTCATAGCGATCGACTATGTCAAAGAGTTAGAAAAAAATGCATCAAAC

SEQ ID NO: 14904 - protein, 161 aa, Streptococcus agalactiae; identical to SEQ ID NO: 1520

SEQ ID NO: 14905 - protein, 2603 aa, Streptococcus agalactiae
ATGAAAGAATTATCGTCTGCACAAATCCGCCAAATGTGGTTGGATTTCTGGAAATCCAAAGGACATTCCGTTGAGCCTTCAGCTAACTTGGTTCCTGTTAATGACCCAACGCTTCTTTGGATCAACTCAGGTGTTGCAACCTTGAAAAAATATTTTGATGGTTCAGTGATTCCAGAAAATCCACGTATTACCAATGCACAAAAATCAATTCGTACTAATGATATTGAAAATGTTGGTAAAACAGCACGTCACCATACTATGTTTGAAATGCTTGGTAACTTCTCAATTGGAGACTATTTCCGTGATGAAGCTATTGAGTGGGGATTTGAACTCTTGACAAGTCCTGAATGGTTTGACTTCCCTAAAGACAAGCTCTACATGACTTATTACCCAGATGACAAGGATTCATATAACCGTTGGATTGCTTGTGGCGTTGAACCAAGTCACTTGGTGCCAATCGAGGATAACTTCTGGGAAATCGGTGCTGGTCCTTCAGGTCCAGATACTGAGATTTTCTTCGACCGTGGTGAAGATTTTGATCCAGAAAATATTGGACTTCGTCTTTTGGCTGAAGATATCGAAAACGATCGTTACATCGAAATCTGGAACATTGTTCTCTCACAATTCAATGCTGACCCAGCCGTACCACGTTCAGAATACAAAGAATTGCCAAACAAAAACATTGATACGGGTGCGGGTCTTGAACGTCTTGCAGCTGTTATGCAAGGGGCAAAAACAAACTTTGAAACTGACCTTTTCATGCCTATCATCCGTGAAGTAGAGAAATTGTCAGGTAAAACTACGATCAGATGGCGACACATGAGCTTCAGGTATCGCTGATCACATCGTGCGCTTTCATTTGCCATCGTGATGGTGCGCTCCTGAAATGAAGTCGTGGTTATGTCTCGTCGTCTTCTCCGTCGTGCGGTTATGCACGGTCGCCGTCTTGGATCAACGAAACTTTCCTTTACAAATTGGTTCCGACTGTTGGACAAATCATGGAAAGCTACTATCCAGAAGTGCTTGAAAAACGTGATTTTATTGAGAAAATCGTTAAACGTGAGGAAGAAACATTTGCTCGTACTATCGATGCTGGTAGCGGTCACTTAGATTCATTGCTTGCGCAGCTTAAGGCTGAAGGTAAAGACACACTTGAAGGTAAAGATATCTTCAAACTTTATGATACTTATGGATTCCCAGTTGAATTGACAGAGGAATTGGCAGAAGATGCAGGCTATAAGATTGACCACGAAGGCTTTAAGTCAGCCATGAAAGAACAACAAGACCGTGCGCGTGCAGCTGTTGTTAAGGGTGGTTCGATGGGGATGCAAAATGAAACCCTAGCTGGTATTGTTGAAGAATCACGATTCGAATACGACACATATAGTCTTGAATCAAGTCTTTCAGTTATCATTGCTGATAATGAACGTACTGAGGCTGTTTCAGAAGGTCAAGCCCTTCTTGTCTTTGCTCAAACACCATTCTATGCTGAAATGGGTGGACAGGTTGCTGACACAGGTAGAATCAAAAATGATAAGGGTGACACAGTTGCTGAGGTTGTTGATGTTCAAAAAGCACCAAATGGTCAACCTCTACACACTGTAAACGTTTTGGCATCACTTTCAGTTGGAACAAACTACACACTTGAAATCAACAAAGAGCGTCGTTTGGCTGTTGAGAAAAACCACACAGCAACTCACTTGCTCCATGCAGCCCTTCACAATGTTATCGGTGAACACGCAACTCAGGCTGGTTCATTGAACGAAGAAGAATTCTTGCGCTTTGATTTTACTCACTTTGAAGCAGTAAGCAATGAGGAACTTCGTCACATTGAACAAGAAGTTAATGAGCAAATTTGGAACGCTCTTACAATCACAACGACTGAAACTGACGTTGAAACCGCAAAAGAGATGGGAGCAATGGCACTTTTTGGTGAGAAATATGGTAAAGTGGTTCGTGTGGTTCAAATTGGTAATTATTCTGTTGAACTTTGCGGTGGAACTCACTTAAATAATTCTTCAGAAATCGGTCTCTTCAAGATTGTCAAAGAAGAAGGTATTGGTTCAGGCACTCGTCGTATTATTGCAGTTACTGGTAGACAAGCTTTTGAAGCTTATCGTAACCAAGAGGATGCACTAAAAGAGATCGCTGCTACTGTAAAAGCTCCGCAATTGAAAGATGCAACAGCTAAAGTACAAGCTCTTAGCGATTCACTTCGTGATCTTCAAAAAGAAAATGTAGAGCTTAAAGAAAAAGCAGCAGCAGCAGCAGCTGGTGATGTCTTTAAAGATATTCAAGAAGCTAAGGGCGTGCGCTTCATTGCTAGTCAAGTTGATGTTGCAGACGCAGGTGCACTTCGTACATTTGCTGATAACTGGAAACAAAAAGACTACTCTGATGTGCTTGTTCTCGTAGCAGCTATTGGTGAGAAGGTTAATGTCCTTGTTGCAAGCAAAACTAAAGATGTCCACGCTGGTAACATGATCAAAGGATTGGCACCAATTGTAGCAGGTCGTGGTGGTGGTAAACCAGACATGGCTATGGCAGGTGGTAGCGATGCAAGTAAAATTGCAGAGCTGCTAGCAGCAGTTGCAGAAAATTTA

SEQ ID NO: 14906 - protein, 872 aa, Streptococcus agalactiae
  VARIANT 278: Xaa = Any Amino Acid
MKELSSAQIRQMWLDFWKSKGHSVEPSANLVPVNDPTLLWINSGVATLKKYFDGSVIPENPRITNAQKSIRTNDIENVGKTARHHTMFEMLGNFSIGDYFRDEAIEWGFELLTSPEWFDFPKDKLYMTYYPDDKDSYNRWIACGVEPSHLVPIEDNFWEIGAGPSGPDTEIFFDRGEDFDPENIGLRLLAEDIENDRYIEIWNIVLSQFNADPAVPRSEYKELPNKNIDTGAGLERLAAVMQGAKTNFETDLFMPIIREVEKLSGKTYDPDGDNMSFXVIADHIRALSFAIGDGALPGNEGRGYVLRRLLRRAVMHGRRLGINETFLYKLVPTVGQIMESYYPEVLEKRDFIEKIVKREEETFARTIDAGSGHLDSLLAQLKAEGKDTLEGKDIFKLYDTYGFPVELTEELAEDAGYKIDHEGFKSAMKEQQDRARAAVVKGGSMGMQNETLAGIVEESRFEYDTYSLESSLSVIIADNERTEAVSEGQALLVFAQTPFYAEMGGQVADTGRIKNDKGDTVAEVVDVQKAPNGQPLHTVNVLASLSVGTNYTLEINKERRLAVEKNHTATHLLHAALHNVIGEHATQAGSLNEEEFLRFDFTHFEAVSNEELRHIEQEVNEQIWNALTITTTETDVETAKEMGAMALFGEKYGKVVRVVQIGNYSVELCGGTHLNNSSEIGLFKIVKEEGIGSGTRRIIAVTGRQAFEAYRNQEDALKEIAATVKAPQLKDATAKVQALSDSLRDLQKENVELKEKAAAAAAGDVFKDIQEAKGVRFIASQVDVADAGALRTFADNWKQKDYSDVLVLVAAIGEKVNVLVASKTKDVHAGNMIKGLAPIVAGRGGGKPDMAMAGGSDASKIAELLAAVAENL

SEQ ID NO: 14907 - protein, 714 aa, Streptococcus agalactiae
ATGGTTGGTTTAGGAACAGTTATCAATGTTATTCTTATTATAGTTGGAGGCTTTGTAGGTTTATTTTTGAAAAATTTTTTGAAAGAATCACTTCAAAAGAGCCTCATGCAAGCCATGGGAGTCGCAGTTTTATTTATTTCAATATCAGGTGTTTTGGAGAAAATGATGTTAGTCGAAAAGTCACATCTCATCTCTAATCATACAAATATGATGATTATTACTCTTGCTCTAGGTACGGTACTTGGAGAGTTGCTATCACTAGATTCGTATATTGATAGATTTGGGGACTATCTTAAGCAAAAAACAGGAAGTGGTAACGATATTAAATTTGTGGAAGCATTCGTCACCTCAACTTGTACTGTTTGTATTGGAGCAATGGCCGTTGTTGGTAGCATTCAAGATGGTATAGCAGCAGATCATTCGATTTTATTTGCTAAGGGAATGTTAGACATGATTATTATTGCAATTATGACAGTGTCTTTAGGGAAAGGGGCTCTATTTTCTGCACTTCCTGTCGCTTTACTACAAGGTAGCCTTACGATTGTTGCTTTTTTCATGGGGAGCCTACTTAATCCATCATCTTTAGATTACCTTAACTTAGTAGGAAATATGCTTATATTCTGTGTCGGTGTTAATTTACTCTTTAACCTAAATATTAAAGTTATCAATATGTTGCCAGCAATTATTTTAGCTATATTATGGGGAAGTTTTATA

SEQ ID NO: 14908 - protein, 238 aa, Streptococcus agalactiae
MVGLGTVINVILIIVGGFVGLFLKNFLKESLQKSLMQAMGVAVLFISISGVLEKMMLVEKSHLISNHTNMMIITLALGTVLGELLSLDSYIDRFGDYLKQKTGSGNDIKFVEAFVTSTCTVCIGAMAVVGSIQDGIAADHSILFAKGMLDMIIIAIMTVSLGKGALFSALPVALLQGSLTIVAFFMGSLLNPSSLDYLNLVGNMLIFCVGVNLLFNLNIKVINMLPAIILAILWGSFI

SEQ ID NO: 14909 - protein, 816 aa, Streptococcus agalactiae
ATGAATCTATTATTTTCTATTGATGATATGTACGTAGATCATTTTAAAGTGATGCTTTATTCGCTTGTCCGACAAACCAAGAATCGTAAGTTAGAGATATATGTCTTACAAAAAACATTACTCAAACGTCATACAGAACTTATTCAATATACTCAAAATTTAGAAGTTGGCTATCATCCAATAATTGTAGGTACCGAAGTATTTGCTCAGGCACCTACAACTGATCGCTATCCAGATACAATATATTATCGACTTTTGGCTCATAAATTTTTACCTGAGACCTTAGATAGGATACTTTATTTAGATGCAGATATGCTTTGCTTAAATGATTTCTCAAGTTTATATGACATGGAGTTAGGTGATCAACTATATGCAGCGGCAAGTCATAATACTGATGGTAAGTTTCTAGATTATGTCAATAAATTACGGTTAAAAAATGTAGAGCTAGAATCCTCTTATTTCAATACAGGGGTACTCTTGATGAACTTGCCTGCTATACGAAAAGTTGTTCATCAACAAACTATCTTAGATTACATAATGCAAAACCGTGGTCGTCTAATCTTACCAGATCAGGATATCTTAAATGGCTTATACGCTAATTTGGTTAAACCAATACCTGATGAAATTTATAATTATGATGCTAGGTATAGTCTTATTTATCAATTAAAAAGTCGCAATGAATGGGATTTAGAGTGGGTTATTAACCATACTGTTTTTTTACATTTTGCAGGACGAGATAAACCATGGAAAAAAGATTATAGAGGACGTTACTCGGGCCTTTATAAGTTTATGGCTAAAGAGGCTTTAACTAAAAAT

SEQ ID NO: 14910 - protein, 272 aa, Streptococcus agalactiae; identical to SEQ ID NO: 1526

SEQ ID NO: 14911 - protein, 285 aa, Streptococcus agalactiae
ATGACGTATATTGGTGTACCTAAAGAGCAAAAGGCACTCAGTCGTAGGGGTAAACAATTAGAAAAAATAAATCAGGGAGGAAAAACACTTATGTCACAAATGATTCAAGATTTAGTAGGAAGCACATGTATGATTTATTTAGAGGATGGTTTTCAAACGCATCCTTATGAGATTTTAAAGGTAGATGAGGATTGGGTACAGATTCGTCGCAACTTGAAACGAAGTAAAGAGGAGGTACGTATTCTCCGTATTCATGATATCAAGGAATTGCGTCCAGTCAATAAA

SEQ ID NO: 14912 - protein, 95 aa, Streptococcus agalactiae
MTYIGVPKEQKALSRRGKQLEKINQGGKTLMSQMIQDLVGSTCMIYLEDGFQTHPYEILKVDEDWVQIRRNLKRSKEEVRILRIHDIKELRPVNK

SEQ ID NO: 14913 - protein, 213 aa, Streptococcus agalactiae
ATGGGATTAATTTTAAAAAACAGGCTCAAAGAATTGCGTGCACGAGATGGTATCAATCAAACAGAACTCGCCAAATTAACGGGAGTCTCAAGACAAACAATTAGCCTAATTGAACGCGGAGAATATACGCCATCTGTTATTATTGCTATGAAGATTTCTCAAGTATTTAAAGAATCCCTAGAGAATGTTTTTAGTTTAGTGTCAACGGAGGAA

SEQ ID NO: 14914 - protein, 71 aa, Streptococcus agalactiae
MGLILKNRLKELRARDGINQTELAKLTGVSRQTISLIERGEYTPSVIIAMKISQVFKESLENVFSLVSTEE

SEQ ID NO: 14915 - protein, 756 aa, Streptococcus agalactiae
ATGAAAAATTTTATAAAACAAAGTGATACTACATTTGTTCGAATTATCAAAAGTCTTTTAATTGGTGGTTTTATAGGGGCCATACTTGGTTCCGTAGGAGCTCTTTTTAACATATTTGGTCAAGATAAGTACTTATCTGAAATTAATATTGTTCAATATTTCCTATGGGTTAGTCGTATTGTTGTAATTATAACAGCTCTCTTTAGTCTCATCTACCTCTATCAGATTCAAAAATATCAGAAATTTTTTTTCAATGTTGATGAAAGTCAATCTGAAGAAATTTATCGCCAGATTAATTTAAGACATTCTTATGGGATGACTTTTGTGTCAATTTCAATAGTACTCAGTATATTTAATACTTTATTTAACTATAAACTAAATATTTTTGATGATTCAGTTACTTTAGTTATTCCAATATATGATTTATCACTGTTATTTGTTTTATTGGGTTTACATATATATTTTTTAAAGGTATATCGGAATATCCGAGGTATAAAAATGACAGTCGCTCCAACTTTAAAAGAGTTGAAAAACAATGTCTTACAATTGGACGAAGCAGAGTTGGAATCAAATTATAAGATGTGTTTTGATATTGTCATGAATTTAAGTGGTTTTATTTTCCCTACGATCTATTTTGTATTATTCTTTATCTCATTTGTTTTTCAAAAAGTGGAGATTGTAGCAATTATTATAACAACATCTATTCATATCTACATTCTCATTAAGTCTTTAAAAGCAGCACGTCATTTTTATAGA

SEQ ID NO: 14916 - protein, 252 aa, Streptococcus agalactiae
MKNFIKQSDTTFVRIIKSLLIGGFIGAILGSVGALFNIFGQDKYLSEINIVQYFLWVSRIVVIITALFSLIYLYQIQKYQKFFFNVDESQSEEIYRQINLRHSYGMTFVSISIVLSIFNTLFNYKLNIFDDSVTLVIPIYDLSLLFVLLGLHIYFLKVYRNIRGIKMTVAPTLKELKNNVLQLDEAELESNYKMCFDIVMNLSGFIFPTIYFVLFFISFVFQKVEIVAIIITTSIHIYILIKSLKAARHFYR

SEQ ID NO: 14917 - protein, 557 aa, Streptococcus agalactiae
ATGTCAAAAAATAACAACACTACCTGTCTTATTGAAACTGCTATTTTTGCAGCGCTTGCTATGGCTTTATCAATGATTCCTGATTTTGCGTCATGGTTCACTCCCTCTTTTGGAGCAATTCCTCTGATACTTTTTGCATTACGTCGTGGTACAAAATACGGTCTATTTGCTGGCTTAATTTGGGGCTTATTGCACTTTGTTCTTTCCAAAGTATATACCTAGTTATCCAAGTTTTTATAGAATACATCTTAGCATTTATAAGTATGGGACTTGCAGGCGTATTTTCTGCTAAATTTAAAGATGCACTTAGCAGCAGCTCTAAAACTAAAGCTTTATCATTAGCATTATCTGGAGCAATATTAGCAACATTTGTTCGTTATGTTTGGCATTATATCGCTGGTGTTATTTTTTGGGCTAGTTATGCACCAAAAGGTATGTCTGCTACATTATACTCATTAAGCGTCAATGGTACTGCTGGTTTGTTAACTCTATTTTTTGTAGTCATTAGTATTATTATTTTAGTTATCAGCTACCCTAGCTTCTTTTTACCTAAGAAA

SEQ ID NO: 14918 - protein, 187 aa, Streptococcus agalactiae
  VARIANT 76: Xaa = Any Amino Acid
MSKNNNTTCLIETAIFAALAMALSMIPDFASWFTPSFGAIPLILFALRRGTKYGLFAGLIWGLLHFVLSKVYYLSXSQVFIEYILAFISMGLAGVFSAKFKDALSSSSKTKALSLALSGAILATFVRYVWHYIAGVIFWASYAPKGMSATLYSLSVNGTAGLLTLFFVVISIIILVISYPSFFLPKK

SEQ ID NO: 14919 - protein, 957 aa, Streptococcus agalactiae
ATGACAACTTACTACGAAGCTATAAACTGGAACGAAATTGAAGATGTTATTGATAAATCAACTTGGGAAAAACTAACCGAACAATTTTGGCTCGATACACGTATCCCTTTATCAAATGACTTAGACGATTGGCGCAAACTTTCCGCTCAAGAAAAAGATCTTGTTGGCAAGGTTTTTGGAGGCTTAACCCTACTTGATACCATGCAATCAGAAACTGGTGTTGAAGCTATTCGTGCCGATGTTCGCACGCCTCACGAAGAAGCTGTCTTAAACAATATTCAATTCATGGAATCTGTTCACGCTAAATCTTATTCTTCAATTTTCTCAACTTTAAATACTAAATCAGAAATTGAAGAAATTTTCGAGTGGACTAATAATAATGAGTTCCTTCAAGAAAAAGCACGTATTATCAATGACATTTATGCTAATGGAAATGCCCTTCAAAAAAAGGTGGCTTCCACCTACCTCGAAACTTTCCTTTTTTATTCTGGCTTTTTCACACCTCTTTACTATTTGGGAAATAATAAGTTAGCAAATGTTGCTGAAATCATTAAATTAATTATTCGTGATGAATCTGTACATGGTACTTATATCGGTTACAAATTCCAGCTTGGTTTTAACGAATTACCAGAAGATGAGCAAGAGAATTTTCGTGATTGGATGTATGACCTCCTTTATCAGCTGTATGAAAACGAAGAAAAATACACCAAGACACTTTATGATGGCGTAGGATGGACTGAAGAAGTTATGACCTTTTTACGCTACAATGCTAATAAAGCTCTTATGAATTTAGGACAAGATCCTTTATTCCCAGATACAGCAAATGATGTCAACCCAATTGTTATGAATGGTATTTCAACAGGAACATCAAACCATGACTTCTTCTCTCAAGTAGGTAATGGTTACCTACTTGGTAGCGTTGAAGCTATGCATGATGATGACTATAACTATGGATTA

SEQ ID NO: 14920 - protein, 319 aa, Streptococcus agalactiae; identical to SEQ ID NO: 1534

SEQ ID NO: 14921 - protein, 2157 aa, Streptococcus agalactiae
ATGAGTTTAAAAAATATTGGCGATGTATCTTACTTTCGCCTAAATAATGAAATTAACCGTCCTGTTAATGGACAAATCCCACTCCATAAAGATAAAGAAGCCTTAACTGCTTTTTTCAAAGAAAACGTACAGCCTAATTCAAAAGCTTTTGACTCAATCACTGATAAAATTGCTTACCTCCTTAAGTATGATTATCTTGAAGAAGCTTTCCTCAATAAATATCGTCCTGAATTTATTGAAGAATTATCTACCAAACTCTTCGATAAAAAGTTTCGTTTTAAATCCTTCATGGCAGCCTATAAGTTTTATCAGCAGTATGCATTAAAAACAAATGATGGAGAATACTATTTAGAAAGTATTGAAGATCGCGTTCTCTTTAACGCTCTTTATTTTGCAGACGGTGATGAAGAACTAGCAACTGACTTAGCTCTAGAAATGATTTCACAACGCTATCAACCTGCAACACCAAGTTTTTTAAATGCTGGTCGAAGTCGTCGCGGAGAATTAGTCTCATGTTTCTTAATCCAAGTAACTGATGATATGAATGCTATTGGTCGTTCGATTAATTCAGCTCTTCAATTATCTCGTATTGGTGGTGGGGTTGGAATATCACTTAGTAACCTTCGTGAGGCTGGAGCTCCTATCAAAGGTTTTGCTGGTGCTGCTTCTGGAGTCGTTCCAGTCATGAAATTATTTGAAGACAGTTTTTCTTACTCCAACCAACTTGGACAACGCCAAGGTGCTGGAGTTGTTTACCTTGACGTTTTCCATCCAGATATTATTTCATTCCTATCAACTAAAAAAGAAAATGCTGATGAAAAAGTACGTGTTAAAACATTGTCATTAGGGATTACTGTACCCGATAAATTCTATGAACTAGCACGTAACAATCAAGAAATGTACTTGTTTAGTCCTTATAGTATCGAACGTGAATATGGTGTTCCTTTCAGCTATATTGATATTACCGAAAAATATGATGAATTAGTCGCTAACCCTAATATCACTAAAACAAAAATCAATGCTCGTGATTTAGAAACAGAGATTTCTAAACTTCAACAAGAATCTGGTTATCCTTACATCATCAATATTGACACTGCTAATCGTACTAATCCTGTTGACGGAAAAATTATTATGTCAAATCTTTGCTCTGAGATTTTGCAAGTACAAAAACCAAGTCTTATCAATGATGCTCAAGAATACCTTGAAATGGGAACTGATATTTCTTGTAACCTTGGCTCAACTAATGTTTTAAATATGATGACATCTCCTGATTTTGGAAAATCAATTAAAACAATGACTCGTGCTCTAACTTTCGTTACTGACTCATCAAATATTGAAGCTGTTCCAACTATTAAGAACGGAAATGCTCAAGCACATACATTTGGACTTGGAGCAATGGGACTCCACTCCTATTTGGCAAAAAATCATATCGAATATGGTAGTCCAGAATCAATTGAATTTACTGATATTTATTTCATGCTAATGAACTACTGGACCTTAGTAGAATCAAACAATATTGCCCGCGAACGTCAAACAACATTTGTAGGTTTTGAAAAATCAAAATACGCTGACGGTACATACTTTGATAAATATGTATCTGGAAAATTTGTTCCACAATCTGACAAAGTAAAATCCCTATTTACTAATCATTTTATCCCCGAAGCTAAAGATTGGGAAAACCTTAGATACGCAGTTATGAAAGACGGACTATATCATCAAAATCGGCTTGCAGTTGCTCCGAATGGTTCTATTTCGTATATCAACGATTGTTCAGCATCTATCCACCCTATTACACAACGTATTGAAGAGCGTCAAGAGAAAAAAATCGGGAAAATTTATTATCCAGCTAATGGCTTAGCTACAGATACTATCCCTTATTACACTTCTGCCTATGATATGGATATGCGTAAAGTAATAGACGTCTATGCCGCAGCAACTGAGCACGTAGACCAAGGTCTCTCAATGACACTCTTTTTACGAAGCGAATTACCAAAGGAGTTGTACGAGTGGAAAACAGAAAGTAAGCAGACTACTCGCGACCTTTCAATCCTACGTAACTATGCTTTCAACAAAGGTGTGAAATCAATCTACTATATCCGTACTTTTACAGATGATAGTAGCGAAGTCGGAGCTAATCAATGCGAAAGTTGTGTCATC

SEQ ID NO: 14922 - protein, 719 aa, Streptococcus agalactiae
MSLKNIGDVSYFRLNNEINRPVNGQIPLHKDKEALTAFFKENVQPNSKAFDSITDKIAYLLKYDYLEEAFLNKYRPEFIEELSTKLFDKKFRFKSFMAAYKFYQQYALKTNDGEYYLESIEDRVLFNALYFADGDEELATDLALEMISQRYQPATPSFLNAGRSRRGELVSCFLIQVTDDMNAIGRSINSALQLSRIGGGVGISLSNLREAGAPIKGFAGAASGVVPVMKLFEDSFSYSNQLGQRQGAGVVYLDVFHPDIISFLSTKKENADEKVRVKTLSLGITVPDKFYELARNNQEMYLFSPYSIEREYGVPFSYIDITEKYDELVANPNITKTKINARDLETEISKLQQESGYPYIINIDTANRTNPVDGKIIMSNLCSEILQVQKPSLINDAQEYLEMGTDISCNLGSTNVLNMMTSPDFGKSIKTMTRALTFVTDSSNIEAVPTIKNGNAQAHTFGLGAMGLHSYLAKNHIEYGSPESIEFTDIYFMLMNYWTLVESNNIARERQTTFVGFEKSKYADGTYFDKYVSGKFVPQSDKVKSLFTNHFIPEAKDWENLRYAVMKDGLYHQNRLAVAPNGSISYINDCSASIHPITQRIEERQEKKIGKIYYPANGLATDTIPYYTSAYDMDMRKVIDVYAAATEHVDQGLSMTLFLRSELPKELYEWKTESKQTTRDLSILRNYAFNKGVKSIYYIRTFTDDSSEVGANQCESCVI

SEQ ID NO: 14923 - protein, 222 aa, Streptococcus agalactiae; identical to SEQ ID NO: 10439

SEQ ID NO: 14924 - protein, 74 aa, Streptococcus agalactiae; identical to SEQ ID NO: 1538

SEQ ID NO: 14925 - protein, 261 aa, Streptococcus agalactiae; identical to SEQ ID NO: 10441

SEQ ID NO: 14926 - protein, 87 aa, Streptococcus agalactiae; identical to SEQ ID NO: 1540

SEQ ID NO: 14927 - protein, 1722 aa, Streptococcus agalactiae
ATGCTTAAAGGAATCGCAGCCTCTGATGGTGTTGCAGTTGCTAAAGCATATCTACTTGTCCAACCGGATTTGTCATTTGAGACTGTAACAGTCGAAGATACAAACGCAGAAGAAGCTCGCCTTGATGTTGCACTCCAAGCTTCACAAGACGAGCTTTCTGTTATCCGTGAGAAGGCAGTAGAAAGCTTAGGCGAAGAAGCCGCAGCTGTATTTGATGCTCATTTAATGGTTCTTTCTGACCCAGAAATGATTAATCAAATTAAAGAGACTATTCGTGCAAAACAAGTAAATGCAGAAACAGGTCTTAAAGAAGTGACTGATATGTTCATCACTATCTTTGAAGGTATGGAAGATAACCCATACATGCAAGAACGTGCAGCAGATATCCGTGATGTTGCCAAACGTGTCTTAGCACATCTTTTGGGTGTTAAATTACCAAACCCGGCAACTATCAATGAAGAATCAATCGTTATTGCACACGATTTGACACCTTCTGATACAGCTCAATTAAATAAACAATTTGTTAAAGCTTTTGTAACAAATATTGGAGGGCGTACAAGTCACTCAGCTATTATGGCACGTACACTCGAAATCGCAGCTGTTCTTGGTACAAATGATATTACTGAACGTGTTCAAGATGGTCAGTTGATTGCTGTTAATGGTATTACTGGTGAAGTTATCATTGAACCAACTGAAGCTCAAATTTCAGCCTTCAAGGCAGCAGGTGAAGCTTATGCCAAGCAAAAAGCTGAATGGGCACTTCTTAAGGATGCACAAACAGTTACTGCTGATGGTAAACATTTTGAATTAGCTGCTAATATCGGTACACCTAAAGATGTTGAGGGTGTTAACGAAAATGGAGCAGAAGCAGTTGGTCTTTACCGTACAGAGTTCTTATATATGGATTCACAAGATTTCCCAACAGAAGATGAGCAATATGAAGCATATAAAGCAGTTCTTGAGGGTATGAATGGTAAACCAGTTGTTGTTCGTACAATGGATATCGGTGGAGATAAAGAGCTTCCTTACTTTGATCTTCCAAAAGAGATGAACCCATTCTTAGGATTCCGTGCATTGCGTATTTCAATTTCTGAAACTGGTGATGCAATGTTCCGCACACAAATCCGAGCACTTCTTCGTGCTTCAGTTCATGGACAGCTACGCATCATGTTCCCAATGGTTGCTTTGCTTAAAGAATTCCGTGCTGCTAAAGCTATATTTGAAGAAGAGAAAGCGAACTTGTTAGCTGACGGTGTAGCAGTAGCTGAAGGCATTGAAGTTGGTATTATGATTGAAATCCCAGCGGCAGCTATGCTTGCAGACCAATTTGCAAAAGAAGTTGATTTCTTCTCAATTGGTACTAATGATCTTATCCAATACACAATGGCTGCGGACCGTATGAATGAGCAAGTTTCATACCTCTATCAACCATACAATCCATCAATCCTTCGTTTGATTAACAACGTTATCAAAGCTGCTCATGCTGAAGGTAAATGGGCAGGTATGTGTGGTGAGATGGCCGGTGATCAAACTGCGGTTCCACTTCTTGTTGGTATGGGATTGGATGAATTCTCAATGTCAGCAACCTCAGTACTTCGTACACGTAGCTTAATGAAAAAATTGGACACAGCTAAAATGGAAGAATACGCTAATCGTGCTCTTTCAGAGTGTTCAACTATGGAAGAAGTTATCGAACTTCAAAAAGAATACGTTGACTTTGAC

SEQ ID NO: 14928 - protein, 574 aa, Streptococcus agalactiae; identical to SEQ ID NO: 1542

SEQ ID NO: 14929 - protein, 1425 aa, Streptococcus agalactiae
TTGACAAAAGAATATCAAAATTATGTCAATGGCGAATGGAAATCATCTGTTAATCAGATTGAGATTTTGTCACCAATTGATGATTCTTCATTGGGATTCGTGCCAGCGATGACTCGAGAAGAAGTTGATCATGCTATGAAAGCGGGTCGTGAGGCTTTACCAGCTTGGGCTGCTTTAACAGTATATGAACGTGCACAATACCTTCATAAAGCCGCAGACATTATTGAACGTGATAAAGAAGAAATTGCTACTGTTTTAGCAAAAGAAATTTCTAAAGCTTACAATGCTTCAGTAACTGAGGTTGTAAGGACAGCTGATCTTATTCGTTATGCAGCAGAAGAAGGAATTCGTTTATCAACTTCAGCTGACGAAGGTGGAAAAATGGATGCTTCAACAGGTCATAAGTTGGCTGTTATTCGTCGTCAACCAGTAGGTATCGTTTTAGCAATCGCACCTTATAATTACCCTGTTAACCTCTCAGGATCAAAAATTGCGCCAGCTCTAATTGGTGGAAACGTTGTGATGTTTAAACCACCAACACAAGGTTCAGTCTCAGGACTTGTTTTAGCAAAAGCTTTTGCAGAAGCAGGTCTTCCAGCAGGTGTCTTTAATACTATTACAGGACGCGGTTCTGAGATTGGAGATTACATTGTTGAGCATGAAGAAGTTAATTTTATTAACTTTACAGGATCAACGCCAGTTGGACAACGTATTGGTAAGTTGGCAGGAATGCGTCCAATTATGCTTGAGTTGGGCGGTAAGGATGCAGGTATCGTCTTAGCTGATGCTGACCTTGATAACGCTGCTAAACAAATCGTTGCAGGTGCTTATGATTACTCTGGACAACGCTGTACGGCAATTAAGCGTGTGCTTGTCGTTGAAGAAGTTGCAGATGAATTGGCAGAAAAAATATCTGAAAATGTAGCAAAATTATCAGTAGGTGATCCATTTGATAATGCAACGGTGACACCGGTTATTGATGATAATTCAGCTGACTTTATTGAAAGCTTAGTAGTAGATGCACGTCAAAAAGGTGCGAAAGAATTGAATAAATTTAAACGTGATGGTCGTCTATTAACTCCAGGATTGTTTGATCATGTTACTTTAGATATGAAACTAGCTTGGGAAGAGCCTTTTGGACCAATTCTCCCAATTATTCGTGTCAAGGATGCAGAAGAAGCTGTTGCTATTGCCAACAAATCTGATTTTGGATTACAATCATCAGTCTTTACACGTGATTTCCAAAAAGCATTTGATATAGCAAATAAACTTGAAGTTGGTACAGTTCACATTAACAATAAGACTGGACGTGGTCCTGATAACTTCCCATTCTTAGGACTCAAAGGATCTGGTGCAGGTGTTCAAGGTATCAGATATTCAATTGAAGCAATGACAAATGTAAAATCGATTGTTTTTGATATGAAA

SEQ ID NO: 14930 - protein, 475 aa, Streptococcus agalactiae
MTKEYQNYVNGEWKSSVNQIEILSPIDDSSLGFVPAMTREEVDHAMKAGREALPAWAALTVYERAQYLHKAADIIERDKEEIATVLAKEISKAYNASVTEVVRTADLIRYAAEEGIRLSTSADEGGKMDASTGHKLAVIRRQPVGIVLAIAPYNYPVNLSGSKIAPALIGGNVVMFKPPTQGSVSGLVLAKAFAEAGLPAGVFNTITGRGSEIGDYIVEHEEVNFINFTGSTPVGQRIGKLAGMRPIMLELGGKDAGIVLADADLDNAAKQIVAGAYDYSGQRCTAIKRVLVVEEVADELAEKISENVAKLSVGDPFDNATVTPVIDDNSADFIESLVVDARQKGAKELNKFKRDGRLLTPGLFDHVTLDMKLAWEEPFGPILPIIRVKDAEEAVAIANKSDFGLQSSVFTRDFQKAFDIANKLEVGTVHINNKTGRGPDNFPFLGLKGSGAGVQGIRYSIEAMTNVKSIVFDMK

SEQ ID NO: 14931 - protein, 1251 aa, Streptococcus agalactiae
ATGAAGAAATTAATTATAGGTATTTTTAGTCTAATTATTATAGCGATTCTTGCTTGGCAAGGTTTTTCGTTTTTGAAACATAAGGAAATAAAACTTCAACAAGCTGTTGTTGAAAAAGAAATTCGCATAGCCGAGAAAACGGTAGAAGTGGTGAAAAGACAGAAAACTGAACGTGTTCTTTTTCTTGAACCTAAAGGATATGACAAAAGTCTAAGCGCTGATATTTTAAAGTGGAATCAAAAAAGTTTTGAGCATAAAAAATTTTATGACAATCAATACATTATTCTACGTCCTCAATTAGCAGATTCTAACTTTGCAAATGTTAAAAAATTATCCATTTATCAAATCTTATATCAAAAAGAAAAAGGAAGTATGTTTCAAAAATCAAGTCGCCTTTTGAGAACCTACTTACTTGATCAAAATAAGAAACCTTTTGAATTAGATGAGCTTTTAGCTCATAATATATCTGGATTTAAGGCTATTTTAGAAAATATAGCTCCAGGAACTCAACTAAAGGAACATGATAGCAATAAAGAATTTTTAAAAACTGGAAGAGTAACAGATGGGCTAGATGTTAAAGATGGTAAGTTAATTATTAATGATTTAAAATTACCACTTGATAAATTATATAATGTGATCGATGAGTCATATTTAAAATCAAGTGATCTAGATTTAGTTTCTAACTTAAAAGCTAAAGCACCACGTGTTGCACTTACCTTTGATGATGGACCAAATGAAAAAACGACTCCTAAAGCCTTAGAAATCCTTAAAAGATATAATGCTAAAGCGACTTTCTTTATAATGGGACAAAGTGCTGTAGGGCACACAGATATTTTACAAAGGATGCATGCTGAAGGTCATGAGATTGGTAATCATACATGGGATCATCCTAATTTAACCAAACTACCAGCGGAGAAAATCAAGGAAGAGATTCATAAGACTAATGATCTAATCATGAAAGCAACAGGACAAAAACCAGTGTACTTACGTCCCCCTTACGGAGCAACAAATGCTACTGTAAAAACAGTGACAGGATTGAAAGAAATGTTGTGGTCAGTTGATACAGAAGACTGGAAAAATCATAATACACAAGCAATGATGACCAATATCAAAAAACAATTACGTCCTGGGGGAGTGATTTTGATGCATGATATTCACCAGACATCCATAGATGCTTTGCCTACAATTATGGATTATCTGACAACCCAGGGTTATTATTTTGTTACTGTAGGTGAATTATATTCAACGCCT

SEQ ID NO: 14932 - protein, 417 aa, Streptococcus agalactiae
MKKLIIGIFSLIIIAILAWQGFSFLKHKEIKLQQAVVEKEIRIAEKTVEVVKRQKTERVLFLEPKGYDKSLSADILKWNQKSFEHKKFYDNQYIILRPQLADSNFANVKKLSIYQILYQKEKGSMFQKSSRLLRTYLLDQNKKPFELDELLAHNISGFKAILENIAPGTQLKEHDSNKEFLKTGRVTDGLDVKDGKLIINDLKLPLDKLYNVIDESYLKSSDLDLVSNLKAKAPRVALTFDDGPNEKTTPKALEILKRYNAKATFFIMGQSAVGHTDILQRMHAEGHEIGNHTWDHPNLTKLPAEKIKEEIHKTNDLIMKATGQKPVYLRPPYGATNATVKTVTGLKEMLWSVDTEDWKNHNTQAMMTNIKKQLRPGGVILMHDIHQTSIDALPTIMDYLTTQGYYFVTVGELYSTP

SEQ ID NO: 14933 - protein, 1080 aa, Streptococcus agalactiae
ATGATAACAAAATTTCCAGACCAATGGCAGGATAAATTAACCCAGCGTCAATTTGATGATCTAACAGATATTCAAAATAAACTTTTTCAACCTATTACTGATGGTGATAATATCCTTGGAATTAGCCCTACAGGTACTGGTAAAACTCTAGCATACCTTTTCCCAACGCTTCTTAAGTTGCAACCTAAAAAGAGCCAACAACTCTTAATTTTAGCTCCAAATTCAGAATTAGCTGGACAAATCTTCGACGTTACAAAAGAATGGGCTGAACCATTAGGACTGACAGCACAACTATTCCTTTCAGGGTCTAGTCAAAAACGCCAAATTGAGCGACTAAAAAAAGGACCAGAAATCCTTATAGGAACTGCTGGACGCGTATTTGAACTTGTGAAACTAAAAAAAATAAAAATGATGAACATTAATACTATCGTCCTTGATGAGTTCGATGAATTACTCGGCGACTCACAATATCATTTTGTGGACAATATTATTAATCGCGTTCCTCGTGATCAGCAAATGATTTACATTAGTGCCACCAACAAACTGGACAATAGTAAACTTGCCGATAACACTATAACAATTGACCTATCTGATCAAAAACTTGATACTATAAAACATTATTATATTACAGTTGATAAAAGAGAGCGTACTGACTTACTTCGTAAATTTTCAAATATTCCTGATTTTAGAGGTCTTGTCTTTTTTAACAGCTTATCAGACTTAGGTGCATGTGAAGAACGTTTACAATTTAATAGGGCCTCGGCAGTTTCTTTAGCAAGCGATATTAATATTAAATTCCGTAAAGTTATCTTAGAGAAATTTAAAAACCATGATATTTCATTACTCCTAGGAACTGATTTGGTAGCTCGTGGCATTGATATCGACAACCTAGAATATGTGATTAATTTTGATATCGCACGCGACAAAGAAACATATACACATCGTTCTGGACGAACTGGTCGTATGGGGAAAGAGGGATGTGTTATTACATTTGTAACACATAAAGAAGAGCTCAAACAACTTAAAAAATACGCCACCGTTGCAGAACTTGTACTTCACAATCAAAAATTACACTTAAAA

SEQ ID NO: 14934 - protein, 360 aa, Streptococcus agalactiae
MITKFPDQWQDKLTQRQFDDLTDIQNKLFQPITDGDNILGISPTGTGKTLAYLFPTLLKLQPKKSQQLLILAPNSELAGQIFDVTKEWAEPLGLTAQLFLSGSSQKRQIERLKKGPEILIGTAGRVFELVKLKKIKMMNINTIVLDEFDELLGDSQYHFVDNIINRVPRDQQMIYISATNKLDNSKLADNTITIDLSDQKLDTIKHYYITVDKRERTDLLRKFSNIPDFRGLVFFNSLSDLGACEERLQFNRASAVSLASDINIKFRKVILEKFKNHDISLLLGTDLVARGIDIDNLEYVINFDIARDKETYTHRSGRTGRMGKEGCVITFVTHKEELKQLKKYATVAELVLHNQKLHLK

SEQ ID NO: 14935 - protein, 626 aa, Streptococcus agalactiae
ATGCGTAAAAAACCTATTATTATTGGTGTTACAGGTGGATCTGGTGGTGGTAAAACCAGTGTTTCTCGGGCGATTTTATCAAATTTCCCAGATCAAAAAATTATCATGATTGAACATGATTCTTACTATAAAGATCAAAGTCATTTGACTTTTGAAGAACGTGTAAAAACCAATTATGATCATCCCCTTGCTTTTGATACCAATTTGATGATTGAGCAATTGAACGAATTGATTGAGGGGCGTCCGGTCGATATTCCGGTTTATGATTACACAAACATACCCGTAGTGATAGAACTATCCGCCAAGAACCTCAGGATGTCATTATTGTTGAGGGAATTTTGGTATTAGAAGATCAGCGTTTGCGTGATTTAATGGATATCAAATTATTTGTTGATACAGATGATGATATTCGTATTATTCGTCGTATTAAGCGTGATATGGAAGAGCGCGATAGAAGTTTAGATAGTATTATTGAACAGTATACAGAAGTTGTAAAACCTATGTATCATCAATTTATCGAACCAACAAAGCGTTATGCGGATATTGTAATTCCAGAAGGAGTAAGTAATATTGTCGCTATTGATTTAATCAATACCAAAGTGGCTAGCATCTTAAATGAAGCAAAA

SEQ ID NO: 14936 - protein, 209 aa, Streptococcus agalactiae
MRKKPIIIGVTGGSGGGKTSVSRAILSNFPDQKIIMIEHDSYYKDQSHLTFEERVKTNYDHPLAFDTNLMIEQLNELIEGRPVDIPVYDYTKHTRSDRTIRQEPQDVIIVEGILVLEDQRLRDLMDIKLFVDTDDDIRIIRRIKRDMEERDRSLDSIIEQYTEVVKPMYHQFIEPTKRYADIVIPEGVSNIVAIDLINTKVASILNEAK

SEQ ID NO: 14937 - protein, 495 aa, Streptococcus agalactiae
ATGAACAAGTCTAAGAAAATCGAAAATTATCAATTATTATTACTACAAGCGCAAGCTCTATTCTCAGATGAAACAAATGCTCTTGCCAACTTATCAAATGCTTCAGCTATGCTAAATGCTATGCTTCCAAATTCTGTATTTACAGGCTTTTATTTATTTGATGGAGAGGAGTTAATTCTTGGCCCTTTTCAGGGTGGTGTATCATGTGTGCATATTACTTTAGGAAAAGGTGTTTGTGGTGAATCTGCACAAACTGCTAAGACGCTGATTGTTGATGATGTTACAAAGCATGCTAACTATATCTCCTGTGATTCAAAAGCTATGAGTGAAATCGTAGTACCCATGTTTAAAAATGGCAAACTTCTAGGAGTTCTAGATTTAGATTCTTCTTTAGTAGCAGATTATGATGAGATTGATCAAGAATACTTAGAAAAATTTGTAGGTATTCTAGTAGAACATACGATTTGGAATTTGGATATGTTTGGAGTTGAAAAG

SEQ ID NO: 14938 - protein, 165 aa, Streptococcus agalactiae; identical to SEQ ID NO: 1558

SEQ ID NO: 14939 - protein, 1662 aa, Streptococcus agalactiae
ATGTATCAGGCCCTTTATCGGAAATATCGTAGCCAAACATTTGATGAAATGGTTGGACAAAGTGTTATTTCAACTACTTTAAAGCAAGCTGTGTCCAGCAAAAAAATTAGCCATGCTTACCTTTTTTCAGGACCTAGGGGAACTGGAAAAACAAGTGCTGCTAAAATATTTGCAAAAGCGATGAATTGCCCAAATCAAGTTAATGGCGAACCTTGTAATCATTGTGATATTTGTCGAGATATTACAAATGGTAGTTTAGAGGATGTCATTGAAATTGATGCTGCGTCAAATAATGGTGTCGATGAAATTCGTGATATCAGGGACAAATCAACTTATGCTCCAAGTAGGGCAACCTATAAAGTTTATATTATTGATGAAGTTCATATGTTGTCTACAGGTGCCTTCAATGCACTATTGAAAACACTTGAAGAGCCAACAGAAAATGTTGTTTTTATATTAGCAACAACAGAACTCCATAAAATCCCTGCAACAATCTTATCTCGTGTCCAGCGCTTTGAATTTAAAGCGATTAAATTATTAGCTATTCGAGATCATTTAGCACAGATTTTAGATAAAGAAGCTATTTCATATGATTTGGATGCTCTGACACTAGTCGCTAGACGAGCCGAAGGTGGTATGCGTGATGCTTTATCAATTCTCGATCAAGCCTTGAGTTTAGCGAAAGATAACCACATTTCTTTAGATGTAGCAGAAGAAATTACAGGGAGCATTTCCTTATCTGCTATAGATGATTATGTATCGAATATATTGGCTCACGATACAACTGAAGCACTCGCTAAACTTGAAGTAATCTTTGATAGTGGCAAAAGTATGAGTCGTTTTGCAACAGATTTATTGATGTACTTAAGAGATTTACTTGTTGTTCAAGCAGGTGGTGAAAATAGTCATTCAAGTGATACTTTTATGGCCAATCTTGATGTTAAACAAGATATTTTATTTGAAATGATTGATAAAGTGACATCTGTTCTTCCTGAGATAAAAAATGGTAGCCATCCTAAAGTTTATGCAGAGATGATGACCATTCAATTGTCTGAAATGGTAGAAAAAAATTCGTCAAACATACCCGCAGATGTGACAGCAGAATTAGATAGTCTTCGTCGAGAGTTAAAATCGTTAAAAAACGAAATGAGCCAACTCTCTCGAGCAGATCAAAGTTCATCAACTCAAAAAGTAAAGGTTAATAATAAGACATTCACATTCAAAGTTGACCGTACAAAGATTTTGACCATTATGGAAGAAACGGTTGTAGATAGCCAACGTTCACGTGAATATTTAGAAGCTTTAAAGAGTGCTTGGAACGAGATATTAGATAATATTACGGCTCAAGATAGAGCCTTATTAATGGGATCTGAACCTGTCTTAGCTAATAGCGAGAATGCTATTTTGGCATTTGATGCGGCCTTTAATGCTGAACAAGCTATGAAACGTACCGATCTCAATGATATATTTGGTAATATTATGAGTAAAGCAGCAGGTTTTTCACCTAATATTTTAGCTGTACCTAGAAATGATTTTAATCAAATTCGGAGCGATTTTGCAAAGAAAATGAAAGCTCAAAAGACGGAAACAGAACCTGAAGTTAATCATCAGATTCCAGAAGACTTTTCTTATCTAGCAGAACGAATAGCAATCGTTGAAGAT

SEQ ID NO: 14940 - protein, 554 aa, Streptococcus agalactiae
MYQALYRKYRSQTFDEMVGQSVISTTLKQAVSSKKISHAYLFSGPRGTGKTSAAKIFAKAMNCPNQVNGEPCNHCDICRDITNGSLEDVIEIDAASNNGVDEIRDIRDKSTYAPSRATYKVYIIDEVHMLSTGAFNALLKTLEEPTENVVFILATTELHKIPATILSRVQRFEFKAIKLLAIRDHLAQILDKEAISYDLDALTLVARRAEGGMRDALSILDQALSLAKDNHISLDVAEEITGSISLSAIDDYVSNILAHDTTEALAKLEVIFDSGKSMSRFATDLLMYLRDLLVVQAGGENSHSSDTFMANLDVKQDILFEMIDKVTSVLPEIKNGSHPKVYAEMMTIQLSEMVEKNSSNIPADVTAELDSLRRELKSLKNEMSQLSRADQSSSTQKVKVNNKTFTFKVDRTKILTIMEETVVDSQRSREYLEALKSAWNEILDNITAQDRALLMGSEPVLANSENAILAFDAAFNAEQAMKRTDLNDIFGNIMSKAAGFSPNILAVPRNDFNQIRSDFAKKMKAQKTETEPEVNHQIPEDFSYLAERIAIVED

SEQ ID NO: 14941 - protein, 192 aa, Streptococcus agalactiae; identical to SEQ ID NO: 6033

SEQ ID NO: 14942 - protein, 64 aa, Streptococcus agalactiae; identical to SEQ ID NO: 1564

SEQ ID NO: 14943 - protein, 867 aa, Streptococcus agalactiae
ATGGCAAATCAACTTAATATTTCCCGCACAGCTATTTGGAAAGGTATAAAAACGTTAGAAGAATTAGGCCTAGAGATTGAGTCTGTCACTAACAAGGGCTACCGATTGGTATCAGGTGACATATTATTACCAGAACAACTCGAACAAGAAATTGGTATTAAGGTTAGTCTTAATAATAATAGTGCTTCAACCCAACTAGATGCTAAAATGGGGATAGAAAGCAAATTAAAGACTCCACACCTTTTTTTAGCTCCTAATCAAAAAAAAGCTAAAGGACGTTTTGATAGACCTTTCTTTACATCAAATCAAGGCGGCATCTATATGTCTCTTTTATTACAACCTAATGTACCGATTGAAGATATAAAACCTTATACTGTCATGGTAGCCTCTAGTGCTGTAAAAGCTATCTCACGGTTAACAGGAATTACTCCTGAAATTAAGTGGGTCAATGATATTTATTTAGATAATAAAAAAATAGCTGGTATTTTAACCGAGGCTATCGCTTCTGTTGAGAGTGGATTGGTAACGAATGTTATTATAGGATTAGGTATCAATTTCTATATCAAAGAGTTCCCTAGGGCGTTAACTAAGCGCGCAGGTAGTCTCTTTACAGAGCAACCGACCATAACTAGAAATCAATTGATTACAGAAATCTGGAATCTCTTTTTCAATATTCCACTAGAGGATCACTTAAAGGTATATAGAGAAAAATCCCTAGTCTTAGATAAAACCGTTAGCTTTATGGATGGTCAAACAATGTATTCTGGGAAAGCTATTGATATTACTGATAAAGGATATTTAGTGGTTGAGTTAGATGATGGTCAGTTGAAAACACTTCGCAGTGGCGAAATCAGTCTTTCTTCTTGG

SEQ ID NO: 14944 - protein, 289 aa, Streptococcus agalactiae; identical to SEQ ID NO: 6036

SEQ ID NO: 14945 - protein, 1194 aa, Streptococcus agalactiae
ATGTCAGAACGTAAACTTTTCACGTCTGAGTCAGTATCTGAGGGACATCCCGATAAGATTGCTGACCAAATTTCCGATGCGATTTTAGATGCAATTTTAGAGCAAGATCCAGATGCCCACGTAGCAGCCGAAACAGCTGTTTATACAGGTTCGGTTCATGTATTTGGCGAGATATCAACGACAGCCTATGTTGATATTAACCGAGTTGTCCGTAACACAATCGCTGAAATTGGCTATGATAAAGCTGAATATGGCTTCTCAGCTGAATCTGTCGGAGTGCATCCGTCACTCGTTGAACAGTCGCCAGACATTGCACAGGGAGTCAATGAAGCTCTTGAGGTACGTGGTTCTCTTGAACAAGATCCTTTAGATTTAATTGGTGCAGGTGACCAAGGTTTGATGTTTGGGTTTGCTGTTGATGAAACACCTGAGTTAATGCCATTGCCAATTTCTTTAGCTCATCAGTTAGTTAAGAAATTGACAGATCTACGTAAGTCTGGGGAACTCACCTATCTTCGACCAGATGCAAAATCTCAAGTAACGGTTGAATATGATGATAATGATCAACCAATTCGTGTGGATGCAGTAGTTATTTCGACACAGCATGATCCTAATGTAACTAATGACCAACTCCATAAGGACGTGATTGAGAAAGTTATCAATGAAGTTATTCCAAGCCATTATTTAGATGACCAAACAAAATTCTTTATCAATCCTACAGGGCGCTTTGTTATTGGAGGCCCTCAAGGAGATTCAGGACTAACAGGTCGTAAGATTATTGTAGATACTTATGGTGGTTATTCTCGTCATGGTGGTGGTGCATTTTCAGGTAAAGATGCTACTAAAGTAGATCGTTCAGCATCTTATGCAGCTCGTTATATTGCAAAAAATATTGTTGCAGCTGATTTAGCTAAAAAAGTAGAAGTACAACTTGCTTATGCAATTGGTGTTGCTCAGCCTGTCTCTGTGCGTGTAGATACATTTGGAACAGGTGTTATAGCAGAAGCAGACCTAGAGGCAGCTGTACGCCAAATATTTGATTTGCGACCAGCAGGCATTATTAATATGTTGGACCTCAAACGACCTATTTATCGACAAACAGCAGCCTATGGGCATATGGGACGTACTGATATCGATTTGCCATGGGAGCGAGTTGATAAAGTCCAGGCCTTAAAGGATTTTATTGCTAGCAAA

SEQ ID NO: 14946 - protein, 398 aa, Streptococcus agalactiae
MSERKLFTSESVSEGHPDKIADQISDAILDAILEQDPDAHVAAETAVYTGSVHVFGEISTTAYVDINRVVRNTIAEIGYDKAEYGFSAESVGVHPSLVEQSPDIAQGVNEALEVRGSLEQDPLDLIGAGDQGLMFGFAVDETPELMPLPISLAHQLVKKLTDLRKSGELTYLRPDAKSQVTVEYDDNDQPIRVDAVVISTQHDPNVTNDQLHKDVIEKVINEVIPSHYLDDQTKFFINPTGRFVIGGPQGDSGLTGRKIIVDTYGGYSRHGGGAFSGKDATKVDRSASYAARYIAKNIVAADLAKKVEVQLAYAIGVAQPVSVRVDTFGTGVIAEADLEAAVRQIFDLRPAGIINMLDLKRPIYRQTAAYGHMGRTDIDLPWERVDKVQALKDFIASK

SEQ ID NO: 14947 - protein, 1905 aa, Streptococcus agalactiae
ATGAAAAAACAATTTTTAAAATCAGCAGCGATTCTATCGCTAGCAGTAACAGCAGTATCTACAAGTCAGCCGGTAGCCGGGATAACTAAAGATTATAATAACCGAAATGAAAAAGTAAAAAAGTATTTACAAGAAAATAATTTCGGTCATAAAATAGCGTATGGATGGAAAAATAAAGTAGAATTTGATTTTCGTTATTTATTGGATACTGCTAAATATTTAGTAAATAAAGAAGAATTTCAAGATCCTTTATATAGTGATGCGCGCGAAGAATTGATAAGTTTTATTTTTCCGTATGAGAAATTTTTAATTAACAATCGTGACATAACTAAATTAACAGTTAATCAGTATGAAGCGATTGTGAATAGAATGAGTGTTGCTTTACAAAAATTTTCAAAGAATATTTTTGAGAAACAGAAAGTAAATAAAGATTTAATCCCTATTGCGTTTTGGATTGAGAAAAGTTACAGAACTGTTGGAACGAATGAAATCGCCGCTTCTGTAGGCATTCAAGGAGGATTTTATCAAAACTTCCATGATTATTATAATTATTCATATCTATTAAATTCTTTATGGTATGAAGGAAATGTAAAAGAAGTAGTTAAGGATTATGAAAACACTATTCGTCAAATACTATCTAAAAAGCATGAGATTGAAAAAATTCTTAATCAGAGCACTTCTGATATCTCTATAGATGATGATGATTACGAAAAAGGAAATAAAGAATTGCTAAGGGAAAAATTAAATATTATTCTAAATCTTTCAAAGAGAGATTACAGAGTAACTCCATACTATGAAGTGAATAAACTACATACAGGGCTTATTTTATTGGAGGATGTCCCTAATTTAAAGATTGCTAAGGATAAGTTGTTTTCATTAGAGAATTCTTTAAAGGAATACAAAGGAGAGAAAGTTAATTATGAGGAACTAAGATTCAATACGGAACCTTTAACTAGTTACTTAGAAAATAAAGAAAAATTTTTAGTCCCCAATATTCCATATAAAAATAAATTAATTTTAAGGGAAGAAGATAAATATAGTTTTGAAGATGATGAAGAAGAGTTTGGAAATGAACTTCTAAGTTACAATAAGCTTAAGAATGAAGTTTTACCTGTTAATATTACAACTTCTACTATATTAAAACCGTTTGAACAGAAGAAAATTGTGGAAGATTTTAATCCTTATTCTAATTTAGACAATTTAGAAATAAAAAAAATAAGGTTGAATGGCTCCCAAAAACAAAAAGTAGAACAGGAAAAAACTAAATCGCCAACTCCTCAAAAAGAGGCTGTAAAAGAACAAACTGAGCAAAAAATATCTGGGAAGACTCAAAACGTAGAAAAGAAATCTGAAACTGTGGCAACTCCACAACAAAGTTCAACTGCGCAAACTTCTGTCCAACAGCCAGCTCCGGTTCAACCAGTTGTTCAAGAATCTAAAGCTTCTCAAGAGGAGATTAATGCAGCACATGATGCCATTTCAGCGTATAAATCAACAGTCAATATTGCTAATACAGCCGGTGTAACAACTGCGGAAATGACCTCGCTCATTAATACTCAAACTTCTAATCTTTCTGATGTTGAGAAAGCTTTAGGGAATAATAAGGTTAATAATGGTGCAGTCAATGTATTGAGAGAAGATACATCTCGTCTTGAGAATATGATTTGGAATCGTGCTTACCAAGCTATTGAAGAATTCAACGTCGCTCGTAATACTTATAATAACCAAATGAAGTCAGAAACAGTTCCAGTTGATAATGATATTGAAGCTATTTTAGCAGGTTCTCAAGCTAAAATTAGCCATTTGGACAATCGTATCGGAGCGCGCCACATGGATCAAGCTTTTGTAGCTAGTTTATTAGAAGTTACTGAGATGAGTAAATCAATCTCATCGCGTATAAAAGAA

SEQ ID NO: 14948 - protein, 635 aa, Streptococcus agalactiae
MKKQFLKSAAILSLAVTAVSTSQPVAGITKDYNNRNEKVKKYLQENNFGHKIAYGWKNKVEFDFRYLLDTAKYLVNKEEFQDPLYSDAREELISFIFPYEKFLINNRDITKLTVNQYEAIVNRMSVALQKFSKNIFEKQKVNKDLIPIAFWIEKSYRTVGTNEIAASVGIQGGFYQNFHDYYNYSYLLNSLWYEGNVKEVVKDYENTIRQILSKKHEIEKILNQSTSDISIDDDDYEKGNKELLREKLNIILNLSKRDYRVTPYYEVNKLHTGLILLEDVPNLKIAKDKLFSLENSLKEYKGEKVNYEELRFNTEPLTSYLENKEKFLVPNIPYKNKLILREEDKYSFEDDEEEFGNELLSYNKLKNEVLPVNITTSTILKPFEQKKIVEDFNPYSNLDNLEIKKIRLNGSQKQKVEQEKTKSPTPQKEAVKEQTEQKISGKTQNVEKKSETVATPQQSSTAQTSVQQPAPVQPVVQESKASQEEINAAHDAISAYKSTVNIANTAGVTTAEMTSLINTQTSNLSDVEKALGNNKVNNGAVNVLREDTSRLENMIWNRAYQAIEEFNVARNTYNNQMKSETVPVDNDIEAILAGSQAKISHLDNRIGARHMDQAFVASLLEVTEMSKSISSRIKE

SEQ ID NO: 14949 - protein, 407 aa, Streptococcus agalactiae
ATGAAAAAAATAACAACTTTAATCTTAGCTAGTAGCTTATTACTAGTTGCAACGACATCGGTTAAAGCTGATGATAACTTTGAAGTACCAACGCGTTATGTTAAAATGAGTGAAAAATCAAAAGCATTTTATCAAGATTACAAGAAAAACAACGTAAAACACATACTACTGTGAAGACTTTTAATAATTCAGAAATAAGGCATCAACTACCTCTTAAACAAGAAAAGGCTAGGAATGATATCTACAATTTAGGCATTCTTATTTCTCAGGAGTCTAAAGGGTTCATCCAACGTATTGATAATGCCTATTCTTTGGAAATGTCTCAGATATTGTTAATGAAGCTCAGGCTTTGTATAAACGCAACTATGATTTATTTGAAAAATCAAATCTACACGTGNNNNNTTAAT

SEQ ID NO: 14950 - protein, 136 aa, Streptococcus agalactiae
  VARIANT 45, 133, 134, 135: Xaa = Any Amino Acid
MKKITTLILASSLLLVATTSVKADDNFEVPTRYVKMSEKSKAFYXRLQEKQRKTHTTVKTFNNSEIRHQLPLKQEKARNDIYNLGILISQESKGFIQRIDNAYSLEMSQILLMKLRLCINATMIYLKNQIYTXXXN

SEQ ID NO: 14951 - protein, 219 aa, Streptococcus agalactiae
ATGTTATTCGGTGAACACGCAACTCAGGCTGGTTCATTGAACGAAGAAGAATTCTTGCGCTTTGATTTTACTCACTTTGAAGCAGTAAGCAATGAGGAACTTCGTCACATTGAACAAGAAGTTAATGAGCAAATTTGGAACGCTCTTACAATCACAACGACTGAAACTGACGTTGAAACCGCAAAAGAGATGGGGGAAGGCCCAAAAAAAATTNNNNNT

SEQ ID NO: 14952 - protein, 73 aa, Streptococcus agalactiae
  VARIANT 72, 73: Xaa = Any Amino Acid
MLFGEHATQAGSLNEEEFLRFDFTHFEAVSNEELRHIEQEVNEQIWNALTITTTETDVETAKEMGEGPKKIXX

SEQ ID NO: 14953 - protein, 438 aa, Streptococcus agalactiae
ATGAGTGAAAAATCAAAAGCATTTTATCAAAGATTACAAGAAAAACAACGTAAAACACATACTACTGTGAAGACTTTTAATAATTCAGAAATAAGGCATCAACTACCTCTTAAACAAGAAAAGGCTAGGAATGATATCTACAATTTAGGCATTCTTATTTCTCAGGAGTCTAAAGGGTTCATCCAACGTATTGATAATGCCTATTCTTTGGAAAATGTCTCAGATATTGTTAATGAAGCTCAGGCTTTGTATAAACGCAACTATGATTTATTTGAAAAAATCAAATCTACACGTGATAAGGTTCAAGTCTTACTTGCATCGCATCAAGGTAATACAGACTTAAAAAACTTTTATGCTGAGTTGGACGATATGTATGAACATGTTTATCTCAACGAAAGTAGAGTGGAGGCGATAAACAGAAATATCCAAAAATATAAT

SEQ ID NO: 14954 - protein, 146 aa, Streptococcus agalactiae
MSEKSKAFYQRLQEKQRKTHTTVKTFNNSEIRHQLPLKQEKARNDIYNLGILISQESKGFIQRIDNAYSLENVSDIVNEAQALYKRNYDLFEKIKSTRDKVQVLLASHQGNTDLKNFYAELDDMYEHVYLNESRVEAINRNIQKYN

SEQ ID NO: 14955 - protein, 564 aa, Streptococcus agalactiae
ATGACTAATCATAAAACAAAAAAATTAACGGTTTTAGCAATTATGATTGCTTTAGATGTTTTTCTAACGCCCATTTTTAGAATAGAAGGCATGGCCTTTATGTCTAGTGTGGTTAATATTATCGCTGGAGTTATAATGGGACCAATCTATGCATTAGTTATGGCACTTGTAACGGCTTTTATTCGTATTTTAACTCAAGCAGGAGTAGCATCTGTTGCACCTTTAGCTATTCTAGGAGCTGGTCCAGGAGCTTTCTTAGCGGGTTGGTTTTATCGGTTTTATGCGAAAGACTGGATGTCTTGGGTGGGTGAGTTTATAGGAACAGGGATAATTGGAGCACTTTTATCAGCTCCAATTATGGTCTGGTTTTGGACTTGGACAGCGGATGGAAATCACGAAGTGTTAGCTAAAGCATCTGCAGCTCAATCCATTTTTCTTTTTATGCCAAGGTTTATAGGGGCGACTATAATTGGCGGTGTTATTGCTTTGTTGCTACTTCAGGGATTAAAGCGGGTTCCTGTATTTATGACAATACAAGCATTATTTAAAGGAGAAAAAGTAAAA

SEQ ID NO: 14956 - protein, 188 aa, Streptococcus agalactiae; identical to SEQ ID NO: 1572

SEQ ID NO: 14957 - protein, 552 aa, Streptococcus agalactiae; identical to SEQ ID NO: 6047

SEQ ID NO: 14958 - protein, 184 aa, Streptococcus agalactiae; identical to SEQ ID NO: 6048

SEQ ID NO: 14959 - protein, 1284 aa, Streptococcus agalactiae
ATGCTATCTGTTGAAAAATTAGCTTACACCCATGGCGATAGTCATTATTTATTTGATGAAGTGACTTTTAGTCTTAACCCAGGAGAACGAATTTTAATTAGTGGCTATTCAGGGTGTGGTAAGAGTACATTGGCTCTTTTACTATCAGGGTTAAAAGAAAGTGGGAAAGGTCAAGTTTTATTAAACGGCTCATTAATAGAACCAAGCGATGTGGGTTTTCTTTTTCAAAATCCTGATTTGCAATTTTGTATGGATACTGTGGCGCATGAGTTGTATTTTATTTTAGAAAATTTACAAATAGAACCGGAGCAAATGCAAGATAGAAGTGAGTTTGTATTGGCACAAGTTGGTTTAAAAGGATTTCAGAATCGTTTGATTTATACTTTATCTCAAGGTGAAAAACAGCGATTAGCATTGGCGACTATTTTTTTAAAATCTCCTAAACTTATTATTTTAGATGAAGCTTTTGCGAATTTGGATCAAGAGAGTGCCAGTCAACTATTACAATTAGTTCTTAATTATCAAGCAAACAATCAATCAATGCTGATTGTAATCGATCATTTGATTACTTATTATCAAGATATAATGGATCACTATTTTTGGTTGGAAAAATGGTTGATAAGGGTCGATTTTGATTATATGCTCAATCGTTTGAATGTCTTCGAATTAGAAAAGAAAAGTCATAATACAGGTGACAAACTGTTATCAATTAAAGATTTCCAAGTTAAACTTTCAAAAAACAAATTCATCTCTTACCTTGATTTTGATTTAGCAAGTGGGGAGAGGTTGTGCTTAGATGGACCAAGTGGCGTGGGGAAGTCTAGTTTCTTTATGGGATTGTTAGGGCTCTATAGGACTAAAGGAAAGAAACAATTTACTCATAGAAAGCAAATTCCTATAAGCTTTTTATTTCAAAATCCCTTAGATCAATTTATTTTTTCAACAGTTTATGACGAAATTTTTCAGGTTTGCAAGGATAGTAACAAAGCGAGGGATATTTTGGAAACCATAAATCTTTGGGATAAAAAACAGTTTTCACCATTTCAACTAAGTCAAGGCCAACAGAGGCGATTAGCCATTGGCAGTATTTTAGCTAGTGATAGTAAACTTCTATTATTAGATGAACCAACTTATGGACAAGATGCCTATCACGCTAATATGATTACGACTCTTCTTTTGAGTTATTGTCACAAAAATCATTGTGGGGTTATTTTTACTAGCCATGATCCTCACTTAAAAGAGTGTTTTGCAACACGTTTCTTGGAGGTGTCATCTTGTTCAATT

SEQ ID NO: 14960 - protein, 428 aa, Streptococcus agalactiae
MLSVEKLAYTHGDSHYLFDEVTFSLNPGERILISGYSGCGKSTLALLLSGLKESGKGQVLLNGSLIEPSDVGFLFQNPDLQFCMDTVAHELYFILENLQIEPEQMQDRSEFVLAQVGLKGFQNRLIYTLSQGEKQRLALATIFLKSPKLIILDEAFANLDQESASQLLQLVLNYQANNQSMLIVIDHLITYYQDIMDHYFWLEKWLIRVDFDYMLNRLNVFELEKKSHNTGDKLLSIKDFQVKLSKNKFISYLDFDLASGERLCLDGPSGVGKSSFFMGLLGLYRTKGKKQFTHRKQIPISFLFQNPLDQFIFSTVYDEIFQVCKDSNKARDILETINLWDKKQFSPFQLSQGQQRRLAIGSILASDSKLLLLDEPTYGQDAYHANMITTLLLSYCHKNHCGVIFTSHDPHLKECFATRFLEVSSCSI

SEQ ID NO: 14961 - protein, 666 aa, Streptococcus agalactiae
TTGTTCAATTTGAAAAACTATCATCCAGCTATCACCTTCCTATGTTTATTAATACCAACCTTTTCGTTTAGTTTCACATTGAGGCTAAGAACGTCTTTGTTATTTCTAATTATAGTAGTAACACTGCAATGCTTCGTAAAGGTTTCTTTAAAAACTTGGGCGAAGGTCAATTTGATCTCATTTGTGATGGGACTCTCTTTATTTTTAGGGACGTATTTTTGGGGGAAATTACCCCATCAATTCGTCTTAGCTAGTCTAGTGGCCTGTCGTCCGCTTATTTTTATGAACGTGGGTTTGTTATTTCATGCATCACATTCTAATTATGATTTTATAGAATCTCTTTATCAAACTTTCAAAGTGCCTAGTCATTTTGCATATGGTATTTTTGCGGTCTTTAATCTTTTACCATTAATTAAATTACAATACCAACGTAATCGACTCGCATTCCGACTGAAGAATCAGGTAACTTGGGCATTATCGCCTAGACTAATATTGTCAGTTTTATTAAAGACGATATATTGGGTAGAACAGTTAGAGTTAGCAATGCTTTCTAAAGGTTTTGAAGTGGGTAAAGAGCGAACACATGCTTCAACTTATCCCGTTCGTTTTCGAGATTATAGTTTACTTGGTATGAGTATTTTATTGGCTATAGGAATGATTTTTAAA

SEQ ID NO: 14962 - protein, 222 aa, Streptococcus agalactiae
MFNLKNYHPAITFLCLLIPTFSFSFTLRLRTSLLFLIIVVTLQCFVKVSLKTWAKVNLISFVMGLSLFLGTYFWGKLPHQFVLASLVACRPLIFMNVGLLFHASHSNYDFIESLYQTFKVPSHFAYGIFAVFNLLPLIKLQYQRNRLAFRLKNQVTWALSPRLILSVLLKTIYWVEQLELAMLSKGFEVGKERTHASTYPVRFRDYSLLGMSILLAIGMIFK

SEQ ID NO: 14963 - protein, 678 aa, Streptococcus agalactiae
ATGTTAAAAGATGAGATGATTGCTAAAGGAACAAAATATATACAATCCATCTATCAAGATCCATTTATTCAAGGAATTGTAAAAGGGCGTTTAGACCATGACGTAATCTGCCATTATTTACAGGCAGATAATATCTACCTTGGGAAATTTGCTGATATTTATGCCCTGTGCTTGGCAAAATCTGATAATTTACGAGATAAACAATTTTTCCTTGAACAAGTTGACTTTACATTAAATCGGGAGTTAGCAGATGGTGAAGGTCCACATCAAGCCTTGGCAGCTTATACTAATCGATCTTATCAGGATATTATCGAAAAGGCTGTATGGTACCCGTCAGCAGATCATTACATTAAACATATGTATTTTCATTTTTACGAAAATGGTATTGCTGGTGCTTTAGCTGCAATGAGCCCATGTCCATGGATTTACCATCAATTGGCTAAAAAAATAATTGAGGAGAACCAGTTTTTGAATGGTAACCCTTTTAATAATTGGATAACTTTTTATGCTAACGATACAGTTGAAGAGTTAATGGAAAACTATTTTCGTATGATGGATTATTATGCGCAGAATTTGTCAAAAGAGAAGCAAGCTGATTTGGTAGATGCTTTTGTGAAATCTTGTCAGCATGAGAGACGTTTTTTTCAAATGGCAATAAATCAAGAAAAATGGGAGGAT

SEQ ID NO: 14964 - protein, 226 aa, Streptococcus agalactiae
MLKDEMIAKGTKYIQSIYQDPFIQGIVKGRLDHDVICHYLQADNIYLGKFADIYALCLAKSDNLRDKQFFLEQVDFTLNRELADGEGPHQALAAYTNRSYQDIIEKAVWYPSADHYIKHMYFHFYENGIAGALAAMSPCPWIYHQLAKKIIEENQFLNGNPFNNWITFYANDTVEELMENYFRMMDYYAQNLSKEKQADLVDAFVKSCQHERRFFQMAINQEKWED

SEQ ID NO: 14965 - protein, 795 aa, Streptococcus agalactiae
ATGACTTATTTAGCACCAGTTTTAACTATTGCAGGAACTGATCCTAGCGGTGGAGCAGGGATTATGGCAGATTTAAAGACATTTCAAGCTCGTCGGACTTACGGGATGGCTGTTGTGACTAGTGTTGTTGCTCAGAACACTTGTGGGGTTAGAGGCGTTCAGCATATAGAAACAGCTATCATTGATCAACAACTAGCTTGTGTTTATGATGATATTAAGCCAAAGGCGGTCAAAACAGGAATGTTAGCGGAGAGGGAAACGATTAGTTTAGTCGCTTCATATTTAAAAAAATATCCGCAACCTTATGTATTAGATCCTGTTATGGTGGCAACTAGCGGACATCGTTTAATTGATTCAGATGCCGTAGAAGCATTAAAAGAAGACTTATTGCCATTAGCAACTATTATCACACCAAATTTACCAGAAGCTGAGGTTTTAGTGGGATATGACTTATCAGATGAAGTAAGTATTATTAAAGCAGGTTACGATATTCAAAAACAATATTCTGTTAGAAATGTTCTTATAAAGGGAGGACATCTAGATGGTTTGGCTAAAGATTATTTATTTTTGGAAAAAGAAGGGTTGATAACTCTTAGTAATCAACGTATCAATACTATTCATACTCATGGGACTGGGTGTACATTTGCAGCAGTCGTTGCAGCGGAGTTAGCTAAAGGGCAATCAATTCTAAACGCGGTAAGTACCGCTAAATCATTTATTACTTCAGCTATCGAAACAGCGCCTGAGTTGGGTCTTGGAAACGGTCCTGTCAATCATACTAGCTATCAAGGAGAC

SEQ ID NO: 14966 - protein, 265 aa, Streptococcus agalactiae; identical to SEQ ID NO: 1586

SEQ ID NO: 14967 - protein, 768 aa, Streptococcus agalactiae
ATGTATTTAGAACAACTAAAAGAGGTAAATCCTTTAACCATTTGTATCACTAATAATGTGGTCAAAAACTTTACAGCCAATGGTTTATTAGCTTTAGGAGCTTCTCCGGCTATGAGCGAGTGCATAGAGGACTTAGAAGACTTGTTAAAAGTTGCAGATGCATTATTAATTAATATAGGAACACTAACAAAAGAAAGTTGGCAACTTTACCAAGAAGCAATCAAAATAGCAAATAAAAACCAAGTTCCAGTTGTATTAGATCCTGTAGCGGCAGGAGCAAGTCGTTTTCGATTAGAAGTGTCACTTGATTTATTGAAGAATTATCCTATTAGTTTACTTAGAGGAAATGGTAGTGAAATCGCTGCTTTGGTTGGTGAAAAACAAGCGTCTAAAGGGGCAGATGGGGGAAAAGTGGCTGATTTAGAATCAATTGCTGTAAAAGCCAATCAAGTTTTTGATGTGCCAGTGGTTGTCACAGGAGAAACTGATGCTATCGCTGTTAGAGGAGAAGTTCGCTTATTACAAAATGGTAGTCCTTTAATGCCACTTGTTACAGGAACTGGATGTCTATTAGGGGCAGTATTGGCTGCTTTTATTGGTAGTTCTGACAGAAGCGATGATCTTGCTTGTCTGACAGAGGCCATGACTGTTTATAATGTTGCTGGAGAAATTGCAGAGAAAGTGGCAAAAGGTAAGGGAGTGGGAAGTTTCCAAGTTGCATTTTTAGATGCCCTTTCTCAGATGAAATCAGAAATGATTATGGACAAA

SEQ ID NO: 14968 - protein, 256 aa, Streptococcus agalactiae
MYLEQLKEVNPLTICITNNVVKNFTANGLLALGASPAMSECIEDLEDLLKVADALLINIGTLTKESWQLYQEAIKIANKNQVPVVLDPVAAGASRFRLEVSLDLLKNYPISLLRGNGSEIAALVGEKQASKGADGGKVADLESIAVKANQVFDVPVVVTGETDAIAVRGEVRLLQNGSPLMPLVTGTGCLLGAVLAAFIGSSDRSDDLACLTEAMTVYNVAGEIAEKVAKGKGVGSFQVAFLDALSQMKSEMIMDK

SEQ ID NO: 14969 - protein, 669 aa, Streptococcus agalactiae
ATGAAAGATACATTGAAATTATATTTTGTTTGTGGGACTGTGGATTGCTCTAGGAAGAATATATTGACTGTTGTTGAAGAAGCCTTACAAGCAGGTATAACTCTATTTCAATTTAGAGAAAAAGGTTTTACAGCATTACAAGGTAAGGAAAAAATTGCTATGGCTAAGCAACTCCAAATACTTTGTAAGCAATATCAAGTTCCTTTTATTATTGATGATGACATTGACTTAGTTGAGTTAATTGATGCTGATGGTCTTCATATTGGACAAAATGATTTACCTGTTGATGAGGCACGGAGACGTTTACCAGATAAAATCATCGGTTTATCTGTGAGTACAATGGCTGAATATCAGAAATCACAATTATCTGTTGTTGATTACATCGGAATTGGTCCTTTTAATCCGACACAATCAAAAGCAGATGCTAAGCCTGCTGTTGGCAATAGGACAACAAAGGCAGTTAGAGAAATTAATCAAGATATTCCAATCGTTGCAATAGGCGGAATCACTAGTGATTTTGTTCATGATATTATAGAATCAGGCGCAGATGGGATTGCTGTTATATCGGCTATTTCAAAAGCAAATCATATTGTAGATGCAACCAGACAATTGCGCTATGAAGTTGAAAAAGCTCTGGTTAATAGGCAAAAACACAGTGATGTAATCAAA

SEQ ID NO: 14970 - protein, 223 aa, Streptococcus agalactiae
MKDTLKLYFVCGTVDCSRKNILTVVEEALQAGITLFQFREKGFTALQGKEKIAMAKQLQILCKQYQVPFIIDDDIDLVELIDADGLHIGQNDLPVDEARRRLPDKIIGLSVSTMAEYQKSQLSVVDYIGIGPFNPTQSKADAKPAVGNRTTKAVREINQDIPIVAIGGITSDFVHDIIESGADGIAVISAISKANHIVDATRQLRYEVEKALVNRQKHSDVIK

SEQ ID NO: 14971 - protein, 1257 aa, Streptococcus agalactiae
ATGCGTAAAATTATTATTAACGGTGGCAAGCAACTGACGGGAGAAGTTGCTGTATCGGGTGCCAAAAATAGTGTAGTTGCCTTGATTCCTGCCACTATTCTTGCTGATGATGTTGTGGTCTTAGATGGAGTTCCGGCTATTTCTGATGTTGACAGTTTAGTTGACATTATGGAAACTATGGGAGCTAAGATTAAGCGTTATGGTGAGACGCTTGAAATTGATCCACGTGGCGTTAAAGATATTCCAATGCCTTATGGCAAAATCAATAGTCTTCGTGCATCCTATTATTTCTATGGAAGCTTATTGGGGCGTTATGGTCAAGCAACATTAGGTTTACCTGGTGGTTGTGATTTAGGCCCCCGTCCGATTGATTTACATTTAAAAGCTTTTGAAGCGATGGGAGCTAGTGTTTCTTATGAAGGTGATTCAATGCGTCTAGCAACAAACGGAAAGCCTTTGCAAGGAGCAAATATTTATATGGATACTGTCAGTGTTGGTGCGACAATTAACACTATGATCGCAGCAGCTAAGGCAAATGGTCGTACGGTTATTGAAAATGCTGCGCGTGAACCAGAAATTATTGACGTGGCTACTCTTTTAAATAATATGGGAGCTCATATTCGTGGTGCTGGGACTGATGTTATTACAATTGAAGGTGTGAAATCGCTCCATGGCACGCGTCATCAAGTAATTCCAGATCGTATTGAAGCAGGAACTTATATTGCTATGGCAGCAGCTATCGGACGAGGAATAAAAGTGACCAATGTGTTATATGAACACCTTGAGAGTTTCATTGCTAAGTTAGATGAGATGGGAGTTCGAATGACAGTTGAAGAGGATTCAATTTTTGTCGAAGAACAAGAAAAGTTAAAAGCTGTATCCATAAAAACCTCACCTTACCCAGGATTTGCTACAGATTTACAACAACCTCTAACCCCTTTATTACTAACAGCAGAAGGAAACGGGAGTTTATTAGATACTATCTATGAGAAACGTGTTAATCATGTTCCCGAATTAGCACGTATGGGAGCTAATATTTCTACCCTAGGGGGCAAAATAGTTTATAGTGGTCCTAATCAATTATCTGGTGCACCTGTAAAAGCGACAGATTTGCGTGCAGGCGCTGCTTTAGTTATCGCTGGCTTAATGGCAGAGGGACGAACTGAAATTACGAATATCGAGTTTATTTTACGTGGATATTCTAATATCATCGAGAAACTAACATCATTGGGTGCGGATATCCAATTGGTTGAGGAA

SEQ ID NO: 14972 - protein, 419 aa, Streptococcus agalactiae
MRKIIINGGKQLTGEVAVSGAKNSVVALIPATILADDVVVLDGVPAISDVDSLVDIMETMGAKIKRYGETLEIDPRGVKDIPMPYGKINSLRASYYFYGSLLGRYGQATLGLPGGCDLGPRPIDLHLKAFEAMGASVSYEGDSMRLATNGKPLQGANIYMDTVSVGATINTMIAAAKANGRTVIENAAREPEIIDVATLLNNMGAHIRGAGTDVITIEGVKSLHGTRHQVIPDRIEAGTYIAMAAAIGRGIKVTNVLYEHLESFIAKLDEMGVRMTVEEDSIFVEEQEKLKAVSIKTSPYPGFATDLQQPLTPLLLTAEGNGSLLDTIYEKRVNHVPELARMGANISTLGGKIVYSGPNQLSGAPVKATDLRAGAALVIAGLMAEGRTEITNIEFILRGYSNIIEKLTSLGADIQLVEE

SEQ ID NO: 14973 - protein, 569 aa, Streptococcus agalactiae
TTGTGGTATAATATTATCATGGATATATGGACAAATTTAGGACGGTTTGCATTCATTGAAACAGAACATGTTAACCTACGTCCTGTTGCCTACACTGATAGGGAAGCTTTTTGGCGAATAGCTTCAAAAAGGACAAATTTACAATTTATTTTTCCTGTTCAACCAGTAAGAAGGAAAGTGATTTTCTTTTAGTTCATTCTTTTATGAAAGAGCCGTTGGGAGTTTGGGCGATTGAAGATAAAGTTAGTCATAAAATGTTTGGAGTTATCCGTTTTGAAAACATTGATTTATCTAAAAAGACAGCTGAAATTGGCTATTTTTTGAAAGAAAGTTCTTGGGGTCAAGGCATTATGACTGAATGTCTAAAGACACTTTCTTTTTTTGCTTTTCAAGAGTTTGGGATGGACAAATTGATCATAGTAACACATAAAGAGAATATTGCTAGTCAGAAGGTTGCTTTGAAGGCGCATTTCAAACAATCTAGGAGTTTTAAAGGAAGCGACCGTTATACACGCCGTATAAGAGACTATATTGAGTTTCAATTAACTAGGGGTGATTATCGTTATGAG

SEQ ID NO: 14974 - protein, 190 aa, Streptococcus agalactiae; identical to SEQ ID NO: 6064

SEQ ID NO: 14975 - protein, 1281 aa, Streptococcus agalactiae
ATGAGTAAACATCAAGAAATTTTGGAGTACCTAGAAAATTTAGCTGTTGGTAAGAGGGTTAGTGTACGCAGTATTTCAAATCATTTAAAGGTGAGTGATGGCACTGCATACCGCGCTATAAAAGAGGCAGAAAATAGGGGTATTGTTGAGACTAGACCGCGTAGTGGGACAGTACGTGTTGCTCAAAAAGCAAAGGTTAATATTGAAAAACTGACTTATGCTGAAATTGCAAGGATTAGTGACTCACAAGTTGTTGCAGGAACAGAGGGGCTCAGCAAGGAGTTTAGTAAATTTTCTATAGGTGCAATGACTCACAGAAATATTGAAAAATATTTGGTGCAAGGAGGGTTATTGATTGTTGGCGACCGTGATGAAATACAACATTTAGCCTTACAACATCAAAACGCTATCTTAGTTACAGGTGGCTTTAATGTTTCCCCATCTGTTTGTCGTTTAGCAGATAAACTTCAAATTCCCGTAATGGTAACACACTATGATACATTCACAGTATCAACGATGATTAATCACACTTTGTCAAATGCCAAAATTCGTACTGATTTAAAGACCGTTGAACAAGTCTATCAGTCGCAAATGGATTACGGTTTCTTAGCGCAGGATGATACCGTAAAAGAATTTAATCTTCTTGTTAAACAAACTAAAAATGTTCGTTTTCCAATAGTCAACCAAGCTAATGTTGTCGTTGGTGTTGTTAGTGTGCAAGATATTCTTGGAAAAGATAAAGAAGTAAAATTGGCAACAGTCATGTCAAAAAATATCATTGTTGCTAAACCTCGAATGAGTCTAGCTAATATCAGTCAAAAAATGATTTTTGAAGATTTGAATATGATGCCAGTAGTATCGGATGACTTTGAATTATTAGGCGTTATTACAAGACGACAAGCTGTAGAAAATTTATCGATGTCGCAAGGGACAGCTTTATACACCTATAGTGATCAAATCTTGTCTAATTTACAAATTGAAGATGGTCACTTTTCGTTTTTAGTAGAACCCGCTATGATTGACCATACAGGTAGCTTAACACAAGGAGTTTTGACGGAGTTCTTAAAAGAAATTTGTATTCGTGTCTTAACTCGTAAGCATCAACGCAGTATTGTTGTTAAACAAATGACACTTTATTTCTTGCAACCTGTTCAAATTGATGAAATAATAATGGTAACGCCAACAATTATTTCAGAAAAACGGCGCGAAGCTACACTCGATTTAGAATTAAAATTAGAAAATAAAGTTATTGCTAAAGCTATGATAGCGGTAAAAATTAAT

SEQ ID NO: 14976 - protein, 427 aa, Streptococcus agalactiae
MSKHQEILEYLENLAVGKRVSVRSISNHLKVSDGTAYRAIKEAENRGIVETRPRSGTVRVAQKAKVNIEKLTYAEIARISDSQVVAGTEGLSKEFSKFSIGAMTHRNIEKYLVQGGLLIVGDRDEIQHLALQHQNAILVTGGFNVSPSVCRLADKLQIPVMVTHYDTFTVSTMINHTLSNAKIRTDLKTVEQVYQSQMDYGFLAQDDTVKEFNLLVKQTKNVRFPIVNQANVVVGVVSVQDILGKDKEVKLATVMSKNIIVAKPRMSLANISQKMIFEDLNMMPVVSDDFELLGVITRRQAVENLSMSQGTALYTYSDQILSNLQIEDGHFSFLVEPAMIDHTGSLTQGVLTEFLKEICIRVLTRKHQRSIVVKQMTLYFLQPVQIDEIIMVTPTIISEKRREATLDLELKLENKVIAKAMIAVKIN

SEQ ID NO: 14977 - protein, 750 aa, Streptococcus agalactiae
ATGTGGGAAGTTGAAGAATACGTTCGTAGACGTTGTAAAGAAGAAAACGTATTGCCATTGCAAATCGGGGTTGATGGTGCAGTTATGGATTACCCATATGCTACTTGTTGTGGGCTTAATGATGAAGTGGCTCATGCCTTTCCTCGTCATTATACCCTAAAACAAGGTGACCTTTTAAAAGTAGATATGGTTTTAAGCGAACCTTTAGATAAATCAATTGTTGATGTTTCATCGTTAAACTTTGACAACGTGGCTCAAATGAAAAAGTACACGGAAACATATAGTGGTGGTTTGGCAGACTCATGTTGGGCTTATGCTGTAGGTGAAGTTTCACAAGAGGTGAAAGACTTAATGTCTGTGACAAGAGAAGCAATGTATATTGGGATTGAAAAAGCAGTTATCGGAAACCGTATTGGTGATATTGGAGCTGCTATTCAGGATTATGCAGAGAGTCGTGGTTATGGAGTTGTTCGTGATTTGGTTGGTCACGGTGTTGGTCCAACAATGCATGAAGAGCCTATGGTGCCTAACTATGGTACAGCAGGTCGAGGTCTCCGTCTTCGTGAGGGGATGGTTTTAACCATCGAACCAATGATTAATACTGGTACTTGGGAAATTGATACAGACATGAAAACTGGTTGGGCACATAAAACCTTAGATGGTGGTCTTTCTTGTCAATATGAACATCAATTTGTTATCACTAAAGATGGTCCTGTTATTTTAACGAGTCAAGGAGAAGAAAGAACTTAC

SEQ ID NO: 14978 - protein, 250 aa, Streptococcus agalactiae; identical to SEQ ID NO: 1606

SEQ ID NO: 14979 - protein, 918 aa, Streptococcus agalactiae
ATGAAATTAAAAAAATTCTTTGAGGATTTGCTGGCTAAACTAGAATATAGACCCATTCAAGTTTTTATGCGTCATTTTCAAAGTGCAGAGATGGACTTATCAGCCATAGCAGTTGCTTATTATCTATTAGTGACAGCTTTTCCATTACTAGTTATTGCTGCTAATATTTTTCCTTATTTTCATATTAATGTGTCGGATTTATTGTCACTTATGCAAAAAAATCTTCCGAAAAATATTTATGAACCTGCCTCACGCTTAGCAGTAGATGCTTTTTCGAAACCGTCTACCGGCATTTTGGGATTCGCGTCATTAACAGCTTTTTGGACAATGTCTAAAAGTTTGACCTCTCTTCAAAAAGCCATTAATAAAGCATACGGTGTTGACCAACACAGAGACTTTGTGATTAGTCGTTTAGTGGGTGTGGGGACTGGGCTGATCATCCTATTTTTACTGACTTTTGTTTTAATTTTTTCAACCTTTTCAAAACCAGTTTTACAGATAATTGTAAACATGTATGATTTGGGAGATACTCTAACGGCGTGGCTTTTAAATCTTGCACAACCAGTTACATTTTTGACTATATTTTTAGGTATTGGAATTTTATACTTTATTTTACCTAACGCACGAATTAGAAAAGTACGTTATGTCATTCCAGGGACATTATTTTCAACGTTTGTTATTGGTTTTTTTAGTAATTTAATTAGCCAATACGTCTTAAATAGGGTTGAAAAAATGGTAGATATTAAAACGTTTGGTTCGGTCGTTATCTTTATCTTAATGCTATGGTTTATTTTCTTAGCCCACATTATGATTTTAGGTGCAATACTGAATGCCAGCGTTCAAGAAATTGCGACAGGAAAAATTGAATCAAGGCGTGGAGATATTATGTCTCTTATCCAAAAATCCAAAGAAGAAAAA

SEQ ID NO: 14980 - protein, 306 aa, Streptococcus agalactiae; identical to SEQ ID NO: 1608

SEQ ID NO: 14981 - protein, 453 aa, Streptococcus agalactiae
ATGGTTAAATTAAAATCGTTACTGAAAAAAAGTATTCAAAATGAAGTCAGCTTATATTTACTGTTCGGACTATTAACATCCCTTCTTTATTTAGTTATTCGACAAGGGATTTTTAATTTCTCGCAGGACGCTCCATTCTCTGCAATAGTTGCTAACATAATAGCTATACTTTTTGCTTTTTTTACAAATGATCGATTTGTTTTTAAACAAACTAAAATTGGACAGTTTCAACGCTTACAAACATTTGTCATCGCTAGATTAGGCACATTAGGATTAGATTTGATATTAGCTGTTATTTTTGTTGATCAATTTCCTTCTATTATCGGACAATTCGTTCAGCACAATTTAAATAAAATCAACACCATTGAAAGCCTTGTATCTCAAATATTAATTATTTTACTCAACTACATCTTGAGCAAATTTGTTATTTTTAAAGACAAAAAAAGGCAACTC

SEQ ID NO: 14982 - protein, 151 aa, Streptococcus agalactiae
MVKLKSLLKKSIQNEVSLYLLFGLLTSLLYLVIRQGIFNFSQDAPFSAIVANIIAILFAFFTNDRFVFKQTKIGQFQRLQTFVIARLGTLGLDLILAVIFVDQFPSIIGQFVQHNLNKINTIESLVSQILIILLNYILSKFVIFKDKKRQL

SEQ ID NO: 14983 - protein, 479 aa, Streptococcus agalactiae
ATGAACACATTTACAACTCGCGATTACGCTCACATGGCTATTGTAACAGCTATCTATATCGTTTTAACCATAACGCCACCTTTTAATGCTATTGCTTATGGTGCTTATCAATTCCGTGTTTCAGAAATGCTAAATTTCTTGGCCTTTTATCACCGAAAATACCTTTTTGCGGTAACGTTAGGATGTATGATTTCTAATCTTTATAGTTTTGGAATGATTGATGTCTTTGTAGGTGGTGGTTCAACTTTACTTTTTGTTTATCTTGGAACCATTTTATTCAAGCAATATCAAAAAGATTATCTATTTAATGGCCTTATTAACAAAGCATTCTTTTTCTTTTCTTTCTTCTTTGCTGCTTCAATGATTACGGTAGCAGTTGAATTGAAAATTGTAGCAGGATTACCTTTATTATTAACATGGTTAACGACAGCTGTTGGTGAATTGACTTCACTTTTGGTTGGAGCAGTCCTTGGATAAGT

SEQ ID NO: 14984 - protein, 160 aa, Streptococcus agalactiae
MNTFTTRDYAHMAIVTAIYIVLTITPPFNAIAYGAYQFRVSEMLNFLAFYHRKYLFAVTLGCMISNLYSFGMIDVFVGGGSTLLFVYLGTILFKQYQKDYLFNGLINKAFFFFSFFFAASMITVAVELKIVAGLPLLLTWLTTAVGELTSLLVGAVLWIS

SEQ ID NO: 14985 - protein, 1919 aa, Streptococcus agalactiae
TTGTGAATCACGCAAAAGAGTATTATACACAGATATCCACAGTTTCTGACAGTCAATATGACCAGTTATATCGAGAGTTAGTAGAATTAGAAGAGCAACATCCAGAAAACATTTTGCCAAATAGTCCCACACATCGAGTGGGTGGTTTAGTTTTAGAAGGCTTTGAAAAATACCAACATGAATATCCTTTGTATTCATTGCAGGATGCTTTCTCAAAAGAAGAATTGATAGCCTTTGATAAACGTGTTAAAGCAGAGTTTCCAACTGCTTCTTATATGGCAGAGCTGAAAATTGATGGTCTATCTGTCTCGTTGACTTATGTAAATGGTATTTTACAGGTTGGGGCAACACGTGGTGATGGCAATATTGGAGAAAATATTACTGAAAATTTAAAGCGTGTTCATGATATTCCTCTACATTTAGACCAAAGTTTAGATATTACTGTTCGCGGAGAGTGCTACCTTCCCAAAGAATCTTTTGAAGCTATTAACATAGAAAAACGTGCAAATGGTGAGCAGGAATTTGCTAATCCTAGGAATGCAGCAGCAGGAACCTTGCGCCAATTAAACACAGGGATTGTTGCGAAACGTAAATTAGCAACTTTTCTTTATCAAGAAGCTAGCCCTACGCAAAAAGAAACACAAGATGATGTTTTAAAAGAGCTAGAAAGCTATGGCTTTTCAGTCAATCATCATCGTTTAATTAGCTCTTCTATGGAGAAAATTTGGGATTTTATCCAAACTATAGAAAAAGATAGAATTTCCCTCCCTTATGATATCGATGGTATTGTTATTAAGGTTAATAGCTTAGCAATGCAAGAAGAGTTGGGCTTCACTGTAAAGGCACCTCGTTGGGCGATTGCATATAAATTCCCTGCTGAAGAAAAGGAAGCAGAAATATTATCTGTTGATTGGACAGTTGGGCGAACAGGAGTTGTAACACCAACAGCTAACCTAACTCCAGTTCAACTAGCAGGGACAACCGTTAGTAGGGCCACTCTGCATAATGTAGATTATATTGCCGAAAAAGATATCCGTATTGGAGATACTGTTGTTGTATACAAAGCAGGGGATATCATCCCTGCAGTCTTAAATGTCGTTATGAGTAAGCGAAACCAGCAAGAAGTCATGCTTATTCCTAAACTATGTCCTTCTTGTGGTAGTGAATTAGTTCATTTTGAAGATGAGGTGGCTTTACGTTGTATTAATCCGCTGTGCCCCAACCAAATCAAAGAACGTTTAGCTCATTTTGCTAGCCGGGATGCTATGAATATTACAGGTTTTGGTCCATCCTTAGTCGAAAAATTATTTGATGCTCATTTAATAGCAGATGTTGCAGATATTTATCGTTTAAGTATAGAGGATTTATTAACTTTAGATGGTATTAAAGAGAAATCTGCAACTAAGATTTATCATGCAATCCAATCTTCAAAAGAAAATTCTGCTGAAAAACTTCTTTTTGGCCTAGGTATTCGTCATGTGGGAAGCAAGGCGAGCCGCCTTTTATTGGAGGAATTTGGTAATTTGAGGCAACTAAGTCAAGCAAGTCAAGAAAGTATTGCCTCAATTGATGGACTAGGAGGGGTTATTGCCAAATCACTTCATACGTTCTTTGAAAAAGAAGAGGTAGATAAACTACTAGAGGAATTAACTTCCTATAACGTTAATTTTAATTATCTAGGAAAACGAGTTAGTACAGATGCACAACTTTCAGGTTTAACAGTCGTTTTAACCGGAAAACTTGAAAAGATGACTCGTAATGAAGCAAAAGAGAAATTACAAAACCTTGGTGCTAAGGTGACAGGTAGCGTTTCTAAAAAGACTGATTTAATTGTTGCAGGAAGCGATGCAGGAAGTAAACTAACCAAGGCTCAAGATTTAGGGATTACAATACAAGATGAAGACTGGTTACTCAACCTT

SEQ ID NO: 14986 - protein, 642 aa, Streptococcus agalactiae
  VARIANT 3, 5: Xaa = Any Amino Acid
MLXSXAKEYYTQDNPTVSDSQYDQLYRELVELEEQHPENILPNSPTHRVGGLVLEGFEKYQHEYPLYSLQDAFSKEELIAFDKRVKAEFPTASYMAELKIDGLSVSLTYVNGILQVGATRGDGNIGENITENLKRVHDIPLHLDQSLDITVRGECYLPKESFEAINIEKRANGEQEFANPRNAAAGTLRQLNTGIVAKRKLATFLYQEASPTQKETQDDVLKELESYGFSVNHHRLISSSMEKIWDFIQTIEKDRISLPYDIDGIVIKVNSLAMQEELGFTVKAPRWAIAYKFPAEEKEAEILSVDWTVGRTGVVTPTANLTPVQLAGTTVSRATLHNVDYIAEKDIRIGDTVVVYKAGDIIPAVLNVVMSKRNQQEVMLIPKLCPSCGSELVHFEDEVALRCINPLCPNQIKERLAHFASRDAMNITGFGPSLVEKLFDAHLIADVADIYRLSIEDLLTLDGIKEKSATKIYHAIQSSKENSAEKLLFGLGIRHVGSKASRLLLEEFGNLRQLSQASQESIASIDGLGGVIAKSLHTFFEKEEVDKLLEELTSYNVNFNYLGKRVSTDAQLSGLTVVLTGKLEKMTRNEAKEKLQNLGAKVTGSVSKKTDLIVAGSDAGSKLTKAQDLGITIQDEDWLLNL

SEQ ID NO: 14987 - protein, 1017 aa, Streptococcus agalactiae
ATGAAGAAACAAAAAAAAGCGCGTTTAATTTATAACCCAACTTCTGGTCAAGAAATTATGAAAAAAAATGTAGCGGAAGTTCTTGATATACTTGAAGGATTTGGGTATGAAACATCAGCCTTTCAAACAACGCCAACTAAAAATTCTGCCAGAGATGAAGCTGCTAGAGCTGCTCAAGCTGGTTTTGATTTGATTGTTGCAGCAGGTGGAGATGGTACTATTAATGAAGTTGTTAATGGTATTGCTCCTTTGAAACGTCGTCCTAAGATGGCAATTATTCCAACTGGAACAACTAATGATTTTGCTCGTGCCTTAAAAATACCGCGAGGTAATCCTATTGAAGCAACTAAATTAATTGGTAAAAATCAAATCGTTAAGATGGACATTGGTCAAGCTCAAGAGGACAATTATTTTATTAATATTGCAGCTGCAGGTAGTTTGACAGAGTTAACTTATAGTGTACCAAGTCAATTGAAAACAACGTTTGGCTATCTTGCTTATCTAGCAAAAGGTGTTGAATTATTACCTCGAGTTCGAAAAGTACCAGTCAAAATTACTCACGATAAGGGTGAATTTATCGGTGATGCTTCAATGATTTTTGTTGCCATCACAAATTCTGTAGGAGGGTTTGAACAAATTGCACCTGATGCCAAATTGGATGATGGGAAATTTACCCTTATTTTAGTAAAAACTGCAAATCTTATTGAGATTATGCATCTCATTCGTTTGGTGCTAGCAGGTGGAAAACATATTAATGATAAACGAGTAGAGTATATTAAAACGTCTTATCTAACTATCGAACCCCTATCAGACGAGCGTATGATGATTAACTTAGATGGAGAATATGGAGGAGATGCTCCCATTACTCTAGCAAACCTTAAAAATCATATTAGGTTCTTTGCTAATACTGATGAAATTTCGGATGATGCTTTAGTTTTAGATAAAGATGAATTAGCGATAGAAGCTATTGCACAGAAGTTTGCTAATGAGGTAAATGATTTAGAAGGATTAGGAGAT

SEQ ID NO: 14988 - protein, 339 aa, Streptococcus agalactiae
MKKQKKARLIYNPTSGQEIMKKNVAEVLDILEGFGYETSAFQTTPTKNSARDEAARAAQAGFDLIVAAGGDGTINEVVNGIAPLKRRPKMAIIPTGTTNDFARALKIPRGNPIEATKLIGKNQIVKMDIGQAQEDNYFINIAAAGSLTELTYSVPSQLKTTFGYLAYLAKGVELLPRVRKVPVKITHDKGEFIGDASMIFVAITNSVGGFEQIAPDAKLDDGKFTLILVKTANLIEIMHLIRLVLAGGKHINDKRVEYIKTSYLTIEPLSDERMMINLDGEYGGDAPITLANLKNHIRFFANTDEISDDALVLDKDELAIEAIAQKFANEVNDLEGLGD

SEQ ID NO: 14989 - protein, 2297 aa, Streptococcus agalactiae
ATGGATAATACTGTCATTGTACATTACCATAGCCGAAAGAAAAATTACTTTAATTTAAGTTTATGGCAGTGGCGCGATGGCTCAGAGGGTCAAGATGCTCATTTTTCACGGTTTGACAGTTTCGGTGCTGTTGCGATACTAAAATATCCCTTGCCATATTTTTTAAGCCATTATTATGTGATTGTTAAGGATAAAAATTGGCATCATAAAACAATAGATTATCGCATTGATTGTACTAAAGGTGGTGCACGTAAAGAAGTTTGGATTGTAGATGGGGATGACAATCTGTATTATTCTCGTCAAGCAGCAGTTAGTAGCCATCATTATAGTAGACGCCAACCTCATGCCTACGATATGGCAATCAATAGTAGAGCGTTTGATAAAAAATGGGGATTTGATGGTTGGTTAGGTTTTGAATATTCAGAAACTAAAACGGCTTTTAGATTGTGGGCCCCTACTGCGGAACGTGTAGAACTGATTTTATATCATTCGACAGATGAAACAGCAAGTGTATCAAAAGTTCTTTCTATGAAAAGAGGGACAGCCGTCAATTATAAAAATCATAAAGAAAACACCCATGGCGTCTGGTTTACTGAACTTGAAGGAAACTATAATTACCAAGCATATACTTATCGAGTCTACTATAGACGACGTACCTTTAAAATTACGAGAGACCCTTATTCCATTGCAACGACTGCAAATGGTAAAAGGTCTATTGTTATTGCTCCAGAAGCATTAACTCCGGAAGGGTTTAAAATAAGTCATGGAAAAGAAGCTAAGTGGCGGCTCGAAAACCCCAATCAAGCAGTCATTTACGAAATGCATGTGCGTGATTTTTCGATATCTGAGACTTCAGGAGTTAAGACAGATTATCAAGGAAAATTTAAGGGATTGCATCAAAAAGATACAGTTAATCAGCATGGTGATAAAACGACCTTTGATTATGTGCAAGACTTAGGAGTTAACTATATCCAACTTCAACCAATTTTCGATCATCATCAGACGTTTGATGATGATGGTCACTATGCTTATAATTGGGGATATGATCCTGAAAACTACAACGTTCCAGAAGCAAGCTTCTCTAGTAATCCACATGAACCTGCAACGCGTATTTTAGAATTAAAATCTGCTATCCAAGCGTACCATGATGCAGGCATTGGTGTTATTATGGATGTTGTCTATAATCATACTTTTTCATCAACTGATTCTGCATTTCAACTAACGGTTCCAGATTATTATTATCGAATGAATCACAATGGAACATTTCAAAATGGTTCAGGCTGTGGTAATGAAACAGCTAGTGAAAAAGAAATGTGTCGTAAGTATATTCTTGATTCAGTTTTGTATTGGGTGAAAGAATATAATATCGATGGTTTTCGATTTGATTTGATGGGACTACATGATGTAGAAACGATGAACATTATAAGAAATGAGCTAAATAAAATCGACCCTCGTATTTTGGTTTATGGAGAAGGATGGGACATGGGAGCTGGTCTCACGCCTCAAAATAAAGCTAAAAAAGATAATGCTTATCAGATGCCTGGAATTGGCTTTTTCAATGATGATGTAAGAGACGCTGTCAAAGGTGCGGAAATTTACGGAGAATTTAAAAAAGGCTTAGTTTCTGGAAACAGTACAGAAGATATTGTTGCAAAAGGCATTTTAGGAAGTGATGAGTTAGTATCATACATTGATCCTAGTCAAGTTTTAAATTATGTTGAAGCACATGACAACTACAACTTAAATGATTTGCTATGGGAATTACATCCTAATGACAACGAGAAACAACATATTTACCGAGTTGAAGTAGCTAGTGCTATGAATCTATTGATGCAAGGGATGGCTTTCATGCAATTAGGTCAGGAGTTTCTTCGAACAAAGTGTTATCCTACAGGTGATAAAGGTCAACTTACTCAAGCAGATAAAGAAAGAGCTATGAATTCTTACAATGCCCCAGACCAAGTTAATCAGGTCAACTGGGATAATGTTACCTTTCATAAGAGTACTATTAATTTTATTAGGAAAATAATTACTTTGAAGACAAACTCTCCTTACTTTTCTTACTCTAGCTTTGAAGAGATTCGCAAACATGTTTTTGTAGAGTCTGCTCAATACCATTCAGGTTTCATAAGTTTTACAGTCGAAGAACATAAGAAAATAAAAATAATTTTCAATATAAAGGAAAACGCTTGCAGGATCCTTTCATAGGTGATATAATAATATCAAATCATGAAGAAGGAAAAGCGATAGATTCATTAGATGATGAGCTTTCTGTAATGATCCTTGATATCACAAAA

SEQ ID NO: 14990 - protein, 766 aa, Streptococcus agalactiae
MDNTVIVHYHSRKKNYFNLSLWQWRDGSEGQDAHFSRFDSFGAVAILKYPLPYFLSHYYVIVKDKNWHHKTIDYRIDCTKGGARKEVWIVDGDDNLYYSRQAAVSSHHYSRRQPHAYDMAINSRAFDKKWGFDGWLGFEYSETKTAFRLWAPTAERVELILYHSTDETASVSKVLSMKRGTAVNYKNHKENTHGVWFTELEGNYNYQAYTYRVYYRRRTFKITRDPYSIATTANGKRSIVIAPEALTPEGFKISHGKEAKWRLENPNQAVIYEMHVRDFSISETSGVKTDYQGKFKGLHQKDTVNQHGDKTTFDYVQDLGVNYIQLQPIFDHHQTFDDDGHYAYNWGYDPENYNVPEASFSSNPHEPATRILELKSAIQAYHDAGIGVIMDVVYNHTFSSTDSAFQLTVPDYYYRMNHNGTFQNGSGCGNETASEKEMCRKYILDSVLYWVKEYNIDGFRFDLMGLHDVETMNIIRNELNKIDPRILVYGEGWDMGAGLTPQNKAKKDNAYQMPGIGFFNDDVRDAVKGAEIYGEFKKGLVSGNSTEDIVAKGILGSDELVSYIDPSQVLNYVEAHDNYNLNDLLWELHPNDNEKQHIYRVEVASAMNLLMQGMAFMQLGQEFLRTKCYPTGDKGQLTQADKERAMNSYNAPDQVNQVNWDNVTFHKSTINFIRKIITLKTNSPYFSYSSFEEIRKHVFVESAQYHSGFISFTVEEHKKIKIIFNIKGKRLQDPFIGDIIISNHEEGKAIDSLDDELSVMILDITK

SEQ ID NO: 14991 - protein, 1866 aa, Streptococcus agalactiae
ATGTCCAATAAAGATGAGTTATATACTTTTAGAATAGGTGAAAATTTTCATCTCCAGAATTATTTAGGCGTACATAGCGAAAATGGAAGCTTTTGTTTCAGAGTTTGGGCTCCTAATGCTGAAAATGTTCAAGTTATTGGAGATTTTACAGATTGGCGAAATCGACCTCTCCAAATGAACAAAATTCAAGCAGGAGTTTGGGAAGCTAACAGTTTGGATGCGCGCGAAGGTGATTTATATAAATATTTGGTTACTCGTAAAGGTGGTCAAGTAGTTGAGAAAATCGATCCTATGGCAGTTTATATGGAAAGACGTCCTGGAACTGCAAGTGTTATTAAAGTTCTTAGAAATAAAAAGTGGGAAGATGGTCTTTGGATGGGAAGGCGCAAACGTCTGGGTTTTCAGAAGCGTCCAATTAATATTTACGAAGTTCATGCTGGTTCATGGAAAAAAGATGATTTTGGACATCCTATGACTTTTTCTCAGTTAAAAGATTACTTAATCCCCTACCTTGTTGAGATGAATTATACTCATGTTGAATTTATGCCCTTAATGGCACATCCGCTTGATATGAGTTGGGGATATCAATTAATGGGGTATTTTGCTTTTGAACATACCTATGGTACTCCAGAAGAATTTCAAGACTTTGTAGAAGCATGTCATAAAAATAATATAGGAGTTCTTGTAGATTGGGTTCCAGGACACTTTATTCAGAATGACGATGCTTTAGCCTATTTCGATGGAACTGCTACTTATGAGTATCAAAATCATGATCGTGCGCATAACTATCGATGGGGAGCTCTGAACTTTGATTTAGGAAAAAATCAAGTACAATCCTTTTTGATTTCGAGTGCCTTGTTCTGGATTGAACATTATCATATTGATGGTATTCGTGTTGATGCGGTTAGTAATATGTTATATCTCGATTATGATGAAGGACCATGGGAAGCTAACCAATTTGGGGATAATCGTAATTTGGAAGGATATCACTTTTTAAGGAAACTTAACAAAGTAATTAAAGAGCGTCATCCTAATGTTATGATGATTGCTGAAGAGTCAACAGCTTCTACCCCAATAACTAAAGACTTAGAGTCTGGAGGATTGGGTTTTGACTTTAAATGGAATATGGGCTGGATGAATGATATCCTGCGTTTTTATGAAGAAGATCCTCTCTATAGGCAATATGATTTTAATTTAGTGACTTTTAGTTTTATGTATATATTCAATGAGAACTTTGTACTAGCTTTTTCACATGATGAAGTAGTACATGGTAAAAAGAGTATGATGCATAAAATGTGGGGTGACCGTTATAATCAATTTGCTGGTTTACGTAATTTATATGCATATCAAATGTGTCATCCTGGGAAAAAACTTCTCTTTATGGGAAGTGAGTTTGGTCAATTTTTAGAATGGAAATATAATGATCAACTAGAATGGGAAAACTTAAATGATGATATGAACCAAAAGATGCAACGCTATACTAAACAATTGAATCAATTTTATAAAGATCATAAGTGCCTATGGCGTATTGATGATTCCTTTGACGGGCTAGAAATTATTGATGCGGATAATAAATCTGAAACTGTTTTATCTTTTATACGAAAAGATGATAAAGGCGATTTGTTACTTTGTGTCTTTAATATGACTCCTGTAGAACGCCCTAACTTTACTATTGGTGTTCCGCAAGCGGGTATTTATGAAGAAGTTTTAAATACTGAAATGGAAGAGTTTGGAGGTGTTTGGAAAAACCACAATCCTGTAACGAAAACACAAGTGGCTACATGGAAAGATTATGATCATACTTTAAGTTTTACATTACCAGCCCTTGGGGCAAGTGTTTGGAGAATAAAACGTCGGCTTCGTAAA

SEQ ID NO: 14992 - protein, 622 aa, Streptococcus agalactiae
MSNKDELYTFRIGENFHLQNYLGVHSENGSFCFRVWAPNAENVQVIGDFTDWRNRPLQMNKIQAGVWEANSLDAREGDLYKYLVTRKGGQVVEKIDPMAVYMERRPGTASVIKVLRNKKWEDGLWMGRRKRLGFQKRPINIYEVHAGSWKKDDFGHPMTFSQLKDYLIPYLVEMNYTHVEFMPLMAHPLDMSWGYQLMGYFAFEHTYGTPEEFQDFVEACHKNNIGVLVDWVPGHFIQNDDALAYFDGTATYEYQNHDRAHNYRWGALNFDLGKNQVQSFLISSALFWIEHYHIDGIRVDAVSNMLYLDYDEGPWEANQFGDNRNLEGYHFLRKLNKVIKERHPNVMMIAEESTASTPITKDLESGGLGFDFKWNMGWMNDILRFYEEDPLYRQYDFNLVTFSFMYIFNENFVLAFSHDEVVHGKKSMMHKMWGDRYNQFAGLRNLYAYQMCHPGKKLLFMGSEFGQFLEWKYNDQLEWENLNDDMNQKMQRYTKQLNQFYKDHKCLWRIDDSFDGLEIIDADNKSETVLSFIRKDDKGDLLLCVFNMTPVERPNFTIGVPQAGIYEEVLNTEMEEFGGVWKNHNPVTKTQVATWKDYDHTLSFTLPALGASVWRIKRRLRK

SEQ ID NO: 14993 - protein, 1136 aa, Streptococcus agalactiae
ATGAAAAATGAAATGTTAGCACTCATTTTCGTCGGAGGACAAGGCACTCGACTCGGAAAATTGACTCAGAGCATTGCGAAACCTGCTGTTCAATTTGGAGGTCGTTACCGTATTATTGACTTTGCGCTTTCAAATTGTGCGAATTCAGGTATTAATAATGTTGGAGTTATTACTCAGTATCAACCGCTGGAACTCAATACTCATATTGGAAACGGATCTAGCTGGGGACTAGATGGTATCGATTCGGGAGTAACTGTATTACAGCCATATTCTGCAACAGAAGGTAATCGCTGGTTTCAAGGTACCAGCCACGCTATCTATCAAAATATTGACTACATTGATCGTATTAATCCAGAATATGTACTCATTCTCTCTGGGGACCACATCTATAAAATGGACTATGATGACATGCTACAGACGCATAAAGATAATTTAGCAAGCCTAACAGTCGCTGTTTTAGATGTTCCTTTAAAAGAAGCAAGCCGTTTTGGAATTATGAATACTGATTCAAACGACCGTATTGTCGAATTTGAAGAAAAACCTGAACATCCTAAGTCAACAAAAGCTTCAATGGGAATATACATTTTTGACTGGAAGAGATTACGGACAGTTTTAATTGATGGTGAAAAGAACGGCATAGACATGTCAGACTTTGGTAAAAATGTTATACCAGCATACCTTGAATCGGGTGAACGTGTTTATACCTATAATTTTGATGGGTATTGGAAAGATGTTGGTACTATTGAATCCCTTTGGGAAGCTAATATGGAATATATTGGAGAAGATACAAATTACATAGTCGTGATCGTTCATGGAAAATCTATTCTAAAAATTTGATTGCACCACCTAATTTCATGACAGAAGATGCAAATGTTAAAGATTCTTTAGTTGTAGATGGATGCTTTGTTGCAGGAAATGTTGAGCACTCCATTTTATCAACTAATGTCCAGGTAAAACCAAATGCTATTATTAAAGACTCCTTTGTTATGAGTGGCGCGACTATCGGTGAAGGTGCAAAGATAAATCGAGCTATTATCGGTGAGGATGCTGTTATTGGTGATGGTGTTGTGATTGATGGAAGTAAAGAAGTAGAAGTTATTGGTTATAAAGAAGTAGCGGGGGTTCCAAATGAAGAT

SEQ ID NO: 14994 - protein, 379 aa, Streptococcus agalactiae
  VARIANT 263: Xaa = Any Amino Acid
MKNEMLALIFVGGQGTRLGKLTQSIAKPAVQFGGRYRIIDFALSNCANSGINNVGVITQYQPLELNTHIGNGSSWGLDGIDSGVTVLQPYSATEGNRWFQGTSHAIYQNIDYIDRINPEYVLILSGDHIYKMDYDDMLQTHKDNLASLTVAVLDVPLKEASRFGIMNTDSNDRIVEFEEKPEHPKSTKASMGIYIFDWKRLRTVLIDGEKNGIDMSDFGKNVIPAYLESGERVYTYNFDGYWKDVGTIESLWEANMEYIGEDXKLHSRDRSWKIYSKNLIAPPNFMTEDANVKDSLVVDGCFVAGNVEHSILSTNVQVKPNAIIKDSFVMSGATIGEGAKINRAIIGEDAVIGDGVVIDGSKEVEVIGYKEVAGVPNED

SEQ ID NO: 14995 - protein, 318 aa, Streptococcus agalactiae
ATGAAGATTGATAAATATACTGCGATTTTAGGAAATACTGTTAGTTACCCAGATATGCACAGTTTGACGGATAATCGTCCGCTTGCTTCTCTACCTTTTGATGGTAAGTATCGTTTAATTGATTTTCAATTATCCTCTTTAGCTAATGCAGGCGTTAGAAGTATTTATGGTATTTTTCGTGGGAATAATGTTCGCTCTGTTTTTGACCATATTAGAAGTGGTCGTGAGTGGGGCTTAGGTACACTGTTGAGTCACTATTCTTTAGGATTCTATGATACAGACGATGATACTCGTACAGTCAATGGGGATTATTACGAT

SEQ ID NO: 14996 - protein, 106 aa, Streptococcus agalactiae
MKIDKYTAILGNTVSYPDMHSLTDNRPLASLPFDGKYRLIDFQLSSLANAGVRSIYGIFRGNNVRSVFDHIRSGREWGLGTLLSHYSLGFYDTDDDTRTVNGDYYD

SEQ ID NO: 14997 - protein, 753 aa, Streptococcus agalactiae
ATGCTTTGTAATATTGACTTAAGTCAAGTAATCCACTTGCATAATGCAAATGGTGTGCAAGCCACCGTGGTTTATAAAAAAATGCCGAGATCAGCTATTGCAGAGGCTAATCAAGTCTTGACCATTGATGAATCTGATCATGTAGTGAGTCTAGGTAAAGCTGTAGATAATGACGATAACCAAAAAATGTCTGCTGAGATTTATGTTATCGATACACCTTGGTTAATCGAAAAAATGGAAGAGGAAGCTCAAAATAATGAACCACGTAAACTCCGCTTCTTACTTCGTGATTTAATTGTTGAAAGTAATGCTTTGGCTTTTGAATACACTGGTTATTTGTCAAACATTTCTTCTATTAAATCCTATTATGATGCTAACATGGACATGTTAACACCAAATAAATTTTATTCGCTCTTCTTTTCAAACCAAAAAGTTTATACTAAGGTGAAAAATGAGGAAGCTACTTATTTTGATAAACAATCAAATGTCTCTAATTCGCAACTAGCCTATGGAAGTATTATTAAAGGTTATTTAGACCATTCTATCGTTTCTAGAAATTGTCTCCTTGAAAAAGGGACTCGAGTAGTCAATAGTATTATCTTTCCAAAAGTAAAAATCGGAGAAGGGGCAACCATTGAAAATACTATTATTGACAAATGCGTTAAGGTTGCATCCGGAGTTACATTGAAAGGTAGTTTAGATAAACCGTTAGTGATTCCTAAATTTTCAGAGATTAATGAGGATATTATACAA

SEQ ID NO: 14998 - protein, 251 aa, Streptococcus agalactiae
MLCNIDLSQVIHLHNANGVQATVVYKKMPRSAIAEANQVLTIDESDHVVSLGKAVDNDDNQKMSAEIYVIDTPWLIEKMEEEAQNNEPRKLRFLLRDLIVESNALAFEYTGYLSNISSIKSYYDANMDMLTPNKFYSLFFSNQKVYTKVKNEEATYFDKQSNVSNSQLAYGSIIKGYLDHSIVSRNCLLEKGTRVVNSIIFPKVKIGEGATIENTIIDKCVKVASGVTLKGSLDKPLVIPKFSEINEDIIQ

SEQ ID NO: 14999 - protein, 1426 aa, Streptococcus agalactiae
ATGAAAATAATGTTTGTTGCGGCAGAGGGTGCTCCCTTTGCTAAAACAGGTGGTTTGGGAGATGTGATTGGCGCACTCCCAAAATCACTTAGTAAAAAAGGTCATGATGTCGCTGTTGTCATGCCATATTATGATATGGTAGACCAAAAATTTGGAGACCAAATAGAAAACCTCATGTATTTCTATACAGATGTTGGCTGGCGTCATCAATATGTAGGAGTTAAGAGACTTTCTCAAGATAATGTTACGTTCTACTTTATTGATAATCAATATTATTTTTATAGAGGTCATGTCTATGGTGATTGGGATGATGGGGAGCGTTTTGCTTATTTCCAATTAGCTGCTTTAGAGTTGATGGAGAAAATAGATTTTATTCCCGATGTCTTACACGTCCATGATTATCATACAGCAATGATTCCTTTCTTATGAAGAGAAGTACCACTGGATTCAGGCCTATAATAATATAAGAGCAGTTTTTACTATTCACAATATTGAATTTCAAGGGCAGTTTGGTCCAGAAATGTTAGGAGATTTATTTGGAGTTGGCGCTGAGAGATATGAAGATGGAACTCTTAGATGGAATAATTGTCTTAATTGGATGAAAGCAGCAATTCTTTACTCAGATAGAGTGACAACGGTATCACCAAGCTACGCAAATGAAATAAAAACTCCAGAATTTGGTAAAGGTTTAGACCAAATTATGCGTATGGAAGCAGGTAAATTATCTGGAATCGTAAATGGTATTGACAGCGATTTGTTAAATCCAGAAACAGATGCTTTTTTGCCATATCATTTTTCAAAAAGCAACTTAGAGGGCAAAATTAAAAATAAGTTGGCTTTACAGGAAAATTTGGGCTTGCCTCAAGATAAAAATGTACCATTAATTGGTATTGTTTCACGACTTACCGATCAAAAAGGATTTGATATTATTGCTTCTGAATTGGACAATATGCTTCAACAAGATATTCAAATGGTTATTTTAGGAACAGGCTATCACCATTTTGAAGAAACGTTCTCTTATTTTGCTAGTCGTTACCCTGAAAAACTATCTGCTAATATTACTTTTGACTTAGGATTAGCGCAACAGATTTATGCGGCTTCAGATATCTTCATGATGCCAAGTGCTTTTGAACCTTGTGGTCTCTCGCAGATGATGGCTATGAGATATGGTAGCTTACCCTTGGTACATGAAGTTGGAGGATTAAAAGATACTGTGGTAGCCTTCAATCAATTTGATGGTAGTGGTACAGGTTTTTCATTTAATCATTTTTCAGGCTATTGGTTAATGCAAACTCTAAAACTAGCATTAGAAGTTTATAATGATTATCCTGAAGCGTGGAAAAAGTTACAATGGCAAGCTATGTCAAAAGATTTTTCATGGGATACAGCATGTGTTGCTTACGAACAACTGTATCAGCAACTACAA

SEQ ID NO: 15000 - protein, 476 aa, Streptococcus agalactiae
MKIMFVAAEGAPFAKTGGLGDVIGALPKSLSKKGHDVAVVMPYYDMVDQKFGDQIENLMYFYTDVGWRHQYVGVKRLSQDNVTFYFIDNQYYFYRGHVYGDWDDGERFAYFQLAALELMEKIDFIPDVLHVHDYHTAMIPFLLKEKYHWIQAYNNIRAVFTIHNIEFQGQFGPEMLGDLFGVGAERYEDGTLRWNNCLNWMKAAILYSDRVTTVSPSYANEIKTPEFGKGLDQIMRMEAGKLSGIVNGIDSDLLNPETDAFLPYHFSKSNLEGKIKNKLALQENLGLPQDKNVPLIGIVSRLTDQKGFDIIASELDNMLQQDIQMVILGTGYHHFEETFSYFASRYPEKLSANITFDLGLAQQIYAASDIFMMPSAFEPCGLSQMMAMRYGSLPLVHEVGGLKDTVVAFNQFDGSGTGFSFNHFSGYWLMQTLKLALEVYNDYPEAWKKLQWQAMSKDFSWDTACVAYEQLYQQLQ

SEQ ID NO: 15001 - protein, 165 aa, Streptococcus agalactiae
ATGGGAGCTGGTCTCGCGCCTCAAAATAAAGCTAAAAAAGATAATGCTTATCACATGCCTGGAATTGGCTTTTTCAATGATGATGTAACAGACGCTGTCTCAGGTGCGGAAATTTACGGAGAATTTAAAAAAGGCTTAGTTTCTGGAAACANNNNNTTAATTAAT

SEQ ID NO: 15002 - protein, 55 aa, Streptococcus agalactiae
  VARIANT 51, 52: Xaa = Any Amino Acid
MGAGLAPQNKAKKDNAYHMPGIGFFNDDVTDAVSGAEIYGEFKKGLVSGNXXLIN

SEQ ID NO: 15003 - protein, 714 aa, Streptococcus agalactiae
TTGGAATCTACAAGTAATCCAACCGTATCTTTTTTAGGCATCGATTTTGATTTAACCATCCTAGCTATGTCTCTCTTGACAATTACTATTATCTTTATCTTAGTCTTCTGGGCTAGTCGTAAGATGACAATAAAACCAAAAGGTAAGCAGAATGTCTTAGAATATGTCTATGAGCTTGTTAATAATACAATCTCACAAAATTTAGGACATTATACTAAAAATTATAGTTTATTGATGTTTATTTTATTCAGTTTTGTCTTCATTGCTAACAACTTAGGATTGATGACATCATTGAAAACACATGAGCATAATTTTTGGACATCTCCGACCGCTAATTTTGGTGTAGATATTACATTATCATTATTAGTAGCATTTATTTGTCATATTGAAGGTATTCGCAAAAAAGGAATTGGTGGTTATCTCAAAGGTTTCTTATCACCAACACCAGCAATGCTTCCGATGAATTTATTGGAAGAAGTTACTAATGTTGCTTCATTAGCATTGCGTCTTTTTGGTAATATCTTTTCTGGTGAAGTTGTCACTGGATTACTTTTACAACTTGCAGTTTTATCACCATTTACAGGTCCACTAGCTTTTGCATTGAATATCGTTTGGACAGCATTTTCAATGTTTATTGGTTTCATCCAAGCGTATGTGTTCATTATCTTGAGCTCAAGTTATATTGGACACAAAGTTCATGGTGACGAAGAAGAA

SEQ ID NO: 15004 - protein, 238 aa, Streptococcus agalactiae; identical to SEQ ID NO: 1634

SEQ ID NO: 15005 - protein, 495 aa, Streptococcus agalactiae
ATGTCAATACTTATTAATAGTACAACGATTGGTGATATCATTATCGTATCTGGCTCTGTGCTTCTCTTATTTATCTTAATTAAGACTTTTGCATGGAAACAAATCACAGGTATTTTTGAAGCCCGTGAACAAAAGATAGCTAATGATATTGATACTGCTGAACAGGCACGTCAACAAGCTGAAGCTTTTGCAACTAAGCGTGAGGAAGAACTATCTAACGCTAAAACTGAAGCTAATCAAATCATTGATAATGCTAAAGAGACAGGTCTTGCAAAAGGTGATCAAATTATTTCAGAAGCAAAAACTGAAGCTGATCGATTAAAAGAAAAAGCACATCAAGATATTGCCCAAAATAAGGCAGAAGCACTAGCAGATGTTAAGGGTGAAGTAGCAGATTTAACAGTTTTATTAGCTGAAAAAATTATGGTATCAAATCTTGATAAAGAAGCTCAGAGTAATCTCATTGATAGCTATATTAAAAAGCTAGGAGATGCC

SEQ ID NO: 15006 - protein, 165 aa, Streptococcus agalactiae; identical to SEQ ID NO: 1640

SEQ ID NO: 15007 - protein, 534 aa, Streptococcus agalactiae
ATGAATAAAAAGACGCAGGCTCTAATTGAGCAATATTCAAAAAGCCTTGTTGAAGTTGCCATTGAACATAAAATTGTTGAAGAAATCCAACAAGAAGTAGCAGCTTTAATTGATATTTTTGAAACAAGCGAGCTTGAGGGTGTCCTGTCAAGTCTTGCCGTTTCACATGATGAAAAACAACATTTTGTGAAGACATTGCAAACATCATGTTCAACTTATCTTGTTAATTTCCTTGAGGTTATTGTACAAAATGAACGTGAAGCACTTCTATATCCTATTTTGAAATCAGTTGATCAGGAACTTATCAAAGTGAATGGTCAATATCCAATTCAAATTACAACTGCAGTTGCTTTGTCTCCAGAACAAAAAGAACGTCTTTTTGATATTGCTAAAACTAAATTAGCTTTACCAAATGGACAGTTAGTTGAGCACATTGACCCATCTATTGTTGGTGGATTTGTTGTCAATGCAAACAATAAAGTAATTGATGCAAGTGTTCGTAATCAATTACATCAATTTAAAATGAAATTAAAA

SEQ ID NO: 15008 - protein, 178 aa, Streptococcus agalactiae
MNKKTQALIEQYSKSLVEVAIEHKIVEEIQQEVAALIDIFETSELEGVLSSLAVSHDEKQHFVKTLQTSCSTYLVNFLEVIVQNEREALLYPILKSVDQELIKVNGQYPIQITTAVALSPEQKERLFDIAKTKLALPNGQLVEHIDPSIVGGFVVNANNKVIDASVRNQLHQFKMKLK

SEQ ID NO: 15009 - protein, 1503 aa, Streptococcus agalactiae
TTGGCAATTAATGCACAAGAAATTAGCGCTTTAATTAAAAAGCAAATTGAAGACTTCCAGCCAAATTTTGACGTCACAGAAACTGGTATTGTTACATATATCGGTGATGGTATTGCTCGTGCTCGTGGGCTAGATAATGCTATGAGTGGAGAACTTCTTGAATTTTCAAATGGTGCGTACGGTATGGCTCAAAACCTTGAGTCTAATGACGTGGGTATCATTATTTTGGGTGATTTCTCAGAAATTCGTGAAGGTGATGTGGTAAAACGTACTGGTAAAATTATGGAAGTACCAGTAGGGGAAGCTATGATTGGACGTGTCGTCAATCCGCTTGGTCAACCAGTTGATGGACTAGGTGAAATTGAGACGACAGCAACACGCCCAGTTGAAACACCAGCACCTGGTGTTATGCAACGTAAATCAGTTTTTGAGCCTCTTCAAACAGGTCTCAAAGCGATTGATGCTTTGGTTCCTATCGGACGTGGGCAACGCGAATTGATTATCGGTGACCGCCAAACTGGTAAGACGTCTGTAGCGATTGATGCAATCTTGAATCAAAAAGGTCAAGATATGATCTGTATCTATGTGGCTATCGGTCAAAAAGAGTCTACAGTACGTACACAAGTTGAAACTTTGCGTAAATATGGTGCCCTTGATTACACAATCGTTGTGACAGCTTCAGCATCACAACCATCTCCATTACTTTTCATTGCTCCATATGCAGGAGTAGCAATGGCTGAGGAATTCATGTATAACGGGAAACACGTTTTGATTGTTTATGATGATTTATCAAAACAAGCCGTAGCTTATCGTGAACTTTCGCTTCTTCTTCGCCGTCCTCCAGGTCGCGAAGCTTACCCAGGGGATGTTTTCTATCTTCATAGTCGTCTTTTGGAACGTTCAGCTAAAGTATCAGATGCTTTAGGTGGAGGTTCGATTACAGCGCTTCCGTTCATTGAAACACAAGCAGGTGATATCTCAGCATATATTGCTACAAACGTTATTTCAATTACTGACGGCCAAATTTTCTTGCAAGAAAATCTCTTTAACTCAGGTATTCGTCCGGCGATTGATGCAGGTTCATCAGTATCTCGTGTTGGTGGTGCAGCGCAAATTAAAGCGATGAAGAGAGTTGCAGGTACGCTTCGTCTAGATCTTGCTTCTTATCGCGAACTTGAGGCATTCACTCAATTTGGTTCAGACCTTGATGCAGCAACACAAGCAAAACTAAATCGTGGTCGTCGCACAGTGGAAGTGTTAAAACAACCATTACACAAACCATTGCCAGTTGAGAAACAAGTTGTGATTTTATATGCTCTAACACATGGATTCCTTGATGATGTACCTGTAAATGATATTTTAGCTTTTGAAGAAGCTTTGTATGATTACTTTGATGCTCATTATGATAATCTCTTCGAAACAATCCGCACAACAAAAGATTTACCAGAAGAAGCAGAATTAGATGCTGCTATTCAAGCATTTAAAGATCAATCACAATTTAAA

SEQ ID NO: 15010 - protein, 501 aa, Streptococcus agalactiae; identical to SEQ ID NO: 1644

SEQ ID NO: 15011 - protein, 879 aa, Streptococcus agalactiae
ATGGCAGGCTCTCTTAGTGAAATTAAAGACAAGATTCTTTCTACAGAAAAAACAAGTAAGATTACTAGTGCGATGCAGATGGTCTCATCTGCCAAGTTGGTTAAATCTGAACAAGCTGCTAGAGATTTTCAAGTGTATGCCTCTAAAATTCGTCAAATTACTACTAACCTCTTGAAGTCAGACTTAGTATCTGGATCAGATAACCCTATGTTAGCTTCACGTCCGGTGAAGAAGACAGGTTATATTGTTATTACTTCTGATAAGGGTTTAGTTGGTGGTTACAATTCAAAAATCTTAAAAGCGATGATGGACACTATAACTGACTATCATACTGAGAATGATGATTATGCCATTATTTCAATTGGTAGTGTTGGTTCTGATTTTTTCAAAGCACGTGGAATGAATGTTTCTTTCGAATTACGTGGTTTAGAGGACCAACCAAGTTTTGATCAAGTTGGTAAAATTATTGCTCAAGCAGTTGAAATGTACAAAAATGAGTTGTTCGATGAATTATATGTTTGCTACAATCACCATGTTAACAGTTTAACTAGCCAAGTCAGAATGCAACAAATGCTTCCTATCAAAGAATTGGATGCAGAAGAGGCTTCTGAGGATAGAGTGATTACTGGTTTTGAACTTGAGCCAAACCGTGAAGTTATATTGGAGCAATTATTGCCTCAATATACTGAGAGTTTGATTTATGGAGCTATTATTGATGCTAAAACAGCAGAGCATGCGGCTGGTATGACAGCTATGCAGACTGCAACCGATAATGCTAAAAATGTTATCAATGATTTAACTATTCAATATAACCGTGCTCGTCAAGCAGCTATCACACAGGAAATTACAGAAATTGTTGCAGGTGCTAATGCACTTGAA

SEQ ID NO: 15012 - protein, 293 aa, Streptococcus agalactiae
MAGSLSEIKDKILSTEKTSKITSAMQMVSSAKLVKSEQAARDFQVYASKIRQITTNLLKSDLVSGSDNPMLASRPVKKTGYIVITSDKGLVGGYNSKILKAMMDTITDYHTENDDYAIISIGSVGSDFFKARGMNVSFELRGLEDQPSFDQVGKIIAQAVEMYKNELFDELYVCYNHHVNSLTSQVRMQQMLPIKELDAEEASEDRVITGFELEPNREVILEQLLPQYTESLIYGAIIDAKTAEHAAGMTAMQTATDNAKNVINDLTIQYNRARQAAITQEITEIVAGANALE

SEQ ID NO: 15013 - protein, 1404 aa, Streptococcus agalactiae
ATGAGCTCAGGCAAAATTGCTCAGGTAGTTGGACCTGTCGTTGACGTTGTATTTGCAAGTGGCGACAAACTTCCTGAGATTAATAATGCATTGATTGTCTATAAAAATGGCGATAAGTCACAAAAAGTAGTACTTGAAGTTGCTCTTGAACTTGGTGACGGCCTCGTTCGTACAATAGCTATGGAATCAACTGATGGGCTTACACGTGGTTTGGAAGTATTAGATACTGGTCGCGCAATTAGTGTGCCGGTTGGTAAGGATACTTTGGGTCGTGTCTTCAACGTTCTTGGAGATGCTATTGACCTTGAAGAGCCTTTTGCAGAAGATGCAGAACGTCAACCAATCCATAAAAAAGCACCATCGTTTGATGAATTATCAACATCATCAGAAATCTTAGAAACAGGTATTAAAGTTATTGACTTATTAGCACCTTACTTAAAAGGTGGTAAAGTCGGGCTTTTCGGTGGTGCGGGTGTTGGTAAAACCGTTCTTATTCAAGAATTAATCCACAACATCGCCCAAGAACATGGTGGTATTTCAGTATTTACTGGTGTAGGAGAACGTACTCGTGAAGGGAATGACCTTTATTGGGAAATGAAAGAATCTGGCGTTATTGAAAAAACGGCTATGGTCTTTGGTCAAATGAATGAACCACCAGGAGCACGTATGCGTGTGGCACTTACTGGTCTTACAATAGCTGAATACTTCCGTGATGTAGAAGGACAAGATGTGCTTCTCTTCATTGATAATATCTTCCGTTTCACACAAGCGGGGTCAGAAGTGTCAGCGCTTTTAGGTCGTATGCCTTCAGCCGTTGGTTATCAACCAACACTTGCTACAGAAATGGGACAATTACAAGAGCGTATCACTTCAACTAAAAAAGGTTCTGTTACATCAATCCAAGCTATTTATGTGCCAGCAGATGACTATACTGACCCTGCGCCAGCTACAGCCTTTGCTCACTTAGATTCAACAACTAACCTTGAACGTAAATTGACACAAATGGGGATTTATCCAGCCGTTGACCCATTAGCTTCAAGTTCTCGTGCACTCACACCAGAAATCGTTGGAGATGAGCACTATGAAGTTGCAACAGAAGTACAGCGTGTTCTTCAACGTTACCGTGAGTTACAAGATATCATTGCGATTTTAGGTATGGATGAATTATCAGATGAGGAAAAAACGTTAGTTGGACGTGCACGTCGTATCCAATTCTTCCTTTCTCAAAACTTCAATGTTGCAGAAACATTTACTGGTCAACCAGGTTCATATGTTCCGGTTGAAGAAACTGTTCGCGGATTCAAAGAAATCCTAGATGGTAAACATGATCAAATTCCAGAAGATGCCTTCCGTATGGTTGGTGGTATTGAGGATGTTATCGCAAAAGCAGAAAAAATGAACTAT

SEQ ID NO: 15014 - protein, 468 aa, Streptococcus agalactiae; identical to SEQ ID NO: 1648

SEQ ID NO: 15015 - protein, 411 aa, Streptococcus agalactiae
ATGGCACAATTGACTGTTCAAGTAGTAACATCAGATGGTATTAGATATGACCATCACGCTAGTCTCATTACTGTTAGAACGCCAGATGGTGAAATGGGAATTTTACCAGGTCACATAAATTTGATTGCTCCCCTTATTGTTCATCAGATGAAGATTAATCGTTCTCATCAAGAAGGTGTAGACTGGGTAGCTGTTAATGGTGGTATAATTGAAGTTAATGAGGATCAGGTGACAATTGTTGCGGATTCAGCAGAACGAGCACGTGATATAGACCTTAACCGTGCAGAACGGGCTAAGGAACGCGCTGAGCGTGCATTAGAAAAAGCTCAAACAACTCAGAATATTGATGAGATGCGTAGAGCTGAGGTTGCTCTTCGTCGCGCAATTAACCGTATTAGCGTCGGTAAAAAG

SEQ ID NO: 15016 - protein, 137 aa, Streptococcus agalactiae
MAQLTVQVVTSDGIRYDHHASLITVRTPDGEMGILPGHINLIAPLIVHQMKINRSHQEGVDWVAVNGGIIEVNEDQVTIVADSAERARDIDLNRAERAKERAERALEKAQTTQNIDEMRRAEVALRRAINRISVGKK

SEQ ID NO: 15017 - protein, 1269 aa, Streptococcus agalactiae
ATGGATAAAATTATTGTGGAAGGTGGGCAAACGCGGCTTCAAGGTCAAGTTGTTATTGAAGGAGCTAAAAATGCAGTTTTACCTCTTTTAGCAGCCACAATTTTACCAAGCCAAGGGAAAACATTATTGACCAATGTTCCTATCTTGTCTGATGTATTTACAATGAACAATGTTGTTCGTGGTTTAGATATTCAAGTTGACTTTAATTGCGATAAAAAAGAAATCTTAGTGGATGCCTCAGGTGATATTTTAGATGTTGCACCTTATGAATTTGTTAGTCAAATGAGAGCTTCTATTGTTGTTTTGGGACCTATTTTAGCTAGAAATGGCCATGCTAAGGTTTCAATGCCAGGCGGTTGTACAATTGGTAGCCGACCAATTGACCTTCATCTTAAAGGTTTAGAAGCTATGGGAGCTACGATTACACAAAATGGTGGTGATATTACTGCCCAAGCTGAAAAGCTTAAGGGGGCTAATATATACATGGATTTTCCCTCAGTCGGTGCCACTCAAAACTTGATGATGGCTGCTACACTTGCTTCAGGCACAACAACGATAGAGAATGCTGCACGTGAACCAGAAATTGTAGACCTTGCGCAGTTACTAAATAAAATGGGAGCTAAAGTCAAGGGTGCTGGTACGGAAACATTAACGATCATTGGTGTTGATGCTTTACATGGTACAGAACATGATGTTGTCCAAGATCGTATTGAAGCTGGAACCTTTATGGTGGCAGCTGCTATGACTTCTGGAAATGTTCTAGTAAAGGATGCTATTTGGGAACATAACCGTCCTTTAATCTCTAAATTGATGGAGATGGGTGTTGAAGTGTCAGAGGAAGAAGATGGTATTCGTGTAAAAGCTGATACTAAAAAATTGAAGCCAGTGACTGTGAAAACACTCCCTCATCCAGGATTTCCTACTGATATGCAAGCTCAATTTACAGCTCTAATGGCAGTAGTTAATGGCGAATCAACTATGATTGAGACAGTTTTTGAAAATCGTTTTCAACATTTGGAAGAAATGCGTCGCATGGGATTACAAACGGAAATTTTACGAGATACTGCAATGATTCATGGTGGGAGAGCCTTACAAGGTGCACCGGTCATGTCTACTGACTTACGAGCTAGTGCAGCTTTAATCTTGGCAGGAATGGTTGCGCAAGGGCAAACAGTAGTTGGCCAATTAACCCATTTAGACCGTGGTTATTATCAATTCCATGAAAAATTAGCGGCTCTTGGTGCTAATATTAAACGTGTAAGTGAGGCG

SEQ ID NO: 15018 - protein, 423 aa, Streptococcus agalactiae
MDKIIVEGGQTRLQGQVVIEGAKNAVLPLLAATILPSQGKTLLTNVPILSDVFTMNNVVRGLDIQVDFNCDKKEILVDASGDILDVAPYEFVSQMRASIVVLGPILARNGHAKVSMPGGCTIGSRPIDLHLKGLEAMGATITQNGGDITAQAEKLKGANIYMDFPSVGATQNLMMAATLASGTTTIENAAREPEIVDLAQLLNKMGAKVKGAGTETLTIIGVDALHGTEHDVVQDRIEAGTFMVAAAMTSGNVLVKDAIWEHNRPLISKLMEMGVEVSEEEDGIRVKADTKKLKPVTVKTLPHPGFPTDMQAQFTALMAVVNGESTMIETVFENRFQHLEEMRRMGLQTEILRDTAMIHGGRALQGAPVMSTDLRASAALILAGMVAQGQTVVGQLTHLDRGYYQFHEKLAALGANIKRVSEA

SEQ ID NO: 15019 - protein, 201 aa, Streptococcus agalactiae
GTGAGGCGTAATATGGCATCTAGTGGTTGGAAATATGTACTAAAACAAATCGGTCTAATAGTATTAGTCATACTGTTAGCCTTGCTGTTTTTAGCGGTTGGATTGATGTTGGGTTATAGTGTTTTTGGTGACGGAGAGCATGCTTACTCTATTTTATCGCTGGATAAATGGCAAAATATTATTGGAAAATTTTTAGGAAAA

SEQ ID NO: 15020 - protein, 67 aa, Streptococcus agalactiae; identical to SEQ ID NO: 1658

SEQ ID NO: 15021 - protein, 855 aa, Streptococcus agalactiae
ATGACAAAAAAACAAAAACAAATAACAGCTTCGATTGTAACTTTGCTTTTTTCATTACTGGCAATAGGGTTAGGTGAAAGTAAATCTTTGCCTAATGATCACATTTTAAAACAGGTGACAGATTTAATTATTAGTAATGAATCTGGCAAAAATACTTCCCTTAAAAATATATCAGGAACCCCTAGTAGAGAGTTATCTGAATCTGTTTTGACTAGCAATGTTAAAAAACAATTGGGAACAAATATAGCTTGGAACCAGTCAGGTGCTTTTATCATTAATCAAAATAAAACAGATTTGAATGCTAAAGTGTCAAGTGCACCATATGCTATTAATGAAATAAAGAAGGTTAATAACCAAATTGTTCCAACTAAAGCAAATGCCTTATTAACAAAAGCAACTCGTCAATATCGAAATCGAGAAGAAACAGGGAATGGTAGAACTTATTGGAAACCAGCTGGATGGCATCAGATAAATGGATTAAAAGGGAGCTATAACCACGCTGTGGACAGAGGCCATTTAATTGGTTATGCTTTAGTAGGGAGTTTAAGAGGATTTGATGCCTCCACAAGTAATCCTAAAAATATTGCCACACAAGCAGCTTGGGCAAACCAAGCTAATAGCAACCAATCAACAGGGCAAAATTATTATGAAACTTTAGTTCGTAAAGCATTGGATCGTCATAAAACTGTTAGGTATCGTGTGACTTTAATTTATGACAGAGATAATCTTTTATCTTCGGGATCACATATTGAGGCTAAATCTTCAGATGGAAGTTTAGAATTTAATGTTTTTATTCCTAATGTACAATCGGGATTATTATTTGATTATGCAACAGGAAAAGTGAAGCAGACAAAG

SEQ ID NO: 15022 - protein, 285 aa, Streptococcus agalactiae
MTKKQKQITASIVTLLFSLLAIGLGESKSLPNDHILKQVTDLIISNESGKNTSLKNISGTPSRELSESVLTSNVKKQLGTNIAWNQSGAFIINQNKTDLNAKVSSAPYAINEIKKVNNQIVPTKANALLTKATRQYRNREETGNGRTYWKPAGWHQINGLKGSYNHAVDRGHLIGYALVGSLRGFDASTSNPKNIATQAAWANQANSNQSTGQNYYETLVRKALDRHKTVRYRVTLIYDRDNLLSSGSHIEAKSSDGSLEFNVFIPNVQSGLLFDYATGKVKQTK

SEQ ID NO: 15023 - protein, 1071 aa, Streptococcus agalactiae
TTGTTTTCAAAGCTACTTATTTTGACTTGGAGGAAGATGGATTACAAAAACAATTAGAAGAGTTGAAAATATCCTCAAGAAAAGCTTAAAGAAATGACTGGGAACCACACTAAAGAATTACAAGACTTACGTGTACAAGTTTTAGGAAAAAAAGGTTCTCTAACAGAATTACTAAAAGGTCTGAAAGATTTATCTAATGATTTACGACCAGTTGTTGGAAAACAAGTCAATGAAGTACGTGATATTTTAACAAAAGCGTTTGAGGAACAAGCTAAAGTAGTGGAAGCTGCGAAGATTCAAGCACAGTTAGAGTCTGAGAGTGTCGACGTTACCTTGCCTGGTCGTCAAATGACATTAGGTCACCGTCATGTCTTAACACAAACTAGCGAAGAGATTGAAGATATCTTTTTAGGTATGGGATTCCAAGTGGTTGATGGTTTTGAAGTTGAGAAAGACTACTATAATTTTGAACGAATGAATTTACCAAAAGATCATCCAGCCCGTGATATGCAAGATACTTTTTATATTACAGAAGAAATCTTGCTACGTACTCATACTTCGCCTGTTCAAGCACGAACAATGGACCAACATGATTTTTCTAAAGGGCCTTTAAAAATGATTTCTCCTGGACGTGTTTTCCGTCGTGATACTGATGATGCTACTCATAGCCATCAATTCCATCAAATTGAAGGCTTAGTTGTTGGAGAAAATATTTCAATGGGCGATCTCAAAGGAACACTTCAACTGATTTCTCAAAAAATGTTTGGAGCAGAGCGTAAAATCCGACTTCGTCCTTCATATTTCCCATTCACAGAACCTTCAGTTGAAGTTGATGTCTCTTGCTTCAAGTGCGGAGGTAAGGGATGTAATGTCTGCAAACAGACAGGTTGGATTGAGATATTGGGTGCTGGTATGGTTCACCCAAGTGTTTTGGAAATGTCTGGTATTGATTCTGAGAAATACTCCGGTTTTGCCTTTGGCTTAGGTCAAGAACGTATTGCAATGTTACGCTACGGTATCAATGACATTCGTGGCTTCTATCAAGGTGATGTTCGCTTCACAGATCAATTT

SEQ ID NO: 15024 - protein, 358 aa, Streptococcus agalactiae
MFSKLLILTWRKDGFTKTIRRVENITQEKLKEMTGNHTKELQDLRVQVLGKKGSLTELLKGLKDLSNDLRPVVGKQVNEVRDILTKAFEEQAKVVEAAKIQAQLESESVDVTLPGRQMTLGHRHVLTQTSEEIEDIFLGMGFQVVDGFEVEKDYYNFERMNLPKDHPARDMQDTFYITEEILLRTHTSPVQARTMDQHDFSKGPLKMISPGRVFRRDTDDATHSHQFHQIEGLVVGENISMGDLKGTLQLISQKMFGAERKIRLRPSYFPFTEPSVEVDVSCFKCGGKGCNVCKQTGWIEILGAGMVHPSVLEMSGIDSEKYSGFAFGLGQERIAMLRYGINDIRGFYQGDVRFTDQF

SEQ ID NO: 15025 - protein, 296 aa, Streptococcus agalactiae
ATGTCTCAAATTACTTTTAAAAAGGTTGGCCTTGATAATGTGAATATTTTACAGAATCTTGCTATAGAAACCTTTCGGCAGACGTTTTCTCATGATAATAGTGAGGAACAACTTCAAGCATTTTTCAATGAGTCTTACACTTTACCAGTATTAAATCGGAAATTACCCATGCTGAATCTGATACTTATTTTGTTTATCTTGATACAGATTTAGTGGGTTATTTAAAAGTAAACTGGGGAAGTCAGCAAACTGAAAAAAACTTGATAAAGCATTTGAAATTCAAAGGATTTATCTTC

SEQ ID NO: 15026 - protein, 99 aa, Streptococcus agalactiae
MSQITFKKVGLDNVNILQNLAIETFRQTFSHDNSEEQLQAFFNESYTLPVLKSEITHAESDTYFVYLDTDLVGYLKVNWGSQQTEKNLIKHLKFKGFIF

SEQ ID NO: 15027 - protein, 171 aa, Streptococcus agalactiae
TTGGATTTAGCTTATAAATCAGGCTTAGATTGGGCTTGGTTAGGTGTTTGGGAGTTTAATCATAAAGCTCAGGCATTTTACGCTAAATACGGATTTGAAAAATTTTCTGAGCACCAATTTTCAGTAGGTGATAAAGTGGATACGGATTGGTTATTAAGAAAAAGTTTACAC

SEQ ID NO: 15028 - protein, 57 aa, Streptococcus agalactiae
MDLAYKSGLDWAWLGVWEFNHKAQAFYAKYGFEKFSEHQFSVGDKVDTDWLLRKSLH

SEQ ID NO: 15029 - protein, 2401 aa, Streptococcus agalactiae
ATGTTAGTATCGTATAAATGGTTAAAAGAGTTAGTGGATGTTGATGTCACAACAGCAGAACTAGCTGAGAAAATGTCAACCACTGGTATTGAGGTTGAAGGTGTGGAGACACCAGCGGAAGGTTTATCAAAATTAGTTGTAGGTCATATTGTTTCGTGTGAAGATGTTCCAGATACCCACTTACATTTGTGTCAAGTTGATACAGGGGACGATGAACTTCGTCAAGTTGTCTGTGGTGCTCCAAATGTCAAGACTGGTATTAATGTTATCGTAGCGGTTCCTGGTGCTCGTATTGCAGATAACTATAAGATTAAAAAAGGTAAAATCCGTGGTATGGAGTCACTTGGAATGATTTGTTCACTTCAAGAGTTGGGCTTATCGGAAAGTATCATTCCAAAAGAGTTTTCTGATGGTATCCAAATTTTACCTGAGGGAGCTATACCTGGTGATAGTATTTTCTCTTATCTGACTTAGATGATGAAATTATTGAATTATCAATTACACCAACCGTGCAGATGCTCTTTCAATGCGTGGTGTTGCCCATGAGGTAGCAGCAATTTATGGGAAAAAAGTTCATTTTGAAGAAAAAAATCTCATTGAAGAAGCAGAAAGAGCAGCTGATAAGATTTCTGTTGTCATTGAATCAGATAAAGTTTTATCTTACTCGGCTCGTATTGTTAAGAATGTAACAGTTGCACCAAGTCCACAATGGCTTCAAAATAAACTGATGAATGCTGGTATACGTCCAATTAATAATGTTGTTGATGTGACAAACTATGTTCTTTTGACTTATGGTCAACCAATGCATGCTTTTGATTTTGATAAATTTGATGGGACAACTATAGTAGCACGTAATGCTGAGAATGGTGAAAAGTTAATTACTCTTGATGGTGAAGAGCGTGACTTAATAGCTGATGACTTGGTCATTGCGGTAAATGATCAACCAGTTGCTTTGGCAGGCGTTATGGGAGGACAATCAACTGAAATTGATAGTTCTTCTAAGACAGTGGTCCTTGAAGCGGCAGTATTTAATGGAACAAGTATCCGCAAAACAAGTGGAAGACTCAACCTTCGTTCAGAGTCATCTTCTCGCTTTGAAAAAGGTATCAATTATGATACGGTTTCAGAGGCTATGGATTTTGCGGCTGCAATGTTACAAGAATTGGCAGGCAGTCAAGTTCTTTCTGGGCAAGTTACAGAAGGAGTTCTTCCAACTGAGCCGGTAGAGGTATCAACGACTCTTGGTTACGTTAATACTCGTTTGGGAACAGAACTTACCTATACTGATATTGAAGAAGTATTTGAAAAACTCGGCTTTGCTATTTCTGGTTCAGAAGTGAAATTTACTGTGTTGGTACCGCGTCGTAGATGGGATATTGCCATTCAAGCTGACTTAGTTGAAGAGATTGCCCGTATTTATGGTTACGAAAAATTACCAACAACATTGCCAGAAGCCGGAGCGACTGCAGGAGAATTAACGAGTATGCAACGCTTACGTCGTAGAGTCCGTACGGTTGCTGAAGGAGTAGGATTATCTGAAATTATCACCTATGCTTTAACGACTCCAGAAAAAGCAGTGCAGTTCTCAACTCAAGCAACTAATATAACTGAACTTATGTGGCCGATGACTGTTGATCGCTCAGCACTTCGCCAAAATGTTGTTTCAGGAATGCTTGATACAATTGCTTATAACGTTGCTCGCAAAAACAGTAACCTTGCAGTTTATGAGATAGGAAAAGTTTTTGAACAAACTGGTAATCCAAAAGAAGATTTACCAACTGAAGTAGAGACGTTTACTTTTGCCTTAACAGGTCTAGTAGAGGAAAAAGATTTCCAAACAAAAGCCAAGCCAGTTGATTTCTTCTACGCCAAAGGTATTGTAGAGGCGCTCTTTATTAAATTAAAATTAGATGTTACTTTTGTAGCACAAAAAGGTTTAGCAAGTATGCACCCAGGTCGTACAGCAACTATCTTATTAGATGGGAAAGAGATTGGTTTTGTTGGTCAAGTACACCCACAAACTGCAAAACAATATGATATTCCTGAAACTTATGTTGCTGAAATCAATCTATCAACTATTGAAAGTCAAATGAACCAAGCGTTGATTTTTGAAGATATTACGAAGTATCCGTCTGTATCTCGCGATATTGCATTATTACTTGCAGAATCTGTTAGTCATCATGATATTGTGTTAGCAATTGAGTCATCAGGGGTAAAACGTCTAACAGCGATTAAACTGTTTGATGTCTACGCTGGAAATAATATTGCAGAAGGGTATAAATCAATGGCTTATAGCTTAACTTTCCAAAACCCTAATGACAATCTAACGGACGAAGAAGTGGCTAAATATATGGAAAAAATCACTAAATCACTCGTTGAGAAAGTTAATGCAGAAATAAGA

SEQ ID NO: 15030 - protein, 801 aa, Streptococcus agalactiae
  VARIANT 170: Xaa = Any Amino Acid
MLVSYKWLKELVDVDVTTAELAEKMSTTGIEVEGVETPAEGLSKLVVGHIVSCEDVPDTHLHLCQVDTGDDELRQVVCGAPNVKTGINVIVAVPGARIADNYKIKKGKIRGMESLGMICSLQELGLSESIIPKEFSDGIQILPEGAIPGDSIFSYLDLDDEIIELSITPXRADALSMRGVAHEVAAIYGKKVHFEEKNLIEEAERAADKISVVIESDKVLSYSARIVKNVTVAPSPQWLQNKLMNAGIRPINNVVDVTNYVLLTYGQPMHAFDFDKFDGTTIVARNAENGEKLITLDGEERDLIADDLVIAVNDQPVALAGVMGGQSTEIDSSSKTVVLEAAVFNGTSIRKTSGRLNLRSESSSRFEKGINYDTVSEAMDFAAAMLQELAGSQVLSGQVTEGVLPTEPVEVSTTLGYVNTRLGTELTYTDIEEVFEKLGFAISGSEVKFTVLVPRRRWDIAIQADLVEEIARIYGYEKLPTTLPEAGATAGELTSMQRLRRRVRTVAEGVGLSEIITYALTTPEKAVQFSTQATNITELMWPMTVDRSALRQNVVSGMLDTIAYNVARKNSNLAVYEIGKVFEQTGNPKEDLPTEVETFTFALTGLVEEKDFQTKAKPVDFFYAKGIVEALFIKLKLDVTFVAQKGLASMHPGRTATILLDGKEIGFVGQVHPQTAKQYDIPETYVAEINLSTIESQMNQALIFEDITKYPSVSRDIALLLAESVSHHDIVLAIESSGVKRLTAIKLFDVYAGNNIAEGYKSMAYSLTFQNPNDNLTDEEVAKYMEKITKSLVEKVNAEIR

SEQ ID NO: 15031 - protein, 900 aa, Streptococcus agalactiae
ATGAAAATAGATGACCTAAGAAAAAGCGACAATGTTGAAGATCGTCGCTCCAGTAGCGGAGGTTCATTCTCTAGCGGAGGAAGTGGATTACCGATTCTTCAACTTTTATTGATGCGAGGGAGTTGGAAAACCAAGCTTGTGGTTTTAATCATCTTACTGCTACTTGGCGGAGGGGGACTAACCAGCATTTTTAATGACTCATCCTCACCTTCTAGTTACCAATCTCAGAATGTCTCACGTTCTGTTGATAATAGCGCAACGAGAGAACAAATCGATTTCGTTAATAAAGTCCTTGGATCAACTGAGGATTTCTGGTCACAAGAATTCCAAACCCAAGGTTTTGGAAATTATAAGGAACCAAAACTTGTTCTTTACACCAATTCGATTCAAACAGGTTGTGGTATAGGTGAATCTGCTTCAGAACCATTTTATTGTTCAGCAGATAAAAAAATCTATCTTGATATTTCTTTTTACAATGAATTATCACATAAATATGGTGCTACTGGTGATTTTGCTATGGCCTACGTCATCGCCCATGAAGTTGGTCACCACATTCAAACAGAGTTAGGCATTATGGATAAGTATAATAGAATGCGACACGGACTTACTAAGAAAGAAGCAAATGCTTTAAATGTTCGGCTAGAACTTCAAGCAGATTATTATGCAGGGGTATGGGCTCACTACATCAGGGGAAAAAATCTCTTAGAACAAGGAGACTTTGAAGAGGCCATGAATGCTGCCCACGCCGTCGGAGACGATACCCTTCAGAAAGAAACCTACGGAAAATTAGTGCCTGATAGCTTTACCCATGGAACAGCTCAACAACGCCAACGCTGGTTTAACAAAGGCTTTCAATATGGTGACATCCAACACGGTGATACTTTCTCCGCAGAACATCTA

SEQ ID NO: 15032 - protein, 300 aa, Streptococcus agalactiae
MKIDDLRKSDNVEDRRSSSGGSFSSGGSGLPILQLLLMRGSWKTKLVVLIILLLLGGGGLTSIFNDSSSPSSYQSQNVSRSVDNSATREQIDFVNKVLGSTEDFWSQEFQTQGFGNYKEPKLVLYTNSIQTGCGIGESASEPFYCSADKKIYLDISFYNELSHKYGATGDFAMAYVIAHEVGHHIQTELGIMDKYNRMRHGLTKKEANALNVRLELQADYYAGVWAHYIRGKNLLEQGDFEEAMNAAHAVGDDTLQKETYGKLVPDSFTHGTAQQRQRWFNKGFQYGDIQHGDTFSAEHL

SEQ ID NO: 15033 - protein, 3231 aa, Streptococcus agalactiae
ATGAAATTACTTTATACTGATATTAATCATGATATGACAGAAATCTTAGTCAATCAGGCCGCGCATGCTGCTGAAGCTGGATGGCGTATTTTTTATATTGCTCCAAACTCTTTATCTTTTGAAAAGGAGCGTGCAGTATTAGAGACCCTTCCTCAAGAAGCCTCTTTTGCTATTACAATTACTCGCTTTGCTCAATTGGCACGTTATTTTACTTTAAACCAGCCTAATCAAAAAGAAAGTTTAAACGATATTGGATTAGCAATGATCTTTTATCGTGCTTTAGCAAGTTTTGAAGATGGACAATTAAAAGTTTTTGGACGATTGAAGCAAGATGCTTCCTTTATCAGTCAATTGGTAGACCTATACAAAGAATTGCAGACAGCAAATCTGAGTATTTTAGATTTAAAATATTTACATTCTCCTGAAAAATTTGAAGATCTATTAGCTATTTTTCTAGTGGTTTCAGATCTTTTAAGAGAAGGAGAATACGACAATCAATCTAAAATTGCCTTTTTTACAGAACAAGTAAGGTCAGGACAGCTAGATGTGGATTTAAAGAACACTATCCTTATAGTCGATGGTTTTACCCGTTTCTCAGCTGAAGAAGAAGCTTTAATTAAAAGTCTGAGTTCACGTTGTCAAGAGATTATCATCGGAGCTTATGCTAGCCAAAAAGCGTATAAGACTAACTTTACCAATGGAAATATTTATTCTGCAGGGGTTGATTTTTTAAGATATCTAGCAACGACATTTCAAACAAAACCAGAATTTATCTTGTCTAAGTGGGAAAGTAAGTCTGGTTTTGAAATGATTTCGAAAAATATCGAAGGTAAACATGATTTTACAAATAGTAGTCACATTTTAGACGACACTGCTAAAGATTGTATAACAATTTGGGAGTGCATTAATCAAAAAGATGAAGTGGAACATGTGGCTAGAGCTATACGTCAGAAACTTTATCAGGGATATCGCTACAAAGATATTTTAGTTTTACTAGGAGATGTAGATAGTTATAAACTACAATTAAGTAAGATTTTTGAACAGTATGATATTCCTTATTATTTCGGTAAAGCTGAAACAATGGCTGCGCACCCTTTAGTTCATTTTATGGATTCCTTGTCGCGAATAAAACGTTATCGATTTAGAGCTGAAGATGTTTTAAATCTTTTTAAGACAGGTATTTATGGAGAGATTGGTCAAGATGATTTAGATTATTTTGAAGCTTATATCTCATATGCAGATATTAAAGGTCCTAAGAAGTTCTTTACAGATTTTGTTGTGGGGGCTAAAAAATTTGATTTAGGGCGTCTTAACACTATTCGTCAGTCCCTCCTTACTCCACTGGAAAGTTTTGTTAAAACGAAAAAACAAGACGGTATAAAAACACTCAACCAATTCATGTTTTTCCTTACTCAGGTAGGTTTGAGTGACAATTTATCGCGATTAGTTGGTCAAATGTCTGAAAATGAACAAGAAAAACATCAAGAAGTTTGGAAAACATTTACAGATATTTTAGAGCAGTTTCAAACAATATTTGGTCAAGAAAAATTAAATTTAGACGAATTTTTATCGTTATTAAATTCAGGTATGATGCAAGCCGAGTATCGTATGGTCCCTGCTACTGTTGATGTGGTTACTGTTAAGTCTTACGACTTGGTAGAACCACATAGTAATCAATTTGTCTATGCCCTAGGCATGACACAATCACATTTTCCAAAGATTGCTCAAAACAAATCTTTAATATCTGATATTGAACGTCAGCTTATAAATGATGCCAATGACACTGATGGTCATTTTGACATTATGACGCGAGAAAATTTGAAGAAAAACCATTTTGCTGCTCTCTCTCTTTTTAATGCTGCTAAACAAGCATTAGTGTTGACTATACCACAATTATTGAATGAGTCTGAAGATCAGATGTCACCATATCTTGTCGAACTAAGAGATATAGGTGTTCCTTTTAATCATAAAGGACGCCAATCGTTAAAAGAAGAAGCTGATAATATTGGGAATTACAAAGCTTTATTATCGCGTGTTGTTGACTTGTATCGCTCTGCTATTGACAAAGAGATGACTAAAGAAGAACAAACTTTTTGGTCAGTTGCTGTTCGTTATTTGCGTCGTCAATTAACTTCTAAAGGGATCGAGATACCAATAATTACAGATAGTCTTGATACTGTGACAGTTTCATCAGATGTGATGACCAGACGCTTCCCAGAAGATCACCCACTTAAATTATCCTCATCTGCTTTGACAACTTTTTATAATAATCAATATAAGTATTTTTTACAATATGTGTTAGGTTTGGAAGAACAAGACTCAATTCATCCAGATATGCGGCACCACGGAACGTATCTTCATCGTGTTTTTGAAATTCTGATGAAAAACCAAGGGATAGAATCTTTTGAAGAGAAACTCAACTCTGCAATTAATAAAACCAATCAAGAAGATGTTTTCAAATCCTTGTATTCAGAAGATGCAGAAAGTCGTTATTCTTTAGAAATTTTAGAAGATATCGCGCGTGCAACTGCAACCATATTACGACAAGATAGTCAGATGACTGTTGAAAGTGAAGAAGAACGATTTGAACTAATGATTGATAATACTATAAAAATTAACGGTATTATTGACCGTATCGATCGTTTATCTGATGGTTCTTTGGGTGTCGTGGACTATAAATCAAGCGCTCAAAAATTCGATATCCAAAAATTTTATAACGGTCTAAGTCCACAATTAGTCACCTACATTGATGCTATCAGTCGTGACAAGGAAGTTGAACAAAAACCACCGATTTTTGGAGCTATGTACTTACATATGCAAGAACCTAGACAAGACTTGTCTAAAATTAAAAATTTAGATGATTTAGTAACAAAAAATCATCAAGCTTTAACTTATAAAGGATTATTTTCAGAAGCCGAAAAAGAATTCTTAGCAAATGGGAAATACCATCTCAAAGATTCCCTTTATTCAGAGGCTGAAATTGCTATTTTACAAGCACATAATCAATCGCTTTACAAAAAAGCATCTGAGACTATTAAGTCAGGTAAGTTTTTGATCAATCCATATACAGAAGATGCTAAAACAGTTGACGGTGATCAGTTTAAGAGTATTACGGGGTTCGAGGCGGATAGGCATATGGCACGTGCCAGAGCGCTTTATAAATTACCTGCTAAGGAAAAACGTCAAGGTTTCTTAACATTAATGCAGCAAGAGGAGGAAAATGATGACCTT

SEQ ID NO: 15034 - protein, 1077 aa, Streptococcus agalactiae
MKLLYTDINHDMTEILVNQAAHAAEAGWRIFYIAPNSLSFEKERAVLETLPQEASFAITITRFAQLARYFTLNQPNQKESLNDIGLAMIFYRALASFEDGQLKVFGRLKQDASFISQLVDLYKELQTANLSILDLKYLHSPEKFEDLLAIFLVVSDLLREGEYDNQSKIAFFTEQVRSGQLDVDLKNTILIVDGFTRFSAEEEALIKSLSSRCQEIIIGAYASQKAYKTNFTNGNIYSAGVDFLRYLATTFQTKPEFILSKWESKSGFEMISKNIEGKHDFTNSSHILDDTAKDCITIWECINQKDEVEHVARAIRQKLYQGYRYKDILVLLGDVDSYKLQLSKIFEQYDIPYYFGKAETMAAHPLVHFMDSLSRIKRYRFRAEDVLNLFKTGIYGEIGQDDLDYFEAYISYADIKGPKKFFTDFVVGAKKFDLGRLNTIRQSLLTPLESFVKTKKQDGIKTLNQFMFFLTQVGLSDNLSRLVGQMSENEQEKHQEVWKTFTDILEQFQTIFGQEKLNLDEFLSLLNSGMMQAEYRMVPATVDVVTVKSYDLVEPHSNQFVYALGMTQSHFPKIAQNKSLISDIERQLINDANDTDGHFDIMTRENLKKNHFAALSLFNAAKQALVLTIPQLLNESEDQMSPYLVELRDIGVPFNHKGRQSLKEEADNIGNYKALLSRVVDLYRSAIDKEMTKEEQTFWSVAVRYLRRQLTSKGIEIPIITDSLDTVTVSSDVMTRRFPEDHPLKLSSSALTTFYNNQYKYFLQYVLGLEEQDSIHPDMRHHGTYLHRVFEILMKNQGIESFEEKLNSAINKTNQEDVFKSLYSEDAESRYSLEILEDIARATATILRQDSQMTVESEEERFELMIDNTIKINGIIDRIDRLSDGSLGVVDYKSSAQKFDIQKFYNGLSPQLVTYIDAISRDKEVEQKPPIFGAMYLHMQEPRQDLSKIKNLDDLVTKNHQALTYKGLFSEAEKEFLANGKYHLKDSLYSEAEIAILQAHNQSLYKKASETIKSGKFLINPYTEDAKTVDGDQFKSITGFEADRHMARARALYKLPAKEKRQGFLTLMQQEEENDDL

SEQ ID NO: 15035 - protein, 3621 aa, Streptococcus agalactiae
ATGACCTTTAAGCCTTTCTTAAATCCAGAAGATATTGCTGTTATTCAGACAGAAGAAAAAAATTCTGATAAAAAACAAAAGCGAACGCCTGAACAAATTGAAGCAATTTATACTTTTGGTAACAATGTCCTGGTATCAGCTTCGGCTGGTTCTGGAAAGACTTTTGTAATGGTTGAGCGGATTTTAGATAAACTTTTAAGAGGGGTTCCGATTGAGTCTTTGTTTATCTCAACATTTACAGTAAAAGCGGCAGGTGAGCTCAAAGAACGTTTAGAAAAGAAAATAAACGAGTCTTTGAAATCCGCAGAATCAGATGATTTAAAACAGTTTCTCACCCAGCAACTTGTCGGCATTCAAACAGCTGATATTGGTACTATGGATGCTTTTACGCAAAAAATAGTTAACCAATATGGTTATACTTTGGGCATATCACCTATATTTAGGATTTTACAAGATAAAAATGAGCAAGACGTCATAAAGAATGAGGTCTATGCTGATTTATTTTCTGACTACATGACTGGGAAGAATGCAGCTTCATTCATAAAATTAGTCAAAAATTTCTCAGGTAATCGTAAAGATAGCAAAGCTTTTCGAGAAATGGTTTATAAAGTTTATGCTTTTAGCCAGTCCATCGATAACCCCAAGCGCTGGATGCAAACAGTTTTTCTAAAAGGTGCACAAACTTACACTGATTTTGAAGCTATTCCAGATCAAGAAGTTTCAAGCCTTTTAAATGTAATGCAAACAACTGCTAATCAATTACGTGATTTAACGGATCAAGAAGATTATAAGCAATTAACTGCTAAAGGGGTTCCGACAGCAAATTACAAAAAACACCTTAAAATAATTGAAAATTTAGTCCATTGGTCTCAAGACTTTAATTTGCTGTATGGAAAAAAAGGATTGGCTAATTTGGCACGTGATATCACTAATGTGATTCCTTCAGGCAATGATGTTACAGTTGCTGGCGTTAAATATCCTATCTTTAAACAATTGCATAATCGTATCGTTGGACTTAAGCACTTAGAAGTTATTTTTAAGTATCAAGGAGAATCTCTTTTCTTGTTAGAATTATTGCAATCCTTTGTTTTAGATTTCTCAGAACAATATTTACAGGAGAAGATTCAAGAAAATGCTTTTGAATTTTCTGATATTGCCCATTTTGCAATTCAAATATTGGAAGAAAATCATGATATTAGGCAAATTTATCAAGATAAGTATCATGAAGTAATGGTTGATGAGTATCAGGACAATAACCATACCCAAGAGAGAATATTAGAATTATTGTCTAATGGACATAATCGTTTCATGGTTGGAGACATAAAACAATCAATTTACCGTTTTCGTCAGGCTGATCCACAAATTTTTAATGATAAATACAAAGCTTACCAAGACAATCCAAGTCAAGGGAAATTAATTATTCTGAAAGAGAATTTTCGGAGTCAATCAGAGGTTTTAGACAGTACAAATAGTGTGTTTACACATCTTATGGATGAAGAAGTAGGAGACATTCTTTATGATGAAAGTCACCAATTAAAAGCTGGTAGTCCAAGACAGCAAGAAAGACATCCGAATAATAAAACACAAGTTTTACTATTAGATACTGATGAAGATGATATAGATGACAGTGATAGTCAACAATATGATATTAGCCCAGCTGAAGCAAAGTTAGTCGCAAAAGAAATTATTCGATTGCATAAAGAAGAGAATGTTCCCTTTCAAGATATCACCCTCTTAGTTTCTTCAAGGACAAGGAATGATGGTATCTTACAAACTTTTGACCGTTATGGTATTCCTTTGGTAACTGACGGTGGGGAGCAAAATTACTTAAAATCAGTCGAAGTGATGGTAATGCTTGATACTTTGCGATCAATTGATAATCCCTTAAATGATTATGCTCTAGTTGCTCTTTTGAGATCTCCCATGTTTGGCTTTAATGAAGATGATTTAACAAGAATTGCTATTCATGATGTCAAAATGGCTTTTTATCATAAAGTGAAATTGTCTTATCATAAAGAAGGTCATCATAGTGATTTAATTACTCCAGAATTATCTTCTAAAATAGATTACTTTATGAAGACATTCCAGACTTGGCGTGATTTTGCTAAATGGCATTCGCTTTATGATTTAATATGGAAAATATATAATGACCGTTTTTATTATGATTATGTAGGAGCTCTGCCTAAAGCTGAGCAACGTCAAGCCAATCTATATGCCTTGGCACTTCGAGCAAATCAGTTTGAAAAAACAGGTTTCAAGGGTTTATCACGTTTTATTCGAATGATTGATAAAGTTTTAGAAAATGAAAATGATTTGGCAGATGTTGAGGTGGCATTACCGCAAAATGCTGTTAACCTAATGACTATACACAAATCAAAGGGTCTTGAGTTTAAGTATGTATTTATTTTAAATATTGATAAGAAATTTTCAATGGTAGACATAACTTCCCCTCTTATTTTAAGCCGAAATCAAGGAATTGGTATTAAATATGTTGCTGATATGCGACATGAACTCGAAGAAGAGATACTGCCTGCAGTAAAGGTTAGCATGGAAACACTTCCTTACCAACTTAATAAAAGAGAGTTACGCTTAGCTACTTTATCAGAGCAAATGCGTTTACTTTACGTAGCTATGACACGTGCAGAGAAAAAATTATATCTGGTTGGTAAGGCTAGTCAAACCAAATGGGCTGATCATTATGACTTAGTATCTGAAAATAATTATCTCCCATTAGCTAGTCGTGAGACTTTTGTGACCTTTCAAGATTGGTTACTGGCTGTTCATGAAACCTATAAGAAACAAGAGTTGTTTTATGACATCAACTTCGTATCATTAGAGGAATTAACAGATCACCACATAGGGATGGTTAATCCTAGTCTACCTTTCAATCCCGATAATAAGGCAGAGAATCGTCAGTCTGAAGATATCGTGCACGCGATTAGCGTGTTAGAATCTGTTGAACAGATTAATCAAACTTATAAAGCGGCTATTGAGTTACCGACAGTAAGAACACCAAGTCAAGTCAAAAAATTCTATGAGCCTATTCTAGATATAGAAGGCGTTGATGTGATGGAAACTATTACTAAAACATCAGTAGATTTTAAGTTACCTGATTTTTCTACAAGTAAAAAGCAAGACCCAGCAGCTTTAGGATCTGCTGTACATGAATTAATGCAACGCATAGAGATGTCATCTCATGTCAAAATGGAAGATATTCAAAAAGCCTTGACAGAAGTGAATGCTGAAACAAGTATCAAAGCGGCTATTCAGATTGAAAAAATCAACTATTTTTTCCAAGAAAACTCACTCGGTAAATATATACAAGAAGAAGTAGAACATCTACATCGAGAGGCACCTTTTGCCATGTTAAAAGAAGATCCGGAGAGTGGTGAGAAATTCGTTGTACGTGGTATTATTGATGGGTATCTACTATTAGAAAATCGGATAATTCTATTTGATTATAAGACTGATAAATTTGTCAATCCTCTGGAATTAAAAGAACGCTATCAGGGGCAAATGGCTTTATATGCAGAAGCTTTAAAAAAATCTTACGAGATAGAAAGGATAGACAAATACTTAATTCTTTTAGGTGGTAAACAGCTAGAAGTGGTAAAAATGGAT

SEQ ID NO: 15036 - protein, 1207 aa, Streptococcus agalactiae
MTFKPFLNPEDIAVIQTEEKNSDKKQKRTPEQIEAIYTFGNNVLVSASAGSGKTFVMVERILDKLLRGVPIESLFISTFTVKAAGELKERLEKKINESLKSAESDDLKQFLTQQLVGIQTADIGTMDAFTQKIVNQYGYTLGISPIFRILQDKNEQDVIKNEVYADLFSDYMTGKNAASFIKLVKNFSGNRKDSKAFREMVYKVYAFSQSIDNPKRWMQTVFLKGAQTYTDFEAIPDQEVSSLLNVMQTTANQLRDLTDQEDYKQLTAKGVPTANYKKHLKIIENLVHWSQDFNLLYGKKGLANLARDITNVIPSGNDVTVAGVKYPIFKQLHNRIVGLKHLEVIFKYQGESLFLLELLQSFVLDFSEQYLQEKIQENAFEFSDIAHFAIQILEENHDIRQIYQDKYHEVMVDEYQDNNHTQERILELLSNGHNRFMVGDIKQSIYRFRQADPQIFNDKYKAYQDNPSQGKLIILKENFRSQSEVLDSTNSVFTHLMDEEVGDILYDESHQLKAGSPRQQERHPNNKTQVLLLDTDEDDIDDSDSQQYDISPAEAKLVAKEIIRLHKEENVPFQDITLLVSSRTRNDGILQTFDRYGIPLVTDGGEQNYLKSVEVMVMLDTLRSIDNPLNDYALVALLRSPMFGFNEDDLTRIAIHDVKMAFYHKVKLSYHKEGHHSDLITPELSSKIDYFMKTFQTWRDFAKWHSLYDLIWKIYNDRFYYDYVGALPKAEQRQANLYALALRANQFEKTGFKGLSRFIRMIDKVLENENDLADVEVALPQNAVNLMTIHKSKGLEFKYVFILNIDKKFSMVDITSPLILSRNQGIGIKYVADMRHELEEEILPAVKVSMETLPYQLNKRELRLATLSEQMRLLYVAMTRAEKKLYLVGKASQTKWADHYDLVSENNYLPLASRETFVTFQDWLLAVHETYKKQELFYDINFVSLEELTDHHIGMVNPSLPFNPDNKAENRQSEDIVHAISVLESVEQINQTYKAAIELPTVRTPSQVKKFYEPILDIEGVDVMETITKTSVDFKLPDFSTSKKQDPAALGSAVHELMQRIEMSSHVKMEDIQKALTEVNAETSIKAAIQIEKINYFFQENSLGKYIQEEVEHLHREAPFAMLKEDPESGEKFVVRGIIDGYLLLENRIILFDYKTDKFVNPLELKERYQGQMALYAEALKKSYEIERIDKYLILLGGKQLEVVKMD

SEQ ID NO: 15037 - protein, 915 aa, Streptococcus agalactiae
ATGATAGTCGAACAAAAATTTGGAAATGGTTTTACTTGGATTAACATTGAAGCAGAGCAATTGCGAACAGAAACATCGGAAATTCAAGCAAAATATTTGGATAGTGAGATTATTACATATGCTCTGGATGATTATGAACGAGCCTTTATGGAATGTTCTCATATTAAAGGAAAAGAAGTCTTGACGATTATTTTTAATACTATTGATCTAAAGCAGAAAGAAAGTTATTATGAGACCGTTCCGATGACCTTTTGCTTATCACACGACCGTTTGATAACGGTGACACGGTCTCGAAATAGTTATATGCTAGAACTATTGCAAAAATATCTAGACCGTAATCCAGATGTCTCTCCTAAAAAATTTTTATTTGCAGCTTTAACTTTGATTACAAAACAATATTTTAATGTTGTATCGAAAATTGATAGAGAAAAGGATATTCTCAACCGTCAATTGAGAGAACAAACAACCAATAAGCGCTTATTAGCCATGAGTGACCTAGAGACAGGCTCCGTTTATCTTTTGACAGCTGCCAATCAAAATGCATTGGTATTAGAGCAATTAGATGTTCATCCTAGTCAGCGATTTAATTCTGAAGTGGAAAAAGAACAGTTATCAGATGCTCTCATTGAAGCGCATCAGTTAGTCAGTATGACACAATTAAACAGTCAGGTACTTTCACAATTATCATCTACTTTTAATAATGTCTTAAATAATAACTTGAACGAAAACTTAACAGGTTTGAATATCATTTCGATTAATTTAGCGATTATTGCAGCAATTACTGGCTTTTTTGGGATGAATATTCCATTACCTCTTACAGAATCACGGAGTTCATGGTTAATTGTTATTGCTACTTCGGTCTTACTTTGGGTTATTATTGCTCAAATTTTAAAACGAGTTTTTAACTTAAGAAAA

SEQ ID NO: 15038 - protein, 305 aa, Streptococcus agalactiae; identical to SEQ ID NO: 6134

SEQ ID NO: 15039 - protein, 1374 aa, Streptococcus agalactiae
ATGTCTATTACAAAAGAATTTGATACCATCGCAGCTATTTCAACTCCTCTCGGTGAGGGAGCTATTGGTATTGTCCGTATATCTGGTACAGATGCCTTAAAGATAGCATCAAAAATTTATCGTGGAAAAGATCTATCCGCTATCCAATCCCATACCTTAAACTATGGTCATATTGTGGACCCAGATAAAAATGAAATCTTGGATGAAGTTATGTTAGGCGTTATGCTTGCTCCAAAAACATTCACAAGAGAAGATGTTATTGAAATTAATACGCATGGAGGAATTGCAGTTACTAACGAAATTCTTCAGTTAATTTTACGACATGGAGCACGAATGGCTGAACCAGGAGAATTTACTAAACGTGCTTTTTTAAACGGTCGAGTTGACTTGACTCAGGCTGAAGCTGTTATGGATCTTATTAGAGCTAAAACAGATAAAGCAATGGATATTGCCGTTAAGCAATTAGATGGTTCTTTAAAGACACTAATCAATAACACTCGACAAGAAATTCTAAATACTCTAGCCCAAGTTGAAGTTAATATCGATTACCCTGAATATGATGACGTTGAAGAGATGACTACAACACTGATGCGTGAAAAAACACAAGAGTTTCAAGCACTTATGGAAAATTTACTTCGAACTGCCCGACATGGAAAAATTCTTCGAGAAGGACTTTCAACAGCAATCATTGGTCGTCCAAATGTCGGTAAATCCAGCTTACTAAATAACCTCTTACGTGAAGAAAAGGCGATTGTGACAGATATTGAAGGAACAACTCGTGATGTTATTGAAGAATACGTCAATATTAAAGGAGTTCCTTTAAAACTAGTTGACACTGCTGGTATCCGTGATACAGATGATATCGTTGAAAAAATTGGTGTTGAACGTTCAAAGAAGGCTTTAGAAGAAGCCGACCTTGTGTTGTTGGTTCTCAATAGTTCCGAACCACTAACATTACAAGACCGCTCCCTTCTAGAACTAAGTAAAGAAAGTAATCGTATCGTATTACTCAATAAAACGGATCTTCCTCAAAAAATAGAAGTTAACGAATTACCTGAAAATGTTATTCCAATTTCGGTTTTAGAAAATGAAAACATCGATAAAATCGAAGAACGTATTAACGATATTTTCTTTGACAATGCTGGTATGGTAGAACATGACGCTACTTATCTATCGAATGCTCGCCATATCTCACTAATTGAAAAAGCCGTTGATAGTTTAAAAGCTGTCAATGAGGGCTTGGAATTAGGAATGCCTGTTGATCTCTTACAAGTCGATATGACTAGAACTTGGGAAATACTTGGAGAAATCACTGGGGATGCAGCTCCAGATGAGCTAATAACTCAGCTCTTCAGCCAATTCTGCTTAGGTAAA

SEQ ID NO: 15040 - protein, 458 aa, Streptococcus agalactiae
MSITKEFDTIAAISTPLGEGAIGIVRISGTDALKIASKIYRGKDLSAIQSHTLNYGHIVDPDKNEILDEVMLGVMLAPKTFTREDVIEINTHGGIAVTNEILQLILRHGARMAEPGEFTKRAFLNGRVDLTQAEAVMDLIRAKTDKAMDIAVKQLDGSLKTLINNTRQEILNTLAQVEVNIDYPEYDDVEEMTTTLMREKTQEFQALMENLLRTARHGKILREGLSTAIIGRPNVGKSSLLNNLLREEKAIVTDIEGTTRDVIEEYVNIKGVPLKLVDTAGIRDTDDIVEKIGVERSKKALEEADLVLLVLNSSEPLTLQDRSLLELSKESNRIVLLNKTDLPQKIEVNELPENVIPISVLENENIDKIEERINDIFFDNAGMVEHDATYLSNARHISLIEKAVDSLKAVNEGLELGMPVDLLQVDMTRTWEILGEITGDAAPDELITQLFSQFCLGK

SEQ ID NO: 15041 - protein, 1908 aa, Streptococcus agalactiae
ATGATTATACTACAAGGAAACAAAATTGAGCGCTCATTTTCAGGTGATGTGCTTTTTGATAATATTAATATTCAAGTTGATCAACGTGATCGTATTGCTCTTGTTGGACGTAATGGTGCTGGCAAATCAACGCTTCTTAAAATTTTAGTTGGTGAAGAGGCTCCGACAAAAGGAGAAATAAATAAAAAGCGTGATTTGAGTTTGTCCTACTTGGCACAAGATAGTCGTTTTCAATCTGAAAATACAATTTTCCAAGAAATGTTACAAGTTTTTGATTCATTAAGAGAAGTAGAGAAGCGCTTACGTGAATTGGAATTACAAATGGGACAAGTTTCAGGAAGTGACCTGGAACAATTGATGAAAACATACGATATTTTGTCAGAAGAGTTTCGTGAAAAAGGTGGCTTTACCTATGAATCAGATATAAAGGCTATTTTAAATGGCTTTAAGTTTAACAGTGATATGTGGGAAATGCCTATTAGTGAATTGTCTGGTGGGCAAAATACACGATTAGCGCTTGCAAAAATGCTACTTGAAAAGCCAGAATTACTTGTTTTAGATGAACCAACGAACCATTTAGACATTGATACGATTGCTTGGTTAGAAAATTATCTTGTAAATTATCAAGGAGCCCTTATTATTGTCAGCCATGACCGCTATTTTTTAGACAAGGTAGCTACAGTAACTTATGATTTAACGACACATTCTCTAGACCGCTATGTAGGCAATTATTCGAAATTTATGGATCTTAAGGCAGAGAAAATAGCGACTGAAGAAAAGAATTTTGAAAAGCAACAAAAAGAAATTGCTAAGTTAGAAGATTTTGTACAACGTAACATTGTTAGGGCTTCAACCACTAAACGAGCACAAGCTCGTCGTAAACAATTAGAAAAGATGGAACGACTCGACAAACCGAATGTAGAGCAAAAATCAGCTAATATGACTTTTCATGCTGGGAAAGTCTCAGGGAATGTTGTTTTAACACTTGAGAATGCAGCTATTGGTTATGAAGGTGTTTCTTTATCGGAGCCAATCGATTTGGACGTGAAGAAATTTGATGCTATTGCAATTGTAGGTCCAAATGGTATCGGGAAATCAACTTTAATCAAATCGCTTGTTGGGCAAATTCCTTTTATCAAAGGAGAAGCAAAATTAGGAGCAAATGTCGAAACTGGGTATTACGATCAAAGTCAAAGTAATTTAACAAAAACGAATACTGTTTTAGATGAGTTATGGAATGCTTTTTCAACAACTCCAGAAGTTGAAATTAGAAACCGTTTAGGAGCTTTTCTTTTTTCAGGTGATGATGTTAAAAAATCAGTTTCAATGCTATCCGGTGGTGAACGAGCGCGTTTGCTATTGGCAAAATTATCTATGGAAAATAATAATTTCCTCATATTAGATGAGCCAACAAACCACTTGGATATTGATAGTAAAGAAGTCTTAGAAAATGCACTCATCGAATTTGATGGCACATTACTTTTTGTTAGTCATGATCGCTATTTTATTAATCGTGTGGCAACTAAGGTTCTCGAAATTTCTGATAAGGGAAGTACTCTCTATCTAGGAGATTATGATTATTACCTCACTAAGAAAGCCGAACTAGAGGAATTAGCCCGTTTAAATGAAGAAGAAGTGAGTGCTTCAAAAACAGAAATCGACGTTACATCAGATTATGAGACACAAAAAGCAAATCAAAAGGAATTTAGGAAAATTACCCGTCGCGTTGCAGAAATTGAGGCACGTTTGGAAGTTCTTGAAAATGATGAAAACAATATCAATGGTTTAATGTTAGAAACCAATGACATCGGAAAACTCTCTGATTTACAAAAAGAGCTGGAATCAATCCAAGAAGAACAATTGCTATTAATGGAAGAATGGGAAAATCTAAATATGAGACTAGATTTG

SEQ ID NO: 15042 - protein, 636 aa, Streptococcus agalactiae
MIILQGNKIERSFSGDVLFDNINIQVDQRDRIALVGRNGAGKSTLLKILVGEEAPTKGEINKKRDLSLSYLAQDSRFQSENTIFQEMLQVFDSLREVEKRLRELELQMGQVSGSDLEQLMKTYDILSEEFREKGGFTYESDIKAILNGFKFNSDMWEMPISELSGGQNTRLALAKMLLEKPELLVLDEPTNHLDIDTIAWLENYLVNYQGALIIVSHDRYFLDKVATVTYDLTTHSLDRYVGNYSKFMDLKAEKIATEEKNFEKQQKEIAKLEDFVQRNIVRASTTKRAQARRKQLEKMERLDKPNVEQKSANMTFHAGKVSGNVVLTLENAAIGYEGVSLSEPIDLDVKKFDAIAIVGPNGIGKSTLIKSLVGQIPFIKGEAKLGANVETGYYDQSQSNLTKTNTVLDELWNAFSTTPEVEIRNRLGAFLFSGDDVKKSVSMLSGGERARLLLAKLSMENNNFLILDEPTNHLDIDSKEVLENALIEFDGTLLFVSHDRYFINRVATKVLEISDKGSTLYLGDYDYYLTKKAELEELARLNEEEVSASKTEIDVTSDYETQKANQKEFRKITRRVAEIEARLEVLENDENNINGLMLETNDIGKLSDLQKELESIQEEQLLLMEEWENLNMRLDL

SEQ ID NO: 15043 - protein, 966 aa, Streptococcus agalactiae
ATGGTAACTCTATCTAAAGAACAACACTTGGATATGTTTCTAAAAATGCAACGTATTCGTGATGTTGATATGAAATTTAACAAATTGGTTCGTCGTGGTTTCGTCCAAGGGATGACTCACTTCTCTGTTGGTGAAGAAGCTGCTTCAGTAGGTGCTATCCAAGATTTAACAGATTCAGATATCATTTTCTCAAACCACCGTGGACACGGACAAACTATTGCAAAAGGTATTGATATTGGTGGAATGTTTGCTGAACTTGCTGGTAAAGCAACAGGAACATCAAAAGGTCGTGGAGGCTCAATGCACTTAGCAAACCTTGAAAAAGGTAACTATGGAACAAACGGTATCGTCGGTGGAGGATATGCGCTTGCGGTAGGTGCTGCCCTTACACAGCAATATGAAGGAACTGATAACATTGTTATCGCCTTTTCGGGTGACTCAGCGACTAACGAAGGCTCATTCCATGAGTCAGTTAACTTAGCTGCTGTTTGGAACTTACCAGTTATCTTCTTTATCATCAACAACCGTTATGGTATCTCAACAGACATCACATACTCAACTAAAATTCCTCACCTTTACATGCGTGCTGATGCGTACGGTATTCCAGGGCATTATGTTGAAGATGGTAATGATCTTATGGCTGTTTACGAGAAAATGCATGAAGTTATCAATTACGTGCGTTCAGGAAATGGACCAGCTATTGTAGAGGTTGAATCATACCGTTGGTTTGGTCATTCAACTGCTGATGCTGGGGTATACCGTACTAAAGAAGAAGTTGATTCATGGAAAGCTAAAGATCCAGTAAAACGCTACCGTGCATACTTAATTGAAAATGAAATCGCTACTGAAGAAGAGCTTGCAGCTATTGAAGCACAAGTGATTAAAGAAGTTGAAGAAGGGGTTAAATTCGCTGAAGAAAGTCCATTCCCTGATATGTCTGTTGCATTTGAAGACGTTTTTGTGGAC

SEQ ID NO: 15044 - protein, 322 aa, Streptococcus agalactiae; identical to SEQ ID NO: 1690

SEQ ID NO: 15045 - protein, 858 aa, Streptococcus agalactiae
ATGTTAGAAGAGTTTGGTGCTAAGCGCGTTCGCGACACACCAATCTCAGAGGCTGCGATTGCAGGTTCAGCTATCGGTGCTGCACAAACAGGTTTGCGTCCTATCGTTGATTTGACATTCATGGATTTCGTAACAATCGCAATGGATGCTATCGTTAACCAAGGTGCTAAAACGAATTATATGTTTGGTGGAGGTCTATCAACTCCAGTTACTTTCCGTGTGGCATCAGGGTCAGGTATTGGTTCGGCTGCACAACACTCACAATCATTAGAAGCTTGGTTAACACACATTCCAGGTCTAAAAGTTGTTGCACCTGGTACTGTTAATGAGTCAAAAGCACTTTTGAAATCTTCTATTCTTGACAATAACCCAGTTATCTTCTTAGAGCCAAAAGCTCTCTATGGTAAGAAAGAAGAAGTTAATATGGATCCTGATTTCTATATTCCACTTGGTAAAGGGGATATTAAGCGTGAAGGTACTGACTTAACAATTGTTTCTTATGGCCGTATGCTTGAGCGTGTTATGCAAGCTGCTGAAGAAGTTGCTGAGGAAGGTATTAACGTTGAGGTTGTTGATCCACGTACACTTATTCCGCTTGATAAAGAATTAATTATCGATTCTGTTAAGAAAACTGGTAAATTGATCTTGGTTAACGATGCTTATAAAACTGGTGGTTTCACTGGTGAAATTGCAACTATGGTTGCTGAAAGTGAAGCATTTGATTACCTTGATCATCCTATCGTGCGTCTTGCAAGTGAAGATGTTCCAGTACCGTATTCACGTGTACTTGAACAAGGAATCTTACCTGATGTAGCAAAAATTAAAGATGCTATCTACAAAGTAGTTAACAAAGGTAAA

SEQ ID NO: 15046 - protein, 286 aa, Streptococcus agalactiae; identical to SEQ ID NO: 1692

SEQ ID NO: 15047 - protein, 1386 aa, Streptococcus agalactiae
ATGGCTGTCGAAATTATTATGCCTAAACTCGGGGTTGACATGCAAGAAGGCGAAATCCTTGAGTGGAAAAAACAGGTAGGTGATGTTGTTAATGAAGGTGACGTCCTACTTGAAATTATGTCAGATAAAACAAATATGGAGATTGAAGCAGAAGACTCAGGTGTTTTACTAAAAATCACACATGGGAATGGAGATGTTGTTCCTGTAACTGAGACAATTGGCTGTATCGGTGCTGAAGGTGAAGAAGTAACAGAAGCATCTTCTTCTGAAAATACATCAGTTGAAGAAAACGCGACACAAGTAACTTCAGAACCAGAAAAAGTTGAAGAAACATCAGAACCAAGTGTGCCAGCAGCTACAAGTGGTGAAAAAGTACGTGCCACTCCTGCAGCTCGTAAATTAGCAAGAGAGATGTCTATTGACCTTGCACTAGTATCTGGAACAGGGGCAAATGGTCGCGTTCACAGAGAAGATGTTGAAAGCTTCAAGGGTGCTCAACCACGTATTACACCATTGGCACGTCGAATTGCTGAAGATCAAGGAGTTGATATAGCAGAAATCACTGGCAGTGGTATTCGTGGTAAAATTGTTAAAAATGATGTTTTGGCTGCTATGTCACCGCAAGCAGCAGAGGCTCCTGTAAAAACGAAAGCTACACCAACAACAGAAGAAAAACAATTACCAGAAGGTGTTGAAGTCATTAAGATGTCTGCAATGCGTAAGGCTATTTCTAAAGGTATGACTAACTCTTACCTCACTGCTCCAAGCTTTACACTTAACTATGATATTGATATGACTGAAATGATGGCTCTTCGCAAGAAATTAATTGATCCAATCATGGCTAAAACAGGCTTGAAAGTCAGCTTTACTGATTTGATTGGAATGGCCGTTGTTAAGACATTGATGAAACCAGAGCATCGATACCTAAATGCTTCATTAATTAACGATGCACAAGAAATTGAGCTTCATAATTTTGTTAATATTGGAATCGCAGTTGGTCTTGATGATGGTTTGATTGTTCCTGTTGTTCACAATGCTGATCAAATGTCACTTTCTGACTTTGTTATAGCATCTAAAGATGTTATTAAGAAAACTCAAGAAGGTAAATTAAAATCAGCTGAAATGTCAGGTTCAACATTCTCAATTACTAACTTAGGTATGTTTGGTACTAAGACGTTTAACCCAATTATCAATCAACCGAACTCAGCAATCCTTGGAGTAGGTGCTACTATTCCGACTCCAACAGTGGTTGATGGTGAAATTGTAGCTCGACCAATCATGGCAATGTGTTTAACAATTGACCACCGTATTGTTGATGGAATGAATGGTGCTAAGTTTATGGTTGATCTTAAGAACTTAATGGAAAACCCATTTGGTTTACTTATT

SEQ ID NO: 15048 - protein, 462 aa, Streptococcus agalactiae
MAVEIIMPKLGVDMQEGEILEWKKQVGDVVNEGDVLLEIMSDKTNMEIEAEDSGVLLKITHGNGDVVPVTETIGCIGAEGEEVTEASSSENTSVEENATQVTSEPEKVEETSEPSVPAATSGEKVRATPAARKLAREMSIDLALVSGTGANGRVHREDVESFKGAQPRITPLARRIAEDQGVDIAEITGSGIRGKIVKNDVLAAMSPQAAEAPVKTKATPTTEEKQLPEGVEVIKMSAMRKAISKGMTNSYLTAPSFTLNYDIDMTEMMALRKKLIDPIMAKTGLKVSFTDLIGMAVVKTLMKPEHRYLNASLINDAQEIELHNFVNIGIAVGLDDGLIVPVVHNADQMSLSDFVIASKDVIKKTQEGKLKSAEMSGSTFSITNLGMFGTKTFNPIINQPNSAILGVGATIPTPTVVDGEIVARPIMAMCLTIDHRIVDGMNGAKFMVDLKNLMENPFGLLI

SEQ ID NO: 15049 - protein, 1755 aa, Streptococcus agalactiae
ATGGCTTTTGATGTAATTATGCCAAAACTTGGGGTTGACATGCAAGAAGGCGAAATCCTTGAGTGGAAAAAAAATGAAGGTGACACCGTTAATGAAGGTGATGTCCTTCTTGAAATCATGTCTGATAAAACCAATATGGAAATTGAAGCAGAAGACACTGGTGTACTTTTAAAAATTGTACATCAGGCAGGAGATGTTGTTCCTGTCACTGAAGTGATTGCCTATATCGGAGAAGAAGGTGAAGAAGTAGGTACGTCATCACCTTCGGCTGATGCAACTATCACAGCTGAAGATGGTCAATCAGTTTCTGGACCTGCTGCTCCTTCACAAGAGACAGTTGCAGCAGCAACTCCTAAAGAAGAACTTGCAGCTGATGAGTACGATATCGTAGTCGTAGGTGGTGGCCCTGCAGGTTATTACGCAGCAATCCGCGGTGCTCAACTTGGAGGAAAAATTGCCATTGTTGAGAAAACTGAATTTGGCGGTACGTGTTTGAATGTTGGTTGTATCCCTACAAAAACATATCTTAAAAATGCTGAAATCCTAGATGGTTTGAAAGTAGCAGCTGGACGTGGTATCAACCTTGCTTCAACTAACTATGCAATTGATATGGATAAGACTGTTGCCTTTAAAAATTCTGTAGTTAAGACATTGACTGGTGGTGTACGTGGTCTCTTGAAAGCGAACAAAGTTGAAATTTTCAATGGACTTGGACAAGTAAACCCTGATAAATCTGTTGTTATTGGCGATAAAGTTATCAAAGGTCGTAACGTCGTCCTTGCGACTGGTTCTAAGGTATCTCGTATTAATATTCCAGGTATTGAATCACCATTAGTATTAACATCAGATGATATTCTTGATTTACGTGAAATTCCTAAGTCACTTGCTGTTATGGGTGGTGGTGTCGTAGGTATTGAGCTTGGTCTTGTATGGGCTTCATATGGTGTTGACGTAACTGTTATTGAAATGGCTGATCGCATCATTCCAGCAATGGATAAAGAAGTATCGCTAGAACTTCAAAAAATCCTTGCTAAGAAGGGAATGAAGATTAAAACATCAGTTGGTGTTTCTGAAATTGTTGAAGCCAATAATCAATTAACGCTTAAATTAAACAACGGCGAAGAAGTTGTTGCTGATAAAGCTCTTCTTTCAATTGGACGTGTTCCACAAATGAATGGTCTTGAAAATCTTGAGCCTGAACTTGAGATGGAACGTGGACGTATTAAAGTTAATGCTTATCAAGAAACTTCAATTCCAGGTATCTATGCACCAGGTGATGTTAATGGAACTCGTATGTTAGCTCATGCTGCATACCGTATGGGTGAAGTAGCTGCTGAAAACGCACTCGGCGGTAATAAGCGTAAAGCACATCTAGATTTCACTCCAGCAGCTGTTTATACTCATCCTGAAGTAGCAATGGTGGGGATGACAGAAGAGCAAGCACGTGAACAATATGGTGACATATTAGTTGGTAAAAATAGCTTTACAGGCAATGGTCGTGCTATCGCTTCAAACGAAGCACATGGTTTTGTAAAAGTAATTGCTGAACCTAAGTATAAAGAGATTCTTGGTGTTCACATTATTGGTCCAGCTGCAGCGGAATTGATTAATGAAGCTTCTACGATTATGGAAAATGAGTTGACTGTCTATGATGTAGCACAATCTATCCATGGTCACCCAACATTCTCTGAAGTTATGTACGAAGCTTTCTTAGATGTTCTCGGTGAAGCTATTCACAACCCTCCAAAACGCAAA

SEQ ID NO: 15050 - protein, 585 aa, Streptococcus agalactiae; identical to SEQ ID NO: 1698

SEQ ID NO: 15051 - protein, 987 aa, Streptococcus agalactiae
ATGAAATATATCGTTAACACGTCTAATGATCCGGCTTACAATGTTGCTTTAGAAGCTTACGCCTTTCAAAAGTTGACAGATATCGATGAAATCTTTATTCTTTGGATTAATGAACCGGCTATCATTATTGGACGCCATCAAAATACAATTCAAGAAATTAACAAAGAGTTCATTGATAAAAATGGCATCCATGTTGTCCGTCGTTTGTCAGGAGGCGGAGCAGTTTATCATGACTTGAATAATTTAAACTACACTATTATTTCTAATAATACACAAGAAGGTGCTTTTGATTTCCAAACTTTTTCAAAACCAGTTATTGATACTCTTGCTAAATTAGGTGTTAAAGCAGAATTTACTGGTCGTAATGATTTAGAAATCAATGGACAAAAATTTGCAGGAAATGCTCAAGCTTATTACAAAGGTCGTATGATGCATCATGGTTGTCTTTTATTTGATGTTGATATGTCAGTCTTAGGGCAAGCACTCAAAGTATCTAAAGACAAAATTGAATCTAAAGGGATAAAATCTGTACGCGCACGTGTTACAAATATTGTTGACCATCTTTCAGATAAAATTACAGTACAAGAATTTAGCGATGCCATTTTAGCTCAAGTGAAGGAAGAATATCCAGAGATGGATGAATATGTTTTGAGTGATGCCGAGTTATCAGAAATCCAAGCTATGCGCGATAATCAATTTGCTACATGGGATTGGACGTATGGTAAAGCACCTGAATACACCATTGAACGTGGTGTCCGCTATCCAGCTGGAAAAATTACGACTTATGCTAATGTTGAAAATTCAACGATAAAATCTGTCAAAATCTTTGGTGACTTCTTTGGAGTGAAACCTGTAGATGATATTGAAAAAATGTTGGAAGGTGTCCGCTACGATTACAAAGATGTTTTAGCAGCGCTTAAAACAGTTGATACAAGTCAATACTTCTCACGTATGACACCCGAAGAGATTACAAAAGCTATTGTAGAC

SEQ ID NO: 15052 - protein, 329 aa, Streptococcus agalactiae
MKYIVNTSNDPAYNVALEAYAFQKLTDIDEIFILWINEPAIIIGRHQNTIQEINKEFIDKNGIHVVRRLSGGGAVYHDLNNLNYTIISNNTQEGAFDFQTFSKPVIDTLAKLGVKAEFTGRNDLEINGQKFAGNAQAYYKGRMMHHGCLLFDVDMSVLGQALKVSKDKIESKGIKSVRARVTNIVDHLSDKITVQEFSDAILAQVKEEYPEMDEYVLSDAELSEIQAMRDNQFATWDWTYGKAPEYTIERGVRYPAGKITTYANVENSTIKSVKIFGDFFGVKPVDDIEKMLEGVRYDYKDVLAALKTVDTSQYFSRMTPEEITKAIVD

SEQ ID NO: 15053 - protein, 1275 aa, Streptococcus agalactiae
ATGTCAGAATTGCTAGATAAGATATCATCTCGGAACAATATGCTCGAAGCTTACAAGCAAGTGAAATCAAACAAAGGTTCTGCTGGTATCGATGGGGTCACTATCGAGCAGATGGATGACTATCTTCACCAAAATTGGCGAGAAACCAAGAAACTCATCAAAGAGAGGAGCTATAAACCTCAACCGGTTCTCAGGGTTGAAATCCCAAAACCAAACGGAGGAGTTCGTAACCTAGGTATCCCGACGGCTATGGATAGAATGATTCAGCAGGCCATCGTTCAAGTTTTGAGTCCACTCTGCGAAAAACATTTTTCAGAGTATAGCTATGGGTTCAGACCCAATCGCTCCTGCGAAACAGCCATTGTTCAGCTACTTGAGTATTTAAACGATGGCTACGAGTGGATTGTGGACATTGACTTGGAAAAGTTCTTCGATACTGTTCCGCAAGACAGATTGATGTCCCTGGTTCATAATATCATTCAAGATGGCGATACGGAGTCACTGATTCGTAAGTACTTCCATTCGGGAGTTGTTATTAACGGACAGCGACATAAGACTTTAGTCGGGACACCTCAAGGCGGGAATCTATCACCCCTCCTATCTAATATTATGCTTAATGAGTTAGACAAAGGGTTGGAAAAGCGAGGTCTTCGCTTTGTCCGTTACGCCGATGACTGTGTCATCACTGTCGGAAGCGAAGCAGCTGCTAAGCGGGTCATGCATTCGGTCAGTAGCTATATTGAGAAGCGATTAGGGTTGAAAGTCAACATGACTAAGACCAAGATTGTCAGACCGAACAAACTCAAATACCTCGGATTTGGTTTCTGGAAATCTCCAAAAGGTTGGAAGTGTCGTCCTCACCAAGACAGCGTTCAGAGCTTTAAGCGAAAACTGAAGCAACTGACGATGAGGAAATGGAGCATTGACCTGATAACTCGCATTGAACGATTGAACTGGGTCATTCGAGGATGGATAAACTATTTCTCGCTTGGCAATATGAAGAGTATCATGACACAAATAGATGAGCGTCTGCGAACCCGTATTCGAGTGATTATCTGGAAGCAATGGAAGAAGAAAGCAAAGCGCCTATGGGGACTCTTAAAACTAGGAGTTGCTAGATGGATAGCCGATAAAGTTTCTGGATGGGGTGACCACTATCAGTTGGTAGCTCAGAAGTCGGTACTCAAACGTGCTATATCAAAACCAGCCCTCGCAAAGCGAGGACTGGTCAGTTGCTTAGATTACTATCTTGAACGACATGCGTTAAAAGTTAGT

SEQ ID NO: 15054 - protein, 425 aa, Streptococcus agalactiae
MSELLDKISSRNNMLEAYKQVKSNKGSAGIDGVTIEQMDDYLHQNWRETKKLIKERSYKPQPVLRVEIPKPNGGVRNLGIPTAMDRMIQQAIVQVLSPLCEKHFSEYSYGFRPNRSCETAIVQLLEYLNDGYEWIVDIDLEKFFDTVPQDRLMSLVHNIIQDGDTESLIRKYFHSGVVINGQRHKTLVGTPQGGNLSPLLSNIMLNELDKGLEKRGLRFVRYADDCVITVGSEAAAKRVMHSVSSYIEKRLGLKVNMTKTKIVRPNKLKYLGFGFWKSPKGWKCRPHQDSVQSFKRKLKQLTMRKWSIDLITRIERLNWVIRGWINYFSLGNMKSIMTQIDERLRTRIRVIIWKQWKKKAKRLWGLLKLGVARWIADKVSGWGDHYQLVAQKSVLKRAISKPALAKRGLVSCLDYYLERHALKVS

SEQ ID NO: 15055 - protein, 783 aa, Streptococcus agalactiae
ATGACTTATACCTCACTAAAATCTCCTACTACCAAAGATTATAAATACACTCTTAATGTAGCTCATCTTTATGGTAACCTATTAAATACTTATGGCGATAATGGGAATATCTTAATGATGAAATATGTGGGAGAAAAACTAGGATGTCAAATGACATTTGATATCGTTTCATTAGAAGATAGATTTGATCCCAACTATTATCAGATGGCATTTTTTGGTGGTGGACAAGACTACGAACAAGCTATTGTTGCACGCGATCTTCCCAGTAAGAAAGAAGACATTAACAAATTCATTCAAAATAATGGTGTAGTACTTGCTATTTGTGGAGGTTTCCAACTTTTAGGACAATACTATATTCAAGCTAATGGAGAACGAATAGAGGGCATTGGCGTTATGGGACACTATACGCTAAACCAAAATAATAATCGCTATATTGGTGATATCAAGATTCACAACGATGAATTCAATGAAACATATTATGGCTTTGAGAATCATCAAGGACGTACCTTTTTATCAGAAGACGAAAAACCTTTAGGAACTGTCATTTATGGAAATGGGAATAACAAAGAAGATGGTACTGAAGGGGTTCATTATAAGAATGTTTTTGGGTCATACTTTCACGGTCCAATCCTTTCACGTAATGCTAATCTAGCTTACCGTCTTGTGGCAACTGCCCTCCGTAACAAATATGGTAAAGAGATTGTCCTCCCTAGTTATGAAGAAATTTTATCTTTAGAGATTCCTGAGGAATACGGAGACGTTAAATCAAAAGCAGATTTTGAA

SEQ ID NO: 15056 - protein, 261 aa, Streptococcus agalactiae; identical to SEQ ID NO: 10564

SEQ ID NO: 15057 - protein, 1276 aa, Streptococcus agalactiae
ATGGGACGTGGTTCTACTTATCCGGGTAGTTTAGCACTCAAATTCGATAAAGATATACTAGATACAATTGCCAAAGATTATGAAATTGTAGTTGTGACTGGTACTAACGGTAAAACCTTAACAACAGCTTTAACAGTTGGTATTTTAAAGGAAGCCTTCGGTCAGGTGGTAACCAACCCAAGTGGAGCAAATATGATTACAGGTATTGTTTCAACCTTCCTAACAGCTAAGAAAAGTAAATCTGGTAAAAAAATAGCTGTCCTTGAAATAGACGAAGCGAGTTTACCCCGTATTACACAGTATATAAAGCCTAGTTTGTTCGTCTTTACCAATATTTTCCGTGATCAAATGGACCGTTATGGCGAAATCTACACAACTTATCAAATGATTTTAGATGGAGCTGCTAACGCTCCGCAAGCTACTATCTTAGCTAACGGTGACAGTCCACTTTTTAATTCTAAAAGCGTGACTAACCCTGTGCAATTCTATGGATTTGATACCGACAAACATGAGCCACGATTAGCACACTATAATACTGAGGGTATTCTCTGTCCAAAGTGTCAAGCAATTTTAACTTATCGATTGAACACATATGCCAACCTTGGTGACTACACTTGTCCTAATTGTGATTTTGAACGTCCAAACCTTGATTATGCCTTAACAAGGCTAATACATCTGACAAATACTTCATCAGTTTCGTTATTGATGGCCACAATATAATATCAACGTGGGTGGCCTTTATAATATTTACAATGCTTTGGCGGCAGTATCTGTTGCTGAATATTTTGGTGTAGAAGCAAGTCAAATTAAAGATGGATTTGATAAAAGCCGTGCCGTTTTTGGTCGTCAAGAAACCTTTACAATTGGAAATAAAAAATGTACCTTAGTTCTGATTAAAAATCCAGTAGGAGCTAGTCAAGCTCTTGATATGATTAAACTTGCTCCATACCCGTTCTCTCTTTCAGTACTATTAAATGCCAATTATGCTGACGGTATTGATACTTCTTGGATTTGGGACGCTAATTTTGAAACTATTCTCACGATGAATATCCCAGAAATATTTGCTGGTGGTGTTCGCCACTCTGAAATTGCTCGTCGCTTACGTGTAACTGGTTATGATGAGAAACGCATAAAACAAGCTGATAAACTGCAAGATATTATGGCAATGATTGAGCAGCAAGAGACTGAGCATGCTTATATTTTAGCAACATATACAGCTATGCTGGAGTTTCGTGAAATTCTTGCTAACCACAACGCTATCAGAAAGGAGATGAAT

SEQ ID NO: 15058 - protein, 426 aa, Streptococcus agalactiae
  VARIANT 232, 238: Xaa = Any Amino Acid
MGRGSTYPGSLALKFDKDILDTIAKDYEIVVVTGTNGKTLTTALTVGILKEAFGQVVTNPSGANMITGIVSTFLTAKKSKSGKKIAVLEIDEASLPRITQYIKPSLFVFTNIFRDQMDRYGEIYTTYQMILDGAANAPQATILANGDSPLFNSKSVTNPVQFYGFDTDKHEPRLAHYNTEGILCPKCQAILTYRLNTYANLGDYTCPNCDFERPNLDYALTRLIHLTNTSSXFVIDGXQYNINVGGLYNIYNALAAVSVAEYFGVEASQIKDGFDKSRAVFGRQETFTIGNKKCTLVLIKNPVGASQALDMIKLAPYPFSLSVLLNANYADGIDTSWIWDANFETILTMNIPEIFAGGVRHSEIARRLRVTGYDEKRIKQADKLQDIMAMIEQQETEHAYILATYTAMLEFREILANHNAIRKEMN

SEQ ID NO: 15059 - protein, 849 aa, Streptococcus agalactiae
ATGGATATTTTTTCAGCTATTGATTCAAAGTTTTGGGCGAGCATTATGGAAAATCCATGGATGATCCTTATTCATCTCATGGATATTATCATAGTAGCTGTTCTGATTTATAAATTTATCAAAGCGCTAGCAGGCACAAAAATTATGTCCTTAATTCAGGGCGTTATTTTGTTTATCATCATTAGATTTGTGTCAGAATGGATAGGGCTAACAACGATTACATTTTTGATGAATCAGATTGTTACTTATGGTGTAATTGCAGGTGTTGTCATCTTTGCTCCAGAGATTAGAACAGGTCTCGAAAAATTTGGGCGAACACCACAACTATTTACGCAACGTTCTCAATTAAGCAGTGATGAAAAGCTAGTAGATGCCCTTGTTAAGGCAGTTGCTTATATGAGTCCGCGTAAAATAGGAGCCTTGATTTCAATTGAACGTACCCAAACTTTGCAAGAGTATATAGCTACAGGTATCCCATTAGATGCAGATATTTCCAGTGAATTGTTAATTAATATTTTCATTCCTAATACACCACTGCACGATGGTGCTGTTATTGTAAAAGATAAAAAAATTGCTACAGCATGTTCGTACTTACCTCTATCAGAATCATCTTCGATTTCAAAAGAATTTGGAACACGCCACAGAGCAGCGATTGGTCTATCAGAGAATTCAGATGCACTAACGGTTATTGTTTCTGAAGAGACTGGTGGTATTTCTGTTGCTTTGAAAGGTGAATTTTTACATGATCTTTCTAAAGATAGCTTTGAAGCAATTCTGAGAACTCAGTTGATTCAAAATCAAGAGGAAAACTCAAAATTAGCTTGGTATAATCAACTATTGAGGAGGAAG

SEQ ID NO: 15060 - protein, 283 aa, Streptococcus agalactiae; identical to SEQ ID NO: 6154

SEQ ID NO: 15061 - protein, 957 aa, Streptococcus agalactiae
ATGAAAAAATTTTTTACAAATAAATTTTGGTTAGGCGTTGTCTCACTCTTTCTGGCTATTTTATTATTTTTAACGGCAACTGCAACAAGTATGAACCATCAAGACAATAGTAAGATTGCAGGAGCGTCTGAGACATATACACATACCCTAACAGATGTGCCAATAGACATCAAATACGATAGTGATGATTACTTTATTAGTGGCTATTCTTATGGGGCAGATGTCTATATGTCATCGGTTAATCGTGTTAAGCTAGATTCTGAAATAAATGAGGATACACGAAAATTTAAAGTAGTCGCTGATTTGACAAATATGAAACCAGGGACTCACAAAGTCCCACTAAAGGTAGTAAATTTGCCATCTGGTGTAAATGCTACGGTTTCTCCAACAACAATTACAGTAACTATGGGTAAAAAGAAAACAAAAGAGTTTCCGGTTTATGGACATGTTAATGATAAGCAAATTAAAGCTGGTTATGCAGTCGATAAGATGTCAGTTGATGTGTCAAAAGTTAAAGTTACTAGTGATGAATCTATTATAGATCGTATTGACCATGTCGCTGCCAATATCCCTGATGATAAAGTTCTTGATGATGATTTTAACAAGACAGTTACTTTACAAGCTGTAACAGCAGATGGTACAGTATTAGCAAGTATTATTCACCCTTCTAAAGCAACTTTATCTGTCAAGGTAAAAAAATTGACCAAGACAGTACCGATTAATTTGATACCAGTAGGACAATTCAGCGATAGTATTTCAAAAATTAACTACAAGTTGAGTCAAGAAAAAGCAGTAATTTCAGGAACAAAAGAGGCTTTAGAAGCTATTTCTGTTATTAATGCTGAGGTAGATATTTCAGACGTAACTAAAAATACAGAAAAGAAAATTAATCTTTCTGCAAACAATGTTTCAGTTGATCCTGCTCAAGTAACAGTTCAATTGACAACTACTAAAAAA

SEQ ID NO: 15062 - protein, 319 aa, Streptococcus agalactiae; identical to SEQ ID NO: 6156

SEQ ID NO: 15063 - protein, 1350 aa, Streptococcus agalactiae
ATGGGAAAATATTTTGGTACAGATGGTGTTCGCGGTGAAGCTAATGTTGAACTGACGCCAGAATTGGCTTTTAAATTAGGACGTTTTGGAGGATATGTTCTAAGTCAACACGAAACTGATCGTCCGAGAGTTTTTGTAGCTCGTGATACTCGTATTTCTGGTGAAATGCTGGAATCTGCTTTGATTGCTGGTCTACTTTCAGTAGGTATTGAGGTTTATAAACTTGGTGTTTTAGCCACTCCTGGAGTGTCTTACCTTGTTCGTACAGAAAAAGCTAGTGCAGGGGTTATGATTTCAGCAAGCCACAATCCAGCACTTGATAATGGTATTAAGTTCTTTGGTAGTGATGGTTTTAAACTTGATGATGATCGTGAATTAGAAATTGAAGCTTTACTTGATGCGAAGGAAGACACTTTACCACGTCCATCAGCACAAGGTTTAGGTACTTTAGTAGATTATCCTGAAGGACTTCGGAAATATGAGAAGTTTATGGAATCAACTGGTATTGATTTAGAAGGTATGAATGTTGCGTTGGATACAGCAAATGGTGCAGCAACAGCCTCAGCTCGGAATATCTTTTTAGACTTGAATGCTGATATAAGTGTTATTGGTGATCAACCAGATGGTTTGAATATCAATGATGGTGTTGGTTCGACACATCCTGAGCAATTACAAAGTTTAGTTAGAGAAAATGGTTCCGACATCGGTCTAGCTTTTGATGGTGATAGTGATCGTTTGATCGCTGTTGATGAAAATGGAGAGATTGTAGATGGTGATAAAATTATGTTTATCATTGGGAAATATCTCTCTGATAAAGGGCAGCTTGCTCAGAATACAATCGTAACAACGGTTATGTCAAATCTCGGCTTTCATAAAGCGCTCGACCGTGAAGGAATTCATAAAGCGATTACCGCTGTAGGAGACCGCTACGTGGTTGAAGAAATGCGTAAATCAGGATATAATCTTGGCGGAGAGCAATCAGGCCACGTTATTATCATGGATTACAATACTACAGGGGATGGACAATTAACAGCCATCCAATTGACTAAGGTCATGAAAGAAACTGGTAAGAAATTATCAGAGTTAGCTAGTGAAGTGACGATTTATCCTCAAAAATTAGTAAATATTCGTGTTGAAAATAACATGAAAGATAAAGCGATGGAAGTTCCTGCAATTGCGGAAATTATTGCTAAAATGGAAGAAGAGATGGATGGCAATGGTCGTATTCTAGTACGTCCTAGTGGTACTGAGCCTCTTCTTAGAGTTATGGCAGAAGCGCCAACAAATGAAGCGGTTGATTATTATGTTGATACTATCGCAGATGTCGTTCGTACAGAAATTGGTTTAGAT

SEQ ID NO: 15064 - protein, 450 aa, Streptococcus agalactiae
MGKYFGTDGVRGEANVELTPELAFKLGRFGGYVLSQHETDRPRVFVARDTRISGEMLESALIAGLLSVGIEVYKLGVLATPGVSYLVRTEKASAGVMISASHNPALDNGIKFFGSDGFKLDDDRELEIEALLDAKEDTLPRPSAQGLGTLVDYPEGLRKYEKFMESTGIDLEGMNVALDTANGAATASARNIFLDLNADISVIGDQPDGLNINDGVGSTHPEQLQSLVRENGSDIGLAFDGDSDRLIAVDENGEIVDGDKIMFIIGKYLSDKGQLAQNTIVTTVMSNLGFHKALDREGIHKAITAVGDRYVVEEMRKSGYNLGGEQSGHVIIMDYNTTGDGQLTAIQLTKVMKETGKKLSELASEVTIYPQKLVNIRVENNMKDKAMEVPAIAEIIAKMEEEMDGNGRILVRPSGTEPLLRVMAEAPTNEAVDYYVDTIADVVRTEIGLD

SEQ ID NO: 15065 - protein, 369 aa, Streptococcus agalactiae; identical to SEQ ID NO: 10577

SEQ ID NO: 15066 - protein, 123 aa, Streptococcus agalactiae; identical to SEQ ID NO: 10578

SEQ ID NO: 15067 - protein, 378 aa, Streptococcus agalactiae; identical to SEQ ID NO: 6161

SEQ ID NO: 15068 - protein, 126 aa, Streptococcus agalactiae; identical to SEQ ID NO: 6162

SEQ ID NO: 15069 - protein, 1128 aa, Streptococcus agalactiae
ATGTTAAAGAAACCAACCTCAGCATATGTACACATTCCATTTTGTACCCAAATATGTTATTATTGTGATTTTTCAAAAGTTTTTATTAAAAATCAGCCTGTAGACGCTTATCTTCAGGCTCTTATCCGTGAATTTCGGTCTTATGATATTACAGAATTGCGCACCTTATATATTGGAGGAGGGACACCTACATCTATAAGCGCTGTGCAACTGGACTATTTATTGACGGAGTTAAGTAGAGATTTAAACTTAAATACTTTAGAGGAGTTCACTATCGAAGCTAATCCAGGAGATTTAACCGTTGATAAAATAGAGGTGCTTCAAAAGTCAGCTGTCAATAGAGTTTCTCTAGGAGTTCAGACCTTTAATGATAAACATTTAAAGCGTATTGGACGCAGTCACAATGAGGTACAAATTTATTCTACAATTGATGCTCTTAAAACAGCTGGTTTTCAAAATATCTCTATTGACCTAATTTATGCCTTACCTGGACAAACGATGGATGATGTTAGAAGTAATGTAGCCAAAGCTCTCTCTCTAAATATTCCTCATTTGAGTCTATATAGTTTAATTTTAGAACACCATACTGTATTTATGAATAAAATGCGTCGTGGGAAATTACATTTGCCAACAGAAGATTTAGAAGCCGAGATGTTTGAATATATCATTTCTGAAATGGAGAGAAATGGTTTTGAGCATTATGAAATTTCTAATTTTACAAAGCCGGGTTTTGAAAGTCGTCATAATTTGATGTACTGGGATAATGTAGAATATTATGGTGTTGGTGCAGGTGCTTCTGGTTATCTTGATGGTATTCGTTATCGTAATAGAGGGCCAATACAACATTATCTAAAGGGTGTTTCAGAAGGTAATGCAAGGTTATCTGAAGAAGTATTATCAAAAAATGAAATGATGGAAGAGGAGCTTTTCCTCGGTCTTCGTAAAAAAAAGGGTGTTTCCATCGGAAAATTTGAACAAAAATTTGGAACGTCCTTTGAGAAACGTTACGGTCAGATTGTTCAAGAACTCCAAAGTGATGGGCTTTTGAAAGAAAATAATGGTTTTATCCAGATGACTAAAAAAGGTCTCTTCTTAGGAGATACGGTTGCCGAGAAATTTATTGTGGAG

SEQ ID NO: 15070 - protein, 376 aa, Streptococcus agalactiae
MLKKPTSAYVHIPFCTQICYYCDFSKVFIKNQPVDAYLQALIREFRSYDITELRTLYIGGGTPTSISAVQLDYLLTELSRDLNLNTLEEFTIEANPGDLTVDKIEVLQKSAVNRVSLGVQTFNDKHLKRIGRSHNEVQIYSTIDALKTAGFQNISIDLIYALPGQTMDDVRSNVAKALSLNIPHLSLYSLILEHHTVFMNKMRRGKLHLPTEDLEAEMFEYIISEMERNGFEHYEISNFTKPGFESRHNLMYWDNVEYYGVGAGASGYLDGIRYRNRGPIQHYLKGVSEGNARLSEEVLSKNEMMEEELFLGLRKKKGVSIGKFEQKFGTSFEKRYGQIVQELQSDGLLKENNGFIQMTKKGLFLGDTVAEKFIVE

SEQ ID NO: 15071 - protein, 735 aa, Streptococcus agalactiae; identical to SEQ ID NO: 10583

SEQ ID NO: 15072 - protein, 245 aa, Streptococcus agalactiae; identical to SEQ ID NO: 1716

SEQ ID NO: 15073 - protein, 768 aa, Streptococcus agalactiae
ATGGCTTATAAAGGATATCTTATTGATTTAGATGGTACTATTTACAAAGGGAAAAGTCGTATCCCAGCAGGAGAGCGTTTTATCGAACGTTTGCAAGAAAAAGGCATTCCTTATATGTTAGTAACTAATAATACGACTCGCACACCAGAAAGCGTTCAGGAAATGCTTCGAGGCTTCAATGTTGAAACACCACTTGAAACAATCTATACCGCAACTATGGCTACGGTTGACTATATGAATGATATGAACCGTGGAAAAACAGCTTACGTTATTGGTGAAGAAGGGCTTAAAAAAGCTATTGCAGATGCAGGTTATGTGGAGGATACAAAAAATCCAGCCTATGTGGTTGTTGGTTTAGATTGGAATGTTACTTATGATAAATTGGCAACTGCTACGTTAGCAATTCAAAATGGTGCTTTATTTATTGGAACCAATCCAGATTTGAATATTCCTACTGAACGTGGTTTATTACCCGGTGCTGGCTCCTTAAATGCTTTATTAGAAGCCGCAACGCGTATAAAACCAGTCTTTATTGGAAAGCCAAATGCCATCATTATGAATAAGGCACTTGAAATTTTAAATATTCCTAGAAATCAAGCAGTCATGGTCGGTGATAATTATTTGACAGATATCATGGCTGGTATTAATAATGATATTGATACTTTGTTAGTAACAACGGGTTTTACAACAGTTGAAGAAGTACCAGATTTACCAATTCAACCAAGTTATGTTTTAGCAAGTTTAGATGAATGGACATTTAATGAAGGA

SEQ ID NO: 15074 - protein, 256 aa, Streptococcus agalactiae; identical to SEQ ID NO: 1718

SEQ ID NO: 15075 - protein, 669 aa, Streptococcus agalactiae
ATGAATGGACATTTAATGAAGGATAAGTTATTAGTAGTTTTAACTTGGATTTGGATTATATCGTTAGCAACTCTAGCTACAATTTATATTGCTTGGTTGATCTATCCTATAGAAATTCAGTTTTTAAAATTAGAAAAGGTTGTGTATTTAAAGGCTGAAACAATTTATTATAATTTTAATAAGTTGATGATATATCTGACTCATCCTTTTATCTCTGATTTAAATATGCCTAGCTTTCCTTCTTCAGAGGATGGTTTAAAGCATTTTGCGGATGTAAAATATCTTTTTACTCTAGCGCATGGGCTTTTTGTTATACTAACTTTTCCAGTTATTTATTTTTTAAGACGTGGATGGAAGCAAAAAAGTATCTTTCTATATGAAGGCTTCTTCAAGATAGCTATTATGTTGCCTATTTTTATTGTAGTATGTGCTTTTCTGTTGGGTTTTGATCAGTTTTTCACTCTATTTCATGAGGTGCTTTTTCCAGGAGATTCTACTTGGCAATTTAATCCTCTAACGGATCCAGTAATTTGGATACTTCCTGAAACTTTTTTCCTCCATTGTTTCATCATTTTTTTGTTAATCTATGAAACAATAACTATAATTCTTTTGATAATAGGTAGAAAACATTTAAAATTAAGAAAATATAAAAACAAAATGCAAGCTTTA

SEQ ID NO: 15076 - protein, 223 aa, Streptococcus agalactiae; identical to SEQ ID NO: 1720

SEQ ID NO: 15077 - protein, 4110 aa, Streptococcus agalactiae
ATGAACAAACCATATTCAATAGGTCTCGACATCGGAACTAATTCCGTCGGATATTCTGTGGTTACAGATGATTATAAGGTACCTGCTAAGAAGATGAGGGTCTTAGGGAATACAGATAAAGAATACATAAAGAAGAATCTTATAGGTGCTCTGCTTTTTGATGGTGGAAATACTGCTTCAGATAGACGCTTGAAGCGAACTGCTCGCCGTCGTTATACACGTCGTAGAAATCGTATTCTATATTTACAAGAAATTTTTGCAGAGGAAATGAGTAAAGTTGATGATAGTTTCTTTCATCGATTAGAGGATTCTTTTCTAGTTGAGGACGACAAGAGAGGGAGCAAGTATCCTATCTTTGCAACAATGCAGGAGGAGAAAGATTATCATGAAAAGTTCCCAACGATTTATCACTTGAGAAAAGAATTAGCTGACAAGAAAGAAAAAGCAAACCTTCGTCTTGTTTATCTGGCTCTAGCTCATATCATTAAATTCAGAGGACATTTCCTAATTGAGGATGATAGCTTTGATGTGAGGAATACTGATATTCAAAGACAATATCAAGCTTTTTTAGAAATCTTTGATACTACCTTCGAAAATAACCATTTGTTATCTCAAAACATAGATGTAGAGGGAATTCTAACAGATAAGATTAGCAAGTCTGCGAAGAAAGATCGCATTTTAGCGCAGTATCCTAACCAAAAATCTACTGGCATTTTTGCAGAATTTTTGAAATTGATTGTCGGAAATCAAGCTGACTTCAAGAAACATTTCAATTTGGAAGATAAAACGCCGCTTCAATTTGCTAAGGATAGCTACGATGAAGATTTAGAAAATCTTCTTGGGCAGATTGGTGATGAATTTGCTGACTTATTCTCAGTAGCGAAAAAGCTATATGATAGTGTTCTTTTATCTGGCATTCTTACAGTAACTGATCTCAGTACCAAGGCGCCACTTTCTGCCTCTATGATTCAGCGTTACGATGAACATAGAGAGGACTTGAAACAGTTAAAACAATTCGTAAAAGCTTCATTGCCTGAGAAATATCAAGAAATATTTACTGATTCATCAAAAGATGGCTACGCTGGTTATATTGAAGGCAAAACTAATCAAGGAGCATTTTATAAATACTTGTCAAAATTGTTGACCAAGCAAGAAGGTAGCGAGTATTTTCTTGAAAAAATCAAGAATGAAGATTTTTTGAGAAAACAAAGGACCTTTGATAATGGCTCAATTCCACACCAAGTCCATTTGACAGAATTGAAGGCTATTATTCGACGTCAATCAGAATACTATCCATTCTTGAAAGAGAATCTAGATAGGATTGAAAAAATCCTTACCTTTAGAATTCCTTATTATGTCGGGCCACTAGCACGTGAGAAGAGTGATTTTGCATGGATGACTCGCAAAACAGATGACAGTATTCGACCTTGGAATTTTGAAGAATTGGTTGATAAGGAAGCATCTGCGGAAGCTTTTATCCATCGTATGACCAACAATGACCTCTATCTTCCTGAAGAAAAAGTCCTACCAAAACATAGTCTTATTTATGAAAAATTTACGGTCTATAATGAGTTGACTAAGGTTAGATATAAAAATGAGCAAGGTGAGACTTATTTTTTTGATAGCAATATTAAACAAGAAATCTTTGATGGAGTATTCAAGGAACATCGTAAGGTATCCAAGAAGAAGTTGCTAGATTTTCTGGCTAAAGAATATGAGGAGTTTAGGATAGTAGATGTTATTGGTCTAGATAAAGAAAATAAAGCTTTCAACGCCTCATTGGGAACTTACCACGATCTCAAAAAAATACTAGACAAAGATTTTCTTGATAATCCAGATAATGAGTCTATTTTGGAAGATATCGTCCAAACTCTAACCTTATTTGAAGATAGAGAAATGATTAAGAAGCGTCTTGAAAACTATAAAGATCTTTTTACAGAGTCACAACTAAAAAAACTCTATCGCCGTCACTATACTGGCTGGGGACGATTGTCTGCTAAGTTAATTAATGGCATTAGAGATAAAGAGAGTCAAAAAACAATCTTGGACTATCTGATTTCTGATGGAAGAGCAAATCGCAACTTTATGCAGTTGATACATGATGATGGTCTATCATTTAAACCAATTATTGACAAGGCACAGGCTGGTAGTCATTCAGATAATCTAAAAGAAGTTGTAGGTGAGCTTGCAGGTAGCCCTGCTATTAAAAAGGGGATTCTACAAAGTTTGAAAATTGTTGATGAGCTTGTTAAAGTCATGGGATACGAACCTGAACAAGTTGTGGTTGAGATGGCGCGTGAGAATCAAACAACAAATCAAGGTCGTCGTAACACTCGACAACGCTATAAACTTCTTGAGGAAGGCGTTAAGAATCTAGCTAGTGACTTGAATGGCAATATTTTGAAAGAATATCCTACGGATAATCAAGCGTTGCAAAATGAAAGACTTTTCCTTTATTACTTACAAAATGGAAGAGATATGTACACAGGGGAAGCACTAGATATTGACAATTTAAGTCAATATGATATTGATCACATTGTTCCTCAAGCTTTCATAAAAGATGATTCTATTGATAATCGTGTTTTGGTATCATCTGCTAAAAACCGTGGAAAATCAGATAATGTTCCTAGCATTGATATTGTAAAAGCACGCAAAGCATTCTGGAAAAAATTACTTGATGCTAAGTTAATGAGTCAGCGTAAGTATGATAATTTGACTAAGGCAGAGCGCGGAGGCCTAACTTCCGATGATAAGGCAAGATTTATCCAACGTCAGTTGGTTGAGACACGACAAATTACCAAGCATGTTGCCCGTATCTTGGATGAACGCTTTAATAATGAGCTTGATAGTAAAGGTAGAAGGATTCGCAAAGTTAAAATTGTAACCTTGAAGTCAAATTTGGTTTCAAATTTCCGAAAAGAATTTGGATTCTATAAAATTCGTGAAGTTAATGATTATCACCATGCACATGATGCCTATCTTAATGCAGTAGTTGCTAAAGCTATTCTAACCAAATATCCTCAGTTAGAGCCAGAATTTGTCTACGGTGACTATCCAAAATATAACAGTTACAAAACGCGTAAATCCGCTACAGAAAAGCTATTTTTCTATTCAAATATTATGAACTTCTTTAAAACTAAGGTAACTTTGGCGGATGGAACCGTTGTTGTAAAAGATGATATTGAAGTTAATAATGATACGGGTGAAATTGTTTGGGATAAGAAGAAACACTTTGCGACAGTTAGAAAAGTCTTGTCATACCCTCAGGTCAATATCGTGAAGAAGACAGAGATTCAGACAGGTGGTTTCTCTAAGGAATCAATCTTGGCGCATGGTAACTCAGATAAGTTGATTCCAAGAAAAACGAAGGATATTTATTTAGATCCTAAGAAATATGGAGGTTTTGATAGTCCGATAGTAGCTTACTCTGTTTTAGTTGTAGCTGATATCAAAAAAGGTAAAGCACAAAAACTAAAAACAGTTACGGAACTTTTAGGAATTACCATCATGGAGAGATTCAGATTTGAGAAAAATCCATCAGCTTTCCTTGAATCAAAAGGTTATTTAAATATTAGGGACGATAAATTAATGATTTTACCGAAGTATAGTCTGTTCGAATTAGAAAATGGGCGTCGTCGATTACTTGCTAGTGCTGGTGAATTACAAAAAGGTAACGAGCTAGCCTTACCAACACAATATATGAAGTTCTTATACCTTGCAAGTCGTTACAATGAGCTAAAAGGAAAACCAGAAGAAATTGAACAAAAACAGGAATTTGTAGTTCAACATGTTTCTTATTTCGACGATATTCTTCAAATAATCAACGATTTTTCAAATCGAGTTATTCTAGCAGATGCTAATTTAGAGAAAATCAATAAGCTTTACCAAGATAATAAGGAAAATATATCAGTAGATGAACTTGCTAATAATATTATCAATCTATTTACTTTTACCAGTCTAGGAGCTCCAGCAGCTTTTAAATTTTTTGATAAAATAGTTGATAGAAAACGCTATACATCAACTAAAGAAGTACTTAATTCTACCCTAATTCATCAATCTATTACTGGACTTTATGAAACACGTATTGATTTGGGTAAGTTAGGAGAAGAT

SEQ ID NO: 15078 - protein, 1370 aa, Streptococcus agalactiae
MNKPYSIGLDIGTNSVGYSVVTDDYKVPAKKMRVLGNTDKEYIKKNLIGALLFDGGNTASDRRLKRTARRRYTRRRNRILYLQEIFAEEMSKVDDSFFHRLEDSFLVEDDKRGSKYPIFATMQEEKDYHEKFPTIYHLRKELADKKEKANLRLVYLALAHIIKFRGHFLIEDDSFDVRNTDIQRQYQAFLEIFDTTFENNHLLSQNIDVEGILTDKISKSAKKDRILAQYPNQKSTGIFAEFLKLIVGNQADFKKHFNLEDKTPLQFAKDSYDEDLENLLGQIGDEFADLFSVAKKLYDSVLLSGILTVTDLSTKAPLSASMIQRYDEHREDLKQLKQFVKASLPEKYQEIFTDSSKDGYAGYIEGKTNQGAFYKYLSKLLTKQEGSEYFLEKIKNEDFLRKQRTFDNGSIPHQVHLTELKAIIRRQSEYYPFLKENLDRIEKILTFRIPYYVGPLAREKSDFAWMTRKTDDSIRPWNFEELVDKEASAEAFIHRMTNNDLYLPEEKVLPKHSLIYEKFTVYNELTKVRYKNEQGETYFFDSNIKQEIFDGVFKEHRKVSKKKLLDFLAKEYEEFRIVDVIGLDKENKAFNASLGTYHDLKKILDKDFLDNPDNESILEDIVQTLTLFEDREMIKKRLENYKDLFTESQLKKLYRRHYTGWGRLSAKLINGIRDKESQKTILDYLISDGRANRNFMQLIHDDGLSFKPIIDKAQAGSHSDNLKEVVGELAGSPAIKKGILQSLKIVDELVKVMGYEPEQVVVEMARENQTTNQGRRNTRQRYKLLEEGVKNLASDLNGNILKEYPTDNQALQNERLFLYYLQNGRDMYTGEALDIDNLSQYDIDHIVPQAFIKDDSIDNRVLVSSAKNRGKSDNVPSIDIVKARKAFWKKLLDAKLMSQRKYDNLTKAERGGLTSDDKARFIQRQLVETRQITKHVARILDERFNNELDSKGRRIRKVKIVTLKSNLVSNFRKEFGFYKIREVNDYHHAHDAYLNAVVAKAILTKYPQLEPEFVYGDYPKYNSYKTRKSATEKLFFYSNIMNFFKTKVTLADGTVVVKDDIEVNNDTGEIVWDKKKHFATVRKVLSYPQVNIVKKTEIQTGGFSKESILAHGNSDKLIPRKTKDIYLDPKKYGGFDSPIVAYSVLVVADIKKGKAQKLKTVTELLGITIMERFRFEKNPSAFLESKGYLNIRDDKLMILPKYSLFELENGRRRLLASAGELQKGNELALPTQYMKFLYLASRYNELKGKPEEIEQKQEFVVQHVSYFDDILQIINDFSNRVILADANLEKINKLYQDNKENISVDELANNIINLFTFTSLGAPAAFKFFDKIVDRKRYTSTKEVLNSTLIHQSITGLYETRIDLGKLGED

SEQ ID NO: 15079 - protein, 351 aa, Streptococcus agalactiae
ATGGCAGGTTGGCGAACCGTTGTTGTAAATACACATTCTAAGCTCTCTTATAAAAATAATCATCTGGTTTTTAAAGATTCTTATCAGACGGAAATGATTCATCTATCAGAGATTGACATTCTAATCATGGAAACAACAGATATCGTTTTGTCGACCATGCTGATTAAACGTTTGGTTGATGAAAATATTTTAGTTATATTTTGTGATGACAAACGCTTGCCAACAGCTATGTTAATGCCGTACTATGCCAGATATGATTCGAGTTTACAATTATCTAGGCAGATGTCATGGATTGAAGATGTCAAAGCGGATGTTAGACGTCAATCATTGCACAAAAAATCNNNNNTTAAT

SEQ ID NO: 15080 - protein, 117 aa, Streptococcus agalactiae
  VARIANT 115, 116: Xaa = Any Amino Acid
MAGWRTVVVNTHSKLSYKNNHLVFKDSYQTEMIHLSEIDILIMETTDIVLSTMLIKRLVDENILVIFCDDKRLPTAMLMPYYARYDSSLQLSRQMSWIEDVKADVRRQSLHKKSXXN

SEQ ID NO: 15081 - protein, 183 aa, Streptococcus agalactiae
ATGCATGCTTTTGATTTTGATAAATTTGATGGGACAACTATAGTAGCACGTAATGCTGAGAATGGTGAAAAGTTAATTACTCTTGATGGTGAAGAGCGTGACTTAATAGCTGATGACTTGGTCATTGCGGTAAATGATCAACCAGTTGCTTTGGCAGGCGTTATGGGAGGACAATCANNNNNT

SEQ ID NO: 15082 - protein, 61 aa, Streptococcus agalactiae
  VARIANT 60, 61: Xaa = Any Amino Acid
MHAFDFDKFDGTTIVARNAENGEKLITLDGEERDLIADDLVIAVNDQPVALAGVMGGQSXX

SEQ ID NO: 15083 - protein, 387 aa, Streptococcus agalactiae
TTGATTGTCTATAAAAATGGCGATAAGTCACAAAAAGTAGTACTTGAAGTTGCTCTTGAACTTGGTGACGGCCTCGTTCGTACAATAGCTATGGAATCAACTGATGGGCTTACACGTGGTTTGGAAGTATTAGATACTGGTCGCGCAATTAGTGTGCCGGTTGGTAAGGATACTTTGGGTCGTGTCTTCAACGTTCTTGGAGATGCTATTGACCTTGAAGAGCCTTTTGCAGAAGATGCAGAACGTCAACCAATCCATAAAAAAGCACCATCGTTTGATGAATTATCAACATCATCAGAAATCTTAGAAACAGGTATTAAAGTTATTGACTTATTAGCACCTTACTTAAAAGGTGGTAAAGTCGGGGCTTTTCGGTGNNNNNTTAAT

SEQ ID NO: 15084 - protein, 129 aa, Streptococcus agalactiae
  VARIANT 126, 127, 128: Xaa = Any Amino Acid
MIVYKNGDKSQKVVLEVALELGDGLVRTIAMESTDGLTRGLEVLDTGRAISVPVGKDTLGRVFNVLGDAIDLEEPFAEDAERQPIHKKAPSFDELSTSSEILETGIKVIDLLAPYLKGGKVGAFRXXXN

SEQ ID NO: 15085 - protein, 738 aa, Streptococcus agalactiae
GTGCTTTTTGATAATATTAATATTCAAGTTGATCAACGTGATCGTATTGCTCTTGTTGGACGTAATGGTGCTGGCAAATCAACGCTTCTTAAAATTTTAGTTGGTGAAGAGGCTCCGACAAAAGGAGAAATAAATAAAAAGCGTGATTTGAGTTTGTCCTACTTGGCACAAGATAGTCGTTTTCAATCTGAAAATACAATTTTCCAAGAAATGTTACAAGTTTTTGATTCATTAAGAGAAGTAGAGAAGCGCTTACGTGAATTGGAATTACAAATGGGACAAGTTTCAGGAAGTGACCTGGAACAATTGATGAAAACATACGATATTTTGTCAGAAGAGTTTCGTGAAAAAGGTGGCTTTACCTATGAATCAGATATAAAGGCTATTTTAAATGGCTTTAAGTTTAACAGTGATATGTGGGAAATGCCTATTAGTGAATTGTCTGGTGGGCAAAATACACGATTAGCGCTTGCAAAAATGCTACTTGAAAAGCCAGAATTACTTGTTTTAGATGAACCAACGAACCATTTAGACATTGATACGATTGCTTGGTTAGAAAATTATCTTGTAAATTATCAAGGAGCCCTTATTATTGTCAGCCATGACCGCTATTTTTTAGACAAGGTAGCTACAGTAACTTATGATTTAACGACACATTCTCTAGACCGCTATGTAGGCAATTATTCGAAAATTATGGATCTTAAGGCAGAGAAAATAGCGACTGAAGAAAAGATTTTT

SEQ ID NO: 15086 - protein, 246 aa, Streptococcus agalactiae
MLFDNINIQVDQRDRIALVGRNGAGKSTLLKILVGEEAPTKGEINKKRDLSLSYLAQDSRFQSENTIFQEMLQVFDSLREVEKRLRELELQMGQVSGSDLEQLMKTYDILSEEFREKGGFTYESDIKAILNGFKFNSDMWEMPISELSGGQNTRLALAKMLLEKPELLVLDEPTNHLDIDTIAWLENYLVNYQGALIIVSHDRYFLDKVATVTYDLTTHSLDRYVGNYSKIMDLKAEKIATEEKIF

SEQ ID NO: 15087 - protein, 201 aa, Streptococcus agalactiae
ATGTATGATGTGTTGGACTTAGATTTTCTAAGTAGCCACATTCCTAAAAAAATTGATTTAAAATATATTAAGGAAATTCAATATGGAACGGATATTAAGTCTCATTGGTATCAAGATGGTCTTGTGACACGTCATGATATTATTGGTGGCGATGCTATTCATGCTCAAGCTAGGATTGAATGGCAGGAAAAAAAGGAGGAT

SEQ ID NO: 15088 - protein, 67 aa, Streptococcus agalactiae
MYDVLDLDFLSSHIPKKIDLKYIKEIQYGTDIKSHWYQDGLVTRHDIIGGDAIHAQARIEWQEKKED

SEQ ID NO: 15089 - protein, 867 aa, Streptococcus agalactiae
ATGGCAGGTTGGCGAACCGTTGTTGTAAATACACATTCTAAGCTCTCTTATAAAAATAATCATCTGGTTTTTAAAGATTCTTATCAGACGGAAATGATTCATCTATCAGAGATTGACATTCTAATCATGGAAACAACAGATATCGTTTTGTCGACCATGCTGATTAAACGTTTGGTTGATGAAAATATTTTAGTTATATTTTGTGATGACAAACGCTTGCCAACAGCTATGTTAATGCCGTACTATGCCAGATATGATTCGAGTTTACAATTATCTAGGCAGATGTCATGGATTGAAGATGTCAAAGCGGATGTTTGGACGTCAATCATTGCACAAAAAATTTTGAATCAGTCTTTTTATCTTGGTGAGTGTTCTTTCTTTGAAAAATCCCAGTCTATTATGAATCTCTATCATGATTTAGAATCTTTTGATACTTCCAATCGTGAAGGGCATGCAGCTAGGATTTATTTCAATACACTTTTTGGAAATGATTTTTCAAGAGAACATGATAATCCAATAAATGCTGGTTTAGACTACGGATATTCATTGCTTTTGAGTATGTTTGCGCGTGAAGTCGTTAAGTGTGGTTGCATGACACAATTTGGGTTAAAGCATGCTAATCAATTTAATCAGTTCAACCTAGCAAGCGATATTATGGAACCATTTCGCCCAATCGTTGATAGGATTATTTATGAAAATAGGCAGAGTGATTTTGTCAAAATGAAAAGAGAACTCTTTTCTATGTTTTCAGAGACATACAGTTACGACGGTAAAGAAATGTATCTTTCAAATATTGTCAGCGATTACACCAAAAAAGTTATTAAGTCGCTAAATAGTGATGGGAATGGGATTCCGGAGTTTAGGATA

SEQ ID NO: 15090 - protein, 289 aa, Streptococcus agalactiae
MAGWRTVVVNTHSKLSYKNNHLVFKDSYQTEMIHLSEIDILIMETTDIVLSTMLIKRLVDENILVIFCDDKRLPTAMLMPYYARYDSSLQLSRQMSWIEDVKADVWTSIIAQKILNQSFYLGECSFFEKSQSIMNLYHDLESFDTSNREGHAARIYFNTLFGNDFSREHDNPINAGLDYGYSLLLSMFAREVVKCGCMTQFGLKHANQFNQFNLASDIMEPFRPIVDRIIYENRQSDFVKMKRELFSMFSETYSYDGKEMYLSNIVSDYTKKVIKSLNSDGNGIPEFRI

SEQ ID NO: 15091 - protein, 324 aa, Streptococcus agalactiae
ATGAGAATGATTTTAATGTTTGATATGCCTACTGAAACAGTAGAAGAACGTAAGGCGTATCGTAAGTTTAGAAAGTTTCTTTTGAGCGAAGGTTTTATTATGCATCAGTTCTCTGTTTATAGTAAATTATTACTCAATAATACAGCTAATAATGCTATGATAGGTCGGCTTAAAGTGAATAATCCTAAGAAGGGTAATATCACACTCTTAACAGTTACGGAAAAACAATTTGCGAGAATGGTTTACCTCCATGGAGAACGCAACACAAGTGTTGCCAACTTTGATAGTCGCTTGGTTTTCCTAGGAGATTCTTATGATCAAGAT

SEQ ID NO: 15092 - protein, 108 aa, Streptococcus agalactiae
MRMILMFDMPTETVEERKAYRKFRKFLLSEGFIMHQFSVYSKLLLNNTANNAMIGRLKVNNPKKGNITLLTVTEKQFARMVYLHGERNTSVANFDSRLVFLGDSYDQD

SEQ ID NO: 15093 - protein, 663 aa, Streptococcus agalactiae
ATGATCAAGATTAATTTTCCAATTTTAGATGAACCATTAGTGTTAAGTAATGCTACGATTTTAACGATAGAAGATGTTTCAGTTTATTCTTCATTGGTGAAACATTTTTATCAATATGACGTAGATGAACATTTGAAATTATTTGATGATAAGCAGAAAAGTCTGAAGGCAACAGAGTTAATGATGGTTACAGATATCTTAGGATACGATGTCAACTCAGCACCTATTCTAAAGTTGATACATGGTGACTTAGAAAATCAATTCAACGAAAAGCCAGAAGTGAAATCAATGGTAGAAAAATTAGCAGCTACTATTACAGAACTTATCGCATTTGAGTGTCTAGAGAATGAGCTTGATTTAGAATACGATGAAATCACGATTTTAGAACTCATTAAGGCACTAGGAGTCAAAATTGAGACACAGAGCGACACTATCTTTGAAAAATGTTTTGAAATTATACAAGTTTACCATTATTTAACGAAAAAGAATCTCTTGGTTTTTGTTAATAGCGGAGCTTATCTTACCAAAGATGAAGTTATAAAATTATGTGAATACATCAATTTAATGCAAAAGTCAGTACTCTTTCTAGAACCTAGAAGACTCTATGATTTACCGCAATATGTTATTGATAAGGATTATTTCTTGATAGGCGAAAATATGGTA

SEQ ID NO: 15094 - protein, 221 aa, Streptococcus agalactiae
MIKINFPILDEPLVLSNATILTIEDVSVYSSLVKHFYQYDVDEHLKLFDDKQKSLKATELMMVTDILGYDVNSAPILKLIHGDLENQFNEKPEVKSMVEKLAATITELIAFECLENELDLEYDEITILELIKALGVKIETQSDTIFEKCFEIIQVYHYLTKKNLLVFVNSGAYLTKDEVIKLCEYINLMQKSVLFLEPRRLYDLPQYVIDKDYFLIGENMV

SEQ ID NO: 15095 - protein, 135 aa, Streptococcus agalactiae
ATGGTTAAAGGGCTAGATTGTTCTACGCTTTACTTAATTATTAGTTTGACAGCGTTGGTTCTTTTAGTGATTGCTGGTGTTTCTTTGTCACTAATACTTGCAAGCTTACAAGGAAAGCAGTGGAGAACCTATCCA

SEQ ID NO: 15096 - protein, 45 aa, Streptococcus agalactiae
MVKGLDCSTLYLIISLTALVLLVIAGVSLSLILASLQGKQWRTYP

SEQ ID NO: 15097 - protein, 414 aa, Streptococcus agalactiae
ATGGAACAAACCTTTTTTATGATAAAACCTGATGGTGTAAAACGTGGTTTTATTGGAGAAGTTATTAGTCGTATTGAGCGTCGAGGCTTCTCTATTGATCGCTTAGAGGTTAGACATGCAGATGCAGATATTTTGAAAAGACATTATGCAGAACTGACGGATAGACCATTCTTTCCAACATTAGTAGATTATATGACTAGTGGTCCAGTAATCATTGGAGTTATTTCGGGAGAAGAGGTCATTTCAACTTGGCGCACCATGATGGGGAGTACTAACCCCAAAGATGCCCTTCCAGGAACTATTCGAGGAGATTTTGCACAAGCTCCCTCTCCAAACCAAGCGACATGTAATATTGTTCATGGGTCAGACTCACCTGAATCTGCAGCTCGCGAGATAGCCATTTGGTTCAATAAC

SEQ ID NO: 15098 - protein, 138 aa, Streptococcus agalactiae
MEQTFFMIKPDGVKRGFIGEVISRIERRGFSIDRLEVRHADADILKRHYAELTDRPFFPTLVDYMTSGPVIIGVISGEEVISTWRTMMGSTNPKDALPGTIRGDFAQAPSPNQATCNIVHGSDSPESAAREIAIWFNN

SEQ ID NO: 15099 - protein, 1830 aa, Streptococcus agalactiae
ATGAATATTGAAGATTTGAAGAAACGTCAAGAAAAGATTAGAAACTTTTCGATTATCGCTCATATTGACCATGGAAAATCAACCTTAGCAGACCGTATTTTAGAGAAAACAGAAACGGTTTCTAGTCGTGAAATGCAGGCGCAACTGTTGGACTCTATGGACCTAGAACGTGAGCGTGGGATTACTATAAAGTTAAATGCTATTGAGCTTAATTATACTGCTAAAGATGGTGAAACTTACATTTTTCACTTGATTGACACGCCAGGGCATGTTGACTTTACATATGAAGTATCACGTTCATTGGCAGCTTGTGAGGGTGCTATACTGGTTGTTGATGCAGCCCAAGGAATTGAAGCTCAAACTCTGGCAAATGTTTATTTGGCTCTAGACAATGATTTAGAGATACTACCAGTTATTAATAAAATTGATTTACCAGCAGCAGATCCAGAACGTGTACGTGCAGAAGTAGAGGATGTTATTGGTCTAGATGCTTCAGAAGCTGTACTTGCCTCAGCTAAGGCAGGGATTGGTATTGAAGAAATTTTAGAGCAGATCGTTGAAAAAGTTCCTGCTCCGACTGGGGAAGTAGATGCTCCTCTTCAAGCTCTAATTTTTGATTCTGTTTACGATGCTTATCGTGGAGTAATTCTGCAAGTAAGGATTGTAAATGGTATGGTTAAGCCAGGAGATAAGATTCAAATGATGTCTAATGGTAAAACCTTCGACGTTACTGAGGTTGGTATTTTCACTCCCAAAGCAGTTGGACGTGATTTTTTAGCAACTGGAGATGTAGGGTATATTGCTGCCTCAATTAAAACAGTTGCTGATACACGTGTTGGTGATACCATTACCCTTGCTAATAACCCAGCTATAGACCCCTTGCATGGCTATAAGCAAATGAACCCAATGGTTTTTGCCGGTCTTTATCCAATTGAATCAAATAAGTATAACGATCTGCGTGAAGCCCTTGAAAAATTACAATTGAATGATGCTAGTCTACAGTTTGAACCGGAAACATCACAAGCATTAGGGTTTGGTTTCCGTTGTGGTTTCTTAGGACTTTTACATATGGACGTTATCCAAGAGCGCTTGGAACGAGAGTTCAATATTGATCTTATTATGACTGCACCATCAGTAGTTTATCATGTTAATACAACTGATGGTGAAATGCTTGAAGTTTCGAATCCATCTGAATTTCCTGATCCTACTCGTGTTGACAGCATTGAAGAACCATATGTTAAGGCGCAAATTATGGTTCCTCAAGAATTTGTCGGTGCTGTAATGGAGTTAGCACAACGTAAACGTGGTGACTTTGTAACAATGGATTATATTGATGATAATCGTGTTAATGTTATTTACCAAATTCCTTTAGCTGAAATTGTGTTTGACTTCTTTGATAAGCTTAAATCATCAACACGTGGCTATGCTAGTTTTGATTATGAAATTTCCGAATATCGTCGCTCACAGTTAGTTAAAATGGATATTCTTTTAAATGGTGATAAAGTGGATGCTTTAAGCTTTATTGTTCACAAAGAATTTGCCTATGAACGTGGTAAATTGATCGTTGATAAGTTGAAAAAAATCATTCCTCGTCAGCAGTTTGAAGTTCCTATCCAAGCAGCTATTGGACAAAAAATTGTGGCTCGTTCTGATATAAAAGCACTACGCAAAAATGTCTTAGCAAAATGTTATGGTGGTGACGTTTCACGTAAACGTAAGTTGCTTGAAAAACAAAAAGCTGGTAAAAAGCGTATGAAAGCAATTGGTTCCGTCGAAGTTCCTCAGGAAGCTTTCTTAAGTGTTTTATCAATGGACGATGATGACAAAAAA

SEQ ID NO: 15100 - protein, 610 aa, Streptococcus agalactiae
MNIEDLKKRQEKIRNFSIIAHIDHGKSTLADRILEKTETVSSREMQAQLLDSMDLERERGITIKLNAIELNYTAKDGETYIFHLIDTPGHVDFTYEVSRSLAACEGAILVVDAAQGIEAQTLANVYLALDNDLEILPVINKIDLPAADPERVRAEVEDVIGLDASEAVLASAKAGIGIEEILEQIVEKVPAPTGEVDAPLQALIFDSVYDAYRGVILQVRIVNGMVKPGDKIQMMSNGKTFDVTEVGIFTPKAVGRDFLATGDVGYIAASIKTVADTRVGDTITLANNPAIDPLHGYKQMNPMVFAGLYPIESNKYNDLREALEKLQLNDASLQFEPETSQALGFGFRCGFLGLLHMDVIQERLEREFNIDLIMTAPSVVYHVNTTDGEMLEVSNPSEFPDPTRVDSIEEPYVKAQIMVPQEFVGAVMELAQRKRGDFVTMDYIDDNRVNVIYQIPLAEIVFDFFDKLKSSTRGYASFDYEISEYRRSQLVKMDILLNGDKVDALSFIVHKEFAYERGKLIVDKLKKIIPRQQFEVPIQAAIGQKIVARSDIKALRKNVLAKCYGGDVSRKRKLLEKQKAGKKRMKAIGSVEVPQEAFLSVLSMDDDDKK

SEQ ID NO: 15101 - protein, 696 aa, Streptococcus agalactiae
ATGAAAGGTCAAAAAATTATTGCTCTAGCTGGTCTTGTCCTGTCATGCCATTTTGCTCTTACGGCATGTCATACTCAAGAACACAAAAATTCTTATCATATTAAAACAAAGCAGGTTGCTAAGAAAAAAGCTAATAAAAAGAAAGTCTCTGTTAAGGAAAGTCATAAAAAACGCAAGGGTGTTGCAGGGGTTGACTTTCCAACTGATGATGGCTTTTTACTGACTAAAGATTCGAAGATTTTATCTCATACAGATTCTGGAATCGTTGTAGCACATGGAAATCATTCTCATTTTATTTTTTACTCTGATTAAAAGGTTCAAAATTTAGCTATTTAATCCCTAATGCTAATGCAAAAACTAATAAAAATCAAGCGGTAAGAAACTTTAAAGCAGGGGCGGTAGCTGTTAATACATTAAATGATGGCTATGTTTTTAATCCCGCAGATATTGTTTCAGAAGATGCTAATGGCTACGTGGTCAGACATGGTGACCATTTCCACTATATTCCAAAAGCAAGTTTATCTCAGCAAAAGCAAGTACAAGCAAGTAGAGCTGTTTCACGTTTAGGAATCAAAGTAATAGCCATTACAGGGTTAATAGTTCTAAAATTGCAGGGCTTCACTACCCAACAAGTGATGGTTTCTTATTTAATGACGAGGAATAAAAGGCACTACCCCAACAGNNNNNTTAATTAAT

SEQ ID NO: 15102 - protein, 233 aa, Streptococcus agalactiae
  VARIANT 103, 219, 229, 230: Xaa = Any Amino Acid
MKGQKIIALAGLVLSCHFALTACHTQEHKNSYHIKTKQVAKKKANKKKVSVKESHKKRKGVAGVDFPTDDGFLLTKDSKILSHTDSGIVVAHGNHSHFIFYSXLKGSKFSYLIPNANAKTNKNQAVRNFKAGAVAVNTLNDGYVFNPADIVSEDANGYVVRHGDHFHYIPKASLSQQKQVQASRAVSRLGNQSNSHYRVNSSKIAGLHYPTSDGFLFNXRGIKGTTPTXXLIN

SEQ ID NO: 15103 - protein, 1647 aa, Streptococcus agalactiae
ATGGCCAAAGATATTGATCTAAGTAAGCCAATTCCAAATCCACATCATGATGACGAAGATCATCACAAAGGTCATCACCATGATGAGTCCGACCATAAGCATGAAGAACACGAGCACACTAAATCAAATAAATTATCTGATGAAAATCAAAAGAAATTAATTTATTTAGCAGAGAAGCTTGGTTTAAATCCTAATCAAATTGAAGATTAACGTCAGAGATGGAAGTATATCTTTAAGTATCCACATGATGACCACTCACACACTATAGCAAGTAAGGATATCGAAATTGGGAAGCCTATCCCAGATGGACACCACGATCACTCTCATGCAAAAGATAAAGTTGGTATGGCAACTCTAAAACAAATTGGTTTTGATGATGAGATTATTCAGGATATTCTGCATGCAGATGCTCCAACACCATTCCCATCAAATGAAACTAATCCTGAAAAAATGCGTCAGTGGCTTGCAACTGTTACTAAGATTAACATTGGACAAAGAACCAATCCATTCCAGCGTTTTGGTCTATCATTGATGCCTAATATTGAAGTTCTAGGAATTGGGTTTACTCCGATTAATGATATGACGCCAGTTTTGCAATTCAAAAAACTTAAACAGCTTTGGATGACAAATACTGGTATTACAGATTATTCTTTCCTTGATAAGATGCCACTATTAGAAGGATTGGATATTTCACAAAACGGTATTAAGGATTTATCTTTCCTTACAAAATATAAACAATTAAGTCTTATTGCTGCAGCTAATAATGGCATTACTTCGCTAAAACCATTGGCTGAATTACCAAACCTTCAATTCTTAGTTTTGAGTCATAACAATATCTCTGACTTGACACCGTTATCAAACTTGACAAAACTCCAAGAATTGCACCTTGATCATAATAATGTGAAGAATTTAAGTGCACTTTCTGGTAAAAAAGATTTGAAAGTTCTAGATTTATCAAACAATAAATCCGCAGACTTATCGACTCTAAAAACAACTAGTCTTGAGACGCTTCTTTTAAATGAGACGAATACAAGCAATCTAAGTTTCTTAAAGCAAAATCCTAAGGTATCTAATTTAACAATTAATAATGCGAAATTATCATCATTAGATGGTATTGAAGAGAGCGATGAAATTGTTAAAGTAGAAGCTGAAGGGAACCAAATTAAGTCACTAGTATTGAAAAATAAACAAGGTTCGTTAAAATTCTTGAATGTGACTAATAATCAGTTAACATCACTTGAAGGTGTTAATAATTATACTTCACTTGAGACCTTAAGTGTTTCTAGAAATAAACTTAAATCTTTAGATATTAAAACACCTAACAAAACAGTTACAAATCTTGATTTTAGCCATAACAATGTTCCAACATCACAATTGAAATTGAATGAAAAAAATATTCCTGAAGCAGTAGCTAAGAATTTTCCAGCAGTTGTAGAAGGTTCAATGGTTGGAAATGGTAGTCTTGCTGAAAAAGCAGCTATGGCTTCTAAAGAGGACAAACAAGTTTCAGATAATACTAATCACCAAAAAAACACTGAAAAATCTGCTCAAGCGAATGCTGATAGTAAAAAAGAAAACCCTAAAACACATGATGAACATCATGACCATGAAGAAACAGATCATGCACATGTAGGTCATCATCACCAT

SEQ ID NO: 15104 - protein, 550 aa, Streptococcus agalactiae
MAKDIDLSKPIPNPHHDDEDHHKGHHHDESDHKHEEHEHTKSNKLSDENQKKLIYLAEKLGLNPNQIEVLTSEDGSIIFKYPHDDHSHTIASKDIEIGKPIPDGHHDHSHAKDKVGMATLKQIGFDDEIIQDILHADAPTPFPSNETNPEKMRQWLATVTKINIGQRTNPFQRFGLSLMPNIEVLGIGFTPINDMTPVLQFKKLKQLWMTNTGITDYSFLDKMPLLEGLDISQNGIKDLSFLTKYKQLSLIAAANNGITSLKPLAELPNLQFLVLSHNNISDLTPLSNLTKLQELHLDHNNVKNLSALSGKKDLKVLDLSNNKSADLSTLKTTSLETLLLNETNTSNLSFLKQNPKVSNLTINNAKLSSLDGIEESDEIVKVEAEGNQIKSLVLKNKQGSLKFLNVTNNQLTSLEGVNNYTSLETLSVSRNKLKSLDIKTPNKTVTNLDFSHNNVPTSQLKLNEKNIPEAVAKNFPAVVEGSMVGNGSLAEKAAMASKEDKQVSDNTNHQKNTEKSAQANADSKKENPKTHDEHHDHEETDHAHVGHHHH

SEQ ID NO: 15105 - protein, 657 aa, Streptococcus agalactiae; identical to SEQ ID NO: 6227

SEQ ID NO: 15106 - protein, 219 aa, Streptococcus agalactiae; identical to SEQ ID NO: 6228

SEQ ID NO: 15107 - protein, 462 aa, Streptococcus agalactiae; identical to SEQ ID NO: 6229

SEQ ID NO: 15108 - protein, 154 aa, Streptococcus agalactiae; identical to SEQ ID NO: 6230

SEQ ID NO: 15109 - protein, 435 aa, Streptococcus agalactiae
ATGAAAGAAACACAAGAAGAATTACGTCAGCGTATCGGACATACAGCTTATCAAGTAACCCAAAATTCAGCTACGGAACATGCTTTTACTGGGAAGTATGATGATTTTTTTGAAGAGGGGATATATGTAGATATCGTCAGTGGAGAGGTTTTATTCTCTTCTTTAGATAAATTTCAATCTGGTTGTGGTTGGCCAGCATTTTCAAAACCAATTGAGAATCGAATGGTGACAAATCATCAAGATCACTCTCATGGAATGCATCGTATTGAGGTTAGGAGTCGTCAAGCTGACTCTCATTTAGGGCATGTATTTAATGATGGACCGGTTGATGCAGGTGGCTTACGCTATTGTATCAATTCAGCTGCCTTAGATTTTATTCCTTATGACCAGATGGCAAAGAGAGGCTATGGGGACTACTTATCACTTTTTGATGAA

SEQ ID NO: 15110 - protein, 145 aa, Streptococcus agalactiae
MKETQEELRQRIGHTAYQVTQNSATEHAFTGKYDDFFEEGIYVDIVSGEVLFSSLDKFQSGCGWPAFSKPIENRMVTNHQDHSHGMHRIEVRSRQADSHLGHVFNDGPVDAGGLRYCINSAALDFIPYDQMAKRGYGDYLSLFDE

SEQ ID NO: 15111 - DNA, 2790 bp, Streptococcus agalactiae
atggcttctacaaataatgtttcagatacaaacacacgttttgctaaagaggaattagaagaggttttcgaagaattagggacaactcaaggtggtttatcagatgaagaggttgctgtacgtcagaaaaaatatggtttaaacctgttatctgaagtaaagcaagaatcaattattttattgtttctgaaaaattttactagtcttatggcaatactattatgggttggaggatttgtggctattgtttctaatagcttagagctaggtcttgccatttggatggttaatgtgattaatggtatttttagtttcattcaggaataccgtgcaagccaagcaacacaagctctcaagaaaatgttaccatcttattcacgtgttcttagaaaaagctcagaagaaaaggtattatcagagcaactagtcccaggagatattgttcttattgaagaaggagattgtatttcagcagatggtcgcttgattaaaacaacagatttgcaagtaaaccaatcagctttgacaggggaatcaaatcctatttataaagatagcaatgttgaaaactaccagtctaaaacattgattgaatgtgataatatggttttcgcaggaacgacagtctccagtggtagcgcaacaatggttgttacggcaattggaatgcaaacccaatttggtcaaatcgctgatttaacacaagggatgaaatcagaaaaaagccctcttcaaagagaacttgatcggttgaccaaacagatttctatcatttcaattactgtaggaattatctttttcttagcagcgactttttttgttaaggagccagtgtcaaaatcatttatctttgccttggggatgatcgttgcatttatcccagaaggtttactacctaccgttacactttctctagctatggcagtccaacgaatggctaaagaacacgcacttgtcaaaaaactttcttcagttgagactcttggagcaacctcagttatctgttctgataagactggtacattaacgcaaaatgaaatgaccgtcaatcatttgtggcaaaatggaaagagttaccaagtgacaggactgggttatgctccagaaggacagattctttttgaaggtgacaatatttgctttggtaatagtgatagaggagacttagaaaaacttattcgttttgctcatctctgtagcaacgctcaagtattaccaccaaatgatgatcgttcaacttatactgtacttggagatccgacagaagcttgtttgaatgttttattggaaaaatcagggataaacatacaagaaaatcgtaagtttgcaccacgtttgaaagagttaccttttgattcggttagaaaacgcatgacaactattcatagcttaggaggcgatgaaaaggataaaaaaatttcaatcacaaaaggtgcgccgaaagaaatacttgatttatcagattatgtcttatctgatggcaaagttatccccttaaataaggaagaacgtaataaaatacagttggctaatgatacatttgctaaagatggacttcgcgtcttagctgtttcatactgcgatattgaaggcttttcaaaagaacaatggacgcaagaaaatttggaacaacacatggtgtttatagggttgatagcaatgagtgatccacctcgtgaaggcgttcgtgaagctattgataaatgtcatgcagcaagcattcgtattattatggtgactggagattacggattaacggcactgagtatcgctaaaaatattggtattattcgtaacgatgatgctaaagtaatttcaggtttagagttatcagaaatgacggatagccaattgaaaaaagaattgtcaggtgaagtcgtttttgctcgtgtagcaccagaacaaaaatatcgagtagtaacgatattacaggagatgggtgaagtagtagcagttacaggagacggggtcaatgatgcgcctgcgctaaaaaaatccgatattggtgtagccatgggtgttaccggtactgatgttgctaaagaatcagctgatatgattctgacagatgatcattttgcttctattgtacatgccgtggaagaagggcgggctgtttatcaaaacattaagaaattcttgacgtatatttttaatagtaatactcctgaggcggttccgtcggcattcttccttttttctaaaggttttattcctttaccattgactgtaatgcaaatacttgctgttgatttgggaaccgatatgcttcccgctttaggtctaggcgtggaaccaccagaaacagatgttatgaatcgtcctccaagacggctaacagatcgcttattggacaaagggctacttataaaatctttcctttggtacggcactattgaatccgtattagctatgggtggttttttctgggctcattacttacgttatggtaattttacttttttcgtcgcaaacggcataccgtacagagaagcgacaactatgacacttggagctattatctttagccagataggtatggttatgaatagcagaacgagctatcaatctattaaaacactatctatttttggtaataaattaattaattttggtataataatggagattttagcatttttagtcttagtatacgtgccactattccataacttattcaacacagcaagcctaggtttatcacattggctctatttaataagctgcccgtttatcatgataggtttagatgaagttcggaaattattcagcagtagaaagaataaacgg

SEQ ID NO: 15112 - protein, 930 aa, Streptococcus agalactiae
MASTNNVSDTNTRFAKEELEEVFEELGTTQGGLSDEEVAVRQKKYGLNLLSEVKQESIILLFLKNFTSLMAILLWVGGFVAIVSNSLELGLAIWMVNVINGIFSFIQEYRASQATQALKKMLPSYSRVLRKSSEEKVLSEQLVPGDIVLIEEGDCISADGRLIKTTDLQVNQSALTGESNPIYKDSNVENYQSKTLIECDNMVFAGTTVSSGSATMVVTAIGMQTQFGQIADLTQGMKSEKSPLQRELDRLTKQISIISITVGIIFFLAATFFVKEPVSKSFIFALGMIVAFIPEGLLPTVTLSLAMAVQRMAKEHALVKKLSSVETLGATSVICSDKTGTLTQNEMTVNHLWQNGKSYQVTGLGYAPEGQILFEGDNICFGNSDRGDLEKLIRFAHLCSNAQVLPPNDDRSTYTVLGDPTEACLNVLLEKSGINIQENRKFAPRLKELPFDSVRKRMTTIHSLGGDEKDKKISITKGAPKEILDLSDYVLSDGKVIPLNKEERNKIQLANDTFAKDGLRVLAVSYCDIEGFSKEQWTQENLEQHMVFIGLIAMSDPPREGVREAIDKCHAASIRIIMVTGDYGLTALSIAKNIGIIRNDDAKVISGLELSEMTDSQLKKELSGEVVFARVAPEQKYRVVTILQEMGEVVAVTGDGVNDAPALKKSDIGVAMGVTGTDVAKESADMILTDDHFASIVHAVEEGRAVYQNIKKFLTYIFNSNTPEAVPSAFFLFSKGFIPLPLTVMQILAVDLGTDMLPALGLGVEPPETDVMNRPPRRLTDRLLDKGLLIKSFLWYGTIESVLAMGGFFWAHYLRYGNFTFFVANGIPYREATTMTLGAIIFSQIGMVMNSRTSYQSIKTLSIFGNKLINFGIIMEILAFLVLVYVPLFHNLFNTASLGLSHWLYLISCPFIMIGLDEVRKLFSSRKNKR

SEQ ID NO: 15113 - DNA, 1101 bp, Streptococcus agalactiae
atgtcaaatataataacttatttaaaaaataattcaaacttaacttttgatgaattagcattaaacgatgttgacattctttgtttaaatgaatttggctatatttcttttgaaaaacttataaacactacagaaatgaagtcagttttagtctgtgagttatatcatgagtaccttcaaactatggctaaatcatatagctttatgttcacgtcacaacgacatgatttatgtcagttaatgatgacctcgaaacgttttaaaaacttaactttatcttattatcaagctgagattagtttagaatttgaaaaacaatttgcagctatggtttttactattcctaatattgattatcatcaggttgtatttcgtggtactgatgccaaccttattggttggaaagaagattttaaattgacgtatatgagagaaatatcggctcatcgttcagcgattaaatacttaaatacaatactgccttattttgataaagtagttctctcaggtcattctaagggtggtaatttagccttgtacgctgcaatgtttacaaagccagatttaaaagcaaaaattgatttgatttggcttattgactccccaggactacaaaaaactttgttacctactacagagtataaaactactaaacaaaagtgcattcgcttactaccagaagaatctattgttggtatgatgctttatagtgatatagagccgctaattattagtagcaatgcgcgtggaattctgcaacacgatgttacaacttgggaaattcaagaaccagctattttaaagactggagcaggactatcgctaaaaagtatttgttttgaaaagacatttcaacagtggatggctgaattaaaaagtcaagaaagaaaattattttttgatttattatttgatagcttcctatcaagtggcgtatctagtttggatgacttcaacttggcttccagagcaaaaatgatgaaagcttttcatagctttagagaactagatgatgataaaaaaaggttatttaacaaatctttaaaattattagtaaccatattttggggagcttatcatgataatagcagagagactaag

SEQ ID NO: 15114 - protein, 367 aa, Streptococcus agalactiae
MSNIITYLKNNSNLTFDELALNDVDILCLNEFGYISFEKLINTTEMKSVLVCELYHEYLQTMAKSYSFMFTSQRHDLCQLMMTSKRFKNLTLSYYQAEISLEFEKQFAAMVFTIPNIDYHQVVFRGTDANLIGWKEDFKLTYMREISAHRSAIKYLNTILPYFDKVVLSGHSKGGNLALYAAMFTKPDLKAKIDLIWLIDSPGLQKTLLPTTEYKTTKQKCIRLLPEESIVGMMLYSDIEPLIISSNARGILQHDVTTWEIQEPAILKTGAGLSLKSICFEKTFQQWMAELKSQERKLFFDLLFDSFLSSGVSSLDDFNLASRAKMMKAFHSFRELDDDKKRLFNKSLKLLVTIFWGAYHDNSRETK

SEQ ID NO: 15115 - DNA, 636 bp, Streptococcus agalactiae
atggctagtattttaaaaaaacatttagagaaacgtttagagcttaaaaatgatcctatgaggacagatatgagtactggtgccagttaccctaaatatggattctcggtaggaaagtacacatatggatatcaacaattcttttacgaaggcgttaacttaaaagaaattggagcattttgctcaatagcccagaacgttactattactggtatgaatcatccaaccgatcacattaccactaacccttttatttactataagtcaaggggatttataaatgaggatagggcggacttaatagatgaaaagaaaaatggaaaagttattattggcaacgatgtctggataggaactaatgtcactatacttccatctgttacaataggtaatggagcaattattgaagcaggttcagttattaccaaagacattcctgactatgctgttgtcgctggaacacctgctaaaattatcaaatatcgcttttcagaggaagaaataacattattaaatgcatctcagtggtggaattggtcagatgaagctattaaggaacatattagcgaattttcagataagagggaattcttcaatactctaaaaagtatttctgaaaacaaaaatcataaactc

SEQ ID NO: 15116 - protein, 212 aa, Streptococcus agalactiae
MASILKKHLEKRLELKNDPMRTDMSTGASYPKYGFSVGKYTYGYQQFFYEGVNLKEIGAFCSIAQNVTITGMNHPTDHITTNPFIYYKSRGFINEDRADLIDEKKNGKVIIGNDVWIGTNVTILPSVTIGNGAIIEAGSVITKDIPDYAVVAGTPAKIIKYRFSEEEITLLNASQWWNWSDEAIKEHISEFSDKREFFNTLKSISENKNHKL

SEQ ID NO: 15117 - DNA, 609 bp, Streptococcus agalactiae
atgaatatgaaattatcaaaacgttaccgcttttggcagaaggtcattaaggctttgggtgtcttagcgttaatagcgacccttgtcttagttgtttatttgtacaaacttggtattttgaatgatagcaatgaattaaaagacctagtacacaagtatgaattttggggtccaatgatttttattgtggctcaaattgtacagattgtttttccagtaattcctggaggtgttacaacagtagcaggtttcttaatttttggtcctaccttaggctttatttataactatattgggattatcatcggaagtgtcatccttttttggttagtcaaattttatggacgaaaattcgttttgctatttatggatcagaagacatttgataaatatgagtctaagctagaaacatccggatatgaaaagttttttatcttttgtatggcatctcccatttcaccagcggacatcatggtgatgattaccggtctatctaatatgtctattaagcgctttgtgacaatcattatgataacgaaacctatttctatcatcggttatagctatttgtggatttatggcggtgatattttgaaaaattttttgaat

SEQ ID NO: 15118 - protein, 203 aa, Streptococcus agalactiae; identical to SEQ ID NO: 6240

SEQ ID NO: 15119 - DNA, 780 bp, Streptococcus agalactiae
atgtttggaaaattattaaaatatgaattaaaatcagttggtaagtggtatctaacactcaacgctgcggttttattagtatctattattttaggactggtattaaaggcacttggcggcaatttttctactgatactaatagtactagcgcccaaatattcactataatactcgttttattgttagcgatggttatttcaggatctctgttatccacccttgctattattatcaaacgtttttatagcaatatcttcggccgtcaaggatatctaaccttaacgctcccagtaactacgaatcagattatttgttcaaagctactagcttcgcttctttggagtatttttaatatttttattgtcattattggaatcatattggtcatattacctttagtaggtattggtcagttcgttgtcgcttttccagaaatctataaaattatttcatcttcgaacgctccactttttatcgcctatttctttctatcgtacgttgcagggacattactgatttatctctctatcgctgtagggcaattatttacaaacaaacgtgtattgatgggaattgtttcttattttggaatatcactcttaattactttcttaacattaataatagatagtatttttcatattgatttattcaactctcatgcaaatgcaacattctctcaacctgtattgctctacaatatacttgttagcattgttgaaattgctatattctatatgttgacacactctattattaagtacaaacttaatatacaa

SEQ ID NO: 15120 - protein, 260 aa, Streptococcus agalactiae; identical to SEQ ID NO: 1752

SEQ ID NO: 15121 - protein, 696 aa, Streptococcus agalactiae
ATGACACAGTTATTACAACTTCATCATGTTACAAAGAAATATCACAAACATATTGCTGTTAATGATGTGACTGTAAGCATTCCAACAGGAAAGATTATAGGTTTATTAGGTCCAAATGGTAGCGGAAAAACAACAATCATCAAAATGATAAATGGATTACTTCAGCCAGATAAGGGAGATATTGTTATCGATGGTTACAGACCGTCTGTTGAAACCAAAAAAATTATTTCATATCTCCCTGATACTTCATATTTACAAGAAAATATGAAAATCAAAGACGTCGTTACATTATTTGAAGATTTCTATAACGATTTTAATTCAAAGGTAGCTTATCAACTATTTGAGGATCTTAACCTAAATCCTAAGGAACGTCTAAAAAACCTATCAAAAGGGAACAAGGAGAAAGTTCAACTAATACTTGTTATGAGTCGTAAAGCTAGGCTCTACATCCTTGATGAACCTATTGGTGGTGTAGACCCTGCAGCGCGTGACTACATTTTAAAAACAATCATTAGCAACTACTCTAATGATGCTTCTGTTTTAATTTCGACTCACTTAATTTCTGACATTGAACCTATCCTTGATGAAGTTATCTTCCTTAAAGAAGGAGAAATTGACCTACAAGGCAATGCTGATGACTTAAGAGAAGAGCACAACTGTTCGATTGATGCTCTCTTTCGTGAAAGATTCAAGAAA

SEQ ID NO: 15122 - protein, 232 aa, Streptococcus agalactiae
MTQLLQLHHVTKKYHKHIAVNDVTVSIPTGKIIGLLGPNGSGKTTIIKMINGLLQPDKGDIVIDGYRPSVETKKIISYLPDTSYLQENMKIKDVVTLFEDFYNDFNSKVAYQLFEDLNLNPKERLKNLSKGNKEKVQLILVMSRKARLYILDEPIGGVDPAARDYILKTIISNYSNDASVLISTHLISDIEPILDEVIFLKEGEIDLQGNADDLREEHNCSIDALFRERFKK

SEQ ID NO: 15123 - protein, 366 aa, Streptococcus agalactiae; identical to SEQ ID NO: 6245

SEQ ID NO: 15124 - protein, 122 aa, Streptococcus agalactiae; identical to SEQ ID NO: 6246

SEQ ID NO: 15125 - protein, 3102 aa, Streptococcus agalactiae
ATGTTTGCACAACTTGATACAAGAACCGTTTATTCTTTTATGGATAGCTTGGTTGATTTAAAGACATATGTCTCTAAATCGAAATCATTAGGATATCAAACTATTGGTATCTTGGACCACAGTAATCTTTATGCAGCATATCATTTTATTCAAGAGGCGCAAAAGGCAAACCTAAGACCAATAGTTGGATTTAGCTTTGATATAGTGGTTGAAAATAGATCAATAGAAGTTTACTGTATTGCGATAAATACAGTTGGTTATAAGAATCTCTTGAAGTTGTCAACGGCTCAAATGTCTGAGAAGATGTCTCTAAATTTATTGACAGAACATCTTGAAGGGGTGCAATTGATTCTTCCCTATCAAGATGCTCTTGATCAGCTCAATTTACCCTTTGATTATGTTATTGGTGTTAATTTGACCTCTCCGCAGATTCCATATACCAAACCTATTATAGCCATAGATACTGTTCGATATTTTCAAAAAAATGATATTGAGACATTACAGATGCTTCATGCTATAAGAGATAATGTCCTGTTAAAAGATGCACAATATGCGAGCAAAAATCAAGAATTAAAACCTTGTCAAGAAATGACTCTAGCATTCAAGAAACGTTTTCCTGAAGCTTTAGCTAACCTAGAATCTTTGGTAGAGAATGTTGTTTATCACTTTGATTCTGACTTTAAGTTACCTATTTTTAATAGAGAAATTCCTGCTGGAGAAGAATTAAGAACCTTAACTCAAAATAACTTAAAAAGTAAAGGTTTATGGAGCGATGCTTATCAAGAGCGTCTCGAAAAAGAATTAACAATCATTCACAAAATGGGCTTTGATGACTATTTCCTTATTGTGTGGGATTTATTAAGATTTGGTCGTAGTAAGGGCTACTATATGGGAATGGGACGTGGTTCAGCAGCGGGAAGTTTAGTCTCATATGCTTTAAATATTACCGGTATCGATCCTGTCAAACATAATTTAATTTTTGAACGTTTTTTAAATGAAGAGCGTTATTCGATGCCAGATATTGATATTGATCTTCCGGATATTTATCGTGGAGAATTCTTGCGCTATGTACGTAATCGATATGGTTCAATGCATTCTGCACAGATTGTAACCTTCTCAACTTTTGGTGCGAAACAGGCTATTCGAGATGTTTTTAAACGCTTTGGTGCATCAGAGTATGAGTTAACAAACATAACTAAAAAAATTCATTTCAGAGATAATTTGACCAGTGTTTATAACCGCAACTTAGCTTTCAGACAAATAATAGATAGTAAAATTGAATACCAAAAAGCCTATGATATTGCTAAGCGTATTGAAGGAAATCCTAGACAGACTTCTATTCATGCCGCTGGGGTAGTAATGAGTGACGATTTGTTAACAGATCATATTCCTTTAAAAAACGGTGAGGATATGATGATAACGCAATATGATGCTAGTTCTGTTGAGGCTAATGGTCTTCTAAAAATGGACTTTCTAGGTCTTCGAAATTTGACATTTGTTCAGAAAATGAAGGAGAAAGTCGATAAGGACTACGGTATCTCTATACAATTAGAAGCTATTGATTTAGAAGATAAAGAGACTCTAAAACTATTTGCGGCTGGTCAAACAAAGGGGATTTTTCAATTTGAGCAAAGTGGAGCTATTAATTTGTTGCGACGTATTAGGCCAGAGTGTTTTGAAGATGTGGTAGCTACTACCAGCTTGAATAGGCCTGGTGCAAGTGATTATACTGAGAATTTTATAAACCGTCGTTTTGGTAAAGAAAAAATCGATTTAGTAGATCCTGTCATAGCTCCAATTTTACAACCTACCTATGGCATAATGCTCTATCAAGAACAGGTTATGCAGATTGCCCAGACCTACGCAGGTTTTACGCTAGGCAAGTCTGATTTGCTCAGACGTGCTATGTCTAAGAAAAATTCTAAGGAGATGCAAAAGATGTCTCAATCCTTCTTAGAGGGTGCAGTATCTAAGGGACATCGTCAAGAAGATGCTCGACTTATATTTGAACGCATGGCTAAATTTGCAGGTTATGGGTTTAATCGCAGCCATGCCTTTGCTTATTCGGCTTTAGCTTTTCAATTAGCCTATTTCAAAGCCCATTATTCCGATGTCTTTTATGACATCATGATAAATTATTCAAATAGTGATTATCTAATCGATGCTATTGATTTTGGTTTTGTTATTGAAAAACCTTCAATTAATACTATTTCATACAGAGACCGCATCTATAAAAAGAAAATTTATTTAGGTTTAAAAAATATTAAGGCTGTTCCTAACGACTTGGCTTATTGGATTTCTAAAAATCAACCATTTCAGAGTATTGAAGATTTTCTAATGAGACTGCCACAGCAGTTTCAAAAAAGTGGTTTTATTTCTCCGCTAATTGCTATTGGAGCATTTGACGAATTTGATAACAATAGACGGAAAATCACCTCTAATCTTGATTCTTTATTTACATTTGTAAATGAACTAGGTAGTTTATTTGCAGATACCTCATATCATTGGTTAGAAGTAGAAGATTTCTCTAATTCTGAGAAATATGAAATGGAACAAGATATCTTAGGAGTAGGAATCAGTCCGCACCCTTTAGTGGGGATTTCACAAAAAGCTAGCCGTCCGTTTATACCAATTAGTCAAGTCCAAGAAAATAGCGAAGCTACTATTTTAGTTCAGCTAAAGCAGGTCAAAATCATTAGGACAAAAAGTTCTGGACAACAAATGGCTTTCTTGACTGTTATGGATATTAATTCAAAAATGGATATTACTGTTTTTCCTGAAACTTTCAATATTGTAAGAGATGATTTACAAGAAGGGAAATATTATTACTTGCATGGAAAAATTCAGAAGCGAGATGAGCGATTACAGATGGTTTTAAACGGTGTTCAAGAAGCAACGGAGGAACGTTTTTGGATACTTCTAAAAAATCATGATAACGACAAAAAAATATCGGAAATATTGTCCAAATATAAAGGGCATATTCCTGTCTATTTGCATTATGAAACAACTAAAGAAACTATCCAAAGCAAAGTACATTTGGTTAGAAAAGATAGTGGCTTAGCCCTTGATTTATCTGAATTTGTTGTGAAAACGGTTTATCAA

SEQ ID NO: 15126 - protein, 1034 aa, Streptococcus agalactiae
MFAQLDTRTVYSFMDSLVDLKTYVSKSKSLGYQTIGILDHSNLYAAYHFIQEAQKANLRPIVGFSFDIVVENRSIEVYCIAINTVGYKNLLKLSTAQMSEKMSLNLLTEHLEGVQLILPYQDALDQLNLPFDYVIGVNLTSPQIPYTKPIIAIDTVRYFQKNDIETLQMLHAIRDNVLLKDAQYASKNQELKPCQEMTLAFKKRFPEALANLESLVENVVYHFDSDFKLPIFNREIPAGEELRTLTQNNLKSKGLWSDAYQERLEKELTIIHKMGFDDYFLIVWDLLRFGRSKGYYMGMGRGSAAGSLVSYALNITGIDPVKHNLIFERFLNEERYSMPDIDIDLPDIYRGEFLRYVRNRYGSMHSAQIVTFSTFGAKQAIRDVFKRFGASEYELTNITKKIHFRDNLTSVYNRNLAFRQIIDSKIEYQKAYDIAKRIEGNPRQTSIHAAGVVMSDDLLTDHIPLKNGEDMMITQYDASSVEANGLLKMDFLGLRNLTFVQKMKEKVDKDYGISIQLEAIDLEDKETLKLFAAGQTKGIFQFEQSGAINLLRRIRPECFEDVVATTSLNRPGASDYTENFINRRFGKEKIDLVDPVIAPILQPTYGIMLYQEQVMQIAQTYAGFTLGKSDLLRRAMSKKNSKEMQKMSQSFLEGAVSKGHRQEDARLIFERMAKFAGYGFNRSHAFAYSALAFQLAYFKAHYSDVFYDIMINYSNSDYLIDAIDFGFVIEKPSINTISYRDRIYKKKIYLGLKNIKAVPNDLAYWISKNQPFQSIEDFLMRLPQQFQKSGFISPLIAIGAFDEFDNNRRKITSNLDSLFTFVNELGSLFADTSYHWLEVEDFSNSEKYEMEQDILGVGISPHPLVGISQKASRPFIPISQVQENSEATILVQLKQVKIIRTKSSGQQMAFLTVMDINSKMDITVFPETFNIVRDDLQEGKYYYLHGKIQKRDERLQMVLNGVQEATEERFWILLKNHDNDKKISEILSKYKGHIPVYLHYETTKETIQSKVHLVRKDSGLALDLSEFVVKTVYQ

SEQ ID NO: 15127 - protein, 1020 aa, Streptococcus agalactiae
ATGAAACGTATTGCTGTTTTAACTAGTGGTGGTGACGCCCCTGGTATGAACGCTGCTATCCGTGCAGTTGTTCGTAAAGCAATTTCTGAAGGTATGGAAGTTTACGGCATCAACCAAGGTTACTATGGTATGGTGACAGGGGATATTTTCCCTTTGGATGCTAATTCTGTTGGGGATACTATCAACCGTGGAGGAACGTTTTTACGTTCAGCCCGTTATCCTGAATTTGCTGAACTTGAAGGTCAGCTTAAAGGGATTGAACAGCTTAAAAAACACGGTATTGAAGGTGTAGTAGTTATCGGTGGTGATGGTTCTTATCATGGTGCTATGCGTCTAACTGAGCACGGTTTCCCAGCTGTTGGTTTGCCGGGTACAATTGATAACGATATCGTTGGCACTGACTATACTATTGGTTTTGACACAGCAGTTGCGACAGCAGTTGAGAATCTTGACCGTCTTCGTGATACATCAGCAAGTCATAACCGTACTTTTGTTGTTGAGGTTATGGGAAGAAATGCAGGAGATATCGCTCTTTGGTCAGGTATCGCTGCAGGTGCAGATCAAATTATTGTTCCTGAAGAAGAGTTCAATATTGATGAAGTTGTCTCAAATGTTAGAGCTGGCTATGCAGCTGGTAAACATCACCAAATCATCGTTCTTGCAGAAGGTGTTATGAGTGGTGATGAGTTTGCAAAAACAATGAAAGCAGCAGGAGACGATAGCGATCTTCGTGTGACGAATTTAGGACATCTGCTCCGTGGTGGTAGTCCGACGGCTCGTGATCGTGTCTTAGCATCTCGTATGGGAGCGTACGCTGTTCAATTGTTGAAAGAAGGTCGTGGTGGTTTAGCCGTTGGTGTCCACAACGAAGAAATGGTTGAAAGTCCAATTTTAGGTTTAGCAGAAGAAGGTGCTTTGTTCAGCTTGACTGATGAAGGAAAAATCGTTGTTAATAATCCGCATGAAGCGGATCTTCGCTTGGCAGCACTTAATCGTGACCTTGCCAACCAAAGTAGTAAA

SEQ ID NO: 15128 - protein, 340 aa, Streptococcus agalactiae
MKRIAVLTSGGDAPGMNAAIRAVVRKAISEGMEVYGINQGYYGMVTGDIFPLDANSVGDTINRGGTFLRSARYPEFAELEGQLKGIEQLKKHGIEGVVVIGGDGSYHGAMRLTEHGFPAVGLPGTIDNDIVGTDYTIGFDTAVATAVENLDRLRDTSASHNRTFVVEVMGRNAGDIALWSGIAAGADQIIVPEEEFNIDEVVSNVRAGYAAGKHHQIIVLAEGVMSGDEFAKTMKAAGDDSDLRVTNLGHLLRGGSPTARDRVLASRMGAYAVQLLKEGRGGLAVGVHNEEMVESPILGLAEEGALFSLTDEGKIVVNNPHEADLRLAALNRDLANQSSK

SEQ ID NO: 15129 - protein, 1296 aa, Streptococcus agalactiae
ATGGCTACTGTTCGTAAAGCAGAAGAGATTGCAGGACAAAAAGTTGGCTTCCTCCTTGATACTAAAGGACCTGAAATTCGTACAGAACTTTTTGAAGATGGTGCAGATTTCCATTCATATACAACAGGTACAAAATTACGTGTTGCTACTAAGCAAGGTATCAAATCAACTCCAGAAGTGATTGCATTGAATGTTGCTGGTGGACTTGACATCTTTGATGACGTTGAAGTTGGTAAGCAAATCCTTGTTGATGATGGTAAACTAGGTCTTACTGTGTTTGCAAAAGATAAAGACACTCGTGAATTTGAAGTAGTTGTTGAGAATGATGGCCTTATTGGTAAACAAAAAGGTGTAAACATCCCTTATACTAAAATTCCTTTCCCAGCACTTGCAGAACGCGATAATGCTGATATCCGTTTTGGACTTGAGCAAGGACTTAACTTTATTGCTATCTCATTTGTACGTACTGCTAAAGATGTTAATGAAGTTCGTGCTATTTGTGAAGAAACTGGCAATGGACACGTTAAGTTGTTTGCTAAAATTGAAAATCAACAAGGTATCGATAATATTGATGAGATTATCGAAGCAGCAGATGGTATTATGATTGCTCGTGGTGATATGGGTATCGAAGTTCCATTTGAAATGGTTCCAGTTTACCAAAAAATGATCATTACTAAAGTTAATGCAGCTGGTAAAGCAGTTATTACAGCAACAAATATGCTTGAAACAATGACTGATAAACCACGTGCGACTCGTTCAGAAGTATCTGATGTCTTCAATGCTGTTATTGATGGTACTGATGCTACAATGCTTTCAGGTGAGTCAGCTAATGGTAAATACCCAGTTGAGTCAGTTCGTACAATGGCTACTATTGATAAAAATGCTCAAACATTACTCAATGAGTATGGTCGCTTAGACTCATCTGCATTCCCACGTAATAACAAAACTGATGTTATTGCATCTGCGGTTAAAGATGCAACACACTCAATGGATATCAAACTTGTTGTAACAATTACTGAAACAGGTAATACAGCTCGTGCCATTTCTAAATTCCGTCCAGATGCAGACATTTTGGCTGTTACATTTGATGAAAAAGTACAACGTTCATTGATGATTAACTGGGGTGTTATCCCTGTCCTTGCAGACAAACCAGCATCTACAGATGATATGTTTGAGGTTGCAGAACGTGTAGCACTTGAAGCAGGACTTGTTGAATCAGGCGATAATATCGTTATCGTTGCAGGTGTTCCTGTAGGTACAGGTGGAACTAACACAATGCGTGTTCGTACTGTTAAA

SEQ ID NO: 15130 - protein, 432 aa, Streptococcus agalactiae
MATVRKAEEIAGQKVGFLLDTKGPEIRTELFEDGADFHSYTTGTKLRVATKQGIKSTPEVIALNVAGGLDIFDDVEVGKQILVDDGKLGLTVFAKDKDTREFEVVVENDGLIGKQKGVNIPYTKIPFPALAERDNADIRFGLEQGLNFIAISFVRTAKDVNEVRAICEETGNGHVKLFAKIENQQGIDNIDEIIEAADGIMIARGDMGIEVPFEMVPVYQKMIITKVNAAGKAVITATNMLETMTDKPRATRSEVSDVFNAVIDGTDATMLSGESANGKYPVESVRTMATIDKNAQTLLNEYGRLDSSAFPRNNKTDVIASAVKDATHSMDIKLVVTITETGNTARAISKFRPDADILAVTFDEKVQRSLMINWGVIPVLADKPASTDDMFEVAERVALEAGLVESGDNIVIVAGVPVGTGGTNTMRVRTVK

SEQ ID NO: 15131 - DNA, 555 bp, Streptococcus agalactiae
atggttaaacgcgattttattagaaatattattttagcattgattgctgtattgattttgattctcttgagatattttgtttttgcaacctttaaagtacataaggatgctacaaattcttattttagcaacggagatgttgttgttgttaatcgtaataggacgcctaagtacaaagactttattgtctataaggttggaaagattttctatattagtcgtgttattggtgagccaaatcaaaaagtgagagtaatggatgatattttatatttgaatgatgttttcaaggatgagccttacattgaaaaaatgaaaaatgcttattctgaaaagaaagacggtcaaatgccctttacttccgacttctcagttgaaacattaacacgaaataaagaaagcagagttcctaagggttcttatcttgtgttaaatgataatcgacaaaataaaaatgatagtcgaaaatttggattaatcaaagagaaagatattcgtggtgttattacctttaaagtataccctctaagtgaatttggttttacagcatcagag

SEQ ID NO: 15132 - protein, 185 aa, Streptococcus agalactiae; identical to SEQ ID NO: 1764

SEQ ID NO: 15133 - DNA, 141 bp, Streptococcus agalactiae
atgtttttgtttgtcaataaaaaaattggtatagtctttttgattttctgtgataacgagataaacgctatcaaaaattctatctatcttaaaaaaatatatttcttagccattttattacataaaaagaatggtatcaaa

SEQ ID NO: 15134 - protein, 47 aa, Streptococcus agalactiae; identical to SEQ ID NO: 1766

SEQ ID NO: 15135 - DNA, 1800 bp, Streptococcus agalactiae
atgtgtggtatcgtaggtgtagttggaaatacaaatgcaacggatattttaattcaaggcttagaaaagctagagtaccgaggatatgactcagcaggtatttttgtagtaggtgataacaaaagtcaacttgtgaagtcagtcggtcgaatcgcggagcttcaggcaaaagtaggagattctgttagtggtacgacaggtatcggtcatacacgttgggcaacccatggtaaacctactgaaggaaatgcacatcctcacacttcaggatctggtcgttttgtattggtacacaatggtgttattgaaaattaccttcaaattaaagaaacttacttaacaaaacataacctcaagggtgaaactgatacagaaatagctattcatttagttgaacactttgttgaagaagataacttatcagtgcttgaagcctttaaaaaagccttacatattatagaaggatcatacgcatttgctcttattgattctcaagatgctgatacgatttacgtagctaaaaataaatcacctcttctaataggtttgggaaatggttataatatggtgtgttcagatgccatggctatgatacgtgagacaagtgaatatatggaaatccacgataaagaactcgttattgttaaaaaagatagcgttgaagttcaagattatgatggtaatgtcattgaacgtggtagctacacagcagagcttgacttatcagatattggtaaggggacttatccattctacatgcttaaagaaattgatgagcaaccaactgtgatgcgtaagttgatttcaacttatgcgaacgaatctggagatatgaatgtggattctgatattataaaatcagtccaagaagcagatcgtctttacatattggctgcaggaacgtcatatcatgctggttttgctgctaagaccatgatcgaaaaattaactgatacacctgttgaacttggagtttcttcagaatggggttacaacatgccacttttgagtaagaagccaatgtttattttacttagtcaatcgggagaaacagcagatagtagacaagttttagttaaagcaaacgaaatgggaatccctagtttaactataacaaatgtgcctggctcaacactttctcgtgaagcaacctatacgatgctcattcatgcaggacctgaaatcgctgttgcttctacaaaagcatatactgctcaagttgcaacgttagctttcttagcaaaagcggtaggagaagcaaatggtaaggcagaagcaaaagattttgatttggttcatgaattgtcaattgtagcacaatcaattgaagcgaccttatcagaaaaagatgttatctctgagaaggtagagcagttgttaatctcgacacgtaatgccttctacattggtcgtggtaacgactattatgttacaatggaggctgcactgaagctaaaagagatttcttatattcagacagaaggttttgctgcaggtgaattaaaacatggtacaatttcgttgattgaagacaatactcctgttattgctttaatatctgctgattcaactattgcagcgcatactcgtggaaatatccaagaagttgtttctcgcggagcaaatgctttgattattgtagaagaagggttggaacgtgaaggtgatgatattattgttaataaagttcacccattcttatcagccatttcaatggttattccgactcaattaattgcttactatgcttcattacaacgtggcttagatgttgataaaccacgtaattggcaaaagctg

SEQ ID NO: 15136 - protein, 600 aa, Streptococcus agalactiae
MCGIVGVVGNTNATDILIQGLEKLEYRGYDSAGIFVVGDNKSQLVKSVGRIAELQAKVGDSVSGTTGIGHTRWATHGKPTEGNAHPHTSGSGRFVLVHNGVIENYLQIKETYLTKHNLKGETDTEIAIHLVEHFVEEDNLSVLEAFKKALHIIEGSYAFALIDSQDADTIYVAKNKSPLLIGLGNGYNMVCSDAMAMIRETSEYMEIHDKELVIVKKDSVEVQDYDGNVIERGSYTAELDLSDIGKGTYPFYMLKEIDEQPTVMRKLISTYANESGDMNVDSDIIKSVQEADRLYILAAGTSYHAGFAAKTMIEKLTDTPVELGVSSEWGYNMPLLSKKPMFILLSQSGETADSRQVLVKANEMGIPSLTITNVPGSTLSREATYTMLIHAGPEIAVASTKAYTAQVATLAFLAKAVGEANGKAEAKDFDLVHELSIVAQSIEATLSEKDVISEKVEQLLISTRNAFYIGRGNDYYVTMEAALKLKEISYIQTEGFAAGELKHGTISLIEDNTPVIALISADSTIAAHTRGNIQEVVSRGANALIIVEEGLEREGDDIIVNKVHPFLSAISMVIPTQLIAYYASLQRGLDVDKPRNWQKL

SEQ ID NO: 15137 - DNA, 111 bp, Streptococcus agalactiae
  misc_feature 102, 103, 104, 105, 106: n = A,T,C or G
atgtcattaccaaattgccctaagtgtaactctgaatatgtctatgaagacggtattttactggtttgtccagaatgtgcttacgagtggaatccagaagannnnnttaat

SEQ ID NO: 15138 - protein, 37 aa, Streptococcus agalactiae
  VARIANT 34, 35, 36: Xaa = Any Amino Acid
MSLPNCPKCNSEYVYEDGILLVCPECAYEWNPEXXXN

SEQ ID NO: 15139 - DNA, 888 bp, Streptococcus agalactiae
ttgacaggggaatcaaatcctatttataaagatagcaatgttgaaaactaccagtctaaaacattgattgaatgtgataatatggttttcgcaggaacgacagtctccagtggtagcgcaacaatggttgttacggcaattggaatgcaaacccaatttggtcaaatcgctgatttaacacaagggatgaaatcagaaaaaagccctcttcaaagagaacttgatcggttgaccaaacagatttctatcatttcaattactgtaggaattatctttttcttagcagcgactttttttgttaaggagccagtgtcaaaatcatttatctttgccttggggatgatcgttgcatttatcccagaaggtttactacctaccgttacactttctctagctatggcagtccaacgaatggctaaagaacacgcacttgtcaaaaaactttcttcagttgagactcttggagcaacctcagttatctgttctgataagactggtacattaacgcaaaatgaaatgaccgtcaatcatttgtggcaaaatggaaagagttaccaagtgacaggactgggttatgctccagaaggacagattctttttgaaggtgacaatatttgctttggtaatagtgatagaggagacttagaaaaacttattcgttttgctcatctctgtagcaacgctcaagtattaccaccaaatgatgatcgttcaacttatactgtacttggagatccgacagaagcttgtttgaatgttttattggaaaaatcagggataaacatacaagaaaatcgtaagtttgcaccacgtttgaaagagttaccttttgattcggttagaaaacgcatgacaactattcatagcttaggaggcgatgaaaaggat

SEQ ID NO: 15140 - protein, 296 aa, Streptococcus agalactiae
MTGESNPIYKDSNVENYQSKTLIECDNMVFAGTTVSSGSATMVVTAIGMQTQFGQIADLTQGMKSEKSPLQRELDRLTKQISIISITVGIIFFLAATFFVKEPVSKSFIFALGMIVAFIPEGLLPTVTLSLAMAVQRMAKEHALVKKLSSVETLGATSVICSDKTGTLTQNEMTVNHLWQNGKSYQVTGLGYAPEGQILFEGDNICFGNSDRGDLEKLIRFAHLCSNAQVLPPNDDRSTYTVLGDPTEACLNVLLEKSGINIQENRKFAPRLKELPFDSVRKRMTTIHSLGGDEKD

SEQ ID NO: 15141 - protein, 639 aa, Streptococcus agalactiae
ATGTCTTATATTTTAGAAATCTTACCTAGCTTATTAGTAGGTGCGCAAGTGACATTGCAAGTTTTCTTTATTGTTATTTGTTTATCAATTCCACTTGGTATTGTTGTAGCCTTCCTAATGAAAGTTCATTTTAAGCCGCTTCAATGGCTACTGACAACTTATATTTGGATTATGCGAGGCACGCCTCTGTTATTACAGCTTATCTTTTTTTATTACTTTTTACCAAGTGTAGGAATTTCTTTTGATCGTATGCCAGCTGCGATTATTGCTTTTACGATGAATTATGCAGCTTATTTTGCAGAGATTTTTCGAGGAGGTATTGAGTCTATTCCTAAAGGGCAATATGAAGCTGCAAAGGTATTAAAGTTTTCTAAGTTTCAAACGGTTTGGTACATAGTATTACCTCAAGTCTTCAAAATAGTCTTACCGAGTGTTTTCAATGAAACGATTACTCTAGTGAAAGATTCCTCATTGGTTTACATACTTGGTGTGGGCGACTTACTTCTAGAAAGTAAGACAGCCGCAAATAGGGATGCAACACTTGCACCAATGTTTATAGCAGGTGGTATTTACCTATTATTAATTGGTCTTTTAACTATTTTATCTAAACAAGTTGAAAAGCGTTTTAACTACTATAAA

SEQ ID NO: 15142 - protein, 213 aa, Streptococcus agalactiae; identical to SEQ ID NO: 1772

SEQ ID NO: 15143 - protein, 627 aa, Streptococcus agalactiae; identical to SEQ ID NO: 10645

SEQ ID NO: 15144 - protein, 209 aa, Streptococcus agalactiae; identical to SEQ ID NO: 1774

SEQ ID NO: 15145 - protein, 903 aa, Streptococcus agalactiae
ATGATCTTCAATTTGCTGAAAGTATATCTGATACGATTCTCAAAATTAATCCTAAGTAGACTTGGGGGTAGATTGTTGACTCACAAAAATATATTATTAACCATTATATTTGGATTATTTATGATTATATTATCAGCATGTGGTATGTCTAATAAGGAAATGGCTGGTATTGATAATTGGGAACATTATCAAAAGGAAAAGAAAATTACTATTGGATTTGATAATACTTTTGTTCCTATGGGATTTGAAAGTCGTTCTGGTGACTATACCGGCTTTGATATTGATTTAGCTAATGCTGTTTTTAAAGAATACGGTATTTCAGTGAAATGGCAGCCTATTAACTGGGATATGAAAGAAACTGAACTTAATAATGGTAATATAGACCTTATTTGGAATGGTTATTCAAAAACGGCAGAACGTGCTAAAAAAGTCGCTTTTACAAACCCATATATGAATAATCATCAAGTAATTGTTACTAAAACTTCATCACATATTAATAGTATTAAGGATATGAAGGGGAAAAAACTAGGAGCCCAGTCGGGTTCATCTGGTTTTGATGCTTTTAACGCTAAACCTGATATTTTAAAAAAGTTTGTAAAAGGAAAAGAAGCAGTTCAATACGATACTTTCACTCAGGCTTTGATTGATTTAAAAAATAACCGTATTGATGGTCTTTTGATTGATGAAGTTTATGCTAACTATTATTTAAAGCAAGAAGGAAATATAAAAGCTTATTATTTTGTTAAAACTGCTTATCAAGGAGAAAATTTTGTAGTAGGAGCTCGTAAAGTTGATCGTAGACTAATTGAAAAGATTAACAAAGCTTTCAAACAGCTTCATAATAAGGGGAGATTTCAAAAAATCTCTTACAAATGGTTTGGTGAAGATGTTTATAGTAAAGAA

SEQ ID NO: 15146 - protein, 301 aa, Streptococcus agalactiae; identical to SEQ ID NO: 1776

SEQ ID NO: 15147 - protein, 240 aa, Streptococcus agalactiae; identical to SEQ ID NO: 6267

SEQ ID NO: 15148 - protein, 80 aa, Streptococcus agalactiae; identical to SEQ ID NO: 1778

SEQ ID NO: 15149 - protein, 918 aa, Streptococcus agalactiae
ATGAATAATGAATTTATTAATTTCGACCGTATTTCCAGAGAAAATTGGAAGGACTTACATCAGCAATCCCAAGCTTTACTAACTGAAAAAGAGCTTGAATCTATCAAAAGCTTAAACGATAATATTAATATTCAAGATGTTATTGACATCTACCTTCCTTTAATTAACCTTATTCAAATCTATAAACGTAGTCAAGAAAATTTATCTTTTTCTAAAGCAATATTTCTTAAAAAGGAAAATTATCAACGTCCTTTTATTATCGGCATATCAGGGTCAGTTGCTGTTGGAAAATCAACTACCAGTCGCTTACTACAATTACTAATTTCACGAACTTTTAAAGATAGTCACGTCGAATTAGTCACTACTGATGGCTTTTTATATCCTAACGAGAAACTCATACAAAATGGAATTTTAAACCGTAAAGGTTTCCCGGAATCCTATGATATGGAGTCACTTCTAAATTTCTTAGATACTATAAAGAACGGTATAACCGCGAAAATCCCAATTTATTCTCATGAAATCTACGATATCGTTCCAAATCAATTGCAAACTATTGAAACACCAGATTTTTTAATTTTAGAAGGAATAAATGTCTTTCAAAACCAACAAAACCATCGACTTTACATGAATGATTATTTTGATTTTTCAATATACATTGATGCTGAAAATAAACAAATTGAAGAATGGTATTTACAACGATTTAACAGTCTTCTACAATTAGCCGAAGCAGACCCTAGTAATTACTATCATAAATTCACACAAATACCGCCACATAAAGCTATGGAACTAGCTAAAGATATTTGGAAAACTATTAATTTAGTCAACCTTGAAAAATATATAGAACCAACCAGAAATAGGGCTGATTTTATTATTCATAAAGGGAAACATCATAAAATTGATGAAATTTATCTCAAAAAG

SEQ ID NO: 15150 - protein, 306 aa, Streptococcus agalactiae; identical to SEQ ID NO: 6270

SEQ ID NO: 15151 - DNA, 468 bp, Streptococcus agalactiae
atgatagattatggtagtcaagtccttctaaatagtttacattttgaaaaaaataaatccttgttagaccttgggtgtggatacggtccgctgggaatttctctagccaaagtgcaaggagttaaagcaactatggttgacattaatacgagagcattggaattagctaagaaaaatgcaacacgcaatggagtagtagttgaagtctttcagtcaaacatttatgaaaatatttctaaaactttcgactatattataagcaacccacctattcgtgctggaaagcaagttgttcattctattatcgaagaaagtatctgttaccttaatacaggcggtagccttaccattgtcattcaaaagaaacaaggcgctccaagtgcaaaagctaaaatgctagatacttttggtaattgcgatattttaaaaaaagataagggatattatatattgagaagtgaaaaagtc

SEQ ID NO: 15152 - protein, 156 aa, Streptococcus agalactiae
MIDYGSQVLLNSLHFEKNKSLLDLGCGYGPLGISLAKVQGVKATMVDINTRALELAKKNATRNGVVVEVFQSNIYENISKTFDYIISNPPIRAGKQVVHSIIEESICYLNTGGSLTIVIQKKQGAPSAKAKMLDTFGNCDILKKDKGYYILRSEKV

SEQ ID NO: 15153 - DNA, 414 bp, Streptococcus agalactiae
atgaagcgaaaggtgcagctactaaaaatgggaaatatagagttgaaaaaattggctgtaaaagcgagtgaaaatgcatacgttccttactcgaaatttccagtaggcgcagcattgcgtacagcagaaggaaaaatatttacaggatgtaacgttgaaaatatcagttatggattagcaaactgtgctgagcgtactgcaatttttaaagctgtttcagaaggttataaagatttttcggaaattgctatttatggaaatactgaagaaccaatttctccttgcggtgcatgccgtcaagtgatggtggaattttttaataagaatgctaaagttacattgattgctaaaaatggtaagacggtcgagacgacggtcggtgagttgttaccatactcgtttgttgatttaaaa

SEQ ID NO: 15154 - protein, 138 aa, Streptococcus agalactiae; identical to SEQ ID NO: 6274

SEQ ID NO: 15155 - DNA, 1047 bp, Streptococcus agalactiae
atgaacaaaaaaatttccgggatcggcttggcttcgattgcagtacttagtttagctgcatgtggacatcgtggtgcttctaaatctggtggtaaatcagatagcttgaaggttgcaatggtaacagataccggtggtgttgatgataaatcatttaaccaatctggttgggaaggtatgcaagcttggggcaagaagaatggccttaaaaaaggagctggttttgactatttccaatcggcaagtgaatctgattatgcaactaacttagatacagctgtgtctagtggttataaattgattttcggtattggattttctcttcatgatgctattgataaagcagcagacaataacaaagatgttaattacgtcatcgttgatgatgttattaaagggaaagataatgttgcaagtgttgtctttgcggataatgaatcagcttacttagcaggtattgcagccgctaaaactaccaaaacaaaaacagttggctttgtaggtggtatggaatctgaggttattacccgttttgaaaaaggttttgaagcaggtgtcaaatcagttgataaatcaattaaaattaaagttgactatgctggttcattcggtgatgctgctaagggtaagacaattgcagccgcacaatatgcttctggcgcagatattgtttatcaagtagctggtggaactggtgcaggtgtattcagtgaagcaaaatcacgcaatgaatctttaaaagaagctgacaaagtttgggtattaggtgtagaccgtgaccaagcagcagaaggtaagtatacttctaaagatggtaaggcttctaactttgttttggcttcatcaattaaagaagttggaaaatcagttgaattgattgctactaaaacaagtaaaggtaaattcccaggtggtaatgtaacaacttatggtttgaaggatggtggagttgatatagcaactacaaacctttcagatgacgccgttaaagcgattaaagaggctaaagctaaaattatttcaggagatatcaaagttcctagcaaa

SEQ ID NO: 15156 - protein, 349 aa, Streptococcus agalactiae
MNKKISGIGLASIAVLSLAACGHRGASKSGGKSDSLKVAMVTDTGGVDDKSFNQSGWEGMQAWGKKNGLKKGAGFDYFQSASESDYATNLDTAVSSGYKLIFGIGFSLHDAIDKAADNNKDVNYVIVDDVIKGKDNVASVVFADNESAYLAGIAAAKTTKTKTVGFVGGMESEVITRFEKGFEAGVKSVDKSIKIKVDYAGSFGDAAKGKTIAAAQYASGADIVYQVAGGTGAGVFSEAKSRNESLKEADKVWVLGVDRDQAAEGKYTSKDGKASNFVLASSIKEVGKSVELIATKTSKGKFPGGNVTTYGLKDGGVDIATTNLSDDAVKAIKEAKAKIISGDIKVPSK

SEQ ID NO: 15157 - DNA, 1533 bp, Streptococcus agalactiae
atgacacagaatgtcattgaaatgaaagaaatcactaagaaattcggtgattttgtggcaaatgatcatatcaatttgacggttgaaaaaggtgagatacatgctctgcttggcgaaaacggtgcagggaaatcaactttaatgaacatgttagcaggtttactagaaccaacagacggtcaaatttttattaatggtcagcctgtaactattgattcaccttccaaatcgtcacaattggggattggtatggtacatcagcatttcatgcttgttgaagcatttactgtagctgaaaatattgttctaggaaatgaaaccacccaaaatggtgttttagacattaagacagcagctaaagaaataaaggaactatcagagaaatatggtttgtcagtaaatccaaatgctaaaatatctgatatttctgtaggagcacagcagcgtgttgaaattttgaagacactttatcgcggtgcagatattttaatttttgatgagccgacggcggtgcttacaccatcagaaataaaagaattgatgacaattatgaagagccttgttaaagaaggcaaatccattatactaattacccataaattggatgaaattcgggcagttgctgataaagttactgtgattcgccgtggtaaaagtattgaaacagtccctgttgcaggcgcaagttctcaacaactggcggaaatgatggttggacgatctgtttccttcagaactgaaaaaaaggaagctaatccgactgacataatcctttctgtaaaggatttagttgtagaagaaaatagaggcggcgttctagctgttaaaaatctgtcgttagatgttcgagcaggtgaaattgtaggtatagctggtattgatggtaatggacaaagtgaattaattcaagctattacaggtttaagaaaggtaacttctggtcaaattgtaattaaaggtaaagatgtcacaaaattttcaagtcgacaaattacagaattaagtgtaggtcatgttccagaagatcgtcatagagatggtttggttctagatatgacgatggcagaaaatttagctttacaaacttattataaagagccattgagtcataaaggtatccttaattttgctaaaattaaagagtatgctcgtcaattaatgacagaatttgatgtgcgtggtgctggtgaacatgttttagcaagaggattttctggtggtaaccaacaaaaagctattattgctcgtgaagtggatcgcgatccagacctactcattgttagccaaccgactcgtggtctagatgttggtgctatcgagtatattcataaacgtttgattgaagagcgcgataaagggaaagcggtcttagtagttagctttgagttagatgaaatcttaaacttatcagatcgtattgcagttattcatgatggtaaaattcaaggaattgttaaacccgaccaaaccaacaagcaagaattgggtattttgatggctggtggaaaaattgaaaaggaggagagagatgtc

SEQ ID NO: 15158 - protein, 511 aa, Streptococcus agalactiae; identical to SEQ ID NO: 1786

SEQ ID NO: 15159 - DNA, 1059 bp, Streptococcus agalactiae
atgtctaagaaggcgcaaaaaattgcagttcctctgatttcagttgtactaggaatcattctaggagctattattatgctgatatttggttatgatccactttggggttatgagggattgttccaaacagcattcggtagtataaaaaatattggtgaaattttccgtgcaatgggaccattaattttaattgctctaggtttctcagttgccagtcgtgcaggtttctttaatattggacttccagggcaagccttatcaggatggattgccgcaggttggttcgctctttcacacccagatatgccacgtccagcaatgattctttgtactattattattggtatcgttgctgggggaatcactggagctattccaggtattctcagagcataccttggaacaagtgaagttattgtaactattatgatgaactatattgttctttattcaggaaatgctattgtacaacgtgttttcccaaaaagcattatgcgtacaagtgactcgagtgtatatgtttctgccaatgcatcataccagacagattggttatctagtttaacgaataattcacgtatcaatattggtatcttcattgctattattgcagttgtgttagtttggttccaattaaataaaacaacgcttggatttgaaattcgttcagttggtttaaatccaaatgctagtgagtacgctggtatgtctgcaaagcgtacaattattctatcaatgattatttctggagcttttgcaggacttggtggtgttgttgaaggactaggtacatttgagaatgtatttgtacagccatcctcgttagctattggctttgacggtatggcagtaagtctactcgcagcgaatagtccaataggtattttatttgcagcatttctatttggtgttctaagtgttggtgcgcctggtatgaacattgcaggtattccacctgagttaattaaagttgtaacagcttcaatcatcttcttcgtaggtgtccattacattattgagtatgttattaaacctaaaaaacaaatgaaaggtggtaag

SEQ ID NO: 15160 - protein, 353 aa, Streptococcus agalactiae
MSKKAQKIAVPLISVVLGIILGAIIMLIFGYDPLWGYEGLFQTAFGSIKNIGEIFRAMGPLILIALGFSVASRAGFFNIGLPGQALSGWIAAGWFALSHPDMPRPAMILCTIIIGIVAGGITGAIPGILRAYLGTSEVIVTIMMNYIVLYSGNAIVQRVFPKSIMRTSDSSVYVSANASYQTDWLSSLTNNSRINIGIFIAIIAVVLVWFQLNKTTLGFEIRSVGLNPNASEYAGMSAKRTIILSMIISGAFAGLGGVVEGLGTFENVFVQPSSLAIGFDGMAVSLLAANSPIGILFAAFLFGVLSVGAPGMNIAGIPPELIKVVTASIIFFVGVHYIIEYVIKPKKQMKGGK

SEQ ID NO: 15161 - protein, 954 aa, Streptococcus agalactiae; identical to SEQ ID NO: 10663

SEQ ID NO: 15162 - protein, 318 aa, Streptococcus agalactiae; identical to SEQ ID NO: 1790

SEQ ID NO: 15163 - protein, 1367 aa, Streptococcus agalactiae
ATGAGTAAAATCGTTGTCGTAGGGACAAACCACGCTGGTACAGCAGCAATTAAAACAATGCTTAGTAATTATGGTGAAGCCAATGAAATTGTAACATTTGATCAAAATTCCAATATCTCTTTCTTAGGATGTGGTATGGCTCTTTGGATTGGTGAACAGATTGATGGTCCAGAAGGATTGTTCTACTCTGATAAAGAGCAGTTGGAAAGTATGGGAGCTAAGGTTTACATGAACTCTCCAGTACTTAATATTGACTACGATAAAAAAGAAGTTACAGCTTTAGTAGATGGAAAAGAACATGTTGAAAGTTATGAAAAACTTATTTTAGCAACTGGTTCACAACCTATCATTCCACCAATTAAAGGTGTTGAAATTCAAGAAGGATCTCGTGAATTTAAAGCTACTCTTGAAAACCTTCAATTTGTGAAACTTTATCAAAATTCAGAAGAAGTTATTGAAAAGTTAGCTAAACCTGGTATCAATCGTGTTGCTGTTGTTGGGGCTGGGTATATTGGTGTAGAATTAGCAGAAGCTTTCCAACGTATTGGAAAAGAAGTAACACTTGTTGATGTTGCTGATACTTGTATGGGTGGTTACTATGATCGTGACTTTACTGATATGATGAGTAAAAACCTTGAAGACCATGGTATTCGTCTTGCTTTCGGACAAGCTGTTCAAGCAGTTGAAGGTGATGGTAAAGTAGAACGTCTTGTTACTGATAAAGAAACATTTGATGTTGATATGGTGATCTTAGCTGTTGGATTCCGTCCAAATACAGAACTCGGTGCAGGTAAATTAGATACATTCCGTAATGGCGCTTGGGTAGTTGATAAGAAGCAAGAAACAAGCGTGAAAGATGTTTATGCTATAGGTGATTGTGCGACAATTTGGGATAATTCTCGTGATGATATCAATTATATTGCTCTTGCTTCAAACGCCGTTCGTACTGGTATTGTAGCAGCTCACAATGCATGTGGTACAGAGCTTGAAGGTGCTGGGTCCAAGGGTCAAATGGTATCTCAATCTATGGCCTTAACATGGTGTCAACTGGTTTGACTTTAGAAAAAGCAAAACAAGCTGGGTACAATGCAGTTGAAACAGGCTTTAATGACCTTCAAAAACCAGAATTTATCAAACACAATAATCATGAAGTAGCTATTAAGATTGTCTATGATAAAGATAGCCGAGTTATCCTTGGTTGCCAAATGGTCTCACACGAAGATGTATCTATGGGAATTCATATGTTCTCACTTGCTATTCAAGAAAAAGTTACTATTGAAAAGCTTGCTTTGACCGATATCTTCTTCTTACCACATTTTAATAAGCCATATAACTATATTACAATGGCTGCATTAGGCGCTAAAGAT

SEQ ID NO: 15164 - protein, 456 aa, Streptococcus agalactiae; identical to SEQ ID NO: 1792

SEQ ID NO: 15165 - protein, 648 aa, Streptococcus agalactiae
TTGAATAGGTTTCACGGTATCTTCTTAGTAGCGGCTAACCCTGTAGATGTACTTACATATTCAACTTGGAAATTCTCAGGTTTCCCTAAGGAACGCGTTATTGGTTCAGGTACTTCACTTGACTCTGCACGTTTCCGTCAAGCTTTAGCAGATAAAATTGGTGTTGATGCTCGTTCAGTTCACGCATACATCATGGGTGAACACGGTGACTCAGAATTTGCCGTTTGGTCACATGCTAACGTTGCTGGTGTCCAACTTGAACAATGGTTACAAGAAAATCGCGATATTGATGAACAAGGACTTGTTGATTTGTTTATTTCAGTTCGTGACGCTGCATACTCAATCATCAACAAAAAAGGTGCTACATATTACGGTATTGCTGTCGCACTTGCTCGTATTACTAAAGCTATCCTTGATGATGAAAATGCAGTTCTTCCATTATCTGTATATCAAGAAGGCCAATACGGTGATGTTAAAGATGTCTTTATCGGTCAGCCTGCAATCGTAGGTGCACATGGTATCGTTCGTCCAGTTAATATCCCATTAAATGATGCTGAACTTCAAAAAATGCAAGCCTCAGCTGAACAATTAAAAGATATTATTGACGAAGCTTGGAAAAACCCAGAATTCCAAGAAGCATCAAAAAAC

SEQ ID NO: 15166 - protein, 216 aa, Streptococcus agalactiae
MNRFHGIFLVAANPVDVLTYSTWKFSGFPKERVIGSGTSLDSARFRQALADKIGVDARSVHAYIMGEHGDSEFAVWSHANVAGVQLEQWLQENRDIDEQGLVDLFISVRDAAYSIINKKGATYYGIAVALARITKAILDDENAVLPLSVYQEGQYGDVKDVFIGQPAIVGAHGIVRPVNIPLNDAELQKMQASAEQLKDIIDEAWKNPEFQEASKN

SEQ ID NO: 15167 - protein, 549 aa, Streptococcus agalactiae
ATGAGTAAAATCGTTGTCGTAGGGACAAACCACGCTGGTACAGCAGCAATTAAAACAATGCTTAGTAATTATGGTGAAGCCAATGAAATTGTAACATTTGATCAAAATTCCAATATCTCTTTCTTAGGATGTGGTATGGCTCTTTGGATTGGTGAACAGATTGATGGTCCAGAAGGATTGTTCTACTCTGATAAAGAGCAGTTGGAAAGTATGGGAGCTAAGGTTTACATGAACTCTCCAGTACTTAATATTGACTACGATAAAAAAGAAGTTACAGCTTTAGTAGATGGAAAAGAACATGTTGAAAGTTATGAAAAACTTATTTTAGCAACTGGTTCACAACCTATCATTCCACCAATTAAAGGTGTTGAAATTCAAGAAGGATCTCGTGAATTTAAAGCTACTCTTGAAAACCTTCAATTTGTGAAACTTTATCAAAATTCAGAAGAAGTTATTGAAAAGTTAGCTAAACCTGGTATCAATCGTGTTGCTGTTGTTGGGGCTGGGTATATTGGTGTAGAAAAAGCAGAAGCTTTCCAACGTNNNNNT

SEQ ID NO: 15168 - protein, 183 aa, Streptococcus agalactiae
  VARIANT 182, 183: Xaa = Any Amino Acid
MSKIVVVGTNHAGTAAIKTMLSNYGEANEIVTFDQNSNISFLGCGMALWIGEQIDGPEGLFYSDKEQLESMGAKVYMNSPVLNIDYDKKEVTALVDGKEHVESYEKLILATGSQPIIPPIKGVEIQEGSREFKATLENLQFVKLYQNSEEVIEKLAKPGINRVAVVGAGYIGVEKAEAFQRXX

SEQ ID NO: 15169 - protein, 2188 aa, Streptococcus agalactiae
ATGGCACAATGGTGGTCATATCGTCATATGCTCGTTGATGGTCATGGAAACTTTGGTTCAATGGATGGGGATGGTGCTGCCGCACAGCGTTATACAGAAGCACGTATGAGTAAATTGCTCTTGAGATGCTTCGTGATATCAATAAAAATACAGTTGATTTTCAAGATAACTATGATGGCAGTGAACGTGAACCTCTTGTTTTACCAGCGCGTTTCCCTAATTTATTAGTCAATGGTGCAACTGGTATTGCTGTAGGTATGGCAACAAATATTCCACCACATAATCTAGGTGAGTCTATAGATGCTGTCAAATTGGTTATGGATAACCCTGATGTTACTACACGGGAGTTAATGGAAGTTATTCCTGGTCCAGATTTTCCTACTGGTGCCTTGGTGATGGGACGTTCAGGTATTCACCGTGCCTATGAAACTGGGAAGGGATCAATTGTCTTACGTTCACGGACTGAAATTGAAACAACTTCAAATGGGAAAGAGCGTATTGTTGTCACAGAGTTTCCATATGGCGTTAATAAAACAAAAGTACACGAGCATATTGTACGTTTAGCACAAGAAAAGCGCATTGAAGGTATTACTGCTGTTCGTGATGAATCAAGTCGTGAAGGCGTTCGTTTTGTTATTGAAGTTCGTCGTGATGCTTCAGCAAATGTGATTTTAAATAATCTTTTCAAATTAACTAGCTTGCAGACAAATTTTAGCTTCAATATGCTTGCTATTGAAAAAGGTGTTCCAAAAATTTTGTCATTACGACAAATCATTGATAACTATATTGAACACCAAAAGGAAGTTATTGTTCGTCGTACTCAGTTTGACAAAGCTAAAGCAGAAGCCCGTGCTCATATCTTAGAAGGTTTACTTGTGGCGCTTGATCACTTGGATGAAGTTATCACAATTATTCGTAATAGTGAGACAGACACCATTGCTCAAGCAGAGTTGATGTCACGTTTTGAATTATCGGAGCGTCAGAGTCAAGCTATTTTAGATATGCGTCTTCGTCGTTTAACTGGATTAGAACGCGATAAAATCCAATCAGAATACATGACTTACTAGCTTTAATTGCTGATTTAGCAGATATCTTAGCTAAGCCTGAACGTGTTGTTACCATTATAAAAGAAGAGATGGATGAGGTTAAGCGTAAGTATGCTGATGCCCGTCGTACAGAATTAATGATTGGTGAAGTTTTATCACTTGAAGATGAAGACCTTATTGAGGAAGAAGATGTTCTTATTACTCTCTCAAACAAGGGATATATCAAGCGTCTCGCTCAAGATGAGTTTAGAGCACAAAAACGTGGAGGACGCGGTATTCAAGGGACTGGAGTTAATAACGATGATTTTGTTCGTGAATTGGTTTCAACAAGTACTCACGATACTGTGCTTTTCTTTACAAATTTAGGGCGTGTGTATCGTTTGAAAGCATATGAAATTCCAGAATATGGACGTACAGCTAAAGGCCTCCCTATCGTTAACCTTTTAAAACTTGACGAAGGTGAGACAATTCAAACAATTATTAACGCTAGAAAAGAAGATGTCGCTAATAAATATTTCTTTTTCACAACTCAGCAAGGTATAGTGAAACGTACAAGTGTTTCTGAATTTAGTAACATTCGTCAAAATGGACTTCGTGCTATTAATTTGAAAGAGAATGACGAGTTGATTAACGTCCTCTTGATTGACGAAAATGAAGATGTTATTATCGGGACACGTACAGGCTACTCTGTTCGCTTCAAAGTGAACGCTGTACGTAATATGGGACGCACAGCGACTGGGGTACGAGGCGTTAATCTTCGTGAAGGTGATAAAGTTGTGGGAGCTTCTCGTATCGTTAATGGACAAGAAGTACTAATCATCACTGAAAAAGGTTATGGCAAGAGAACAGAAGCTTCGGAATATCCTACAAAAGGCCGTGGTGGTAAAGGAATAAAAACCGCTAATATTACTGCTAAAAATGGGCCATTAGCACGCTTAGTGACGATTAATGGAAATGAGGACATCATGGTCATTACAGATACAGGTGTTATTATTCGAACCAATGTTGCTAATATTTCTCAAACTGGTCGTTCTACCATGGGTGTTAAAGTGATGAGACTTGATCAAGAAGCTAAAATCGTCACTGTTGCGCTAGTGGAACAAGAAATTGAAGATAAGTCTAATATAGAGGATACAAAAGAA

SEQ ID NO: 15170 - protein, 730 aa, Streptococcus agalactiae
MAQWWSYRHMLVDGHGNFGSMDGDGAAAQRYTEARMSKIALEMLRDINKNTVDFQDNYDGSEREPLVLPARFPNLLVNGATGIAVGMATNIPPHNLGESIDAVKLVMDNPDVTTRELMEVIPGPDFPTGALVMGRSGIHRAYETGKGSIVLRSRTEIETTSNGKERIVVTEFPYGVNKTKVHEHIVRLAQEKRIEGITAVRDESSREGVRFVIEVRRDASANVILNNLFKLTSLQTNFSFNMLAIEKGVPKILSLRQIIDNYIEHQKEVIVRRTQFDKAKAEARAHILEGLLVALDHLDEVITIIRNSETDTIAQAELMSRFELSERQSQAILDMRLRRLTGLERDKIQSEYNDLLALIADLADILAKPERVVTIIKEEMDEVKRKYADARRTELMIGEVLSLEDEDLIEEEDVLITLSNKGYIKRLAQDEFRAQKRGGRGIQGTGVNNDDFVRELVSTSTHDTVLFFTNLGRVYRLKAYEIPEYGRTAKGLPIVNLLKLDEGETIQTIINARKEDVANKYFFFTTQQGIVKRTSVSEFSNIRQNGLRAINLKENDELINVLLIDENEDVIIGTRTGYSVRFKVNAVRNMGRTATGVRGVNLREGDKVVGASRIVNGQEVLIITEKGYGKRTEASEYPTKGRGGKGIKTANITAKNGPLARLVTINGNEDIMVITDTGVIIRTNVANISQTGRSTMGVKVMRLDQEAKIVTVALVEQEIEDKSNIEDTKE

SEQ ID NO: 15171 - DNA, 741 bp, Streptococcus agalactiae
atgcgtaataaaaaaaaatcacatggtttctttaactttgttagatggttattggttgtattgctaattattgttgggttggctttggtgttcaataaaccaattcgcaatgctttcatagctcatcaatcaaatcattatcaaatttcacgagttagtaaaaaaacaattgaaaaaaataagaaatctaaaacaagttatgacttttcatcagtcaaatctattagtacagaatcgattttatctgctcaaacgaaatcacataatttgcctgtaataggagggattgctataccagatgtcgaaatcaatctcccaattttcaaaggactgggcaatacagagttgagttatggtgcaggaacgatgaaagaaaaccagattatgggaggcccaaataactatgccttagctagtcaccatgtctttggtttgacaggttcttctaagatgctcttttcacctttagaacatgctaagaaaggtatgaaagtttacctcactgataaaagcaaagtatacacttacactattactgaaatttcaaaggtaacaccagaacatgttgaggttattgatgatacacctggcaagagccaactcactttagtgacctgtacggatccagaagccacagaacgtattattgtgcatgctgaattagaaaaaacaggtgaattttcaacagcagatgagtcgatattaaaagcattttcgaaaaaatataatcaaattaatctc

SEQ ID NO: 15172 - protein, 247 aa, Streptococcus agalactiae; identical to SEQ ID NO: 1798

SEQ ID NO: 15173 - DNA, 411 bp, Streptococcus agalactiae
atgaaattaaaggctgttcatcatattgcgataattgtttctgactatgaaaagtcaaaagacttctatgttaataagctaggatttgaaattattcgtgaaaaccatcgtccggagcgtcatgattataaattagatttacggtgcggtgatattgagcttgaaatatttggaaatcgtcttgatgatccagaatatgaaactcctcctcagagaataggtaggccgaattggccacgtgaagcatgtggtttacgacaccttgccttttacgttccagatgtggaagcgtacaaggtagaactggagaatttaggaatttttgtagagcctattcgttacgatgactatactggcaaaaagatgacctttttctttgatccagatggtttacctttagaattacatgaa

SEQ ID NO: 15174 - protein, 137 aa, Streptococcus agalactiae; identical to SEQ ID NO: 1800

SEQ ID NO: 15175 - DNA, 288 bp, Streptococcus agalactiae
atgagtattaaaaagctattgtttgcaggccttgcttttattttatwtaccctagcgagtccagcatatgctgcatcagatgttcagaaagttattgatgaaacttatgttcaacctgattatgtcttaggttattcgctaaatcaagaacagcgtgcacagacattacaacttctgaattatgatgaatctagagacacgaaagttaaaacgctaaatactagctcatatgctaaaataatgaatatagctgatgatgcaagcatccaattatattcatgtgtaaaa

SEQ ID NO: 15176 - protein, 96 aa, Streptococcus agalactiae
  VARIANT 16: Xaa = Any Amino Acid
MSIKKLLFAGLAFILXTLASPAYAASDVQKVIDETYVQPDYVLGYSLNQEQRAQTLQLLNYDESRDTKVKTLNTSSYAKIMNIADDASIQLYSCVK

SEQ ID NO: 15177 - DNA, 273 bp, Streptococcus agalactiae
ttgaaaaattatcatcttgataacgctgtaacggaaaatcaaataaatttaattgttaattttgcagttaatctttcacaaagtaatgtcatcaaaaatagtgatttcacgaacaccttgaataatttgaaagacaacattgtttcgaaagcaggatctaaatttaaaaatatcaatgtcaattttaatgctaataaagctgttgaatcaggtaagggatttttagctaatatttggcaacaaattgttaattttttccagcagtttggtagt

SEQ ID NO: 15178 - protein, 91 aa, Streptococcus agalactiae
LKNYHLDNAVTENQINLIVNFAVNLSQSNVIKNSDFTNTLNNLKDNIVSKAGSKFKNINVNFNANKAVESGKGFLANIWQQIVNFFQQFGS

SEQ ID NO: 15179 - DNA, 432 bp, Streptococcus agalactiae
atgagttctatcattggttcgttttttgcaggattagctattggacaaacttcttttgttgataaggtagaacataaaatttcacttcttagttacaccttctttatcccaattttcttcgcttcaattgcactacctcttaaattcgatggaatgatgtctcaccttcacacgatattaatctttactgctttggctgttttatcaaaattaattccagggtactttgtcggtcgaggctttaatttttcaaaattagaatctttaacaattggtggtggaatggtcagtcgtggcgagatggctctcattatagttcaagttggattagctgctaaaattatttcaagcactacttattccgagcttgttattgttgttatactgtcaactattattgcgccatttattcttaaatattcatttaaagat

SEQ ID NO: 15180 - protein, 144 aa, Streptococcus agalactiae
MSSIIGSFFAGLAIGQTSFVDKVEHKISLLSYTFFIPIFFASIALPLKFDGMMSHLHTILIFTALAVLSKLIPGYFVGRGFNFSKLESLTIGGGMVSRGEMALIIVQVGLAAKIISSTTYSELVIVVILSTIIAPFILKYSFKD

SEQ ID NO: 15181 - protein, 166 aa, Streptococcus agalactiae
ATGCATATTATCATTCAAATTACAATCATTTTGTTGGCAAGCGTTCTTGCAACTCTTATTTCAAAAAGAATGGAATACCGGCTGTGTTGGACAACTACTTGTAGGTATCATCATCGGACCTGCAATAATAGGACTTGTTCATCAAAATCAGGNNNNNTTAATTAAT

SEQ ID NO: 15182 - protein, 56 aa, Streptococcus agalactiae
  VARIANT 52, 53: Xaa = Any Amino Acid
MHIIIQITIILLASVLATLISKRIGIPAVVGQLLVGIIIGPAIIGLVHQNQXXLIN

SEQ ID NO: 15183 - protein, 312 aa, Streptococcus agalactiae
ATGGAATTAAAATATGTCATTCCCAATATGGAAAAAACATTTGGTCAATTAGAATATGCTGGTGAAGGGAATATTGAACAACGTCGAGTCAATGGCAGACCAACTATTCTCTCTCGTAGCTACAATTTATACTCAACGATTCAACGAGCAGATGATATTGTTGTCATTCTTCCCTCCGAAGCTGGCGAGAAACATTTTGAATCCGACGAAAAAGTCAGACTCATCAACCCACGTATTACCGCAGAAGGTTATAAAATTGGCAATAGAGGATTTACCAATTACATTATGCACGCAGACGATATGGTGAAAGCT

SEQ ID NO: 15184 - protein, 104 aa, Streptococcus agalactiae
MELKYVIPNMEKTFGQLEYAGEGNIEQRRVNGRPTILSRSYNLYSTIQRADDIVVILPSEAGEKHFESDEKVRLINPRITAEGYKIGNRGFTNYIMHADDMVKA

SEQ ID NO: 15185 - protein, 375 aa, Streptococcus agalactiae
ATGAGATTAGCAGAAGGTATTGTGATTGAAAAAGACCAGACATTTGGCACATTGAAATTTTCCGCTTTACGTCGTGAGGTTCGTATTCAAAATGAAGATGGTTCGGTTTCCGAAGAAATTAAAGAACGTACCTATGACTTAAAATCAAAAGGACAAGGACGCATGATACAAGTCAGTATCCCCGCTTCTGTTCCTTTGAAAGAATTTGACTACAACGCAGAAGTGGAATTAATCAATCCTGTGGCAGATACCGTAGCGACGGCTACTTTTCGAGGGGCAGACGTTGATTGGTACGTGAAAGCAGACGATCTTGTATTAAAAGGACAGACAAAACCTCATCAGAAATATAAAAAAGAAGCGTCCGAAAGTGAAAAA

SEQ ID NO: 15186 - protein, 125 aa, Streptococcus agalactiae
MRLAEGIVIEKDQTFGTLKFSALRREVRIQNEDGSVSEEIKERTYDLKSKGQGRMIQVSIPASVPLKEFDYNAEVELINPVADTVATATFRGADVDWYVKADDLVLKGQTKPHQKYKKEASESEK

SEQ ID NO: 15187 - protein, 771 aa, Streptococcus agalactiae
ATGACAAACACACCATTGATTTTGAAAGAAATTCCGAAAGATGAAGCCATTTCTTTTATTCGGCAATACCATTATTCAAAGATACTCCCTAGATTGTGTAAATACTTTCTAGGGATTTTTTCAGAAGAAAAATTATTAGGCGTTGTGGAATTAGGCTGGGGTACGCAACCCCTACAAACCATACGCAAACTCTTTCCCGACAGTTCCCTTCAAACCACAGATTATTTAGAAATTGGAAAGATGTGTTTTCTTCCAGAAATGAATCAAACCAATTATTTTGGCAGTCAAGCTCTTTCAGCTCTAATTAAGTGGTTGAAAGAACATACGGACTGTCATTTTTTATATACATTGGCAGATGGAATTGAGGGAAAATGTGGCTATGTCTATCAAGCGTCCAACTTCTTTTACTGCGGGTATTTCAAGACAAGTGTCTATCGTGATAAACAGTCATGGGAAAAGATACACCCTCGAAGTGCTCGCCTTTTATTAGAGGAAAATGCTCGTTTTGAACAGGTAGAGAAAAAGCATTGGCTTTCCCAGGCATTTTGCGAATACAAAGGGATTGAGAAAATCAATGGACGCATGTTTCGCTATCTCTATCCGTTGACAAAAGAAGCGAAAAAACTGTTAGGACACACGCTCTATCGACGTCATTATTATCCGAAAGAAAAAGATTTACGCTTTGAAAAGCGAATCGCTTATCGGAAATATGAAGCCATTTCTCAACCAACTTTTGATAAACAGGCTCGTATCTACAATACACAATTATTT

SEQ ID NO: 15188 - protein, 257 aa, Streptococcus agalactiae
MTNTPLILKEIPKDEAISFIRQYHYSKILPRLCKYFLGIFSEEKLLGVVELGWGTQPLQTIRKLFPDSSLQTTDYLEIGKMCFLPEMNQTNYFGSQALSALIKWLKEHTDCHFLYTLADGIEGKCGYVYQASNFFYCGYFKTSVYRDKQSWEKIHPRSARLLLEENARFEQVEKKHWLSQAFCEYKGIEKINGRMFRYLYPLTKEAKKLLGHTLYRRHYYPKEKDLRFEKRIAYRKYEAISQPTFDKQARIYNTQLF

SEQ ID NO: 15189 - protein, 90 aa, Streptococcus agalactiae
ATGATAGACCAAGTCCTTATCGTTGGCTTTGATTCGCTTTCCTCTGTCATGAAGCAATGGCATAAAAATCCTCCTTTCCATCTATCAAAA

SEQ ID NO: 15190 - protein, 30 aa, Streptococcus agalactiae
MIDQVLIVGFDSLSSVMKQWHKNPPFHLSK

SEQ ID NO: 15191 - DNA, 156 bp, Streptococcus agalactiae
atggcgtatgcagttgatagaaaaatgtatctaactgaactgtttgccaattcaccgattgtaacgttctccaatgaaaagggagtagaacgactagaaaaactatcagcaatgaaatcagcacaaaatgatagaccaagtccttatcgttggctt

SEQ ID NO: 15192 - protein, 52 aa, Streptococcus agalactiae
MAYAVDRKMYLTELFANSPIVTFSNEKGVERLEKLSAMKSAQNDRPSPYRWL

SEQ ID NO: 15193 - DNA, 1095 bp, Streptococcus agalactiae
atgattttagaaaaccattggtatgaagccgaagaaactcaatcagagggattctttaaagacttatccagcaagaaaaccaaacaacgaatccgccattttcctaaaatgtattaccgaatgaaagatggactgatccatattcatgtagaaatcactttagggaaatatcaagatcagctcttgcacttagaaaacaaactagaaacaggcttgtattgtgaattagtggaaaaaacgttgaaagattcttatgtagagtatgttctactttatgacaccattggcaatcgaattggcattgaagatgtggtagctcaagatggacgtgtcaaattgatggaatcggtctattgggagtttgattctctccctcacatgttaattgctgggggcacgggtagtggaaaatcctattttattctcacattgattgaatctctcctgcatacaaatgcgaagctttatattctcgaccctaaaaatgctgatttggcagacttaggagcggtcatagataatgtctattaccgtaaagacgatatgctggcatgtattagtcaattttacgacgatatgattgcccgtagtgaaaccatgaagcaacacccgaactacaaaacaggagaaaattatgcgtatcttggtctacctgcgaacttcctgatttttgatgaatatgtggcgatgatggatatgttaggtcgtgatagtgcacaagttatgaataaactcaaacaaattgttatgctcggacgacaagcaggcttctttttaattcttgcctgtcagcgtccagacgcaaaatattttagtgatggtattcgagataactttaacttccgtgtggctttgggtcgtatgtctgaaatgggcttcggtatgatgtttggaagcgatacacaaaaacaatttttcttaaaacccatcaagggaagaggttatgtggatacaggaaaaagtgtgattagtgagttttatacaccccttgtaccaaaaaggtatgatttcttaggagaaataggaaaagtcattcaaaaaaagcaatctgagcctgtaccgcacgaagtgaaaggtacaggttcagacttgctt

SEQ ID NO: 15194 - protein, 365 aa, Streptococcus agalactiae
MILENHWYEAEETQSEGFFKDLSSKKTKQRIRHFPKMYYRMKDGLIHIHVEITLGKYQDQLLHLENKLETGLYCELVEKTLKDSYVEYVLLYDTIGNRIGIEDVVAQDGRVKLMESVYWEFDSLPHMLIAGGTGSGKSYFILTLIESLLHTNAKLYILDPKNADLADLGAVIDNVYYRKDDMLACISQFYDDMIARSETMKQHPNYKTGENYAYLGLPANFLIFDEYVAMMDMLGRDSAQVMNKLKQIVMLGRQAGFFLILACQRPDAKYFSDGIRDNFNFRVALGRMSEMGFGMMFGSDTQKQFFLKPIKGRGYVDTGKSVISEFYTPLVPKRYDFLGEIGKVIQKKQSEPVPHEVKGTGSDLL

SEQ ID NO: 15195 - DNA, 1182 bp, Streptococcus agalactiae
atggaaaacgaaaaaatttggattaaggaattgaaagaaaagcgactggcttatggcgtttctcaaaataaactggcggttgcttctcatattaccagaccttacctatcggatattgaaacaggcaaggcagtccctactcaacaggtgaaagaagatttactgaacgctttggaacgcttcaatcccgataacccattggagatgttattcgactatgtacggattcgattccctaccaatgatgtgtctcaaattatcggtgaggttttacgcttgaatatggattatatgctacacgaagactttggctattattcttatcccgaacactatcgtttcggtgatattgttgtcctagtctctcatgatgtaagtaaaggggttttattagaactgaaaggaaaaggctgtcggcaatttgaaaactttctattggctcaacatcggagctggtatggtttctttcaagattgcatggaacataaaggtattttcaaacgcttggatttagccatcaacgataaaacagggattttgaatattccagaattggcaaagaaatgtaaacaggaagaatgtatttccgtctttcggagctttaaaaattatcgcagtggtgaattggttcaccgtgatgaaaaaccagacatgggaaacaccctttatattggctcattaaaaagcgaagtctatttctgtatatatgagaaagattatgagcaatacgtgaaaaatgatattgccttagaagacgcagaaataaagaatcgctttgaaattcgtttgaaaaacgacagagccactcaagccatgaaagatttgttggaacatcaaaatgcagaaaaaacagcgtttgagattatcaatcgttatattcgctttgccgataaggacgaaaccaagcgacggagtgattggcaaaccaatgaacgctgggaatggtttatcggcaaaaatcgtggagcattacgcctaaccatacagccagaaccttattcttttgaacgaacattgaactggttacatcatcaagtcgcccctacattaaaagtcgcaagcattttagatattctcaacggtacaaccattatttccaccatgattcatgaagccaaactgacagaaaaacatgagaaattaattgaacaacaacatctaggcatggaggatttgattaca

SEQ ID NO: 15196 - protein, 394 aa, Streptococcus agalactiae
MENEKIWIKELKEKRLAYGVSQNKLAVASHITRPYLSDIETGKAVPTQQVKEDLLNALERFNPDNPLEMLFDYVRIRFPTNDVSQIIGEVLRLNMDYMLHEDFGYYSYPEHYRFGDIVVLVSHDVSKGVLLELKGKGCRQFENFLLAQHRSWYGFFQDCMEHKGIFKRLDLAINDKTGILNIPELAKKCKQEECISVFRSFKNYRSGELVHRDEKPDMGNTLYIGSLKSEVYFCIYEKDYEQYVKNDIALEDAEIKNRFEIRLKNDRATQAMKDLLEHQNAEKTAFEIINRYIRFADKDETKRRSDWQTNERWEWFIGKNRGALRLTIQPEPYSFERTLNWLHHQVAPTLKVASILDILNGTTIISTMIHEAKLTEKHEKLIEQQHLGMEDLIT

SEQ ID NO: 15197 - DNA, 270 bp, Streptococcus agalactiae
atgagcctcttaacagaagaattaaagaagttagggtttcaagcgtatatacaaaatacagggaaatatacgtctctcattattgagggaaaacggcaagctggtgataccatctatacctatgatttttacaaagtgagcttttataagaattataccagtcgaataactgtttatggagagcatttaactccttttcaattattaaagcgtgtaaaaagctatatctactatcgagaaaaatatcttaaggaaaggaggacaatcaca

SEQ ID NO: 15198 - protein, 90 aa, Streptococcus agalactiae
MSLLTEELKKLGFQAYIQNTGKYTSLIIEGKRQAGDTIYTYDFYKVSFYKNYTSRITVYGEHLTPFQLLKRVKSYIYYREKYLKERRTIT

SEQ ID NO: 15199 - DNA, 219 bp, Streptococcus agalactiae
atgaattttgggcagaatttgtacaactggttcttggataatgcacagtcattggtattgttagcgattgtcgtcattggactgtttttaggttttaaacgagaattttcaaaacttattggctttttgattattgctttaatcgccgtcggacttgtgttcaatgcagctggcgtgaaagatgtgttattaaacttatttaaccgaatcattggtgct

SEQ ID NO: 15200 - protein, 73 aa, Streptococcus agalactiae
MNFGQNLYNWFLDNAQSLVLLAIVVIGLFLGFKREFSKLIGFLIIALIAVGLVFNAAGVKDVLLNLFNRIIGA

SEQ ID NO: 15201 - protein, 658 aa, Streptococcus agalactiae
ATGAAAATATCAGAGGTAACTTTAGATGAGACTAACGAGTTTACTTATTATAAAGGATACAAAAGGGATTGGAATACGCTTTGCACCTATCTTAAAATAAGAGCTCCTTTTGATGATTTAGACTTTTTTGAAAGTCATAAAGATTTGCTTACCCAGACAGCAAGCTCCATATATGATAAACAAGGTGATAATGTATTAGTGGATACTATTTTAGTACCACTTCCAGAGAATTACGAAGTAATTAACTTTAGTCAGTTGAAAATTAGTGATGTGATTTCACAAGCTATTGAAGACGCTGAGTCTTTCATGAGTAATGGTGAATATCAACGTGCCTTTGACAGAGTTCACACTGCTTTTCATGGATATTTAATTGAAATACTAAAAAAATATGAAATTACAGTTCCTAGAGACGAAAATCTATCTAAATTATATAGTAGGATACAACAATTAATTGAAAAAGAAATTCAACCTACTGAACTTGCTGATATAGTGAAGACAACGATAAGGTCATCAAATGGAATGATTAGCTCTCTTAATGAAGCAAGAAATAGGCATTCACTTGCACATCCTAATACAAATATTATTGGAAAGAGAGAAGCAAAACTAATAATAGGTATTAAGTACAGTTACAGATTATATTAGCGGATACCTTGATAAG

SEQ ID NO: 15202 - protein, 220 aa, Streptococcus agalactiae
MKISEVTLDETNEFTYYKGYKRDWNTLCTYLKIRAPFDDLDFFESHKDLLTQTASSIYDKQGDNVLVDTILVPLPENYEVINFSQLKISDVISQAIEDAESFMSNGEYQRAFDRVHTAFHGYLIEILKKYEITVPRDENLSKLYSRIQQLIEKEIQPTELADIVKTTIRSSNGMISSLNEARNRHSLAHPNTNIIGKREAKLIIGISSTVTDYISGYLDK

SEQ ID NO: 15203 - protein, 498 aa, Streptococcus agalactiae
TTGGAATTGAAAGTCTATGTGGCAAATTTGGGACGGTATAATGAAGGTGAATTAGTTGGATCATGGTTTACTCCACCAATTGATGAGGAAGAAATGGCAGAAAGAATCGGTTTAAATGAGAACTACGAAGAATACGCCATACATGATTTTGAGCTTCCTTTTGATGTGGACGAATACACGCCAATTAGTGAAATCAACCGTCTATGTGAAGCCATTCAAGAAATCGAAGGTACACCTATTTATAATGAACTCAAAGAAATTCAAGGCATGTGGTTTAGTAGCTTGGAAGAATTACTGGAAAACAAAGAGAATATTCATTGTTATAGTGAATGTGATTCTATGGAAGATGTCGCCCGTTATTATGTGGAAGAAACAGGACAACTTGGTGAAGTACCTTCTAATTTACAAAATTATATTGATTATCAAGCTTTGGGACGTGATATGGAAATAGAGGGAAATTATCTTATCACCTCTCATGGAGTATTTGAGTATTCTAAT

SEQ ID NO: 15204 - protein, 166 aa, Streptococcus agalactiae
MELKVYVANLGRYNEGELVGSWFTPPIDEEEMAERIGLNENYEEYAIHDFELPFDVDEYTPISEINRLCEAIQEIEGTPIYNELKEIQGMWFSSLEELLENKENIHCYSECDSMEDVARYYVEETGQLGEVPSNLQNYIDYQALGRDMEIEGNYLITSHGVFEYSN

SEQ ID NO: 15205 - protein, 90 aa, Streptococcus agalactiae
TTGTCCAATCAAAAAAAGGCATATCCTGATATTCATAGTCAAAGAATAGACATATCATATTATCAACAAGGCATTGAAGACATGACTCAA

SEQ ID NO: 15206 - protein, 30 aa, Streptococcus agalactiae
MSNQKKAYPDIHSQRIDISYYQQGIEDMTQ

SEQ ID NO: 15207 - protein, 1023 aa, Streptococcus agalactiae
TTGGTAATAATAGATGTTTATGGGAAAATAACAAAAATAAAATTGTCAGATAAATTGAAACTATATATATCTAATGTTTCTGATGACTGGAAGGAAAGCATTATAGAAGACATGTTACAAGAAATTCGACAACAAAAAGTTGACATGGCAGATAATTTGAAAAGGTATGGTAAAACATTTCAAACAGAATATTCTATATCTTATTTGAAAGAAATCGTTCACGCCAATGTTGAAGACTATACAAAATATAATTTAGATTCTATTGAGTCATGTCTTCAATGCCTTGTTGATAATATGATATGTCTATTCTTTGACTATGAATATCAGGATATGCCTTTTTTTGATTGGACAAGCAATTGCTTTGATGGTCGTTTTTGTGAAGAGGATTACGCTGAAAAAGTGATGTATTTTAGTAACTTTGTAAATCATGATATACAAAATGGTATTCATATGAACTGCATTTATACAAGTAATATGAATCCTAAAGAGCATACTAGGATATTATCAAATCTAAGTTTTAGAATTGATTCAAACTTTAAAGGGTGCAGGACTACAGACGACTACATTACGGAACTTAAAAAAATGGGCAACCGAATTGATTCTATACTAAAATCGGAAAACGATTATTACAAATTAGATTATATTATGAACGGGATATATAGTGATAATAGTTATAATCAAAATCATTATTTAAAGACTTTTACTTTGTTAGAACTTGTATTATTAAAACCAAATCAGAATACAAATGAAATTGACAAATTACTAATACCTTATCTTGATAAGAAATATGGAGAGGTTTCGAGTGAAGTAGCAAAATTATTAAGACAAATGAGAAATAAAATCGGACATGGTGATTTCAAAGGTTTTAACGAAAAAGCAGAAAAATTCGCTCAAAAATTTATGAAACACTTTCATTTTGACTATACAGAATACAGTAGATTAAATTGGGTATTACTTCATACCTGCTGTCTTTTAGATGATTTACTCAGAATAACTATTTTTCAACAATTAAAAGTCACAAAA

SEQ ID NO: 15208 - protein, 341 aa, Streptococcus agalactiae
MVIIDVYGKITKIKLSDKLKLYISNVSDDWKESIIEDMLQEIRQQKVDMADNLKRYGKTFQTEYSISYLKEIVHANVEDYTKYNLDSIESCLQCLVDNMICLFFDYEYQDMPFFDWTSNCFDGRFCEEDYAEKVMYFSNFVNHDIQNGIHMNCIYTSNMNPKEHTRILSNLSFRIDSNFKGCRTTDDYITELKKMGNRIDSILKSENDYYKLDYIMNGIYSDNSYNQNHYLKTFTLLELVLLKPNQNTNEIDKLLIPYLDKKYGEVSSEVAKLLRQMRNKIGHGDFKGFNEKAEKFAQKFMKHFHFDYTEYSRLNWVLLHTCCLLDDLLRITIFQQLKVTK

SEQ ID NO: 15209 - protein, 393 aa, Streptococcus agalactiae
ATGAAAAAAATAAGAAGTTACACCAGTATTTGGTCAGTAGAAAAAGTGATTTATGCAATTAATGATTTACAACTCCCTTTTCCCATAACCTTTACACAAATGACATGGTTTATCGTTTCTTTGTTTGTCGTTATAATCTTTGGCAGTTTACCACCACTTTCCTTGATTGACGGAGCACTACTCAAATACTTAGGGATTCCCGTTGTCCTCACTTGGTTCATGTGTCAAAAAACCTTTGACGGGAAGAAACCCTATGGATTTTTAAAATCTATTATTACCTATGCTCTACGCCCTAAAATAACCTATGCTGGCAAACAAATACGATTAAATAAAGAAAAAATGAATGAATCAATCACGATTGTAAGGAGTGAACAATTAAATGGCACACCCCAT

SEQ ID NO: 15210 - protein, 131 aa, Streptococcus agalactiae
MKKIRSYTSIWSVEKVIYAINDLQLPFPITFTQMTWFIVSLFVVIIFGSLPPLSLIDGALLKYLGIPVVLTWFMCQKTFDGKKPYGFLKSIITYALRPKITYAGKQIRLNKEKMNESITIVRSEQLNGTPH

SEQ ID NO: 15211 - protein, 2451 aa, Streptococcus agalactiae
ATGGCACACCCCATTAAATATATCGAAGATAATCTCGTATTTAATCATGATGGCGAAGTATTTGCTTATTATGAATTAATTCCCTATAATTACAGTTTTTTAAGTTCCGATGAAAAAGTTCAAGTTCATGATAATTTCCGTCAATTGATTGCCCAAAATCGTGATGGTAAGATTCATGCCCTGCAACTAGCAACCGAATCAAGTATTCGAGCGACACAGGAACAATCGAAAAAAGAAATCACTGGACGATTAAAAGAGATAGCTTACGAAAAAATAGATGAACAGACCGAAGCGTTAGTTTCTATGATTGGTGACAATCAAGTGGACTATCGCTTTTTTATTGGTTTTAAACTCTTGCTGAATGAACAGGAAGTATCGGTCAAAAATATTGGCAAAGACATTCAAAAAGCATTTGCGGAATTCTTTCATGGCGTGAATCACAAGTTGATGGGCGATTTTGTTTCTATGCCTATGTCAGAAATCGAACGCTTTTCTAAAATGGAACAGTTATTAGAAAGTAAATTATCCAGACGCTTTCACATTCGCCCATTGGGGAAAGATGATTTTGGGTATATCATTGCCCACCTTTACGGTCAAACAGGGATTCCTTTTGATGACTACGACTACCATTTACCCAAACGATATGAAGATAAAAAAGTGTTGGTAAAGAAATACGATATTATTAAACCCACTCGCTGTTTAATCGAAGAAAAGCAACGCTACTTACGGATGGAACAGGAAGATACTACCACTTATGTGGCGTATTTTACGATTAACAGTATCGTCGGCGAATTGGATTTCCCCAATAGTGAGATTTTTTATTACCAGCAACAACAGTTCACTTTCCCGATTGATACCAGCATGAATGTTGAAATTGTTGCTAATAAAAAAGCTCTGTCTACCGTTCGCAACAAAAAGAAAGAATTGAAAGACTTGGATAGTCACGCATGGGAAAGCGACAATGAAACCAGTACCAATGTGGTGGACGCTTTAGAATCTGTCGACGAATTAGAAACCAACCTAGACCAAACCAAAGAATCCATGTACAAACTAAGCTATGTGGTACGGGTATCGGCAAAAAATCTGGACGAGTTGAAACAACGTTGTGATGAAGTAAAAGATTTTTATGATGATTTGTCTATCAAATTAGTACGACCTTTTGGCGATATGCTAGGCTTGCATAATGAATTTATTCCCTCAAGCAAGCGATATATCAATGACTATATTCAATATGTCACGTCGGATTTTTTGGCTGGTCTTGGTTTCGGAGCTACACAAATGCTTGGTGAAAATTCTGGTATTTACGTCGGTTACAATCTCGATACAGGCAGAAATATTTATCTCCAACCCAGCCTTGCAAGTCAAGGAATTAAAGGCTCTGTGACGAATGCGTTAGCGTCTGCTTTTATTGGTTCATTAGGTGGCGGAAAATCATTCTCTAACAATATGCTGGTCTATTATTCGGTACTCTTTGGCGGACAGGCAATCATTGTAGACCCAAAAGCTGAACGTGGCAAATGGAAAGAAACCTTACCTGATATTGCCCATGAAATCAATATCGTTAATCTCACGAGTGAGAACGACAATAAAGGGTTACTTGACCCTTATGTGATCTTAAAACTCCCGAAAGATTCAGAAAGCCTAGCCATTGATATTCTCACGTTCTTAACAGGCATTTCCAGCCGAGATAGCGAGAAGTTTCCTGTCCTGCGTAAAGCGATTCGGAGTGTCACTCAAAGCGAACAACGAGGGTTGTTATTGGTGATTGATGAATTGCGAAAAGAAGATACACCCATCAGCAATAGTATTGCTGACCATATCGAAAGCTTTGTCGATTATGATTTTGCCCATCTGTTATTCAGTGATGGCAATGTCACCCAATCCATTAGCTTGGAAAAACAACTCAATATTATTCAAGTGGCAGATTTGGTCTTACCCGATTCCAATAGCTCTTTTGAAGAATACACCACCATGGAATTATTAAGTGTGGCAATGCTGATTGTCATTAGTACCTTTGCTTTAGACTTTATCCACTCTGACCGTTCCATTTTTAAAATTGTTGACCTTGATGAAGCTTGGAGTTTTTTACAAGTGGCACAAGGAAAAGCTCTATCTATGCGTTTAGTTCGGGCAGGGCGTGCCATGAATGCAGGGGTCTATTTCGTTACTCAAAACGCCGACGATTTACTAGATGAAAAGATGAAGAATAATATTGGCTTGAAATTCGCCTTTCGTTCCACTGACCTAGTGGAAATCAAAAAGACCTTAGAATTTTTTGGCGTGGACAAGGAAGATGAAAACAATCAGAAACGCTTACGTGAATTAGAAAATGGACAATGTTTAGTTTCAGACATCTATGGTCGTGTAGGGGTTATGCAGTTTCACCCGATTTTTGAAGAGTTGCTTCATGCCTTTGATACCAGACCGCCTGTGCGAAATGAGGGGGAAAAA

SEQ ID NO: 15212 - protein, 817 aa, Streptococcus agalactiae
MAHPIKYIEDNLVFNHDGEVFAYYELIPYNYSFLSSDEKVQVHDNFRQLIAQNRDGKIHALQLATESSIRATQEQSKKEITGRLKEIAYEKIDEQTEALVSMIGDNQVDYRFFIGFKLLLNEQEVSVKNIGKDIQKAFAEFFHGVNHKLMGDFVSMPMSEIERFSKMEQLLESKLSRRFHIRPLGKDDFGYIIAHLYGQTGIPFDDYDYHLPKRYEDKKVLVKKYDIIKPTRCLIEEKQRYLRMEQEDTTTYVAYFTINSIVGELDFPNSEIFYYQQQQFTFPIDTSMNVEIVANKKALSTVRNKKKELKDLDSHAWESDNETSTNVVDALESVDELETNLDQTKESMYKLSYVVRVSAKNLDELKQRCDEVKDFYDDLSIKLVRPFGDMLGLHNEFIPSSKRYINDYIQYVTSDFLAGLGFGATQMLGENSGIYVGYNLDTGRNIYLQPSLASQGIKGSVTNALASAFIGSLGGGKSFSNNMLVYYSVLFGGQAIIVDPKAERGKWKETLPDIAHEINIVNLTSENDNKGLLDPYVILKLPKDSESLAIDILTFLTGISSRDSEKFPVLRKAIRSVTQSEQRGLLLVIDELRKEDTPISNSIADHIESFVDYDFAHLLFSDGNVTQSISLEKQLNIIQVADLVLPDSNSSFEEYTTMELLSVAMLIVISTFALDFIHSDRSIFKIVDLDEAWSFLQVAQGKALSMRLVRAGRAMNAGVYFVTQNADDLLDEKMKNNIGLKFAFRSTDLVEIKKTLEFFGVDKEDENNQKRLRELENGQCLVSDIYGRVGVMQFHPIFEELLHAFDTRPPVRNEGEK

SEQ ID NO: 15213 - protein, 2025 aa, Streptococcus agalactiae
ATGACACAAAAACAAAAGAAATTTCTTCACTATAGTTGGATAACGCTCCTTTGTGTGGGCGTTATTTTACTTTTATTAGGCACGCTGGGCAATGCAGTACAAGCAACAGGCTTAGTTGATGAAACCATTGATACAAGCAACGAGTATTCCAAGTATGGTTTAAATCATTATCAGCTTGATTATTATGTGGACAATAGCTGGGGCTGGCTGCCGTGGAATTGGAGTGACGGCATAGGGCAATCAGTGATGTATGGACTGTATGCCATTACCAATTTCATTTGGACGATTTCTCTTTATCTTTCCAACGCCACAGGCTATTTGGTCAAAGAAGCCTACGCCTTGGATTTCATTAGTCAAACGTCTCAAGCGATTGGTGAGAACATGCAGACCATTGCAGGGATTACACCGAATGGCTTTTCCAGTTCGGGTTTTTATGTCGGCTTCCTTCTTCTTTTTATTCTGATTGTTGGAATCTACGTTGCCTATACAGGACTGGTGAAACGAGAAACGACCAAAGCTATACGAGCTGTGTTAAATTTTGTGGTGGTGTTTATTCTATCAGCTTCCTTTATTGCGTATGCTCCCGATTATATTGCGAAAATCAATGATTTTTCCAAAGATGTGAGCACTGCCAGTTTAGATATTGGGACAAAGATTGTCCTTCCCGATACGGATAGTCAAGGCAAAGACAGTGTGGATATGATACGTGATAGCCTATTTTCTGTTCAAGTCAAGCAACCGTGGTTATTACTTCAATATGGCTCAACCGATATAGAAACCTTAGGTGAAGACCGTGTGGAAAAGTTATTGGCTACCAGTCCAGATACAAACAATGGTGAAGATAGAGAAAATGTAGTGATTGAAGAAATTGAAGATCATGACAATACCTATTTAACACTCCCGAAGACCATTTCCCGATTAGGAACGGTCTTCTTTTTGTTTGTATTCAATATTGGTATCTCGATTTTTGTTTTCCTTCTAACAGGAATCATGATTTTTTCGCAAGTGCTATTTATTATTTTCGCTATGTTTTTGCCAATCAGTTTCCTATTAAGTATGTTGCCGAGTTTTGATGGCATGGGCAGGCATGCCATTACCAAGTTATTTAATGTGATTATGACAAGGGCTGGTATTACCTTGATTATTACCGTTGCCTTTAGTATTTCCACTATGCTTTATTCGCTGTCAGCAAGTTCTCCCTTTTTCATGATTATGTTTTTACAAATTGTGACCTTTGCAGGGATTTATTTTAAACTGGGCGATTTAATGAGCCTATTCTCTTTACAAAGCAACGACTCTCAAAACATGGGCAGACAAGTGTTTCGCAGACCTCGTCAAATGATGAATCGACAAACCAGAAGATTTCAACGCAGTATGAGTAAGATTTTTCGTGGAAAAGCAGGGTCAACGAAGCAAAAGACAATGACAACAAAGCAGAATCAAACCAATAAAGCTAACCATACTCGTCAAAATGAACGGACTACACCAAAGAAAGAAACAGCACTTTCCAATGTGAAAAAGCAACAAGGCGGTATCGGGCAACGATTAGGTGAAAAGACAGCCCATGTATTGGACACGAAAAATCGTCTAGTCAATAAAAGAAAGCAGGCTAAACAACAGATACAGGCGACACCAACCCATGTCAAATATGCCCTTCATCAAGGAAAAGAGAATGTCACTCATAATGTAACAGACTTTAAACAATCTATGGCAGATACCAAAGCTCAACGCAAACAACAGCGTATGAACCAGCAGGAGCAAAAACGAAAGAACATTGCTCAAAAGCGTTTGGAGCTGGATAAAGCAAAAGAAAAAAGACGAAAAGAAAACCCATCATCTCCTGTTCAGAATAACCAGCAGCATGTTCGCAAGCGTCAGCAAACCGTCACGCCTGTTTTGTCACAAAACACTAAACGTGAAAATCATCAGCGACCATTGAAAAAAGAGCAAAAACAAAAGACACCACCGAAGCAATTCAATCAGAGGAAGCTAAATAAAAGAACGGATAAGCGAGGACAACAAACA

SEQ ID NO: 15214 - protein, 675 aa, Streptococcus agalactiae
MTQKQKKFLHYSWITLLCVGVILLLLGTLGNAVQATGLVDETIDTSNEYSKYGLNHYQLDYYVDNSWGWLPWNWSDGIGQSVMYGLYAITNFIWTISLYLSNATGYLVKEAYALDFISQTSQAIGENMQTIAGITPNGFSSSGFYVGFLLLFILIVGIYVAYTGLVKRETTKAIRAVLNFVVVFILSASFIAYAPDYIAKINDFSKDVSTASLDIGTKIVLPDTDSQGKDSVDMIRDSLFSVQVKQPWLLLQYGSTDIETLGEDRVEKLLATSPDTNNGEDRENVVIEEIEDHDNTYLTLPKTISRLGTVFFLFVFNIGISIFVFLLTGIMIFSQVLFIIFAMFLPISFLLSMLPSFDGMGRHAITKLFNVIMTRAGITLIITVAFSISTMLYSLSASSPFFMIMFLQIVTFAGIYFKLGDLMSLFSLQSNDSQNMGRQVFRRPRQMMNRQTRRFQRSMSKIFRGKAGSTKQKTMTTKQNQTNKANHTRQNERTTPKKETALSNVKKQQGGIGQRLGEKTAHVLDTKNRLVNKRKQAKQQIQATPTHVKYALHQGKENVTHNVTDFKQSMADTKAQRKQQRMNQQEQKRKNIAQKRLELDKAKEKRRKENPSSPVQNNQQHVRKRQQTVTPVLSQNTKRENHQRPLKKEQKQKTPPKQFNQRKLNKRTDKRGQQT

SEQ ID NO: 15215 - protein, 1020 aa, Streptococcus agalactiae
ATGAAGCTAAAAATAACAGTGATTTGTAGTGTGGTCTTCTCTCTCTTCTTTTTTCTCTTATTATTCCTAGTCATTTTCTTTGCAGATGATACGGACAGTGGCGAAAACAACAAGGATTCTTCTATTTCACAAGGCGGTGTGACCGTTTCACCAGAAGTGTTGGCACACCGTCCGTTGATTGAAAAATATGGTAAGGAATATGGGATTGAAGACTATGTTTCTTATATCTTAGCCATTATGCAAGTGGAATCGGGCGGTACAGCAGAAGATGTTATGCAAAGTTCCGAATCTTTGGGTTTACCGCCCAACAGTTTGAGTACCGAAGAGTCCATCAAACAAGGGGTTAAATATTTCAGTGAATTATTAACCAGTGCAGAACAACAAGGAGTGGATATAGATTCTGTTATCCAATCTTATAATTATGGCGGTGGCTTTTTAAATTATGTGAGGAGTCATGGGAAAAAATATACCTATGAATTAGCCGAACAGTTTTCTAAAGAGAAGTCGGGTGGTCAAAAAGCAGACTATCCCAATCCCATAGCCATACCTGTGAATGGTGGTTGGCGATATAACTATGGAAATCAGTTTTATGTTCAGTTGGTTTCACAATACCTAACCGACACTTCCCCAACAGAATTTGATGATGAAACCGTGCAAGTCATTATGGACGAAGCCTTGAAATACGAAGGGTTTCCCTATGTCTTTGGAGGGGCGTCGCCTACCACCTCTTTTGATTGTAGTGGCTTAATACAATGGGTGTATGACAAAGCTGGCATTTCTCTCCCTCGTGTCGCCCAAGATCAGTATGACGCTACGCAAGAAATCTCTATGGAAGAAGCCCAAGCAGGCGACCTTATCTTCTTTCATTCAACCTATAATGCAGGCACATATGTGACTCATGTGGCGATATATTTAGAGGGAAATCGCTTTTATCATGCAGGCGACCCAATCGGTTATGGCGACTTAAGCAGTCGTTATTGGCAAGACCATCTGATTGGGGCTAGACGTGTTATTCATAAC

SEQ ID NO: 15216 - protein, 340 aa, Streptococcus agalactiae
MKLKITVICSVVFSLFFFLLLFLVIFFADDTDSGENNKDSSISQGGVTVSPEVLAHRPLIEKYGKEYGIEDYVSYILAIMQVESGGTAEDVMQSSESLGLPPNSLSTEESIKQGVKYFSELLTSAEQQGVDIDSVIQSYNYGGGFLNYVRSHGKKYTYELAEQFSKEKSGGQKADYPNPIAIPVNGGWRYNYGNQFYVQLVSQYLTDTSPTEFDDETVQVIMDEALKYEGFPYVFGGASPTTSFDCSGLIQWVYDKAGISLPRVAQDQYDATQEISMEEAQAGDLIFFHSTYNAGTYVTHVAIYLEGNRFYHAGDPIGYGDLSSRYWQDHLIGARRVIHN

SEQ ID NO: 15217 - protein, 846 aa, Streptococcus agalactiae
ATGATTAAAGTTGGCACGCATAAGAAATTAACCTTTGTTTTATGGGTTTTATTGATTGGTAGTGTCGGATTTGGAATCTATAAAAATTTTACTGCCATTGACACTCATACTGTCCGTGAAACAGAAATCATTAAACAGCAGATTGTCGATACCAACCAAGTAGAAAGTTTTGTGAAATCCTTTGCGAAAGACTACTTTTCGTGGCAACAATCCCAAGAAGCCATTGATAAACGAAATGAAAAATTGACCCATTATTTGACGGAAGAATTGCAGGTATTAAATGAAGAAATGATTCGTAAGGATATTCCTACTAGTTCTAGTGTGAACGATATACAGGTGTGGCAGGTTTCTCAAGTGAATGAGAACACCTTTGAGGTACTGTTTTCTGTTGAACAAGTTATTACCGAAGACAAAGACAAGGAAACTATATCGTCTAGCTTTCATGTGGTTGTCCATATAGATGAATCAGATAATATGGTTATTATCAAAAATCCGACAATGAGTAAGAAACCTCAAAAATCGGACTACCAACCCAAACAGCTAGAAAGTGACCATACAGTAGATACAGAAACGATGGACGAAATCACTAGCTTTTTAGAAACGTTCTTCCAGCTCTATCCTACCGCCACAGAAAAAGAATTGACTTACTATGTAAGTAATCATGTGTTACCTATGATTAACAAGGAATATGTTTTCGAGGAATTGGTGAATCCTATCTTTACCAGAAAAGATAACCAAGTAATCGTGAATGTCGCTGTGAAATATTTAGATCAAGAAACAAAGGCAACCCAAATCTCGCAATTTGAGTTGATATTAGAAAAACAAGATAATTGGAAGATTGTAAAA

SEQ ID NO: 15218 - protein, 282 aa, Streptococcus agalactiae
MIKVGTHKKLTFVLWVLLIGSVGFGIYKNFTAIDTHTVRETEIIKQQIVDTNQVESFVKSFAKDYFSWQQSQEAIDKRNEKLTHYLTEELQVLNEEMIRKDIPTSSSVNDIQVWQVSQVNENTFEVLFSVEQVITEDKDKETISSSFHVVVHIDESDNMVIIKNPTMSKKPQKSDYQPKQLESDHTVDTETMDEITSFLETFFQLYPTATEKELTYYVSNHVLPMINKEYVFEELVNPIFTRKDNQVIVNVAVKYLDQETKATQISQFELILEKQDNWKIVK

SEQ ID NO: 15219 - protein, 1917 aa, Streptococcus agalactiae
ATGAAAATTATTAATATTGGAGTTTTAGCTCATGTTGATGCAGGAAAAACTACCTTAACAGAAAGCTTATTATATAACAGTGGAGCGATTACAGAATTAGGAAGCGTGGACAAAGGTACAACGAGGACGGATAATACGCTTTTAGAACGTCAGAGAGGAATTACAATTCAGACAGGAATAACCTCTTTTCAGTGGGAAAATACGAAGGTGAACATCATAGACACGCCAGGACATATGGATTTCTTAGCAGAAGTATATCGTTCATTATCAGTTTTAGATGGGGCAATTCTACTGATTTCTGCAAAAGATGGCGTACAAGCACAAACTCGTATATTATTTCATGCACTTAGGAAAATGGGGATTCCCACAATCTTTTTTATCAATAAGATTGACCAAAATGGAATTGATTTATCAACGGTTTATCAGGATATTAAAGAGAAACTTTCTGCCGAAATTGTAATCAAACAGAAGGTAGAACTGTATCCTAATATGTGTGTGACGAACTTTACCGAATCTGAACAATGGGATACGGTAATAGAGGGAAACGATGACCTTTTAGAGAAATATATGTCCGGTAAATCATTAGAAGCATTGGAACTCGAACAAGAGGAAAGCATAAGATTTCAGAATTGTTCTCTGTTCCCTCTTTATCATGGAAGTGCAAAAAGTAATATAGGGATTGATAACCTTATAGAAGTTATTACTAATAAATTTTATTCATCAACACATCGAGGTCCGTCTGAACTTTGCGGAAATGTTTTCAAAATTGAATATACAAAAAAAAGACAACGTCTTGCATATATACGCCTTTATAGTGGAGTACTACATTTACGAGATTCGGTTAGAGTATCAGAAAAAGAAAAAATAAAAGTTACAGAAATGTATACTTCAATAAATGGTGAATTATGTAAGATTGATAGAGCTTATTCTGGAGAAATTGTTATTTTGCAAAATGAGTTTTTGAAGTTAAATAGTGTTCTTGGAGATACAAAACTATTGCCACAGAGAAAAAAGATTGAAAATCCGCACCCTCTACTACAAACAACTGTTGAACCGAGTAAACCTGAACAGAGAGAAATGTTGCTTGATGCCCTTTTGGAAATCTCAGATAGTGATCCGCTTCTACGATATTACGTGGATTCTACGACACATGAAATTATACTTTCTTTCTTAGGGAAAGTACAAATGGAAGTGATTAGTGCACTGTTGCAAGAAAAGTATCATGTGGAGATAGAACTAAAAGAGCCTACAGTCATTTATATGGAGAGACCGTTAAAAAATGCAGAATATACCATTCACATCGAAGTGCCGCCAAATCCTTTCTGGGCTTCCATTGGTTTATCTGTATCACCGCTTCCGTTGGGAAGTGGAATGCAGTATGAGAGCTCGGTTTCTCTTGGATACTTAAATCAATCATTTCAAAATGCAGTTATGGAAGGGATACGCTATGGTTGCGAACAAGGATTATATGGTTGGAATGTGACGGATTGTAAAATCTGTTTTAAGTACGGTTTATACTATAGCCCTGTTAGTACTCCAGCAGATTTTCGGATGCTTACTCCTATTGTACTGGAGCAAGCCTTTAGAAAAGCTGGAACAGAATTGTTAGAGCCATATCTTAGTTTTAAAGTTTATGCACCACAGGAATATCTTTCACGGGCATATAACGATGCTCCCAAATATTGTGCAAATATCGTAAATACTCAACTGAAAAATAATGAGGTCATTATTATTGGAGAAATTCCTGCTCGATGTATTCAAGATTATCGCAATGATTTAACTTTTTTTACAAATGGGCTTAGTGTTTGTTTAGCAGAGCTAAAAGGATATCAGGTTACCACTGGCGAACCTGTTTGCCAGACCCGTCGTCTAAATAGTCGGATAGATAAAGTAAGATATATGTTCAATAAAATAACT

SEQ ID NO: 15220 - protein, 639 aa, Streptococcus agalactiae
MKIINIGVLAHVDAGKTTLTESLLYNSGAITELGSVDKGTTRTDNTLLERQRGITIQTGITSFQWENTKVNIIDTPGHMDFLAEVYRSLSVLDGAILLISAKDGVQAQTRILFHALRKMGIPTIFFINKIDQNGIDLSTVYQDIKEKLSAEIVIKQKVELYPNMCVTNFTESEQWDTVIEGNDDLLEKYMSGKSLEALELEQEESIRFQNCSLFPLYHGSAKSNIGIDNLIEVITNKFYSSTHRGPSELCGNVFKIEYTKKRQRLAYIRLYSGVLHLRDSVRVSEKEKIKVTEMYTSINGELCKIDRAYSGEIVILQNEFLKLNSVLGDTKLLPQRKKIENPHPLLQTTVEPSKPEQREMLLDALLEISDSDPLLRYYVDSTTHEIILSFLGKVQMEVISALLQEKYHVEIELKEPTVIYMERPLKNAEYTIHIEVPPNPFWASIGLSVSPLPLGSGMQYESSVSLGYLNQSFQNAVMEGIRYGCEQGLYGWNVTDCKICFKYGLYYSPVSTPADFRMLTPIVLEQAFRKAGTELLEPYLSFKVYAPQEYLSRAYNDAPKYCANIVNTQLKNNEVIIIGEIPARCIQDYRNDLTFFTNGLSVCLAELKGYQVTTGEPVCQTRRLNSRIDKVRYMFNKIT

SEQ ID NO: 15221 - protein, 351 aa, Streptococcus agalactiae
ATGCGTAAAAAAGAAGATAAATACGATTTTAGAGCCGTTGGTCTAGCGATTAAAGAGGCTCGAATAAAACGTGGTCTCACCCGTGAACAAGTAGGAACAATCATTGAAATTGACCCACGTTATTTAACAAATATAGAAAATAAAGGGCAACACCCAAGTACACAGGTGCTTTATGATCTTGTATCATTACTCCATGTGTCTATTGATGAATTTTTCTTACCTACAGATAATTTGATAAAAAGCACTCGAAGGCTACAGATAGAAAAATACATGGATAGCTTTACAGACAAAGAACTATCCTTAATGGAAGCACTAGCAAAAGGTATCAATGAAGCAAGAAATATTGAAGGC

SEQ ID NO: 15222 - protein, 117 aa, Streptococcus agalactiae
MRKKEDKYDFRAVGLAIKEARIKRGLTREQVGTIIEIDPRYLTNIENKGQHPSTQVLYDLVSLLHVSIDEFFLPTDNLIKSTRRLQIEKYMDSFTDKELSLMEALAKGINEARNIEG

SEQ ID NO: 15223 - protein, 564 aa, Streptococcus agalactiae
GTGTTTTTTTGGCTACTTCGTGAATATCTTTTAAGATTTTTCTTCACTTATGCAACAAATCCCCCTTTCGTGTCGGGACTTAGTATGAAGGGAGATAAAGAAGTACATGCCACTCCCTTTCACGACAGAAAGGGGGTGAAAAACATGAAACCATCTTCTTTTCAAGAAACCATAGAAAATCAGTTTGACTATATCTGCAAACAAGCCATTGAAGATGAACGGAAAGATTATTTCAAACATCTAAGCAGACTGTCCAAAAAAGAAGTTTCATTTTCTGAAATAGATAACTACCTTGTCACCTCTTTTTCTACGGTTGATACGTATGTCACTGATTTTCAACTATTCACATTGTATGGATTAAGAATCAATGTTGAAAGTGATTTGTTAAGCGAAGCCTTACGCCACCTTCCAGAGAACAAGCGGAACATCATTTTACTTCATTATTTTATGGATATGAGTGATGTGGAAATTGCAGAATTACTAAATGTAAATCGTTCAACAGTTTATCGTCATCGAATAAGTGGACTAGCCATGATTAAAGAATTCATGAAGGAGTGTAAAGAA

SEQ ID NO: 15224 - protein, 188 aa, Streptococcus agalactiae
MFFWLLREYLLRFFFTYATNPPFVSGLSMKGDKEVHATPFHDRKGVKNMKPSSFQETIENQFDYICKQAIEDERKDYFKHLSRLSKKEVSFSEIDNYLVTSFSTVDTYVTDFQLFTLYGLRINVESDLLSEALRHLPENKRNIILLHYFMDMSDVEIAELLNVNRSTVYRHRISGLAMIKEFMKECKE

SEQ ID NO: 15225 - protein, 228 aa, Streptococcus agalactiae
ATGAAAACAGCCTATCCAAGGGTTCCCTTCCCCCTCATTGTAAAGGCGACAGATGGCGACGTGGAAGCAATTAATCAGATTGTTAAACATTATCGAGGGTATACCTCAAAACGTTCTTTGCGTCGCATGACAGACGAATATGGCAATTCTCATATGGTTATTGATGAAACCCTACGTGGCAGAATGGAAACAAAACTCATCACCAAGATTTTAGCGTTCGAAATTAAA

SEQ ID NO: 15226 - protein, 76 aa, Streptococcus agalactiae
MKTAYPRVPFPLIVKATDGDVEAINQIVKHYRGYTSKRSLRRMTDEYGNSHMVIDETLRGRMETKLITKILAFEIK

SEQ ID NO: 15227 - protein, 243 aa, Streptococcus agalactiae
GTGAATATTGGAGTTTTCCTAGCCTATAATGGGAAAGGAGTAATAATGATAACGGTCACAAAAAAAGATTTAGTTGAGCTAGGATATGGAACTTCTTTTTCAGCAGACATCATAAAAAAAGCAAAAGAATTGATGATTACAAAAGGGCATACCTACTATCAATCTCGAAAGTTAGATAGAGTCCCTCGTGAAGCTGTTGAAGAAATTCTAGGAATTCGGTTTTCAAATGAAAACAGGTCTGAG

SEQ ID NO: 15228 - protein, 81 aa, Streptococcus agalactiae
MNIGVFLAYNGKGVIMITVTKKDLVELGYGTSFSADIIKKAKELMITKGHTYYQSRKLDRVPREAVEEILGIRFSNENRSE

SEQ ID NO: 15229 - protein, 1191 aa, Streptococcus agalactiae
ATGGTTAAAGACCCAATAAAAAAAGCAAAGAATGGAACCTATTATTTTCGTGCAAATCTAGGTTATGATTCTAAAGGAAAAAAAATTCAAAAATATCGTAGTGGATTCACTACTAAAAAAGAAGCAAGAGAAGAATATTCAAAACTACTACTGATGAAACCAGAAGAATTAAGTGAGAATAAGGATAAAATGACGTTTAATCATTATATCTTTGAAATTTTTCTTCCATGGTATAAGACACAGGTAAAGCTCAGAACATATGAAAATCGCTTACCAACTATTAAGAAACATTTCTCTTATTTTGATAAAATGGCTGTTTCCGATATTGAGCCTATTGATGTGCAAAATTGGCAACTAAAATTATCAAAGAAATGTAAGTCTTCTTATGTGAGAGCTGTTCAAGGACTATTTTCAGTTGCTATGGATCGAGCAATTGTCCTTGGGATAACCACCACAAATCCATCTAAGATTATTGGCAATGTGAAAAAGCAAAAGTCTAAAATTGAATTTTGGACAAAAGAAGAATTTGAAAAAGTAATCTCTCTAATTTATAAAGAAGATTACTATCAACACTTTTTATTTATCTCTCTGTGGTTTTTATTTATGACTGGAATGCGAATTGGTGAAGCTACTGCCATTCAATGGGAAGATATTGATTTTGACTCTGGAGTACTAACCATCAACAAAACACTTTATTACAAGAATCAATCGGATTATAGATTTGTTGAACCAAAAACAAAGGCGAGTGTTCGTCATATTGTATTAGATGAATGTACTCTAAATTATCTATCCGAATGGAAGAAAGCACAACAAAATCTAATTCAGACAGACTTTGTAATGAGCTATAACGGTATTCCTACCCAAAAACATACGCTAGCACATGCTATTGAACGCTATGCTAAGCTGGCTAGTATTCATCGAATCAGAATTCATGGTTTACGGCATTCGCATGCTTCCTTGTTAATCAGTATGGGAGAAAACCCACTCATCATTAAAGACCGTTTAGGACATGAAGATATTGAGACGACTTTAGGAACGTATGGACATCTTTATCCTAACAGTAATTTTGAGGTAGCTAACAAATTAAATGGAGCCATTTCCTTTAAAGAAGCAAAACAAAATTATGATACTTCACCAAAGAATCAATTTACTGTAGACTACTTGCGAAACAAAGAAATGAAAAAAGTGCAA

SEQ ID NO: 15230 - protein, 397 aa, Streptococcus agalactiae
MVKDPIKKAKNGTYYFRANLGYDSKGKKIQKYRSGFTTKKEAREEYSKLLLMKPEELSENKDKMTFNHYIFEIFLPWYKTQVKLRTYENRLPTIKKHFSYFDKMAVSDIEPIDVQNWQLKLSKKCKSSYVRAVQGLFSVAMDRAIVLGITTTNPSKIIGNVKKQKSKIEFWTKEEFEKVISLIYKEDYYQHFLFISLWFLFMTGMRIGEATAIQWEDIDFDSGVLTINKTLYYKNQSDYRFVEPKTKASVRHIVLDECTLNYLSEWKKAQQNLIQTDFVMSYNGIPTQKHTLAHAIERYAKLASIHRIRIHGLRHSHASLLISMGENPLIIKDRLGHEDIETTLGTYGHLYPNSNFEVANKLNGAISFKEAKQNYDTSPKNQFTVDYLRNKEMKKVQ

SEQ ID NO: 15231 - protein, 1560 aa, Streptococcus agalactiae
ATGACTGATATTTCTATATTGAATGATATCCAAAAAATTATCGTTCTAGATTACGGTAGTCAATATAACCAGCTTATCGCACGTCGTATCCGTGAATTTGGTGTATTTTCTGAGTTAAAATCACATAAAATTACGGCTGATGAAATTCGCGATATTAATCCTATTGGTATCGTACTTTCAGGTGGTCCAAATTCCGTATACGCTGATGGCGCTTTTGGAATCGATGAAGAAATTTTTGAATTAGGAATTCCAATCTTAGGAATTTGTTATGGTATGCAACTGATTACCCATAAACTCGGTGGTAAGGTTCTTCCTGCGGGAGAAGCTGGTCACCGTGAGTATGGTCAATCAGCACTTCGCCTACGCTCAGAATCAGCACTCTTTGCTGGCACTCCTCAAGAACAACTTGTTTTGATGAGCCATGGTGATGCTGTTACTGAAATCCCTGAGGGTTTCCATCTCGTTGGTGACTCTGTTGACTGTCCATTTGCTGCAATGGAAAATACTGAAAAACAATTTTATGGTATCCAATTCCACCCCGAAGTTCGTCACTCAGTATATGGCAATGATATCCTTAAAAATTTTGCTGTTAATATCTGTGGTGCACGTGGTGATTGGTCAATGGATAACTTCATTGATATGGAAATTGCAAAAATACGTGAAACTGTAGGCGATCGTAAAGTACTTCTTGGACTATCTGGCGGTGTTGATTCATCTGTTGTCGGAGTACTCCTACAACGTGCTATCGGTGATCAATTAACATGTATTTTTGTAGATCATGGTTTATTACGTAAAAATGAAGGTGACCAAGTTATGGATATGCTTGGTGGTAAATTTGGACTTAATATTATCCGTGTTGATGCTTCAAAACGCTTCCTAGATCTTCTTTCTGGTGTTGAAGATCCCGAGAGAAAACGAAAAATCATCGGAAATGAGTTCGTGTACGTTTTTGATGATGAGGCAAGTAAACTTAAAGGCGTTGATTTCCTTGCTCAAGGTACCCTCTACACAGATATTATTGAATCTGGGACAGAAACAGCCCAAACAATCAAGTCACACCATAATGTTGGTGGATTGCCAGAAGATATGCAATTTGAATTGATTGAGCCACTTAACACATTATTCAAAGATGAGGTTCGCGCTCTTGGTACTGCACTTGGAATGCCTGATGAAGTTGTATGGCGTCAACCATTCCCTGGGCCTGGTCTTGCTATTCGCGTTATGGGTGAAATTACCGAAGAAAAACTTGAAACAGTCCGCGAATCAGATGCTATTCTTCGTGAAGAAATCGCTAAAGCTGGTCTAGATCGTGACGTATGGCAGTATTTCACAGTTAATACTGGCGTACATTCTGTCGGTGTTATGGGAGATGGTCGTACTTATGACTATACAATTGCTATCCGTGCAATTACTTCAATTGATGGCATGACAGCTGACTTTGCGCAACTTCCTTGGGATGTACTTAAGAAAATTTCGACACGTATTGTTAACGAAGTTGATCACGTTAACCGTATTGTTTATGATATTACAAGTAAACCACCTGCAACTGTTGAGTGGGAG

SEQ ID NO: 15232 - protein, 520 aa, Streptococcus agalactiae
MTDISILNDIQKIIVLDYGSQYNQLIARRIREFGVFSELKSHKITADEIRDINPIGIVLSGGPNSVYADGAFGIDEEIFELGIPILGICYGMQLITHKLGGKVLPAGEAGHREYGQSALRLRSESALFAGTPQEQLVLMSHGDAVTEIPEGFHLVGDSVDCPFAAMENTEKQFYGIQFHPEVRHSVYGNDILKNFAVNICGARGDWSMDNFIDMEIAKIRETVGDRKVLLGLSGGVDSSVVGVLLQRAIGDQLTCIFVDHGLLRKNEGDQVMDMLGGKFGLNIIRVDASKRFLDLLSGVEDPERKRKIIGNEFVYVFDDEASKLKGVDFLAQGTLYTDIIESGTETAQTIKSHHNVGGLPEDMQFELIEPLNTLFKDEVRALGTALGMPDEVVWRQPFPGPGLAIRVMGEITEEKLETVRESDAILREEIAKAGLDRDVWQYFTVNTGVHSVGVMGDGRTYDYTIAIRAITSIDGMTADFAQLPWDVLKKISTRIVNEVDHVNRIVYDITSKPPATVEWE

SEQ ID NO: 15233 - protein, 696 aa, Streptococcus agalactiae
TTGTTACCAGCATATATTAAAATTCACGACGCTATTAAAAAGGAAATCGATAAAGGGACTTGGAAGATTGGGCAGCGGTTACCTAGCGAAAGAGATTTAGCGGATGATTATAGTGTAAGTCGTATGACACTTCGCCAATCAATTACATTGTTAGTTGAAGAAGGTATTTTGGAGAGACGAGTTGGTAGTGGCACCTATGTTGCTAGTCATCGTGTTCAAGAAAAAATGCGGGGAACAACTAGTTTTACAGAAATTGTCAATTCTCAAGGGCGTAAGCCATCCAGTAAACTAATCTCATTTCAAAGAAAACTAGCTAATGAAACCGAAATTCAAAAATTAAATTTATCACAGTCAGATTATGTGGTTCGTATGGAAAGGGTACGTTATGCTGATAAGGTACCGTTGGTTTATGAGGTAGCCTCTATACCAGAGAATTTAATTAAAGGTTTTGAACAATCAGAGGTTACAGAACATTTCTTTAAAACCTTAACAGAGAATGGCTACGAAATTGGGAAAAGCCAACAAACTATATATGCTAGAAATGCTAGTGAACGTGTTGCTTCGCATTTAGAAGTTAACGCAGGCCATGCTATTTTGGCATTGACACAAGTTTCATACTTTACTGATGGTAAGCCTTTTGAATATGTTCATGGGCAATATGTTGGAGATCGTTTTGAGTTTTATTTAGAGAATAAC

SEQ ID NO: 15234 - protein, 232 aa, Streptococcus agalactiae; identical to SEQ ID NO: 1814

SEQ ID NO: 15235 - protein, 1332 aa, Streptococcus agalactiae
ATGTCTCAATCTTACATTAATGTTATCGGCGCTGGTTTGGCTGGTTCTGAAGCAGCTTATCAAATTGCTAAACGTGGAATACCAGTTAAGCTTTATGAAATGCGTGGGGTTAAATCAACCCCTCAACATAAAACAGATAATTTTGCAGAATTAGTATGTTCCAATTCATTCCGCGGTGATTCTCTAACAAATGCAGTTGGTCTTTTAAAAGAAGAAATGCGTCGTTTGGATTCTATCATTATGAGAAATGGGGAGGCACATCGAGTTCCAGCAGGTGGAGCCATGGCCGTTGATAGAGAAGGTTATTCTGAAGCTGTTACTGAGGAAATCCATAAACATCCATTAATCGAAGTAATTCGTGATGAAATCACAGATATCCCTGGAGATGCTATTACAGTTATCGCTACAGGACCATTAACAAGTGATAGTCTGGCAGCTAAAATCCATGAACTTAATGGTGGTGATGGTTTTTATTTTTACGATGCCGCCGCTCCAATTGTCGATAAAAATACGATTGACATGAATAAAGTTTACCTTAAGTCTAGGTATGACAAAGGTGAAGCAGCTTATCTAAATTGTCCAATGACCAAAGAAGAATTTATGGCTTTTCATGAAGCTTTAACTACAGCTGAGGAAGCACCACTAAATTCTTTTGAGAAAGAAAAATACTTCGAAGGTTGTATGCCTATCGAAGTGATGGCTAAGCGTGGTATTAAAACGATGCTTTATGGTCCAATGAAACCAGTTGGTTTGGAGTATCCTGAGGACTACAAAGGACCGCGAGATGGTGAATTTAAAACACCATATGCTGTTGTTCAATTACGTCAAGATAATGCTGCAGGCTCTCTTTATAACATAGTTGGTTTCCAAACTCATCTTAAGTGGGGAGAACAAAAACGTGTATTTCAAATGATTCCTGGTCTTGAAAATGCTGAATTTGTCCGGTATGGTGTTATGCATCGCAATTCTTATATGGATTCACCAAATCTTTTAAACCAAACCTTTGCTACACGTAAGAACCCAAATCTTTTCTTTGCTGGACAAATGACCGGTGTTGAAGGTTATGTAGAATCGGCAGCAAGTGGTCTTGTAGCGGGAATCAATGCTGTCCGTCGCTTCAATGGGGAGAGTGAAGTAGTTTTCCCACAAACTACTGCTATTGGTGCACTGCCACATTATATTACACATACAGACAGCAAACATTTCCAACCAATGAATGTTAACTTTGGTATCATCAAAGAATTAGAAGGTCCACGAATTCGTGATAAGAAAGAGCGTTATGAAGCTATTGCTACACGAGCTTTGAAAGATTTAGAAAAATTTCTCAACTAT

SEQ ID NO: 15236 - protein, 444 aa, Streptococcus agalactiae
MSQSYINVIGAGLAGSEAAYQIAKRGIPVKLYEMRGVKSTPQHKTDNFAELVCSNSFRGDSLTNAVGLLKEEMRRLDSIIMRNGEAHRVPAGGAMAVDREGYSEAVTEEIHKHPLIEVIRDEITDIPGDAITVIATGPLTSDSLAAKIHELNGGDGFYFYDAAAPIVDKNTIDMNKVYLKSRYDKGEAAYLNCPMTKEEFMAFHEALTTAEEAPLNSFEKEKYFEGCMPIEVMAKRGIKTMLYGPMKPVGLEYPEDYKGPRDGEFKTPYAVVQLRQDNAAGSLYNIVGFQTHLKWGEQKRVFQMIPGLENAEFVRYGVMHRNSYMDSPNLLNQTFATRKNPNLFFAGQMTGVEGYVESAASGLVAGINAVRRFNGESEVVFPQTTAIGALPHYITHTDSKHFQPMNVNFGIIKELEGPRIRDKKERYEAIATRALKDLEKFLNY

SEQ ID NO: 15237 - protein, 741 aa, Streptococcus agalactiae
ATGCACTATAAAGAATTACTTGAGTCATCCGAAAAAGCTTATTTGGAAACTAATCGGTATAAACATTTTAAGAATATAATCACTTCAGAGCGTTATTTTTCAAACTATATTAGCTACAAAATAATGCCTACAGTAAGTGAGTTTTTACAGGATATGATCTATTTAGCAGATGAACAAAAAGATTATCAGTCTGATTTTGCTTTTGTATTTTTTGAGGAAAATGCTGAATTGAGCAGTGAATTACAGAGAACTTTATCACAACAAGGCTTTGAATCAGAGAAACATATCATATTTACAAATTCATTAAATCATCTTAAACTTTTTGAAAAAGAATTTGATGACATCACATTTACTAAACTTAATGAAAATTACCTAGAAAAATACCTAAAGTTCAAATATAAACAAAGTATAGTTTACGGAGAAATTTACGCTAAGCAAATGTATAATGATAATCGTGTTAATCTTTTAAATAATAATGCTAAAGTTTACCTAGCTATTAAAGATAATCAAATTATTGGAGATGTAACAGCTTGGGACTATGGTGAATACGTGGAAATAGATGATTTTTATGTCCAAGAGTCCTACAGAGGACAAGGAATTGGTACGCGCCTACAATTTGATGCAAGTAGGGGGTTTAAGAAAGTTATCTTAATTTCAGAAGAAGAAAACAGAAAAATGTATGAGCACCAAGGTTATGAGGAAGTCGCCTATTATTGGACCGCTTTACGGAGCCCTCGAAAG

SEQ ID NO: 15238 - protein, 247 aa, Streptococcus agalactiae
MHYKELLESSEKAYLETNRYKHFKNIITSERYFSNYISYKIMPTVSEFLQDMIYLADEQKDYQSDFAFVFFEENAELSSELQRTLSQQGFESEKHIIFTNSLNHLKLFEKEFDDITFTKLNENYLEKYLKFKYKQSIVYGEIYAKQMYNDNRVNLLNNNAKVYLAIKDNQIIGDVTAWDYGEYVEIDDFYVQESYRGQGIGTRLQFDASRGFKKVILISEEENRKMYEHQGYEEVAYYWTALRSPRK

SEQ ID NO: 15239 - protein, 846 aa, Streptococcus agalactiae
ATGAAAATCAAAAAGCTATTAGGGTTAACGACAACAGTAGTAATTTCAGCACTTATTTTAGGAGCCTGTGGTCAGTCTAAAAATGAAGACGCCAAAGTCGTTAGAGTTGGAACAATGGTAAAGAGTAAAACTGAAAAAGCTCGTTGGGATAAAATCGAAGAATTAGTTAAGAAAAAAGGCGTTAAGCTAAAATTTACGGAATTCACAGATTATACACAACCTAATAAAGCTTTAGAAAGTGATGAGATTGATATTAATGCTTTCCAGCATTATAATTACTTAAACAATTGGAATAAAGCAAATAAGACCAATCTTGTTTCCGTTGCTGAGACATACTTTACTTCCTTTAGATTATACTCTGGTACTAAGAACGGTAAAGGTAAATACCAAACAGTTTCTGAAATTCCAAATAAAGCAACTATTACTATCCCAAACGATGCAGTTAACGAAAGTCGCTCTCTCTACTTGTTACAATCAGCAGGCTTGCTAAAATTGAAAGTATCAGGTGATACATTAGCAACAATGTCAGATGTTGTTTCCAATCCTAAATCTTTAGATTTAAAAGAAGTAGATGCAGCACAGACCGCACGTTCTTTGGATTCCACAGATGCAGCAGTTATTAATAATGATTTTGTGACAGAAGCAGGAATAAATCCTAAATCAGCTATTTTTATTGAACCAAAAAGTAAAAATGCAAAACAATGGTACAACCTTTTAGTTGCTCAAAAAGGTTGGCAAGACAAATCAAAAGCTAAAGCCATTAAAGAAGTTGTGAAAGCTTACCATACAGATGCGGTTAAAAAAGTTATCGAAAAAACATCTCAAGGTTTAGATCAACCTGTTTGG

SEQ ID NO: 15240 - protein, 282 aa, Streptococcus agalactiae; identical to SEQ ID NO: 6338

SEQ ID NO: 15241 - protein, 192 aa, Streptococcus agalactiae
GTGAATATGTCGCCTAAAGCTGGTAGGGTCAGAATCGGTTCATTAGTGAAGTTGTACTATATTACAGAGGATATCCTTGAAGAAAGTAAGACACTACTTTTATCTAAATCCGAAAAAAGTAAAGCACGACAACAACGGTTAACAGAAGTATTGAGTACCCCTAGTCAATTACTCAAAAAAAATCGAAATAAA

SEQ ID NO: 15242 - protein, 64 aa, Streptococcus agalactiae
MNMSPKAGRVRIGSLVKLYYITEDILEESKTLLLSKSEKSKARQQRLTEVLSTPSQLLKKNRNK

SEQ ID NO: 15243 - protein, 177 aa, Streptococcus agalactiae
ATGGCCAAGACAAGTAAAAAATTGACAAAATCTTTAGGGCCTATTGGTAAATTAATTTCAATAATCCCTGACACAACTGAACTTATTGGAAAAGCAATTGATAATTCTCGTCCAATTATTGAAAAAGAACTTGACCGTCGTCATGAAAAAAACAGACTTATACTCAGCTTGATAATG

SEQ ID NO: 15244 - protein, 59 aa, Streptococcus agalactiae; identical to SEQ ID NO: 6340

SEQ ID NO: 15245 - protein, 960 aa, Streptococcus agalactiae
ATGCGGCGAAAAATAGTTTTACTTTTTGTAGTTCCAATGCTTATAGTTTTAGGAATTTTAGGAGTGGTAGTTCATTATTATGGTTCAGCATTAAATATTTATCTATTACCTCCTAGTAGCGAACGTTATGGACGTGTTATTTTAGATCGTGTTGAACAGCGTGGTTTGTATTCGCAAGGTCGTCAATGGCAAATTATAAGACAACGATCAGAAAAAAAGTTGAAAACGTCAAAATCTTATCAAGAGAGTCGCAACATTGTACAGGAAGCAGTACGGTATGGAGGCGGTAAACATAGTCAAATATTATCCAAAGAGACTGTACGAAGAGATACCCTAGATAGTCGATATCCAGAATATCGAAGATTAAACGAAGACATTCTCTTAATTACTATTCCTTCTATAAGTAAGTTAGATAAACGATCTATTAGCCATTATAGTGGTAAATTACAAAATATATTGATGGAAAAAAGTTATAAGGGACTCATTTTAGACTTATCGAATAATACTGGCGGCAATATGATCCCTATGATTGGGGGGTTAGCCTCTATTTTACCAAATGATACCCTATTTCATTATACTGATAAGTATGGAAATAAGAAAACAATCACGATGAAAAATATACCGCTAGAAGCATTAAAAATATCTAGGAAAACAATCAATACTAAGCATGTTCCAATCGCTATTATAACTAATCATAAAACTGCTAGTTCGGCAGAAATGACTTTTTTATCATTTAAAGGATTACCTAATGTTAAAAGCTTTGGTCAAGCTACAGCAGGATATACGACTGTTAATGAAACTTTCATGCTTTACGACGGTGCTAGATTAGCTTTAACTACAGGAATAGTTAGTGATCGACAAGGATATAAATACGAGAACACCCCTATCTTACCAGATCAAGTAACCAGCCTTCCTTTACAAGAGTCACAGTCTTGGTTAAAGAGTAGAATCAATCAAAAT

SEQ ID NO: 15246 - protein, 320 aa, Streptococcus agalactiae; identical to SEQ ID NO: 6342

SEQ ID NO: 15247 - protein, 750 aa, Streptococcus agalactiae; identical to SEQ ID NO: 10699

SEQ ID NO: 15248 - protein, 250 aa, Streptococcus agalactiae; identical to SEQ ID NO: 1826

SEQ ID NO: 15249 - protein, 1953 aa, Streptococcus agalactiae
ATGTTTTATCTCAAAATAGCCTGGCATAATTTAAAACATTCTATAGACCAGTACATACCATTCCTCTTAGCCAGTTTATTACTTTATTCATTGACTTGTTCTACGCTACTAATCTTAATGAGTGCTGTTGGAAGAGATATGGGGACAGCGGCAACGGTTCTTTTTCTTGGAGTGATTGTTTTGTCAATCTTTGCGGTAGTCATGGAACATTATAGCTACAATATCTTGATGAAACAGCGTAGTAGTGAATTTGGACTGTATAACATTTTGGGGATGAATAAACGTCAAGTTGCGCGTGTAGCTAGTCTAGAGCTGTTTATTATTTATATATTTCTTATTTCTATAGGAAGTCTGTTTAGTGCTTTTTTTGCTAAATTTATTTATTTAATTTTTGTCAACATTATTAACTATCATGCACTAAATCTTAGTTTAAGTTTATGGCCATTTATTATTTGTATCGTTATATTTACAGGTATTTTTCTGACTTTAGAAGTTCCAGTTATTCGACATGTTCATTTATCATCCCCATTAAGTCTTTTTAGAAAGAAACAACAGGGAGAAAAAGAACCAAAAGGTAATCTTATACTTGCAATTTTAGCGTTAGTAGCTATCGCCATCGCTTATACAATGGCTCTTACTTCAGGTAAAGCACCTGCATTAGCTGTTATCTATCGTTTCTTCTTTGCAGTACTTTTAGTTATTGCTGGTACTTATCTTTTTTATATTAGTTTTATGACATGGTACTTAAAAAGGTTGCGTCAAAACAAGCATTATTATTATAAATCTGAGCATTTTGTATCAACTTCGCAAATGATTTTTCGAATGAAGCAAAATGCAGTAGGGTTAGCAAGTATCACTTTATTAGCTGTTATGGCTCTAGTTACTATTGCTACAACAGTCTCACTCTATTCAAATACACAAAATGTTGTTACCGGACTATTTCCAAAATCAGTAAGTTTATCAATAGATAATTCAAAAGGTGACGCGAAAAATATATTTGAAGAAAAGATTTTGAAGAAACTAGGTAAGTCATCTAAGGAAGCTATCACTTATAATCAGACAATGATTTCGATGCCAGTTAGTCAATCAAGTGAACTTAATATCACATCTAAAAACGTCAAACATGTTGATATCACAAAAACGGGTTTTATGTACCTAATTACTCAGAATGATTTCCGTCGTTTAGGTCACCAATTACCAAAATTAAAAGATAACCAAGTGGCTTACTTTGTTCAAAAAGGTGATAGCCGTTTGAAAAAAATAAATCTATTGGGAAATAAATTTGACGTTGTAAAAAATTTAAAAGAGGCTTATGTCCCAGAGACTACAAATACTTACAACCCGGGTTTGATTATATTTGCAAACAACAAACAAATTGACAATATTAGAAAAGCATATTTACCTTATACTAAGAACATCAATACTTTTCCAAAAACCTTTAAGGCATATTTGGATTTGAATAGTCAAGAGATAAATTCAATTTCTAAAAACGACATAATAGAGGTAGATGGTAAGTATGTTGGAAATATTAGCACTAAACAGAGTTTTCTAAAAGAAGGTTATCAAATGTTTGGTGGGTTATTATTTACTGGATTTCTGTTAGGTATAAGCTTTTTGCTAGGTATAGCTCTAATTGTTTACTATAAGCAATACTCAGAAGGTCATGAAGATAAGAGATCTTATCGTATCTTACAAGAAGTAGGTATGAGCAAAAAATTAGTTAAACGGACTATTAATTCTCAAATTATGATTTTCTTCTTCCAACCTTTAGTGGTAGCAGTTATTCACTTTGGAGTTGCTATTCCAATGCTAAAACAGATGCTTTTGGTATTTGGGGTGCTTAACTCAACAATCGTATATGTAGTAAGTGGTTTGACAGTACTTGCGATTTCTATAATTTACTTTATCATTTACCGTATAACTAGTCGAACTTATTATCATATTATTGAACGC

SEQ ID NO: 15250 - protein, 651 aa, Streptococcus agalactiae; identical to SEQ ID NO: 1828

SEQ ID NO: 15251 - protein, 666 aa, Streptococcus agalactiae; identical to SEQ ID NO: 10703

SEQ ID NO: 15252 - protein, 222 aa, Streptococcus agalactiae; identical to SEQ ID NO: 1830

SEQ ID NO: 15253 - protein, 936 aa, Streptococcus agalactiae
ATGATACGCCAGTTTTTAAGAGAACACTTGATTTGGTATATTTTATATATCATGATGTTTGTCCTATTTTTTATTAGTTTCTATCTATATCATTTACCAATGCCCTATTTGTTTAATTCCTTAGGTTTAAATGTTATTGTTTTACTAGGAATTAGTATTTGGCAATACAGTCGTTACAGGAAAAAAATGTTACATCTCAAATATTTTAATAGTAGTCAGGACCCCTCTTTCGAACTTCAACCGAGTGATTACGCTTATTTTAATATTATTACACAATTAGAAGCTAGAGAAGCGCAAAAAGTTTCTGAAACAATTGAACAAACCAATCATGTTGCACTTATGATAAAGATGTGGTCGCACCAAATGAAAGTTCCATTGGCAGCTATTTCATTAATGGCCCAGACAAATCATCTCGATCCTAAGGAAGTTGAACAACAATTATTGAAATTGCAACATTATCTTGAAACGTTGTTAGCATTTTTGAAATTTAGACAATATCGTGACGATTTTCGTTTTGAAGCTGTTAGCCTTAGAGAAGTAGTAGTAGAAATTATAAAATCGTATAAGGTTATTTGTCTATCCAAAAGCTTATCTATCATAATTGAAGGCGATAATATCTGGAAAACAGACAAAAAGTGGTTAACTTTTGCTCTTTCACAGGTGCTAGATAATGCCATAAAATATTCTAATCCTGAGTCAAAGATAATAATAAGCATAGGAGAAGAGAGTATTAGAATACAAGACTACGGTATCGGCATACTCGAAGAGGATATCCCTAGACTTTTTGAAGATGGCTTTACGGGTTACAACGGTCATGAGCACCAAAAGGCAACAGGCATGGGGTTATATATGACAAAAGAAGTCTTATCTAGTCTGAATTTGTCCATTTCGGTGGATAGCAAAATTAATTATGGGACTGCTGTTTCTATACATAAA

SEQ ID NO: 15254 - protein, 312 aa, Streptococcus agalactiae; identical to SEQ ID NO: 1832

SEQ ID NO: 15255 - protein, 1068 aa, Streptococcus agalactiae
ATGAAACGTGAATTACTACTCGAAAAAATCGATGAACTAAAAGAAATTATGCCTTGGTATGTTCTAGAATATTATCAATCAAAGCTTTCTGTTCCTTATAGTTTCACAACACTCTACGAATATTTAAAAGAATATAGACGTTTTCTTGAATGGTTATTGGATTCTGGTGTTGCTAATTGTCATCACATTGCAGAAATTGAGCTTTCAGTTTTAGAAAACCTTACTAAAAAAGATATGGAAGCTTTTATACTATATTTACGAGAACGCCCTTTATTAAATGCTAACACAAGGCAAAATGGGGTGTCTCAAACCACCATTAACAGAACTCTATCTGCCTTATCTAGTCTTTTCAAATACCTTACTGAAGAGGTTGAGAATGCTGACGGGGAGCCTTACTTTTATCGCAATGTCATGAAAAAAGTCTCAACCAAAAAGAAAAAGGAAACTTTAGCTTCTCGGGCAGAAAATATTAAACAAAAGTTATTTTTGGGCAATGAAACGATAGAATTCTTAGAGTATATAGATTGTGAATATCAAAACAAACTTTCCAAACGTGCTTTAGCTTTTTTCAACAAAAATAAAGAGAGAGATTTAGCTATTATTGCTTTGCTACTAGCTTCAGGAGTGCGTCTATCTGAGGCAGTAAACTTAGATTTAAAGGATATTAACCTTAATGTAATGGTTATTGATGTCACACGAAAAGGGGGGAAAAGGGACTCTGTCAATGTCGCTAGCTTTGCGAAGCCCTACCTTGCTAATTATTTAGACATCCGTAAAAATAGATACAAAGCAGAAAATCAGGACATTGCTCTATTTTTATCAGAATACCGTGGGGTGCCAAATCGTATTGATTCTTCAAGTGTAGAGAAAATGGTTGCTAAGTATTCCCAGGATTTTAAGGTTCGTGTAACACCTCATAAACTAAGGCATACTCTTGCTACTAGGCTATATGATGCTACAAAATCTCAAGTATTAGTTAGCCACCAACTAGGTCATGCTTCCACTCAAGTTACTGACCTATATACCCATATTGTTAACGATGAACAAAAGAACGCTTTAGATAAACTA

SEQ ID NO: 15256 - protein, 356 aa, Streptococcus agalactiae
MKRELLLEKIDELKEIMPWYVLEYYQSKLSVPYSFTTLYEYLKEYRRFLEWLLDSGVANCHHIAEIELSVLENLTKKDMEAFILYLRERPLLNANTRQNGVSQTTINRTLSALSSLFKYLTEEVENADGEPYFYRNVMKKVSTKKKKETLASRAENIKQKLFLGNETIEFLEYIDCEYQNKLSKRALAFFNKNKERDLAIIALLLASGVRLSEAVNLDLKDINLNVMVIDVTRKGGKRDSVNVASFAKPYLANYLDIRKNRYKAENQDIALFLSEYRGVPNRIDSSSVEKMVAKYSQDFKVRVTPHKLRHTLATRLYDATKSQVLVSHQLGHASTQVTDLYTHIVNDEQKNALDKL

SEQ ID NO: 15257 - protein, 482 aa, Streptococcus agalactiae
ATGTCTAGTTTTAATAGAAAAAAACTTAAGTTTTTGGGTATATCTTTGGCGACTCTAACAGCCACCACAGTTACCCTGGTTGCCTGTGGTAATGAGTCAAAGAACTCTGGAGATAATAAAGTTATTAATTGGTATATTCCTACTGAAATCAGTACATTGGACATTTCAAAGAATACAGATGCTTATTCAAACTTAGCTATAGGTAATTCAGGCAGCAATTTACTTAGAATTGATAAAGAGGGCAAACCAAAACCCGATTTAGCTAAAAAAGTATCCGTTTCTTCTGATGGTCTTACTTATACTGCTACACTTCGTGATAATTTAAAATGGTCAGATGGAAGCAAACTAAGCGCTGAAGATTTTGTTTACACATGGCGGAGAATAGTTGATCCTAAAACTGCATCTGAATATGCTTACTTGGCGACAGAATCGCACCTTTTAAATGCTGATAAGATTAATTCTGGAGATATTAAAGATTTAAA

SEQ ID NO: 15258 - protein, 161 aa, Streptococcus agalactiae
  VARIANT 161: Xaa = Any Amino Acid
MSSFNRKKLKFLGISLATLTATTVTLVACGNESKNSGDNKVINWYIPTEISTLDISKNTDAYSNLAIGNSGSNLLRIDKEGKPKPDLAKKVSVSSDGLTYTATLRDNLKWSDGSKLSAEDFVYTWRRIVDPKTASEYAYLATESHLLNADKINSGDIKDLX

SEQ ID NO: 15259 - protein, 390 aa, Streptococcus agalactiae
ATGGATCATCGTTTGTCAGAATTATCTTCTCATCTGAGAATTGATGACTTATTAGATAAGAGACCTTTCGAGCTCTCTGGTGGGCAAAAGCAACGTGTAGCGATTGCTCGTAGTTTGATAACCAACCCTCAAATTTTATTAGCAGATGAACCAACAGCAGCGTTAGATTACCGTAATTCAGAAGACTTGCTGAATTTATTTGAAACTATTAACTTGGATGGACAAACTATTTTGATGGTAACCCATTCAGCAAATGCTGCTAGTCATGCCAAACGCGTTTTATTTATCAAAGATGGACGTATTTTTCACCAACTTTATCGTGGTAATAAGAATAATAGCGAATTCAATAAAGATATTTCTTTAACAATGTCTGCCATATTAGGGGGTGAA

SEQ ID NO: 15260 - protein, 130 aa, Streptococcus agalactiae
MDHRLSELSSHLRIDDLLDKRPFELSGGQKQRVAIARSLITNPQILLADEPTAALDYRNSEDLLNLFETINLDGQTILMVTHSANAASHAKRVLFIKDGRIFHQLYRGNKNNSEFNKDISLTMSAILGGE

SEQ ID NO: 15261 - protein, 342 aa, Streptococcus agalactiae
ATGTTTTATCTCAAAATAGCCTGGCATAATTTAAAACATTCTATAGACCAGTACATACCATTCCTCTTAGCCAGTTTATTACTTTATTCATTGACTTGTTCTACGCTACTAATCTTAATGAGTGCTGTTGGAAGAGATATGGGGACAGCGGCAACGGTTCTTTTTCTTGGAGTGATTGTTTTGTCAATCTTTGCGGTAGTCATGGGACATTATAGCTACCATATCTTGATGAAACAGCGTAGTAGTGAATTTGGACTGTATAACATTTTGGGGATGAATAAACGTCAAGTTGCGCGTGTAGCTAGTCTAGAGCTGGTTAATAATTTATATATTCTAATTCAA

SEQ ID NO: 15262 - protein, 114 aa, Streptococcus agalactiae
MFYLKIAWHNLKHSIDQYIPFLLASLLLYSLTCSTLLILMSAVGRDMGTAATVLFLGVIVLSIFAVVMGHYSYHILMKQRSSEFGLYNILGMNKRQVARVASLELVNNLYILIQ

SEQ ID NO: 15263 - protein, 807 aa, Streptococcus agalactiae
TTGAGAAAACTAGGTAGGTCATCTAAGGAAGCTATCACTTATATCCAGACAATGATTCCGATGCCAGTTAGTCAATCAAGTGAACTTAATATCACATCTAAAAACGTCAAACATGTTGATATCACAAAAACGGGTTTTATGTACCTAATTACTCAGAATGATTTCCGTCGTTTAGGTCACCAATTACCAAAATTAAAAGATAACCAAGTGGCTTACTTTGTTCAAAAAGGTGATAGCCGTTTGAAAAAAATAAATCTATTGGGAAATAAATTTGACGTTGTAAAAAATTTAAAAGAGGCTTATGTCCCAGAGACTACAAATACTTACAACCCGGGTTTGATTATATTTGCAAACAACAAACAAATTGACAATATTAGAAAAGCATATTTACCTTATACTAAGAACATCAATACTTTTCCAAAAACCTTTAAGGCATATTTGGATTTGAATAGTCAAGAGATAAATTCAATTTCTAAAAACGACATAATAGAGGTAGATGGTAAGTATGTTGGAAATATTAGCACTAAACAGAGTTTTCTAAAAGAAGGTTATCAAATGTTTGGTGGGTTATTATTTACTGGATTTCTGTTAGGTATAAGCTTTTTGCTAGGTATAGCTCTAATTGTTTACTATAAGCAATACTCAGAAGGTCATGAAGATAAGAGATCTTATCGTATCTTACAAGAAGTAGGTATGAGCAAAAAATTAGTTAAACGGACTATTAATTCTCAAAATTATGATTTTCTTCTTCCAACCTTTAGTGGTAGCAGTTATTCACTTTGGAGTTGCTATCNNNNNTTAATTAAT

SEQ ID NO: 15264 - protein, 269 aa, Streptococcus agalactiae
  VARIANT 265, 266: Xaa = Any Amino Acid
MRKLGRSSKEAITYIQTMIPMPVSQSSELNITSKNVKHVDITKTGFMYLITQNDFRRLGHQLPKLKDNQVAYFVQKGDSRLKKINLLGNKFDVVKNLKEAYVPETTNTYNPGLIIFANNKQIDNIRKAYLPYTKNINTFPKTFKAYLDLNSQEINSISKNDIIEVDGKYVGNISTKQSFLKEGYQMFGGLLFTGFLLGISFLLGIALIVYYKQYSEGHEDKRSYRILQEVGMSKKLVKRTINSQNYDFLLPTFSGSSYSLWSCYXXLIN

SEQ ID NO: 15265 - protein, 1593 aa, Streptococcus agalactiae
ATGTCTAGTTTTAATAGAAAAAAACTTAAGTTTTTGGGTATATCTTTGGCGACTCTAACAGCCACCACAGTTACCCTGGTTGCCTGTGGTAATGAGTCAAAGAACTCTGGAGATAATAAAGTTATTAATTGGTATATTCCTACTGAAATCAGTACATTGGACATTTCAAAGAATACAGATGCTTATTCAAACTTAGCTATAGGTAATTCAGGCAGCAATTTACTTAGAATTGATAAAGAGGGCAAACCAAAACCCGATTTAGCTAAAAAAGTATCCGTTTCTTCTGATGGTCTTACTTATACTGCTACACTTCGTGATAATTTAAAATGGTCAGATGGAAGCAAACTAAGCGCTGAAGATTTTGTTTACACATGGCGGAGAATAGTTGATCCTAAAACTGCATCTGAATATGCTTACTTGGCGACAGAATCGCACCTTTTAAATGCTGATAAGATTAATTCTGGAGATATTAAAGATTTAAATAAACTTGGTGTAACAGCTAAAGGCAATCAAGTGACCTTTAAATTGACAAGTCCATGCCCTCAATTTAAATATTATTTAGCCTTCTCTAATTTTATGCCTCAAAAACAATCGTATGTTGAAAAAGTTGGTAAAGATTATGGTACAACATCAAAAAATCAAATTTACTCAGGTCCTTACCTTGTTAAGGATTGGAATGGTTCAAATGGTAAATTTAAATTAGTCAAAAATAAATATTATTGGGATTCTAAACATGTTAAAACAAATAGTGTCATAGTTCAAACTATCAAAAAACCAGATACTGCAGTTCAAATGTACAAGCAAGGTCAGATTGATTTTGCTGAAATATCAGGAACTTCTGCTATTTATAACCAAACTGGTTCGGTTAAAGCATTGACAAATCAGAAAATTAGGCAAGCTTTGAATTTAGCGACTGATCGTAAAGGTGTTGTTAAAGCGGCAGTTGATACAGGTTCAACTCCTGCTGAATCTCTGGTCCCTAAAAAATTAGCCAAATTACCTAATGGTGAGGATCTTTCCAAGTATACTGCCCCAGGTTATACGTATAATACAAGTAAAGCTCAAAAACTTTTTAAAGAAGGTCTTGCTGAGGTTGGTCAGTCATCTCTCAAGTTAACAATCACAGCTGATTCGGACTCTCCAGCAGCTAAAAATGCTGTTGACTATGTGAAATCTACATGGGAGAGTGCTTTGCCTGGTCTAACTGTTGAAGAAAAATTTGTTACTTTCAAGCAACGCCTTGAAGATGCAAAAAATGAAAATTTTGATGTCGTGCTCTTCTCATGGGGAGGAGATTATCCAGAAGGATCAACTTTCTATGGGTTATTCACGACTAATTCTGCGTATAATTATGGTAAATTTTCTTCTAAAGAGTATGACAATGCCTATCAAAAGGCAATTACTACTGACGCCTTGAAACCAGGAGATGCCGCTAATGATTACAAAACTGCTGAAAAAGCTTTATTTGATCAATCATATTATAACCCAGTTTATTACCTAGGGAAAAAAGGACTCCAAAATTCTAAATTAAAGGGGTTGGTAAGAAATTCAACTGGTTTGAATGTTGATTTTACTTATGCTTATAAGACAGAA

SEQ ID NO: 15266 - protein, 531 aa, Streptococcus agalactiae
MSSFNRKKLKFLGISLATLTATTVTLVACGNESKNSGDNKVINWYIPTEISTLDISKNTDAYSNLAIGNSGSNLLRIDKEGKPKPDLAKKVSVSSDGLTYTATLRDNLKWSDGSKLSAEDFVYTWRRIVDPKTASEYAYLATESHLLNADKINSGDIKDLNKLGVTAKGNQVTFKLTSPCPQFKYYLAFSNFMPQKQSYVEKVGKDYGTTSKNQIYSGPYLVKDWNGSNGKFKLVKNKYYWDSKHVKTNSVIVQTIKKPDTAVQMYKQGQIDFAEISGTSAIYNQTGSVKALTNQKIRQALNLATDRKGVVKAAVDTGSTPAESLVPKKLAKLPNGEDLSKYTAPGYTYNTSKAQKLFKEGLAEVGQSSLKLTITADSDSPAAKNAVDYVKSTWESALPGLTVEEKFVTFKQRLEDAKNENFDVVLFSWGGDYPEGSTFYGLFTTNSAYNYGKFSSKEYDNAYQKAITTDALKPGDAANDYKTAEKALFDQSYYNPVYYLGKKGLQNSKLKGLVRNSTGLNVDFTYAYKTE

SEQ ID NO: 15267 - protein, 771 aa, Streptococcus agalactiae
ATGATTTCTGATTTTTTAAGGGATAATCCAATCCTAACTTTATTATTTTGCGCACATTTTTTAGCTGACTTTCAGTGGCAAAGTCAATCCTTAGCAGATAGTAAATCACATAGTTGGAGGGGACTCTGGAGACATCTCTTGATTGTTTTCCTCCCCCTAGCAGCTTTAATGATATTGATACCAGAAACTACTTTGTTAAATTTAAGCATATGGGGAAGTCATATTGTTATTGATAGTATAAAGAAATTGAGTTACCCTTGGGTAGAGGAAGGGCATTTCCAAAAAGCAGCTTTTATTATAGACCAACTAGCCCACTATACTTGCATTATCGTTTTTTACCATGCGCTTCCTACATATTTACCGCCTAATCATTGGCTTTTGCCTATCAAGCACTTTATTGTCATAGCTCTGGTTTTTATCATTATCACCAAACCCATTAATATTGTGTTTAAAATTTTCTTTAATAAATTTCAAGCTAAAGAATTATCATCATTATTAACACAAGAAAAAACAAAAATAATGAAAGAAAAATCTGAAGATCATGAAGAAACAATTGAAGGAGCAGGAGCTATGATTGGTAATTTAGAGCGTCTAATTATGGCTATATTACTAATCTCAGGACAGTATGCTGCTATAGGTCTTGTTTTTACTGCAAAATCCATTGCACGTTACGATAAAATTTCTAAAAGTCAGGTTTTTGCCGAATATTATTTAATTGGATCATTGTTCTCAATTATAAGTGTTTTGATAACTCATTGGGTACTTTTGGTA

SEQ ID NO: 15268 - protein, 257 aa, Streptococcus agalactiae
MISDFLRDNPILTLLFCAHFLADFQWQSQSLADSKSHSWRGLWRHLLIVFLPLAALMILIPETTLLNLSIWGSHIVIDSIKKLSYPWVEEGHFQKAAFIIDQLAHYTCIIVFYHALPTYLPPNHWLLPIKHFIVIALVFIIITKPINIVFKIFFNKFQAKELSSLLTQEKTKIMKEKSEDHEETIEGAGAMIGNLERLIMAILLISGQYAAIGLVFTAKSIARYDKISKSQVFAEYYLIGSLFSIISVLITHWVLLV

SEQ ID NO: 15269 - protein, 684 aa, Streptococcus agalactiae
ATGTATTTAGCATTAATCGGTGATATCATTAATTCAAAACAGATACTTGAACGTGAAACTTTCCAACAGTCTTTTCAGCAACTAATGACCGAACTATCTGATGTATATGGTGAAGAGCTGATTTCTCCATTCACTATTACAGCTGGTGATGAATTTCAAGCTTTATTGAAACAATCAAAAAAGGTATTTCAAATTATTGACCATATTCAACTAGCTCTAAAACCTGTTAATGTAAGGTTCGGCCTCGGTACAGGAAACATTATAACATCCATCAATTCAAATGAAAGTATCGGTGCTGATGGTCCTGCCTACTGGCATGCTCGCTCAGCTATTAATCATATACATGATAAAAATGATTATGGAACAGTTCAAGTAGCTATTTGCCTTGATGATGAAGACCAAAACCTTGAATTAACACTAAATAGTCTCATTTCAGCTGGTGATTTTATCAAGTCAAAATGGACTACAAACCATTTTCAAATGCTTGAGCACTTAATACTTCAAGATAATTATCAAGAACAATTTCAACATCAAAAGTTAGCCCAACTGGAAAATATTGAACCTAGTGCGCTGACTAAACGCCTTAAAGCAAGCGGTCTGAAGATTTACTTAAGAACGAGAACACAGGCAGCCGATCTATTAGTTAAAAGTTGCACTCAAACTAAAGGGGGAAGCTATGATTTC

SEQ ID NO: 15270 - protein, 228 aa, Streptococcus agalactiae
MYLALIGDIINSKQILERETFQQSFQQLMTELSDVYGEELISPFTITAGDEFQALLKQSKKVFQIIDHIQLALKPVNVRFGLGTGNIITSINSNESIGADGPAYWHARSAINHIHDKNDYGTVQVAICLDDEDQNLELTLNSLISAGDFIKSKWTTNHFQMLEHLILQDNYQEQFQHQKLAQLENIEPSALTKRLKASGLKIYLRTRTQAADLLVKSCTQTKGGSYDF

SEQ ID NO: 15271 - protein, 1563 aa, Streptococcus agalactiae
ATGGCTTTCGAAAGTTTAACAGAGCGCCTGCAAGGAGTTTTTAAAAATATTCGTGGTAAGAAAAAGTTATCTGAAAAAGATGTGCAAGAAGTCACCAAGGAGATTCGTCTAGCTCTTTTAGAAGCTGACGTTGCTCTTCCAGTTGTTAAAACCTTTATTAAACATGTTCGTGAACGTGCTGTTGGACATGAAATCATTGATACACTAGATCCTACGCAACAAATTGTTAAGATTGTCAATGAAGAGCTAACAGATTTATTAGGGGCTGAGACCTCTGAAATTGAAAAATCCCCTAAAATTCCAACCATCATTATGATGGTTGGTCTACAAGGTGCTGGTAAAACAACTTTTGCCGGTAAGTTAGCAAACAAACTAATCAAAGAAGACAATGCTCGTCCTATGATGATAGCAGCTGATATTTATCGACCAGCTGCTATTGATCAGTTAAAAACCCTTGGTAGCCAGATTAATGTTCCTGTCTTTGATATGGGAACTAACCATTCAGCAGTTGAGATTGTCACTAAAGGTTTAGAACAGGCTCGTGAAAATCGTAATGACTATGTTCTTATTGATACAGCCGGACGCCTACAAATTGATGCAACCCTTATGCAGGAATTGCATGATGTCAAAGCCATAGCTCAACCTAATGAAATACTCCTTGTCGTTGACAGCATGATTGGACAGGAAGCTGCAAATGTCGCTGAAGAATTTAACCGTCAGCTCAGCATTAGTGGTGTTGTTCTGACAAAGATTGACGGTGATACACGCGGTGGTGCTGCCCTTTCAGTACGCGAAATTACTGGAAAACCAATTAAATTTACAGGGACAGGGGAAAAAATCACTGATATTGAAACTTTCCATCCCGATCGTATGGCAAGCCGTATATTGGGGATGGGAGACCTGCTAACACTTATTGAGCGCGCTAGTCAAGAATACGACGAAAAACGTTCAATGGAATTAGCGGAGAAAATGCGTGAAAACACCTTTGACTTCAACGATTTTATTGATCAATTAGATCAAGTTCAAAATATGGGGCCAATGGAAGATCTCCTTAAAATGCTTCCAGGAATGGCTAACAATCCAGCAATGAAAAACTTCAAAGTGGATGAAAACGAAATTGCTCGCAAAAGAGCCATTGTGTCATCAATGACTCCAGAAGAGAGAGAAAATCCAAATCTCCTCAATCCAAGTCGTAGACGTCGTATTGCTGCTGGATCAGGTAATACTTTCGTTGATGTTAATAAATTCATTAAAGATTTTAACCAGGCAAAACAAATGATGCAAGGCGTGATGTCCGGTGATATGAATAAAATGATGAAAAAAATGGGAATTGATCCTAATAACCTCCCTAAAGATATGCCTGGAATGGACGGAATGGATATGTCTAATTTAGAAGGTATGATGGGGCAAAATGGCATGCCTGACTTATCTAGTTTAGGTGGCGATATGGACTTCAGCCAAATGTTTGGTGGTGGCTTAAAAGGAAAAGTAGGAGCCTTTGCAGCTAAACAATCAATGAAACGTATGGCTAATAAAATGAAGAAAGCTAAGAAGAAACGCAAA

SEQ ID NO: 15272 - protein, 521 aa, Streptococcus agalactiae
MAFESLTERLQGVFKNIRGKKKLSEKDVQEVTKEIRLALLEADVALPVVKTFIKHVRERAVGHEIIDTLDPTQQIVKIVNEELTDLLGAETSEIEKSPKIPTIIMMVGLQGAGKTTFAGKLANKLIKEDNARPMMIAADIYRPAAIDQLKTLGSQINVPVFDMGTNHSAVEIVTKGLEQARENRNDYVLIDTAGRLQIDATLMQELHDVKAIAQPNEILLVVDSMIGQEAANVAEEFNRQLSISGVVLTKIDGDTRGGAALSVREITGKPIKFTGTGEKITDIETFHPDRMASRILGMGDLLTLIERASQEYDEKRSMELAEKMRENTFDFNDFIDQLDQVQNMGPMEDLLKMLPGMANNPAMKNFKVDENEIARKRAIVSSMTPEERENPNLLNPSRRRRIAAGSGNTFVDVNKFIKDFNQAKQMMQGVMSGDMNKMMKKMGIDPNNLPKDMPGMDGMDMSNLEGMMGQNGMPDLSSLGGDMDFSQMFGGGLKGKVGAFAAKQSMKRMANKMKKAKKKRK

SEQ ID NO: 15273 - protein, 330 aa, Streptococcus agalactiae; identical to SEQ ID NO: 10717

SEQ ID NO: 15274 - protein, 110 aa, Streptococcus agalactiae; identical to SEQ ID NO: 1844

SEQ ID NO: 15275 - protein, 1311 aa, Streptococcus agalactiae; identical to SEQ ID NO: 6365

SEQ ID NO: 15276 - protein, 437 aa, Streptococcus agalactiae; identical to SEQ ID NO: 6366

SEQ ID NO: 15277 - protein, 678 aa, Streptococcus agalactiae; identical to SEQ ID NO: 6367

SEQ ID NO: 15278 - protein, 226 aa, Streptococcus agalactiae; identical to SEQ ID NO: 1848

SEQ ID NO: 15279 - protein, 2547 aa, Streptococcus agalactiae; identical to SEQ ID NO: 10723

SEQ ID NO: 15280 - protein, 849 aa, Streptococcus agalactiae; identical to SEQ ID NO: 1850

SEQ ID NO: 15281 - protein, 651 aa, Streptococcus agalactiae; identical to SEQ ID NO: 6371

SEQ ID NO: 15282 - protein, 217 aa, Streptococcus agalactiae; identical to SEQ ID NO: 1852

SEQ ID NO: 15283 - protein, 555 aa, Streptococcus agalactiae; identical to SEQ ID NO: 6373

SEQ ID NO: 15284 - protein, 185 aa, Streptococcus agalactiae; identical to SEQ ID NO: 1854

SEQ ID NO: 15285 - protein, 801 aa, Streptococcus agalactiae; identical to SEQ ID NO: 6375

SEQ ID NO: 15286 - protein, 267 aa, Streptococcus agalactiae; identical to SEQ ID NO: 1856

SEQ ID NO: 15287 - protein, 885 aa, Streptococcus agalactiae; identical to SEQ ID NO: 6377

SEQ ID NO: 15288 - protein, 295 aa, Streptococcus agalactiae; identical to SEQ ID NO: 1858

SEQ ID NO: 15289 - protein, 914 aa, Streptococcus agalactiae
ATGAAAAATCAAGAATTAGCTAAAAAATTAACATCTCCTTCAAAAAACTCTCGATTAGAAAAATTTGGTAAAGGAATAACTTTTCTTTCGCTTGCCCTAATCGTCTTCATTGTTGCGATGATTTTGATTTTTGTTGCTCAAAAAGGACTATCTACATTTTTTGTTGATGGCGTTAAATTAACAGACTTCTTATTTAATACAAAATGGGAACCAAGTGCTAAGTCATTCGGTGCTCTTCCATGATAGCTGGATCATTTATTGTTACTATTCTATCAGCTATCATTGCTACACCATTTGCTATCGGTGCTGCCGTATTTATGACTGAAATCTCACCTAAATATGGTTCTAAAATTTTACAACCTGCAGTTGAATTACTAGTTGGGATTCCTTCTGTTGTTTACGGTTTTATTGGTTTACAGATTATTGTTCCCTTCGTTCGCTCTATTTTTGGGGGAACAGGTTTTGGCATTTTATCTGGGGTCTGTGTCCTCTTCGTCATGATTCTACCAACTGTTACTTTCATGACAGTAGATAGCCTTAGAGCTGTGCCACGTCACTATAAAGAAGCAAGTTTAGCCATGGGGGCAACTCGTTGGCAAACAATTTGGCGTGTTATATTAAACGCTGCACGTCCAGGAATTTTCACTGCAATTGTTTTTGGTATGGCACGTGCATTTGGTGAAGCTCTAGCAATTCAGATGGTTGTCGGAAACTCTGCAATTTTACCAACATCATTGACAACACCAGCAGCAACATTAACGTCTGTTCTAACAATGGGTATTGGTAATACTGTAATGGGAACTGTACAAAACAATGTCCTCTGGTCGCTAGCCTTAGTACTTTTAATTATGAGTTTAGCATTTAATACAGTTATTAAGTTAATTACAAGGGAAGGAAAGAAAAACTATGAACGC

SEQ ID NO: 15290 - protein, 305 aa, Streptococcus agalactiae
MKNQELAKKLTSPSKNSRLEKFGKGITFLSLALIVFIVAMILIFVAQKGLSTFFVDGVKLTDFLFNTKWEPSAKSFGALPMIAGSFIVTILSAIIATPFAIGAAVFMTEISPKYGSKILQPAVELLVGIPSVVYGFIGLQIIVPFVRSIFGGTGFGILSGVCVLFVMILPTVTFMTVDSLRAVPRHYKEASLAMGATRWQTIWRVILNAARPGIFTAIVFGMARAFGEALAIQMVVGNSAILPTSLTTPAATLTSVLTMGIGNTVMGTVQNNVLWSLALVLLIMSLAFNTVIKLITREGKKNYER

SEQ ID NO: 15291 - protein, 839 aa, Streptococcus agalactiae
TTGTTAACCTTGCTAGCCACCGTCTTATTGACGCTGTCTGGTTGTGCTAATTGGATTGATAAAGGTCAATCAATCACCAGCGTTGGTTCAACCGCCTTACAGCCACTTGTAGAAGCTGCAGCAGATGAGTTTGGTAAGACAAACCTCGGTAAGACTATCAATGTCCAAGGAGGAGGCTCAGGAACAGGCTTATCACAAGTACAGTCTGGAGCTGTTCAAATTGGTAATAGCGACTTATTTGCAGAAGAAAAAGATGGTATTGATGCTAAGAAATTGAAAGACCATCAAGTCGCAGTAGCTGGATTAGCTGTTATTGTTAATAAAAAAGTTAATGTTAAAAATCTAACCACCCACCAACTTCGTGATATTTTTGCAGGAAAAATCAAGAATTGGAAAGAAGTGGGAGGACAAGATTTAGATATTTCCATCATCAATCGAGCAGCAAGTTCTGGATCCCGTGCAACCTTCGATAATACTATTATGGGAAATGTTGCTCCTATTCAAAGCCAAGAACAAGATTCAAATGGTATGGTGAAATCAATTGTTTCTCAAACACCTGGTGCGATTTCATACCTCGCTTTTGCATACGTTGATAAATCTGTCGGAACATTAAAACTAAATGGTTTTGCGCCACAGCTAAAAATGTTACTACCGACAACTGGAAACTTTGGTCATATGAACATATGTATACAAAAGGTAATGAAACAGGTCTAACAAAAGAATTCTTAGACTACATGAAAAGTGATAAAGTTCAAAGTAGTATCGTACAACATATGGGATATATCTCTATTAACGACATGAAAGTTGTTAAAGATGCTGAAGGTAAAGTAACCCCAAAA

SEQ ID NO: 15292 - protein, 280 aa, Streptococcus agalactiae
MLTLLATVLLTLSGCANWIDKGQSITSVGSTALQPLVEAAADEFGKTNLGKTINVQGGGSGTGLSQVQSGAVQIGNSDLFAEEKDGIDAKKLKDHQVAVAGLAVIVNKKVNVKNLTTHQLRDIFAGKIKNWKEVGGQDLDISIINRAASSGSRATFDNTIMGNVAPIQSQEQDSNGMVKSIVSQTPGAISYLAFAYVDKSVGTLKLNGFAPTAKNVTTDNWKLWSYEHMYTKGNETGLTKEFLDYMKSDKVQSSIVQHMGYISINDMKVVKDAEGKVTPK

SEQ ID NO: 15293 - protein, 424 aa, Streptococcus agalactiae
GTGAAATCTACATGGGAGAGTGCTTTGCCTGGTCTAACTGTTGAAGAAAAATTTGTTACTTTCAAGCAACGCCTTGAAGATGCAAAAAATGAAAATTTTGATGTCGTGCTCTTCTCATGGGGAGGAGATTATCCAGAAGGATCAACTTTCTATGGGTTATTCACGACTAATTCTGCGTATAATTATGGTAAATTTTCTTCTAAAGAGTATGACAATGCCTATCAAAAGGCAATTACTACTGACGCCTTGAAACCAGGAGATGCCGCTAATGATTACAAAACTGCTGAAAAAGCTTTATTTGATCAATCATATTATAACCCAGTTTATTATAGGGAAAAAAGGACTCCAAAATTCTAAATTAAAGGGGTTGGTAAGAAATTCAACTGGTTTGAATGTTGATTTTACTTATGCTTATAAGACAGAA

SEQ ID NO: 15294 - protein, 142 aa, Streptococcus agalactiae
  VARIANT 111: Xaa = Any Amino Acid
MKSTWESALPGLTVEEKFVTFKQRLEDAKNENFDVVLFSWGGDYPEGSTFYGLFTTNSAYNYGKFSSKEYDNAYQKAITTDALKPGDAANDYKTAEKALFDQSYYNPVYYXGKKGLQNSKLKGLVRNSTGLNVDFTYAYKTE

SEQ ID NO: 15295 - protein, 180 aa, Streptococcus agalactiae
TTGAAACCAGGAGATGCCGCTAATGATTACAAAACTGCTGAAAAAGCTTTATTTGATCAATCATATTATAACCCAGTTTATTACCTAGGGAAAAAAGGACTCCAAAATTCTAAATTAAAGGGGTTGGTAAGAAATTCAACTGGTTTGAATGTTGATTTTACTTATGCTTATAAGACAGAA

SEQ ID NO: 15296 - protein, 60 aa, Streptococcus agalactiae
MKPGDAANDYKTAEKALFDQSYYNPVYYLGKKGLQNSKLKGLVRNSTGLNVDFTYAYKTE

SEQ ID NO: 15297 - protein, 392 aa, Streptococcus agalactiae
TGCCTATCAAGCACTTTATTGTCATATCTCTGGTTTTTATCATTATCACCAAACCCATTAATATTGTGTTTAAAATTTTCTTTAATAAATTTCAAGCTAAAGAATTATCATCATTATTAACACAAGAAAAAACAAAAATAATGAAAGAAAAATCTGAAGATCATGAAGAAACAATTGAAGGAGCAGGAGCTATGATTGGTAATTTAGAGCGTCTAATTATGGCTATATTACTAATCTCAGGACAGTATGCTGCTATAGGTCTTGTTTTTACTGCAAAATCCATTGCACGTTACGATAAAATTTCTAAAAGTCAGGTTTTTGCCGAATATTATTTAATTGGATCATTGTTCTCAATTATAAGTGTTTTGATAACTCATTGGGTACTTTTGGTA

SEQ ID NO: 15298 - protein, 131 aa, Streptococcus agalactiae
LPIKHFIVISLVFIIITKPINIVFKIFFNKFQAKELSSLLTQEKTKIMKEKSEDHEETIEGAGAMIGNLERLIMAILLISGQYAAIGLVFTAKSIARYDKISKSQVFAEYYLIGSLFSIISVLITHWVLLV

SEQ ID NO: 15299 - protein, 513 aa, Streptococcus agalactiae
TTGGTAGAGGAAGGGCATTTCCAAAAAGCAGCTTTTATTATAGACCAACTAGCCCACTATACTTGCATTATCGTTTTTTACCATGCGCTTCCTACATATTTACCGCCTAATCATTGGCTTTTGCCTATCAAGCACTTTATTGTCATAGCTCTGGTTTTTATCATTATCACCAAACCCATTAATATTGTGTTTAAAATTTTCTTTAATAAATTTCAAGCTAAAGAATTATCATCATTATTAACACAAGAAAAAACAAAAATAATGAAAGAAAAATCTGAAGATCATGAAGAAACAATTGAAGGAGCAGGAGCTATGATTGGTAATTTAGAGCGTCTAATTATGGCTATATTACTAATCTCAGGACAGTATGCTGCTATAGGTCTTGTTTTTACTGCAAAATCCATTGCACGTTACGATAAAATTTCTAAAAGTCAGGTTTTTGCCGAATATTATTTAATTGGATCATTGTTCTCAATTATAAGTGTTTTGATAACTCATTGGGTACTTTTGGTA

SEQ ID NO: 15300 - protein, 171 aa, Streptococcus agalactiae
MVEEGHFQKAAFIIDQLAHYTCIIVFYHALPTYLPPNHWLLPIKHFIVIALVFIIITKPINIVFKIFFNKFQAKELSSLLTQEKTKIMKEKSEDHEETIEGAGAMIGNLERLIMAILLISGQYAAIGLVFTAKSIARYDKISKSQVFAEYYLIGSLFSIISVLITHWVLLV

SEQ ID NO: 15301 - protein, 641 aa, Streptococcus agalactiae
ATGGCAAGCCGTATATTGGGGATGGGAGACCTGCTAACACTTATTGAGCGCGCTAGTCAAGAATACGACGAAAAACGTTCAATGGAATTAGCGGAGAAAATGCGTGAAAACACCTTTGACTTCAACGATTTTATTGATCAATTAGATCAAGTTCAAAATATGGGGCCAATGGAAGATCTCCTTAAAATGCTTCCAGGAATGGCTAACAATCCAGCAATGAAAAACTTCAAAGTGGATGAAAACGAAATTGCTCGCAAAAGAGCCATTGTGTCATCAATGACTCCAGAAGAGAGAGAAAATCCAAATCTCCTCAATCCAAGTCGTAGACGTCGTATTGCTGCTGGATCAGGTAATACTTTCGTTGATGTTAATAAATTCATTAAAGATTTTAACCAGGCAAAACAAATGATGCAAGGCGTGATGTCCGGTGATATGAATAAAATGATGAAAAAAATGGGAATTGATCCTAATAACCTCCCTAAAGATATGCCTGGAATGGACGGAATGGATATGTCTAATTTAGAAGGTATGATGGGGCAAAATGGCATGCCTGACTTATCTAGTTTAGTGGCGATATGGACTTCAGCCAATGTGGTGGTGGCTTAAAAGGAAAAGTAGGAGCCTTTGCAGCTAAACATCAA

SEQ ID NO: 15302 - protein, 215 aa, Streptococcus agalactiae
  VARIANT 190, 197, 199: Xaa = Any Amino Acid
MASRILGMGDLLTLIERASQEYDEKRSMELAEKMRENTFDFNDFIDQLDQVQNMGPMEDLLKMLPGMANNPAMKNFKVDENEIARKRAIVSSMTPEERENPNLLNPSRRRRIAAGSGNTFVDVNKFIKDFNQAKQMMQGVMSGDMNKMMKKMGIDPNNLPKDMPGMDGMDMSNLEGMMGQNGMPDLSSLXGDMDFSXMXGGGLKGKVGAFAAKHQ

SEQ ID NO: 15303 - protein, 576 aa, Streptococcus agalactiae
ATGCACATGTTACGTCGCTGGTTAGGCGATACAGATTTTGCCGCAGGACTAAAAATTTATTTTGAAAAACATCAATATCAAAATACTATTGGTCGTGACCTTTGGAATGCACTTTCTCAAACCTCAGGAAAAGATGTTGCAGCTTTCATGGATTCTTGGTTAGAGCAACCAGGATACCCTGTGATGGCAGCCAAAATAGAAGAAGATGAGCTCATTTTAACTCAAAAACAATTCTTTATTGGTGAACACGAAGATAAGTCTCGCTTGTGGCAAATTCCTCTTAATAGTAATTGGGAAGGAATCCCAGAGATATTAACCGAGGAAACGGTAGTAATCCCCAATTTTAGTCAGTTAGCTGAAAAGAACAAAGAAAATGGTGCACTGCGTTTCAATACTGAAAATACTGCACATTACATTACTAACTATCAAGGTCAACTCTTAGAGCATATCATTTCTGATCTTCCTCTTATGGATAACATTTCTAAACTACAAATTGTACAAGAACGTCATTTACTTGCTGAAAGTGGTATGATTTCATATAGTAGTTTAGAAAATGTTATCCATAAGAGCNNNNNT

SEQ ID NO: 15304 - protein, 192 aa, Streptococcus agalactiae
  VARIANT 191, 192: Xaa = Any Amino Acid
MHMLRRWLGDTDFAAGLKIYFEKHQYQNTIGRDLWNALSQTSGKDVAAFMDSWLEQPGYPVMAAKIEEDELILTQKQFFIGEHEDKSRLWQIPLNSNWEGIPEILTEETVVIPNFSQLAEKNKENGALRFNTENTAHYITNYQGQLLEHIISDLPLMDNISKLQIVQERHLLAESGMISYSSLENVIHKSXX

SEQ ID NO: 15305 - protein, 562 aa, Streptococcus agalactiae
GTGGTTAATTGGCTCCTTCAAGAGTATGATTACTTAGAACTTGTTGATATTCCTAAACTAAATGGGATGGTTGAAGGGATTAATGTACCACAAGTTGCAAGGATGTACCCTCATCATTTTCAAGGTGAAGGACAATTCGTTGCAAAACTGAGAGATACTAGATCTAAGGAAGCACAGAAAATTAAGCCAAAAGCACAGAAAATAAATAAAATGCAGTTACAATTGTGGCAACAATTTGCACAAGACCATTTAAAGATAGACTTGAACGGTGTTTTAGATGTTTTCGGCGACCAACTCTATCTTCTACCTAATGGTCTCCCTGATTTGTCTAAATTAAAAATAGCACGCAATGGTCTCCATCTAGGCACTTTCAAGAAGAATCGTTTTGAGCCATCGTTTGCTTTAGGAATGGCACTTAGCGAACATGACCTAGTACAGTCTATTGAAATTGATATAGAACAGTTTGAGGTGTACGTATCTGGAAATGTAGTCAAACTAGACAAGACTGTTCCAAACGGTTGGTATCAAATTCTTGTAAAAGGCAATGGATTAGGTTTGCAAA

SEQ ID NO: 15306 - protein, 188 aa, Streptococcus agalactiae
MVNWLLQEYDYLELVDIPKLNGMVEGINVPQVARMYPHHFQGEGQFVAKLRDTRSKEAQKIKPKAQKINKMQLQLWQQFAQDHLKIDLNGVLDVFGDQLYLLPNGLPDLSKLKIARNGLHLGTFKKNRFEPSFALGMALSEHDLVQSIEIDIEQFEVYVSGNVVKLDKTVPNGWYQILVKGNGLGFAK

SEQ ID NO: 15307 - protein, 663 aa, Streptococcus agalactiae
TTGGACGCTAAATTTGATTTCGCTAAACAATTAGTGTATAAAGCTGGTCAATTCATTAAATCTGAGATGCAAAATACTTTTGATGTTGAGGAAAAGTCTCGATTTGATGATTTAGTGACAAGTCTTGATAAAAAAACACAAAAATTATTAATTCAAGAAATTATTCAACATTACCCAGATGATAATATACTTGCCGAAGAAGATGATGTGCGCTCACCCATTGCACAAGGTAATGTTTGGGTTTTAGACCCTATTGATGGAACTGTTAATTTTATTGTTCAAAAAGATAACTTTGCTGTTATGTTAGCTTATTACGAAGAAGGCGTTGGACAATTTGGTATCATCTACGACGTTATGGCTGATATTCTTTACAGCGGGGGAGGACATTTTGATGTCTATGCTAACGATAAAAAAATTTTCCTTTCAAGAGGTCCTTTAGAACGTTGCTTACTTGGAGTAAATTCTGCTATGTATGCAGAAAATGATTGCGGTATTGCCCATTTAGCTTCTGAAACCTTAGGTGTTCGTATCTATGGTGGTGCTGGAATTAGCATGGCAAAAGTCATGCAGGGCAAATTATTAGCTTATTTTTCGTATATTCAACCTTGGGAATATGCTGCAGCAAAAATCATGGGGGGAGACATTAGGATTTACCTTNNNNNT

SEQ ID NO: 15308 - protein, 222 aa, Streptococcus agalactiae
  VARIANT 221, 222: Xaa = Any Amino Acid
MDAKFDFAKQLVYKAGQFIKSEMQNTFDVEEKSRFDDLVTSLDKKTQKLLIQEIIQHYPDDNILAEEDDVRSPIAQGNVWVLDPIDGTVNFIVQKDNFAVMLAYYEEGVGQFGIIYDVMADILYSGGGHFDVYANDKKIVPFQECPLERCLLGVNSAMYAENDCGIAHLASETLGVRIYGGAGISMAKVMQGKLLAYFSYIQPWEYAAAKIMGGDIRIYLXX

SEQ ID NO: 15309 - protein, 300 aa, Streptococcus agalactiae
GTGCTGAAATTGAGGGAAAACATGATTAGTAGTAATTATAGTTATCCTCTTGATCCTTCATGGAATACGGAAGATATTACTAAGGTACTTCGCTTTTTAAATCAAGTTGAACACGCCTATGAAAATAGTGTTAAAGTTGATGATTTGCTAGATAGCTATAAAGAATTTAAAAAATTTGTTAAATCCAAGGCGCAGGAAAAACAAATTGACCGTGAATTCCAGAGAACTAGCGGTTATTCCACTTATCAAGCTGTTAAAGCAGCACAACAACAAGCGAAAGGATTTATTTCACTTGGACGC

SEQ ID NO: 15310 - protein, 100 aa, Streptococcus agalactiae
MLKLRENMISSNYSYPLDPSWNTEDITKVLRFLNQVEHAYENSVKVDDLLDSYKEFKKFVKSKAQEKQIDREFQRTSGYSTYQAVKAAQQQAKGFISLGR

SEQ ID NO: 15311 - DNA, 411 bp, Streptococcus agalactiae
atgattaccttatttttatcacccagctgtactagttgtcgaaaagcgcgtgcttggctaagtaagcatgaggttgcttttgaagagcataacattattacaagtccactcaataaagaagaactattacaaattctatcgtttacagaaaatggtacagaagacattatttccacacgttcaaaagtctttcaaaaacttgctattgatgtagacgaattatcaacgtcttcattaatggaattaatttcagaaaatccaagtcttttacgacgcccaattattttagacaaaaaacgtatgcagattggttttaatgaggatgaaattcgtgccttcttaccgcgtgactatcgtaaacaagaactgaaacaggccactattcgtgctgaaattgagggaaaacatgat

SEQ ID NO: 15312 - protein, 137 aa, Streptococcus agalactiae; identical to SEQ ID NO: 6398

SEQ ID NO: 15313 - DNA, 930 bp, Streptococcus agalactiae
atgaaaatccattacattaatgattataaagatattcaagctaaagaagattgcgtcttagttttgggctattttgatggcttacatctgggacataaagccctctttgataaagctaaaaaaatcgcgaccgaaaaaaatttgaaaattgtcgtcttaacgtttaatgagacacctcgtctaaccttcgctcgcttccaacctgaattattgctacatcttacctctccagaaaaacgttctgaaaaatttcaagagtatggcgtcgatgagttatatttaatgaattttaccagtcatttttcaaaagtatcttctgacctttttattaagaaatatatttatggtctcagagcaaaagctgctgttgtcggttttgattataagttcggtcataatcgtaccagtggtgattatctagcgcgtaatttcaagggaccagtctatattattgatgaaatttctgaaggtggtgaaaaaatctcttctacacgtattcgtcaattgattacagagggtaatgttgagaaagctaaccaacttttgggttatgagttttcaacctgtggcatggtagtacatggagatgctagaggacgaactatagggttcccaactgctaatctagctcctattaatcgcacttacttacctgcagacggtgtttatatttccaatgttctgattaatggaaaatattatagagcaatgacgagcattggaaaaaatatcacttttggtggtacagaacttcgtttagaagctaatatctttgattttgatggcgacatttatggagaaactattgaaattttctggttaaaaagaatcagagaaatggtaaagtttaatggtattgacgatcttgtaaaacaacttaaaaaagataaagaaattgctttaaattggaaaaaagatagtcaaactctt

SEQ ID NO: 15314 - protein, 310 aa, Streptococcus agalactiae; identical to SEQ ID NO: 6400

SEQ ID NO: 15315 - DNA, 843 bp, Streptococcus agalactiae
atgacatcacacgatgctgtattcaagcttcgaaagatattacatacaaaaaaaataggacacggcggaactcttgatccagatgttgttggggttttaccaattgcggttggaaaagccactcgtgttattgaatatatgacagaaagtggcaaaatttatgaaggagaaatcactttaggatatgccacaagtacagaagattctagtggagaggtcatttcaagaactccactaactcaatccgatcttagcgaggatgttgtggatcatgcgatgaaaagttttaccggtccaattacacaagttcctcctatgtattcagcagttaaagtaaatggtaaaaaactctatgaatatgctcgttcaggagaagaagtagagcgacctwaacgacaaataacaatttctgaatttagacgcacaagcccattgtacttcgaaaaaggcatctgccgttttagtttctatgtctcatgcagtaaaggtacctatgttaggacgttagctgttgatctaggaataaaactaggatatgctagccatatgtctttcctaaaaagaacctcatctgcaggattatctattacacaatcattaacgcttgaagaaattaatgaaaaatataagcaagaagatttttcatttttacttccaattgaatatggtgttttagatctcccamaagttaacctarctgaggaagataaagttgaaatctcatacggacgtcgtatcttattagaaaatgaagcagataccttagcagctttttatgaaaatagagttatcgctatactagaaaaacgtggcaatgaatttaaaccacacaaagtattgtta

SEQ ID NO: 15316 - protein, 281 aa, Streptococcus agalactiae
  VARIANT 131, 229, 233: Xaa = Any Amino Acid
MTSHDAVFKLRKILHTKKIGHGGTLDPDVVGVLPIAVGKATRVIEYMTESGKIYEGEITLGYATSTEDSSGEVISRTPLTQSDLSEDVVDHAMKSFTGPITQVPPMYSAVKVNGKKLYEYARSGEEVERPXRQITISEFRRTSPLYFEKGICRFSFYVSCSKGTYVRTLAVDLGIKLGYASHMSFLKRTSSAGLSITQSLTLEEINEKYKQEDFSFLLPIEYGVLDLPXVNLXEEDKVEISYGRRILLENEADTLAAFYENRVIAILEKRGNEFKPHKVLL

SEQ ID NO: 15317 - DNA, 429 bp, Streptococcus agalactiae
atgaagattagaactgctacactagacgatagtgaaaaattagtccctttgtatcaagaattaggatacgcaatatcattatcagagattcaatctattttaaaggttattcttactcattcagattatggctttttgatagctgaggataatggcaaactactcgccttcgttggatatcataaactttacttttttgaaaaaagtgggacttactatcgtattttagcactagtagttaatgaaaagcaccgtcgtaaaggcatcgctagtcaacttattaatcacgttaaacagctagctaaaacagatggaagtgaagtactggctttaaatagcagtttaaaagaatatcgtcaggaagcttatcatttttatgaaaacctagggttcaagaaggttagtacaggcttttcatactatttagat

SEQ ID NO: 15318 - protein, 143 aa, Streptococcus agalactiae; identical to SEQ ID NO: 6404

SEQ ID NO: 15319 - DNA, 1269 bp, Streptococcus agalactiae
atgaacgaaatcaaatgccctcattgtggaacagcttttgccatcaacgagtctgaataccatcaattactagaacaaattcgtggagatgcttttgacaaagaagtaagtgaacggttggaaaaagaacttctaatattaggggagcaagcaaaaaatcaattacaggaagttgttgtagaaaaagacaaggagatagctaaacttcagtacaaagtcaaacaatttcttatagaaaaagacaatcttctcaaagacaatgagtaccaactcgctgagcaattaaatcaaaaagacatgatgcttcgcgaccttgaaaaccaaatcgatagactacgtttagagcatgaaaatagcttgcaagaggcgctaacaaaagtcgaacgagaaagagatgcaatacaaaatcagttgcacattcaagaaaaagaaaaagatttagctttagcttcagtaaaaagtgattatgaagtacaactaaaggcagccaatgaacaagtagaattctataaaaacttcaaagctcaacagtmtactaaagcagtaggagaaagtttagaacattatgctgaaacagaatttaataaagtgcgacatttggcctttcctaatgcttattttgagaaggacaatacattatcaagtcgtggctcaaagggggactttatctatcgagaaaaggatgaaaatgaccttgagtttttaagtatcatgtttgaaatgaaaaatgagtctgatgatactatcaagaagcataaaaatgaagattttttcaaagaattagataaagatcgtcgtgaaaaatcttgcgaatacgcagttttagtaactatgcttgaagcagacaatgactattataatactggaattgttgatgttagtcacaaataccctaaaatgtacgttatacgtccacaattttttatccaattaattggtattctaagaaatgcagcactcaataccttaaaatataaacaagagcttgctttgatgaaagaacaaaatattgacatcacacattttgaagaagatttagatattttcaaaaatgcatttgctaaaaattataattctgcaagcaaaaatttccagaaagcaatcgatgaaatagataaatctattaaacgtatggaagctgttaaggctgctttaacaacgtctgaaaatcaactacgtcttgcaaataataaattagacgatgtttctgtcaagaaattaacaagaaaaaatccaacaatgaaagcaaaattcgatgctctaaaagac

SEQ ID NO: 15320 - protein, 423 aa, Streptococcus agalactiae
  VARIANT 178: Xaa = Any Amino Acid
MNEIKCPHCGTAFAINESEYHQLLEQIRGDAFDKEVSERLEKELLILGEQAKNQLQEVVVEKDKEIAKLQYKVKQFLIEKDNLLKDNEYQLAEQLNQKDMMLRDLENQIDRLRLEHENSLQEALTKVERERDAIQNQLHIQEKEKDLALASVKSDYEVQLKAANEQVEFYKNFKAQQXTKAVGESLEHYAETEFNKVRHLAFPNAYFEKDNTLSSRGSKGDFIYREKDENDLEFLSIMFEMKNESDDTIKKHKNEDFFKELDKDRREKSCEYAVLVTMLEADNDYYNTGIVDVSHKYPKMYVIRPQFFIQLIGILRNAALNTLKYKQELALMKEQNIDITHFEEDLDIFKNAFAKNYNSASKNFQKAIDEIDKSIKRMEAVKAALTTSENQLRLANNKLDDVSVKKLTRKNPTMKAKFDALKD

SEQ ID NO: 15321 - protein, 174 aa, Streptococcus agalactiae
ATGAATATTAGCACAAAGGAACTGTTAAATATTGCAATACCAAGTATCCCGCTTTTTAGACAGGATTATCTTATCCAACGTTATAAACAGGGGCTCAACGATTACAAACGTAAGATAGCACGTGCAGAGCAGGAGTGGGAACGTATCCAAAATGACATCAGACAACAACTTAGC

SEQ ID NO: 15322 - protein, 58 aa, Streptococcus agalactiae
MNISTKELLNIAIPSIPLFRQDYLIQRYKQGLNDYKRKIARAEQEWERIQNDIRQQLS

SEQ ID NO: 15323 - protein, 849 aa, Streptococcus agalactiae
TTGATATTACTATTTACAGCAGATTTCCTTACCTATATTATTATTGAATTGATTATCTCGCTTGATTTTTGGAAACTAGAGTGGGATAGCGATATCGTCCAGTTAATCATTTTACTAGCAACTTCAATTAGTACGGTAATGTTATTTATGTGGGTGAAATTTAAAGAGAAGCGTCCAATTAGTTCTCTAGGGCTATTTAAAGAAGGAGCCCTAACAGAATTATCTAGAGGATGGTTAGTCGGGAGCGTTCTCTTTGGAGCCTGCTTAATATTAACAATAATTTCAGGCTCTGGAGTTATCGAAACTGTTCGTTTTACAGCTGATAAATTGATTTGGTTTCTTATTTTTGCTGTTGGATGGCAGGTACAAAGCGCATCTGTTGAAATATTGTGTCGTGGATGGTTACTTCCGGTGAGTGCCACAAAGTATAGTAAGATAGTTTCTGTCAGTATCAGTTCAATCTTTTTCGGTCTTCTGCATAGCGCTAATAATCATGTAAGCCTTATCTCGATTTTCAATCTGTGTCTCTTTGGACTATTTCTATCGCTCTATGTTATTTTAAAAGGTAACATCTGGGGGGCGTGTGGTATTCATGGCGCCTGGAACTGTGTACAAGGGAGTGTCTTTGGAATCGAAGTTAGTGGAGAGCCAATGTTGTCTAACTCCCTAGTCCATGTTAAAACCTATGGTGCTGACTGGATTAGCGGTGGAAAATTTGGTGTGGAAGAGCATGATTACCAGTATTGTTCTTATCGTAGCATGTTATTGGCTTTATCAAAACGAATTTTCCTTACGACTAATAGATTTAATCTAAATAAGCTTCTCTTACTGGAAGCTTATTTTTTATTT

SEQ ID NO: 15324 - protein, 284 aa, Streptococcus agalactiae
  VARIANT 243: Xaa = Any Amino Acid
MILLFTADFLTYIIIELIISLDFWKLEWDSDIVQLIILLATSISTVMLFMWVKFKEKRPISSLGLFKEGALTELSRGWLVGSVLFGACLILTIISGSGVIETVRFTADKLIWFLIFAVGWQVQSASVEILCRGWLLPVSATKYSKIVSVSISSIFFGLLHSANNHVSLISIFNLCLFGLFLSLYVILKGNIWGACGIHGAWNCVQGSVFGIEVSGEPMLSNSLVHVKTYGADWISGGKFGVEXSMITSIVLIVACYWLYQNRIFLTTNRFNLNKLLLLEAYFLF

SEQ ID NO: 15325 - protein, 360 aa, Streptococcus agalactiae
TTGAAAGAAAAAGCAGCATTTTTATTATTACCAAAACCACCAGCTAAAGGATCTAAAATAGCTTTAGAGTATATCAATTGGATTTGGAAAAAACTGTCCTTCACACAAAAAGTAACTGCTAGAAATATTTTTCGTTACAAACAAAGGATGATTATGACCATATTTGGAGTTGCTGGATCAGTAGCGCTCTTATTTTCAGGTCTAGGAATACAATCCTCCTTAAAGCAAACCGTCAATGAACATTTCGGTCGTATTATGCCCTATGATATATTGCTAACATATAACACAAATGCTTCTCCCCCAAAAATACTTGAACTACTTTCAAAAGAATCAAAAATAGACAAATACCAACCCNNNNNT

SEQ ID NO: 15326 - protein, 120 aa, Streptococcus agalactiae
  VARIANT 119, 120: Xaa = Any Amino Acid
MKEKAAFLLLPKPPAKGSKIALEYINWIWKKLSFTQKVTARNIFRYKQRMIMTIFGVAGSVALLFSGLGIQSSLKQTVNEHFGRIMPYDILLTYNTNASPPKILELLSKESKIDKYQPXX

SEQ ID NO: 15327 - protein, 498 aa, Streptococcus agalactiae
ATGCCACTATCTCAAGACAAGCTATTAATGAAAATTAACAGACCGACTATCTCTTTTAACGAACAAAAGAGCTTCTAAAATTGAGACATAACACCCAAATAATGGAATCGCCTCAAATTATTGTCTACAACCGTACTACCTTTCCTGGAGGACAAGGATATAACACTTTTGACTCCAGTACAAATAGCACTTCTAAAATCAGTAATCTTTTCCCCATTATTTTATATTTAGTCGCAGCATTAGTAACTTAACAACAATGACTAGGTTCGTCGAGGAAGAAAGAACCAACGCAGGCATATTAAAAGCACTAGGCTATAGTGACCGCCAAGTTATCTTTAAATTTATTATTTATGGTTTTATAGCAGGAACATTAGGGACTACTTTGGGTATCATTGGAGGGCATTATCTTTTACCTCGTATTATTTCTGATATCATTTCCAAAGACCTGACTATTCCAAACACACAGTATCATTTTTCTTAAATTACAGTTTACTAGCC

SEQ ID NO: 15328 - protein, 169 aa, Streptococcus agalactiae
  VARIANT 5, 161: Xaa = Any Amino Acid
MPLSXRQAIQMKIKQDRLSLLKRTKELLKLRHNTQIMESPQIIVYNRTTFPGGQGYNTFDSSTNSTSKISNLFPIILYLVAALVTLTTMTRFVEEERTNAGILKALGYSDRQVIFKFIIYGFIAGTLGTTLGIIGGHYLLPRIISDIISKDLTIPNTQYHXFLNYSLLA

SEQ ID NO: 15329 - protein, 787 aa, Streptococcus agalactiae
ATGGGAAAGACATTTTGGAAAGATATCTATCGATCAATTACGACTTCAAAAGGTAGATTTTCATCAATCCTCTTACTTATGATGTTAGGCTCATTTGCTTTTATAGGACTGAAGGTCTCAGCACCTAATATGCAAAGAACAGCACAAAATTACCTTGCTCATCATCATGTTATGGATATTACCGTTTTCAATTCTTGGGGACTTGACAAACATGATCAAACTGTTTTAGAAAGCTTAAAAGGATCACAAGTTGAATTTTCTTACTTTGTAGATACAACCCCTCAACAGAATAGTAAATCTTATCGATTGTATTCCAATACTAAAACGATATCAACCTTTGATCTTGTTAAGGGACGTCTCCCTTTAAATAAATCAGAAATTGCTCTCTCATTTCAGGAACGAAAAAAATATGCAATAGGTGATAAAATTAATTTTAAACAAGATAAAAACAAACTGTTTTCAAATACAGGTCCTCTAACTATTGTAGGTTTTGTTAATTCTACCGAGATTTGGTCTAAGACAAACCTTGGTAGTTCTCAAACAGGGGACGGCGACTTAGATAGTTATGGCGTATTAGATAAGACAGCATTTCACTCTCCAGTATATACAATGGCAAGGGTAACTTTTAAAGATCTTAGGTTGATTAACCCTTTCTCAATAAGTTACAAAGAAAAAGTAGCGAAATACCAAGAAAAGGTATCGCGAAAATTAAATATTCCAATAAAATAAGATATACCAAAACAAAAAAGAGAGCCTACGTAAAATCGATGAGGAGAAAAAAGCCTAC

SEQ ID NO: 15330 - protein, 263 aa, Streptococcus agalactiae
  VARIANT 240: Xaa = Any Amino Acid
MGKTFWKDIYRSITTSKGRFSSILLLMMLGSFAFIGLKVSAPNMQRTAQNYLAHHHVMDITVFNSWGLDKHDQTVLESLKGSQVEFSYFVDTTPQQNSKSYRLYSNTKTISTFDLVKGRLPLNKSEIALSFQERKKYAIGDKINFKQDKNKLFSNTGPLTIVGFVNSTEIWSKTNLGSSQTGDGDLDSYGVLDKTAFHSPVYTMARVTFKDLRLINPFSISYKEKVAKYQEKVSRKLNIXNKIRYTKTKKRAYVKSMRRKKAY

SEQ ID NO: 15331 - DNA, 699 bp, Streptococcus agalactiae
atgtcctatattgaaatgaagcattcctataagcgttatcaaacaggtgaaaccgaaattgttgctaacaatgatattagtttcagtattgaaagaggtgagttggtggttattcttggtgcatccggcgctggcaaatctactgttctcaatatactaggagggatggatagtaatagtgaaggtgaagttttaattgatggtaagaatattgctaattataccatcagggaattgactcgttaccgtagatatgatgtcgggtttgtttttcaattctataacttagtccctaatctaacagcactagagaatgtagaattggcttcagaaattgttccaaaggcattagatgcccaacaggcattagaaaacgtaggtttgggacaccgtatcaatcattttccagcacagctttccggtggcgaacagcaacgcgttgcaatagcacgagctattgccaaaaaacctaaactgttactttgtgatgaacctactggtgctttagattaccaaactggaaaacaagtactagccatcctgcaaaagatggcgcaatcaaaagaaacaactgtgatcattgttactcataatactgccttagcgccaattgcaaatcgcgtgatccatatgcatgattcaaaaatcagtgatattgtaataaacgagaatccaagtgatattcagaacatagaatat

SEQ ID NO: 15332 - protein, 233 aa, Streptococcus agalactiae; identical to SEQ ID NO: 1880

SEQ ID NO: 15333 - DNA, 2118 bp, Streptococcus agalactiae
atggcaactacgacaaaaacgtcgaccaaaaaaacaagtaaaaaaaaatcagctactgctaaaaaaaatctagttattgtggagtctcctgcaaaagcaaagactatcgaaaaatacttaggacgtaactataaagttgtagcctcagtaggtcatatccgtgatttaaaaaagtcaagtatgtccattgattttgagaataattacgaaccacaatatattaatattcgtggtaaaggacctctcattaatgatttaaaaaaagaagctaaaaaggctaaaaaagtttacctcgcgagtgacccggaccgtgaaggagaagctatttcctggcatttagcgcatattttagatttagacaaagaagacagaaaccgtgttgttttcaatgaaatcacaaaagatgctgttaaaaatgcttttgtggaacctcgtcagattaacatggatctcgttgatgctcagcaagcacgacgtgttttagatcgcattgttggttattctatctcacctattttatggaaaaaagtaaaaaaagggctatcagctggacgtgtacaatcagttgctcttaaactaatcattgatcgtgaaaatgagattaaggctttccaaccggaggagtattggactattgacggttcctttaaaaaaggaacacgtaaattcaatgccactttctacggtttagacggaaagaaattcaaattatcgaataatgaagacgtcaaaacagttctaaaacgtattaaaactgatgaattcttagttgaaaaagttgaaaaaaaagagcgtcgtcgtaatgcaccattaccgtatacaacttcttcattgcaacaagatgcagctaataaaatcaattttcgaactcgtaaaaccatgatgattgcgcaacagctgtacgaaggacttagcttaggcacagcaggtcatcaaggtctgattacctatatgcgtactgattctacacgtattagtccgttagcacaaaatgaagcaacagaatttattactaaccgttttggtgcaaattattctaaacatgggaataaagttaaaaatgcttctggagcacaagacgctcacgaagctattcgcccatctagtgttaatcatacacccgaaagtattgctaagtatttagacaaagatcaactaaaactttacactcttatctggaaccgttttattgcaagccaaatgacagcagcagtctttgacacaatgaaagttaatttaacgcaaaatggtgttacttttattgctaatggtagccaagtcaagtttgatggttacatggctgtttataacgatactgacaaaaataaaatgttaccagatatggaggaaggagaaagtgttaaaaaggttaatacgaatcctgaacaacacttcactcaacctcctgcaaggttttcagaagcaagtctcattaaaacacttgaagaaaacggtgtaggtcgtccttcaacttatgccccaacgcttgagactattcaaaaacgttattatgttaagcttgcagctaaacgcttcgaaccaactgaacttggtgaaattgttaatagccttattgtagaatttttcccagatattgttgatgttaccttcactgccgaaatggaagggaaactagacgaagttgagattggtaaagagcagtggcaaaagattatcgatgaattttataaaccatttgaaaaagaacttgcaaaagcagaaactgaaatggagaaaattcaaataaaggatgaacctgctggatttgattgcgagctatgtggatcaccaatggtaataaaactaggacgttatggaaagttttatgcgtgtagcaatttccctgaatgtcataacacaaaagctatcactaaggaaataggtgttatttgtcctatctgtcaaaaaggacaagttattgagcgaaaaacaaaacgcaatcgtatcttttatggctgtgaccgctacccagaatgtgagtttacatcttgggacaaacctattggacgaacttgccccaaatcaaatgatttcttagtggagaaaaaagtacgcggtggtggtaaacaagttgtttgctcaaatgaaaaatgcgactaccaagaagagaaaattaaa

SEQ ID NO: 15334 - protein, 706 aa, Streptococcus agalactiae; identical to SEQ ID NO: 1882

SEQ ID NO: 15335 - DNA, 840 bp, Streptococcus agalactiae
atgaatcattttgaactatttaagcttaaaaaagctggactaacaaatcttaatatcaacaatattatcaactatctcaaaaagaatagtttaacttctctatctgttcgcaatatggccgtagtatcaaaatgtaaaaatcctactttctttatagaaaattataaacagctagaccttaaaaaacttcgacaagaattcaaaaaatttccagttctatcgattttggattctaactatcctttagagttaaaagaaatatataatccaccagttctacttttttatcagggtaatattgaacttctatctaaacctaaattagctgtagtgggggcaagacaggcatctcagataggttgtcagtctgttaaaaagattatcaaggagactaacaatcaatttgttatcgtaagtggtttagcgcgtggcattgatacagcagcacatgttagtgctttaaaaaatggcggcagtagtatagctgttatcgggagtggtttagatgtttattatccaacggagaataagaaacttcaagaatatatgtcatataatcatctcgtattatcagaatattttaccggagaacaacccttgaaatttcatttccccgaacgtaaccgtattattgcagggctgtgtcaaggtattgtggttgccgaagctaagatgagatctggaagtttaattacctgtgaaagagcattagaagagggacgagaagtttttgccattcccggaaatattatcgatggcaaatcagatggatgccaccatcttatccaagaaggagctaaatgcattatttcaggaaaagatatcctttctgaatatcag

SEQ ID NO: 15336 - protein, 280 aa, Streptococcus agalactiae; identical to SEQ ID NO: 1884

SEQ ID NO: 15337 - DNA, 1026 bp, Streptococcus agalactiae
atgacaaaaaaacttattattgctatattagcactatgcactatcttaaccacttctcaagctgttttagctaaagaaaaatcacaaactgttaccataaaaaacaactattcggtctatattaaaaaagaaaaaagagacaagccggataataaaaagcaaatcagcgagacacttaaagttccttttaaacccaaaaaagtagttgtttttgatatgggagctttggatactatcacagctttaggagctgaaaaatctgttattggtatcccgaaggctaaaaatgctctaagtttattgcccaataacgtcaaatctgtttataaagctaagagataccaagacgtaggaagtctcttcgaaccaaactttgaagctattgctcgtatgcaacctgatgtggttttcctaggagcacgtatggcttctgttgataatattgaaaaattaaaggaggctgcacctaaagcagcattagtatatgctggagtcgactcaaaaaaagtatttgacaaaggagttgctgagcgtgtcacaatgttagggaaaatcttcgaccaaaataaaaaggcaaaaacctttaataaagatatcgcacaagctgttcttaaattgcagaaaactattgagaaaaaaggtaaacctacagctctatttgtaatggcaaacagcggtgaacttttaactcaatcaccttctggtcgttttggttggattttctctgtaggtggatttaaagcagtcaatgaaaatgaaaaactaagttcacatggtactcccgtatcttatgaatacatcgctgaaaaaaatcctaactatctctttgttttagatcgtggagcgactattggacaaggagcttcatcaaaagaactttttaataacgatgttattaaagcaactgatgctgtcaaaaacaaacgtgttcatgaggtagatggaaaagattggtatatcaattcaggcggaagccgagtaacactccgtatgattaaagatgtacagaactttgttgataatcgt

SEQ ID NO: 15338 - protein, 342 aa, Streptococcus agalactiae
MTKKLIIAILALCTILTTSQAVLAKEKSQTVTIKNNYSVYIKKEKRDKPDNKKQISETLKVPFKPKKVVVFDMGALDTITALGAEKSVIGIPKAKNALSLLPNNVKSVYKAKRYQDVGSLFEPNFEAIARMQPDVVFLGARMASVDNIEKLKEAAPKAALVYAGVDSKKVFDKGVAERVTMLGKIFDQNKKAKTFNKDIAQAVLKLQKTIEKKGKPTALFVMANSGELLTQSPSGRFGWIFSVGGFKAVNENEKLSSHGTPVSYEYIAEKNPNYLFVLDRGATIGQGASSKELFNNDVIKATDAVKNKRVHEVDGKDWYINSGGSRVTLRMIKDVQNFVDNR

SEQ ID NO: 15339 - DNA, 759 bp, Streptococcus agalactiae
atgattcaaataaacaatttacataagttctatggccaaaaggaaatattaaaagacattaatatttcgattcctaaaggaaaagtaacagctattttaggtccaaatggatctggaaagagtacattgctgagttgtatcagtcgacttgaaccttatgataatggtgaaattttccttgataaagtaccattagcccactacagttcaaatgacttagccaaaacattagccatattaagacaatctaatcacttaacactcaagataaaggtgagtgacttgataggattcggtagatttccttatagtaaaggacggttaagtcaaaaagataaagctgtcatagaatcagttatatcttatatggatttaaacgatatagctgacgagttcattaataacctcagcggaggtcaaattcaaagagcttttatcgcaatgacaatggcacaagatactcaatatatttgcttagatgagccactcaacaatttagatatgaaatatgctgttcaaatgatggatcttatcaaacgatatgcgtatgagtttaataaaactatagtgattattattcacgacatcaattttgcaactcactacgctgacaatgttgtcgctttaaaagaaggacaagtggtgtcttgtgggactgtcgaagatgttatgcaagaaaaaatcctttctcatttatttgatatgcctatccgtatcgaaactgttgatggtaaaccaattatccttttttgtacaacg

SEQ ID NO: 15340 - protein, 253 aa, Streptococcus agalactiae
MIQINNLHKFYGQKEILKDINISIPKGKVTAILGPNGSGKSTLLSCISRLEPYDNGEIFLDKVPLAHYSSNDLAKTLAILRQSNHLTLKIKVSDLIGFGRFPYSKGRLSQKDKAVIESVISYMDLNDIADEFINNLSGGQIQRAFIAMTMAQDTQYICLDEPLNNLDMKYAVQMMDLIKRYAYEFNKTIVIIIHDINFATHYADNVVALKEGQVVSCGTVEDVMQEKILSHLFDMPIRIETVDGKPIILFCTT

SEQ ID NO: 15341 - protein, 972 aa, Streptococcus agalactiae
ATGATTAAGGATTTAGAGATACCAAAATTACTTATTTTACTGATACTACTAATTGCTACCATTATTTTGTTTTTAATTTATGGTATTCCAACTGACGCAAATGAATTTTTGATTATCTATATCCTAAAAACACGTTATCAAAAATTGATTGCATTAATTTTGGTTGGTATCTGCATTGGTAGTTCTAGTCTTATTTTTCAAACTCTAACCAATAACCGACTTTTAACTCCGTCCATTATTGGTTTAGATAGCTTATATGTTCTTATCCAAACAGGATTAATGTATTTAATCGGAGCTCAGCGTGTCATAAAATTTTCATCTTTTAGCAGCTTCCTCCTTTCATTATTATTAATGGTTGGATTCGCTTACTTATTATTTACGATACTTTTTCGAAATAAAAAACAGTCTTTGTATTTTGTTCTATTAGCTGGACTCATATTTAATACATTATTTTCTTCTATCTCATCCTTTATTCAAGCCATTATGGACCCCAACGATTTTATGATTTTACAAAATCAGCTCTTTGCTAGTTTCAATGCTATTAATACCAAGATCCTTTGGATTTCTTTCATTATCATTGTCGTTAGCTTTGTCATTAATTGGCCTTTTATAAAGGAATTGGATGTCTTACTATTGGGTAAAGAAAATGCGATATCACTCGGCATCTCATATCAAAAGCTTACTACTAGAATTTTTTTATGGTTAGCATTGATGGTAGCTATAGCAACAGCATTAGTTGGGCCGATTACTTTTTTAGGCTTACTTGTAGCACATATTACCTATCACAGTTTTCATACCTTTAGACATCAAATATTAGTTCCTATAGCCATTGTTATCTGTATCTTTACACTTGTCTTAGGGCAGCATCTCGTTCAAAATCTATTACACCTCACTGTTCAACTAAGTGTTCTCCTCAACCTTATCGGGGGAAGTTATTTTATATTCACCTTAATCAAAGGAAGGAAAAACTTA

SEQ ID NO: 15342 - protein, 324 aa, Streptococcus agalactiae
MIKDLEIPKLLILLILLIATIILFLIYGIPTDANEFLIIYILKTRYQKLIALILVGICIGSSSLIFQTLTNNRLLTPSIIGLDSLYVLIQTGLMYLIGAQRVIKFSSFSSFLLSLLLMVGFAYLLFTILFRNKKQSLYFVLLAGLIFNTLFSSISSFIQAIMDPNDFMILQNQLFASFNAINTKILWISFIIIVVSFVINWPFIKELDVLLLGKENAISLGISYQKLTTRIFLWLALMVAIATALVGPITFLGLLVAHITYHSFHTFRHQILVPIAIVICIFTLVLGQHLVQNLLHLTVQLSVLLNLIGGSYFIFTLIKGRKNL

SEQ ID NO: 15343 - protein, 960 aa, Streptococcus agalactiae
ATGAAAAAGCTATTAACCACTCCTGTAATGGGTTGTACTTTGGTTATACTTTCTCTAACGTCCCTATTTGTTGGTGTTAAATCTATCCCACTGGAGCAAATAACACACCTTAATCAATCACAGGTAGATATTTTTTTAGCGAGTCGCTTACCAAGAACCATTAGTATCCTAATATCTGGTGCAAGTTTGTCAGTCTGTGGCCTGCTAATGCAACAACTCACCCAAAACAAGTTCGTTTCACCGACAACTTCAGGGACTATGGATTGGGCGAAATTAGGAGTAGTTGTTACGCTGATTTTCTTTAAAAATACCTCTATTTTTATTCAACTATGTATTGCTTCAGGTTTTGCCATTTTAGGATCGCTGCTTTTTGTAACTATTTTAAAAATGATTACTTTTAAGGATAATATTTTTATACCTCTTATCGGACTGATGCTTGGACAAATTGTAGCAGCAGCAACAGTATTTTTAGGAACACATTTTCAAGTACTACAATCTGTCAACAGTTGGCTTCAAGGTAATTTTTCCATCATGACTAGCCATCGCTACGAAATTCTTTACTTAGCATTGCCATGTTTGTTTTTAGTGTATTTTTTTGCTCATCAGTTTACCATTGTTGGGCTTGGAGAAAGCTTCGCTAAAAATTTAGGGATTGCTTATGAAAAGATGATTTACTTTGGTTTAGTTTTGGTTTCAATTATGACATCCCTAGTCATTATTATCGTAGGAGCTTTACCTTTCTTAGGTTTAATCGTACCTAATCTAATTAGCTTAACTAAAGGGGATCATATGTCCTCAACTATCTTAGAGACATCGCTTTTAGGGGCTTGTATCGTCATGATATGTGATCTTTTTGGTCGCTTAGTTATTTTTCCTTATGAAGTCTCAATAGGAGTTACGCTAGGAGTATTGGGTAGTGCCTTTTTCTTGATTTCAATTATAAGAAATGAGGGAAAATCA

SEQ ID NO: 15344 - protein, 320 aa, Streptococcus agalactiae
MKKLLTTPVMGCTLVILSLTSLFVGVKSIPLEQITHLNQSQVDIFLASRLPRTISILISGASLSVCGLLMQQLTQNKFVSPTTSGTMDWAKLGVVVTLIFFKNTSIFIQLCIASGFAILGSLLFVTILKMITFKDNIFIPLIGLMLGQIVAAATVFLGTHFQVLQSVNSWLQGNFSIMTSHRYEILYLALPCLFLVYFFAHQFTIVGLGESFAKNLGIAYEKMIYFGLVLVSIMTSLVIIIVGALPFLGLIVPNLISLTKGDHMSSTILETSLLGACIVMICDLFGRLVIFPYEVSIGVTLGVLGSAFFLISIIRNEGKS

SEQ ID NO: 15345 - protein, 546 aa, Streptococcus agalactiae
ATGACCGAAAAAGAAAAAATGTTAGCAGGACAATATTATCGTCCATCAGCACCTGAACTACGCAAGGATAGAGAAGTTGCACTAAAAAATATGCAAGCCTTTAACAATGAAGATGATAGTAGCAAACGTAACGTCATTTTACAAAAATGGTTTGGTGCTACTGGGAAGAGTATCCATATGGAACAACGTTTTGTCTGCGATTATGGTTGTAATATTTATGTTGGTGAAAACTTCTACGCCAATTTTAACCAAACTTTCTTAGATGTTTGTGAAATTCGTATTGGCGATAACTGTATGTTTGGCCCAAACTGTCAACTCCTCACCCCACTCCATCCTCTAGATCCAATAGAAAGAAATTCAGGATTAGAATACGGTGCCCCAATCCAAATCGGGAATAATGTCTGGCTAGGTGGAGGAGTGACTATTTTACCAGGTGTTGTATTAGGAGATAATGTCGTCGTTGGCGCTGGAAGTGTCGTTACGAAATCATTTGAAAATAATGTTGTTATAGCAGGAAACCCTGCTAAGATAATCAAAAAATTAGCT

SEQ ID NO: 15346 - protein, 182 aa, Streptococcus agalactiae
MTEKEKMLAGQYYRPSAPELRKDREVALKNMQAFNNEDDSSKRNVILQKWFGATGKSIHMEQRFVCDYGCNIYVGENFYANFNQTFLDVCEIRIGDNCMFGPNCQLLTPLHPLDPIERNSGLEYGAPIQIGNNVWLGGGVTILPGVVLGDNVVVGAGSVVTKSFENNVVIAGNPAKIIKKLA

SEQ ID NO: 15347 - protein, 759 aa, Streptococcus agalactiae
ATGGCAACAATTAAAGAAATCAAAGCAATTTTAGAGACTATTGTTGATTTAAAAGACAAACGTTGGCAAGAATATCAAACAGATTCACGCGCAGGTGTTCAAAAAGCAATCCTTCAACGAAAAAAAAATATTCAGTCACATTTAGACGAAGAAGCGCGCTTAGAACAAATGTTGGTCTACGAAAAAAAACTTTACATTGAACATATAAACCTTATTGCAGGAATCGATGAAGTAGGTAGAGGTCCTTTAGCAGGACCAGTAGTAGCTGCTGCTGTTATTCTTCCACCAAACTGTAAAATAAAACATCTCAATGACTCCAAAAAAATTCCAAAGAAAAAGCATCAAGAAATCTATCAAAATATTTTAGATCAAGCGTTAGCAGTTGGTATTGGTATTCAAGACAGCCAATGTATTGATGATATCAACATTTATGAAGCTACAAAACATGCTATGATTGATGCAGTTTCTCATTTATCTGTAGTTCCTGAACATCTTTTAATTGATGCTATGGTTTTGGATCTACCAATTCCACAAACTAAAATTATCAAAGGTGATGCTAATTCACTCTCTATTGCAGCAGCTTCAATTGTAGCTAAAGTGACCAGAGATAAAATAATGTCTGATTATGATAGCAAATATCCTGGATTTGCATTTTCTAAAAATGCTGGCTATGGTACTAAAGAGCATTTAGAGGGTTTGCAAAAATACGGTATTACTCCGATACATCGTAAAAGTTTTGAACCTATAAAGTCAATGTTG

SEQ ID NO: 15348 - protein, 253 aa, Streptococcus agalactiae
MATIKEIKAILETIVDLKDKRWQEYQTDSRAGVQKAILQRKKNIQSHLDEEARLEQMLVYEKKLYIEHINLIAGIDEVGRGPLAGPVVAAAVILPPNCKIKHLNDSKKIPKKKHQEIYQNILDQALAVGIGIQDSQCIDDINIYEATKHAMIDAVSHLSVVPEHLLIDAMVLDLPIPQTKIIKGDANSLSIAAASIVAKVTRDKIMSDYDSKYPGFAFSKNAGYGTKEHLEGLQKYGITPIHRKSFEPIKSML

SEQ ID NO: 15349 - protein, 849 aa, Streptococcus agalactiae
ATGGCTACTATTCAATGGTTCCCAGGACACATGTCCAAAGCTCGCCGTCAAGTTCAAGAAAATATTAAGCATGTTGATTTTGTTACAATTTTAGTGGATGCAAGGTTACCTCTTTCTAGTCAAAATCCAATGCTAACCAAAATCGTCGGAGACAAACCCAAACTAATGATCCTCAATAAAGCTGATCTAGCAGATCCCATTCGAACTAAAGAATGGAGAGATTTTTATGAATCTCAAGGTTTAAAGACATTAGCTATTAATTCTAAAGAACAATCAACAGTTAAAAAAGTAACCGACATCGCTAAAATATTAATGTCCGATAAAATCGCTAAACTACGGGAACGTGGTATTCAAAAAGAGACACTTCGTACGATGATTATTGGAATTCCGAATGCAGGCAAATCGACTCTAATGAATCGCCTAGCAGGTAAAAAAATTGCAGTGGTTGGTAATAAACCAGGTGTCACAAAAGGTCAGCAATGGCTCAAATCTAATAAGGAACTGGAAATTTTGGACACTCCTGGTATCTTGTGGCCCAAATTTGAAGATGAATTAGTTGGATTAAAGCTAGCATTAACAGGGGCAATCAAAGATCAATTATTGCCTATGGATGAGGTAACAATATTTGGATTGAATTACTTTAAAACCTATTATCCTGATCGTCTCAAAGAGCGTTTTAAAAGTATTAATTTAGAGGATGAATCTCCTGAAATCATCATGACCTTAACACAAAAATTAGGTTATCGTGACGATTACGATCGCTTTTATAATTTATTTGTCAAAGAAGTTCGCGATGGTAAATTAGGACGCTATACGTTAGATATCGTCGGAGAACATGATGGCAACAAT

SEQ ID NO: 15350 - protein, 283 aa, Streptococcus agalactiae
MATIQWFPGHMSKARRQVQENIKHVDFVTILVDARLPLSSQNPMLTKIVGDKPKLMILNKADLADPIRTKEWRDFYESQGLKTLAINSKEQSTVKKVTDIAKILMSDKIAKLRERGIQKETLRTMIIGIPNAGKSTLMNRLAGKKIAVVGNKPGVTKGQQWLKSNKELEILDTPGILWPKFEDELVGLKLALTGAIKDQLLPMDEVTIFGLNYFKTYYPDRLKERFKSINLEDESPEIIMTLTQKLGYRDDYDRFYNLFVKEVRDGKLGRYTLDIVGEHDGNN

SEQ ID NO: 15351 - DNA, 570 bp, Streptococcus agalactiae
atgagaaaacgttcaattttgccaatattagctgtcttatttgttttcatgagtatctttagcgtatactctatttttcatggtgataaagctaaagaaaaagcaagtgtcataaaacaagcatctcaaacaagtcaaacttcaaaaaaagaggtcttacaaaagaagacttatccaaatctaaataaatattcaaatctagaaattcatgtttcatctacgaggcaaacaatgacaataacctcgagtgacaaggtcatctttaaaacgattgtttcaacaggagcaaaagagagccctaccccaaaaggaacttttgtcatagaaccggaacgaggagattttttctataacgcctcatcaaaagaaggagcctattattgggtctcctttaaagagcatggtatttatctctttcatagcgttccgactgatcaacaaggaaatgagatcccagaagaagcaaagcaattaggaaaagccgcctcacatggctgtgtgcgtatgtcaagggcggatgcaaaatggttctatgaaaatattcctcaaggaacgactgttaccatcaaa

SEQ ID NO: 15352 - protein, 190 aa, Streptococcus agalactiae
MRKRSILPILAVLFVFMSIFSVYSIFHGDKAKEKASVIKQASQTSQTSKKEVLQKKTYPNLNKYSNLEIHVSSTRQTMTITSSDKVIFKTIVSTGAKESPTPKGTFVIEPERGDFFYNASSKEGAYYWVSFKEHGIYLFHSVPTDQQGNEIPEEAKQLGKAASHGCVRMSRADAKWFYENIPQGTTVTIK

SEQ ID NO: 15353 - DNA, 1482 bp, Streptococcus agalactiae
atggtaacatttttaggaggggtagcccttttaattgttggttatttcacgtacggtagatacattgaaaagaattttcaaattgatgaaaatcgccaaacacctgcagaagcattaagggatggatatgattttgttcctatgccaaaatggaagaatgggatgatcgagttattgaacatcgcaggaactggacctatctttggacctattttaggagcactctatggtccagttgcttatatctggatagtcttaggatgtatttttgcaggggctgttcatgattatatgattggaatgatttctcttagaaataatggtgcatatcttcctgaattagctagtcgctatcttggaaaatcaatgaagcatgtgatcaacattttttcaatgctattacttattttagttgcaaccgtatttgtggtaactccagctaatcttatcctgagtattttaccagctgggacactatctttaccttggataatcggtcttattttcgtttattaccttatttctacagtattacctattgataaagcacttggtaaagtttatcctgtattctgcgtcatcctaatggttagtacagcagcagttggcttccgtttattaactggtggctttgatatgccaaacttaacttttgaaacctttaaaaatatgcatccagctggacttgggatattccctgctttattctttaccatttcatgtggagccatctctggtttccatgctacccaagcacctatggtctcaagaacaactgttaatgagagagaagggcgtttcactttctatggtatgatgattgcagaaggagtaattgcgatgatttgggcaggtgcttcaatgagcttgttcaaaggtcaaaatctctatgaaatgattgctgctggaacaccttctgcagttgtcaatcaagtaatgttaatgttactcggtagtgtaattggaactatcgctatcattggtgttattgttctccctgtttcatctggtttatcagctttccgtagcttacgtactatcgttgctgattatatccatgtcaaacaagatactcttccaaaaatctttgctgtaactatcccattatatgttatttcatttgtccttacacacgttgattttaatctcctatggcgttactttaactgggcaaatcaagtaactgctgttattggtttattagttgctacaagatatctcatcctaaaaagacgaaattattgggtaacatttgtaccagctatgttcatgttgtatgcagtagttgtttatattttatctcaaccaattggatttaatatgggcttaggcatcttaacttattcacttgctttagtgttaacaggtattcttgttggacttttctggaaatctggtcaaaaacaattaaaaactgttcatcctgaagcattcctgtttaacgatcatagaccaattaattattacagtagtttagattct

SEQ ID NO: 15354 - protein, 494 aa, Streptococcus agalactiae; identical to SEQ ID NO: 1902

SEQ ID NO: 15355 - DNA, 732 bp, Streptococcus agalactiae
atgaaagttttagtagttgatgatgaaccagttgcacgtaacgaattaatttaccttcttaataagtatgattctaacctcgttatagcagaggcgcatgatatggctactgcattagctattttacttagagaaacttttgatgtagcactgttagatatccatctcagagatgattctgggttgcaattagcagagtatatcaataaaatgcccaaaccaccattattgatattcgcgactgcttatgatcaatatgctattcaggcttttgagcaggatgcgcgtgattatttgttaaaaccctatgagtttgataggttaaagcaagctatggatagagtaaaaggagcgctaagtacatctacaattatagagagcgtagcttccggtcctctcttcaagcaacagtatccattgacagtagaagatcgaatctatctggtgtcggcggatgatatccttttgattgaagctatgcaaggaaaactgattatacaaacacctgataaaaattatgaaattgatggctctctacaacaatggcaagataaactaccatcatctcaatttgtacgggtacatcgctcttacattgtgaatattaatgctattaaaacgattgaaccttggtttaaccaaacacttcagttacacctttgtaataaaataacagttcctgttagcagagcaaatgtaaaacccctaaaacaaatgttaggcatatctacc

SEQ ID NO: 15356 - protein, 244 aa, Streptococcus agalactiae
MKVLVVDDEPVARNELIYLLNKYDSNLVIAEAHDMATALAILLRETFDVALLDIHLRDDSGLQLAEYINKMPKPPLLIFATAYDQYAIQAFEQDARDYLLKPYEFDRLKQAMDRVKGALSTSTIIESVASGPLFKQQYPLTVEDRIYLVSADDILLIEAMQGKLIIQTPDKNYEIDGSLQQWQDKLPSSQFVRVHRSYIVNINAIKTIEPWFNQTLQLHLCNKITVPVSRANVKPLKQMLGIST

SEQ ID NO: 15357 - DNA, 1737 bp, Streptococcus agalactiae
atgacactctttttaattatgatggagcgagcggggttaatcatattattagcctatgcctttgtgcatattccctttataaaacaaactttgaagcaacccgaattaaaaaaacaccagtatattctgcttatcttatttagcttatttgctattatttctaattttacaggggtagaaattcagtcagatttatctatcattccacaaactcttaatcatatagcagatcaatcatcagttgccaacacacgtgttttaaccattggtgtatcaggtctaatcggtggccccatagtcggtattatagttggtctcttatctgtattcgttaggtacttgcaaggaggattagcccctcatatttatgtcatttcttccttactaattggtttatgctctgggttatcaggcaattatcttcgtaaaaattataataaaattcgtgttttagatgcaatggttgttggtttcgggatggaaattctacaaatgatctgtatcctcatttttagtgttgactttaatcaggcgcttcgattagtatcttttatcagcatgccaatgattttaagtaatactttaggtttaggtatatttatatccattatttcatctactcaaaaattagaagaacatgccaaagcatttcaaacccatcaagtacttgaattagcaaatttaacccttccttaccttagaaagggactgacaacagaatcttgtcaaccagtagctgaaattattcataaacatatggatgtgagtgctgttagcctgactagtcaatcagccattttagcctatgtaggagatggagctgaccaccatcttcctaatactcaaatattaacaaagcttgctaaaagagcaatagatactggtaaagttagtgtcgcaactgataaaagtgaaatcgaatgcgaccataggaattgcccacttagttcagcaattgttattccattacacatccacgatgttatagtgggtactttgaaattatatttttcagacgcacaacatatgacttacgttgaccgtcaattagctgaaggattaggcaatatcttttccactcagttagctttgggacaagctgaggaagcaacaaggttactacaggatgcggaaatgaagtctctccaagcgcaggttaatccgcattttctttttaatgcactcaatactatttatggtttaattcgcatggatagcgaaaaagcaagaaagctcgtccaagattttagcaaggttattcgtgctaatcttcaacgggcaaagcaaaatttaattcctctccatgatgaattggaacaggttaacgcctatttagcccttgaagaagcaagatttcctaacatggtggcctttaatttagacaaccaaacaaattcagatgacaacttaatgattcctccctttacattgcaggtcttgattgaaaactcttataaacacgcttttaagcatatcaataaaaataaccagctaaaggttactattgcaagaaataatgataggcttcatatcattgtccaggacaatggtattgggattccaaaagaaaaattaataacgcttggaaaaaaaactcaaatttcaaaaaaaggttctggtacagctattgagaatctcgttcgtcgcttgaatattatttatgatggacaagcaagtttaaaatttgaatcaaatgattcaggaacttgtgctattgttaacatccccattaaaaat

SEQ ID NO: 15358 - protein, 579 aa, Streptococcus agalactiae
MTLFLIMMERAGLIILLAYAFVHIPFIKQTLKQPELKKHQYILLILFSLFAIISNFTGVEIQSDLSIIPQTLNHIADQSSVANTRVLTIGVSGLIGGPIVGIIVGLLSVFVRYLQGGLAPHIYVISSLLIGLCSGLSGNYLRKNYNKIRVLDAMVVGFGMEILQMICILIFSVDFNQALRLVSFISMPMILSNTLGLGIFISIISSTQKLEEHAKAFQTHQVLELANLTLPYLRKGLTTESCQPVAEIIHKHMDVSAVSLTSQSAILAYVGDGADHHLPNTQILTKLAKRAIDTGKVSVATDKSEIECDHRNCPLSSAIVIPLHIHDVIVGTLKLYFSDAQHMTYVDRQLAEGLGNIFSTQLALGQAEEATRLLQDAEMKSLQAQVNPHFLFNALNTIYGLIRMDSEKARKLVQDFSKVIRANLQRAKQNLIPLHDELEQVNAYLALEEARFPNMVAFNLDNQTNSDDNLMIPPFTLQVLIENSYKHAFKHINKNNQLKVTIARNNDRLHIIVQDNGIGIPKEKLITLGKKTQISKKGSGTAIENLVRRLNIIYDGQASLKFESNDSGTCAIVNIPIKN

SEQ ID NO: 15359 - DNA, 90 bp, Streptococcus agalactiae
ttgattattattgtggaagggataagcttaatgatgattttaacagcatgtgacttagtaaaaaaagatcaccaatgggttcaagaacat

SEQ ID NO: 15360 - protein, 30 aa, Streptococcus agalactiae
MIIIVEGISLMMILTACDLVKKDHQWVQEH

SEQ ID NO: 15361 - protein, 102 aa, Streptococcus agalactiae
TTGGGATTATTACTAAAATTGACTGGAAACTCTGAGAGTTTAGTTCTTCAAATATATGATATTGATACGAAGAAGTGGGAAGAAAGAATCAGTCTAAAAAAG

SEQ ID NO: 15362 - protein, 34 aa, Streptococcus agalactiae
MGLLLKLTGNSESLVLQIYDIDTKKWEERISLKK

SEQ ID NO: 15363 - protein, 381 aa, Streptococcus agalactiae
TTGGCAATGTTTTTAAATACTAGAAATTTTGGACATGTTCAATCAATTTATTATACTGAGATGGCAAAAATGTATATTATGATAATGTTAATTATTTTTATTGTATTTTCTGGAATATATTATTTCTATTATTTACCAAAAAATCAAGGGAAAAAATGGAAATTTAATCAGTGGAAATTACAAAAAGGAAAAAAGGAACAATTAAAAATTAATTATGGAATTATTTTTGGTTTAGTGATGCTTTCTCCAGTCTTTCTTGTAGGTAGTATTGAAAATATTTTTGGTTTGATTGGAGGTGTATTATTTACGGCAACTTTTACAGCTCTGATTGTCGATTCCCTTTATGCAGCATATTATATTCATAAATATCCCGAATATGAG

SEQ ID NO: 15364 - protein, 127 aa, Streptococcus agalactiae
MAMFLNTRNFGHVQSIYYTEMAKMYIMIMLIIFIVFSGIYYFYYLPKNQGKKWKFNQWKLQKGKKEQLKINYGIIFGLVMLSPVFLVGSIENIFGLIGGVLFTATFTALIVDSLYAAYYIHKYPEYE

SEQ ID NO: 15365 - protein, 381 aa, Streptococcus agalactiae
ATGAAAGTCCTTGAATTAAATCCCAAAAATGCTTTTAAAGGATGGAATGAGTTAAGCAAAATAGCTAAAACTGGGAAAGTACTAGGATGGACAGGTAAAATTGCTAATATTTACATGAATGGAAAAAAAGATCTTTTTGATGATAAAACATCTTCAATAGATCAAAAAATCAAAAACTTTGCTATAGGTTCAGGTGTAGATGCATTGTCCGGTGCAGCAATAGGGACTTTGGTAGGAGGACCTGTGGGAACCGTTGTTGGAGCAGGTGCAGGGCTGGCATTTGATTTTGCTTTGAATTTTAAAGTTAAGGAGTTGGGTAATGAATCAATTACAGGTTTTGCTAAAAAAGGTTTAAAAAATCTTGCAGGAGGATTAGGATTT

SEQ ID NO: 15366 - protein, 127 aa, Streptococcus agalactiae
MKVLELNPKNAFKGWNELSKIAKTGKVLGWTGKIANIYMNGKKDLFDDKTSSIDQKIKNFAIGSGVDALSGAAIGTLVGGPVGTVVGAGAGLAFDFALNFKVKELGNESITGFAKKGLKNLAGGLGF

SEQ ID NO: 15367 - protein, 231 aa, Streptococcus agalactiae
ATGGATAAAACTTTTCTTTATCGAAAAGCTAAAGATGGAAAATCTGCATATATTTATTCTGAAGGGAGTGATCAATATAAAGAACTAACTGGGAAAGAATTTGATCCTAAAACTACAAATATTATGAAAGGTAGAAAATTAGGGACAGATGGTAAGATATCAATTGATTTTGGTGAGATTAGTAACTCAGGAAAAAATGCAGCTATTAAGTCCCTTAAAAATGAAAGTCCT

SEQ ID NO: 15368 - protein, 77 aa, Streptococcus agalactiae
MDKTFLYRKAKDGKSAYIYSEGSDQYKELTGKEFDPKTTNIMKGRKLGTDGKISIDFGEISNSGKNAAIKSLKNESP

SEQ ID NO: 15369 - protein, 474 aa, Streptococcus agalactiae
ATGTATATCATTCCAGCTGGTTACTCACCTGAACGTTTAGACTCAGAAGTCCTTACAGCAAAGATTGAAGATGATGAAGCCTTATTGCGGAAAATTCAAGACCTTAAAGATCATTTAGATAAAAATACCAAAATCTTGGCTTACGCTTTTGATGGCTTGGAAGTCAGAGTGAAAGCTAGACTAAGAAAAAATCGTAAGAAACTCAAAAACCTTATAGAATTCAATGCCAAATCTACCTCAGTCTTTAATGAATTGAAGGATTATTCAAATGCTGTATCGTCTGGTTTAACCTTTGTATCTAAAGGCTTTAGTAGTTTCAATGGCCAGTTCTCTTCAGCCTCAAATCTTGATTGGCAAAAGACTATTAAGACAGGAATGAGAAAACGAGAAGAAGATGCTAAACAGTTGAGAAAAAAAGCTTTAGAAGATTCAAATAAGCTCAGAAAAATTGCATCAAAAAGGGGTTACTTTGAA

SEQ ID NO: 15370 - protein, 158 aa, Streptococcus agalactiae
MYIIPAGYSPERLDSEVLTAKIEDDEALLRKIQDLKDHLDKNTKILAYAFDGLEVRVKARLRKNRKKLKNLIEFNAKSTSVFNELKDYSNAVSSGLTFVSKGFSSFNGQFSSASNLDWQKTIKTGMRKREEDAKQLRKKALEDSNKLRKIASKRGYFE

SEQ ID NO: 15371 - DNA, 120 bp, Streptococcus agalactiae
atgcaatatatttatcttttttcaaaacgtttcttccttattaagtttagaggaactttaaaagtatgcctatatgactttttagaaaaattacttaatataaattttccggattttgtt

SEQ ID NO: 15372 - protein, 40 aa, Streptococcus agalactiae
MQYIYLFSKRFFLIKFRGTLKVCLYDFLEKLLNINFPDFV

SEQ ID NO: 15373 - DNA, 528 bp, Streptococcus agalactiae
atgagtccaagtgagaaattagatagaagaattgattcttcatcagacctctcccagtatgtatatgattttgaaaagcaatatacagaatatatgaagaaggggtattctgaaaaaaatgcgagtatacaagcacgacgaaccctgaatgaaatactacaagaaaataatccaggattgagatctagcgacgccatgtatgataaagaaacaggtattgcagctattgctgtaaaagataaaaatactggtgagacttatatagcttatgcgggtactaataaggatgctgatggggcaaccgactttatttcagatgcaaatatcggtgctaataactctgcttatttaaaacgattaggagacaaagctactagcttttatgatcgtgttcaaagtaatggcgataatattactgtcacaacaggtcattcttatggtgactttctcgcttctagagtggcaattgagctaattccattctttattaactttagaaaagttaatgattcatttcacttttgttat

SEQ ID NO: 15374 - protein, 176 aa, Streptococcus agalactiae
MSPSEKLDRRIDSSSDLSQYVYDFEKQYTEYMKKGYSEKNASIQARRTLNEILQENNPGLRSSDAMYDKETGIAAIAVKDKNTGETYIAYAGTNKDADGATDFISDANIGANNSAYLKRLGDKATSFYDRVQSNGDNITVTTGHSYGDFLASRVAIELIPFFINFRKVNDSFHFCY

SEQ ID NO: 15375 - DNA, 714 bp, Streptococcus agalactiae
atgaaaaaacaaagactattactgctttttggaggcttattaataatgataatgatgacagcatgtaaggattcaaaaatcccagaaaaccgcacgaaaaaggaataccaggcagaacagaattttaagtcatactttaaatatatatcagataaaaataactatttagataatataaaagtttattacttttctataagtatttctaaagatgtacaagataaagtcagtgaaacaacaacttgttcatatagactagaaaagcaaaagaatcaagagttcattggtaattttgaacatgaagttagtgaatctagtcaatattcaaccgaagttaaaaatcaaatacagtatccaatccagtataaagataattcaattcgttttactgaaaaaacaccgtcagaacgttatgatgagtttgtttttagttcatttgattcttcattattaaaaaaatataaaatatatgattacttactaaaacatcccgaaactgaattaaaaggtgtttcctataagattcctataaattctgaaattgtagccccttttataaagcaattaaatataaaaaatcctaaaaaatcatctatttcggttacaaaaacggaaagtaaagaatattattatacaatcagtattgatactgattctgagatatattctatattcgaaggtattacattagaggatgtaaaggagttttctaaa

SEQ ID NO: 15376 - protein, 238 aa, Streptococcus agalactiae
MKKQRLLLLFGGLLIMIMMTACKDSKIPENRTKKEYQAEQNFKSYFKYISDKNNYLDNIKVYYFSISISKDVQDKVSETTTCSYRLEKQKNQEFIGNFEHEVSESSQYSTEVKNQIQYPIQYKDNSIRFTEKTPSERYDEFVFSSFDSSLLKKYKIYDYLLKHPETELKGVSYKIPINSEIVAPFIKQLNIKNPKKSSISVTKTESKEYYYTISIDTDSEIYSIFEGITLEDVKEFSK

SEQ ID NO: 15377 - DNA, 4425 bp, Streptococcus agalactiae
atgttagttatttgttattatcaatcactccgctacgaatttaatcttgaagaggagaaatcctttctaatatcatcaaacggcaagtcgccaataccagtatcagatttagaaaatgacatcacgctaaaaaatatgcaaggtcaattggtatatattattgaccaaaaagaaaaagagttaactaatggtgtagagatttcaggaattgtcttctatttagcgaataatcaaaaagaaatctatactcccttagattacgaagatatattaatcggtgataaagaagggtatcatgtccgttttaaagaaggagcccctaatttattactgaaaaaaatagaaagcaattggcagcttaatttatttgaaggtgatatttatctgaataatcatcttcaaaaagtagtgcagcagttacctttaagtttaggtgatgagattagcttccaaggaacaattgttaagcttttcccagatgaaattcaaatctggggggggactgattatgaaacatcattaactaagaaagttatgtcagcttatcaattttacgaaggctatcctgattttcaccgctcacctcgtattatttatcgttccagtgaagataaaattacagttaatgcgcctggtaataaacctaataagtctaaagatgaactgttaaaattaattgttcctcctctagtgatgattggagtcagtattcttatttctatttttcgtcctcgtggtatctatatcattgcaacaatgtcaatggctctagtgacgatgattttctctatcactggttactttaaaaatcgtaaacagtataagcaggacttacaagaacgcattgattcctatcatgactatttatctgataagtcaattgaacttcagaagttagctaaagagcaaaagcgtgggcaacactatcattacccaacgattgaaggtttacaggaaatggctgatacttatcaccatcgtatttatgaaaagacaccacttcattttgacttcttgtattatcgcctaggtttgggagaagtaccaacgagctataatattcattattctcaaccagaacgttctgggaaaaaagatcctttagagaacgaaggctataacctctactttaacaatcgttatattaaaaatatgccgattgttgcgaatttatcacatggaccagttggctatataggaccacgaggtttagtattggagcaactccaattgatggttaatcaattagcttttttccattcttaccatgatgttcaatttattactattgttccagaggaagagatggataagtggtcttggatgcgttggttgccacatgcaaccttacaagatgtcaatgttcgtggctttgtttataatcaaagaagccgtgatcaagtgctcaacagtcttaaccaaattttaaaattacgtcgcacacaacgcgaagataaatctgccaaagaagggactttattttctccgcattatgtcgttattgtaactgatgaaaagttaattttagatcacgtcatcatggaattttttacggaagatcctacagaattgggatgttctctcatctttgttcaagatgttatgagttcactttcagaaaatatcaaaaccattattaatattaaagaccgtaatactggtcagttagttatagaagaaggagagcttaaagaaacagattttgaattagatcatttcttagaggattatgacaaggaaaatatttcacgtcgcctagctccgttaaatcacctacaaaatcttaaatcttcaataccagaagcagttacttttatggaaatgtatcaagcagaagaatttgaagatttgcatgttcaagagcgttggataagccatgctccgtataaaagcttagctgttccacttggcttacgtggtcaggatgatattgtttatctaaacctacatgaaaaagctcatggtcctcatggattagttgcaggaacaacgggatcagggaagtcagaaattatccagtcctatatcctttctttagctgttaatttccatccacacgatgtagctttccttctcatagactacaaaggtgggggaatggcaaatctctttaaggacctgccacacttacttggcaccatcaccaacttagatggtgcccaatcgatgcgtgctttggtttctattaatgctgaattgaaacgtcgtcaacgtttatttgctaaagctgatgttaatcatattaaccagtatcagaagaaatacaaacttggagaagtttcagaaccaatgcctcatctcttcttaatctccgatgagtttgccgaattgaaatccaaccaacctgagtttatgaaagagcttgtctcaacagcgcgaattggtcgttccctagggattcacttaatcctagcgacccaaaaaccatctggcgtggtagatgaccaaatctggtcaaactcacgcttcaaactagctcttaaagtagcagaccgcggcgactccatggaaatgctccataccccagatgccgccgagattacacaagcaggacgtgcctacctccaagttggtaataatgaagtctatgaactcttccaatcagcatggtcaggagcagattaccaacctgaaaaagacgaccaagggattgaagaccataccatttattccatcaacgaccttggccaatatgaaatcctaaatgatgatctttcaggcttagaccaagccgaaaatattaaagaagtacctacggaattagatgccatcgttgaaaacattcaaactttaaccaaagaaatgggcatctcagacttacctcaaccgtggctaccgcctctaagcaatcagattgcagtaaccgatctccgtaaggaagaatcagtagatctctggagtaaagccccatcttacaaagttgttctgggctttatggatataccaagccaacaagcacaagaagtagcttaccacgattttgaagatgatgggcatttgtcaatttttgcaggtccaagtatggggaaatccacagcccttcaaactgtaacattggacttagcacgtcacaatagtccagaatttttaaacctttatctctttgattttggtaccaatggcctcttaccattaagacgtttgccacatgtagcagatttctttaccattgatgatgacgaaaaaatagccaagtttatcagcagaatcaaaacggaaatgtctgaccgtaaaaaagccctcagtcgctacaatgttgcaacagcaaaactttaccgccaggtatctggggaaaccatgcctcaaatcctgattgttattgacagttatgaagggctacgggaagctcaaacactgactaacttagaagcttgtttccaaaatatttcgcgtgatgggtcgtcacttggcatttccttagttatctcagctggtcgtatggcagctttgaggtcgtccttaatggcaaaccttaaagaacgtatcgctcttaaattaacagatgactctgaatcacggacacttgtcggtcgtcaccaacacatcatggaagatattccaggacgcggattaatcaaacgtgatgacattgaagtgttacaagtggctctcccaacagaaggcactgaaacctttgacatcatcaataacatccaaaacgaatctgacgccatgaacagcaaatggactggaccaagaccaaaagcaataccaattgttccagaaacacttacctttgaggagtttaaggcatatgaggatgttaaaaaagcaagtgagactaatcagatttcacttggtattagcttaaaagaagttgataattgtagcattccactttcgaaattcaaacagttactttttacttctgacaatccagataatttgtctaacttgacgcgcttcttagttaaatctgtttcattgattaaagatagtaaggtttatcttttagacactgcttctgattatgatgatttgacagaacaacaaattgaatatatcaataatcgaagtgaaatagcaggacatttagaagctattgtttcagaaatctatttaagagaagaatctggtaaaatagaaccatggtttgttattattcctgatatgaatagttttgtggcagaaacaaatatggataaagaacagattttattcttacttgactcggctcacaaatatcatatttatttcttatttggtggcttagcatcataccttatgactaatatctcagatgttccaaaagctattagaacacaggcacagtatgttctcttgggaatgagagttatggatcagtcggtattaccgaaaacatataattcaaaagaaccttatttgaaaccagatatgatttatattcatgatagaagacaagagacaatgcttaaaatcactcaagaaatagaaatggagcat

SEQ ID NO: 15378 - protein, 1475 aa, Streptococcus agalactiae
MLVICYYQSLRYEFNLEEEKSFLISSNGKSPIPVSDLENDITLKNMQGQLVYIIDQKEKELTNGVEISGIVFYLANNQKEIYTPLDYEDILIGDKEGYHVRFKEGAPNLLLKKIESNWQLNLFEGDIYLNNHLQKVVQQLPLSLGDEISFQGTIVKLFPDEIQIWGGTDYETSLTKKVMSAYQFYEGYPDFHRSPRIIYRSSEDKITVNAPGNKPNKSKDELLKLIVPPLVMIGVSILISIFRPRGIYIIATMSMALVTMIFSITGYFKNRKQYKQDLQERIDSYHDYLSDKSIELQKLAKEQKRGQHYHYPTIEGLQEMADTYHHRIYEKTPLHFDFLYYRLGLGEVPTSYNIHYSQPERSGKKDPLENEGYNLYFNNRYIKNMPIVANLSHGPVGYIGPRGLVLEQLQLMVNQLAFFHSYHDVQFITIVPEEEMDKWSWMRWLPHATLQDVNVRGFVYNQRSRDQVLNSLNQILKLRRTQREDKSAKEGTLFSPHYVVIVTDEKLILDHVIMEFFTEDPTELGCSLIFVQDVMSSLSENIKTIINIKDRNTGQLVIEEGELKETDFELDHFLEDYDKENISRRLAPLNHLQNLKSSIPEAVTFMEMYQAEEFEDLHVQERWISHAPYKSLAVPLGLRGQDDIVYLNLHEKAHGPHGLVAGTTGSGKSEIIQSYILSLAVNFHPHDVAFLLIDYKGGGMANLFKDLPHLLGTITNLDGAQSMRALVSINAELKRRQRLFAKADVNHINQYQKKYKLGEVSEPMPHLFLISDEFAELKSNQPEFMKELVSTARIGRSLGIHLILATQKPSGVVDDQIWSNSRFKLALKVADRGDSMEMLHTPDAAEITQAGRAYLQVGNNEVYELFQSAWSGADYQPEKDDQGIEDHTIYSINDLGQYEILNDDLSGLDQAENIKEVPTELDAIVENIQTLTKEMGISDLPQPWLPPLSNQIAVTDLRKEESVDLWSKAPSYKVVLGFMDIPSQQAQEVAYHDFEDDGHLSIFAGPSMGKSTALQTVTLDLARHNSPEFLNLYLFDFGTNGLLPLRRLPHVADFFTIDDDEKIAKFISRIKTEMSDRKKALSRYNVATAKLYRQVSGETMPQILIVIDSYEGLREAQTLTNLEACFQNISRDGSSLGISLVISAGRMAALRSSLMANLKERIALKLTDDSESRTLVGRHQHIMEDIPGRGLIKRDDIEVLQVALPTEGTETFDIINNIQNESDAMNSKWTGPRPKAIPIVPETLTFEEFKAYEDVKKASETNQISLGISLKEVDNCSIPLSKFKQLLFTSDNPDNLSNLTRFLVKSVSLIKDSKVYLLDTASDYDDLTEQQIEYINNRSEIAGHLEAIVSEIYLREESGKIEPWFVIIPDMNSFVAETNMDKEQILFLLDSAHKYHIYFLFGGLASYLMTNISDVPKAIRTQAQYVLLGMRVMDQSVLPKTYNSKEPYLKPDMIYIHDRRQETMLKITQEIEMEH

SEQ ID NO: 15379 - DNA, 1272 bp, Streptococcus agalactiae
atggaaacagattcgtttgtatttgaagaacaagactttcaatttgaaaaaggaccagatttttggcagttatctcttaagcgttcaaaagtaggaactcaaaatctgcaacaactgcaattgttagaaattcaccattctttgttgatgcctatgacaactgcaattaatgcagataccattcaatttcaattccagacagaagcgcacgctctatcttttgaaagctttaaaaaagaaactttatctgaaaaattacgattagccttgaatgtcttggatttagataaggctttgtctttgccagtaaatttcattttgcatccctctaatctatttttaacaaaaaatgcaactgctaaaatagcttatcgtagtcttcctgggattatgacacctgagaagtttggtccagaggagtttttatatcaattcaaatgttttgtctttgcattactgacgcaacatgactatatagaattgtataatggtgctatttctgttattgaagtatcagatttcctaaaaagcatttattatgcagaaactattcaggctgttagagacatcattactactgattatgagcagcaagtagaagtagaaactcatacgttagcaaaagtatcaaaggcaaaatataagctttataaatacataagtgtctggctaggagctttatctacaatactcttgattccgctagtatatctggtttttattcacaatccattcaaagaaaaaatgttggcagcggatacttcatttattaaagttgattataatcaagtgattaatcgactagaacatgtaaaagtaagtaagttaccttatacacagaagtacgagttggcctattcctatattaatggaatgtcattttctgaagaacagcgtgaagttattttaaacaatgttacgctcaagactgatgagctctatcttgattattggattaatattggccgtggtttagatgatgatgctattgatgctgccaaacgtttagacgattctgaccttgttatttatgctattgttcagaaaatggatcaggttagaaaagacaatagtttatctggtaaagatcgtgaacaaaaactttctgagctacaaacagactatgataaatattggaaagaccgtaagacagccttaacagatgaggaatccaaatcgaaaaatagcaataatcattcgacaaattccaacaaagagtcatctgaatcatcaagtactacagcaagtacatcttctaaaactaaaagtagg

SEQ ID NO: 15380 - protein, 424 aa, Streptococcus agalactiae
METDSFVFEEQDFQFEKGPDFWQLSLKRSKVGTQNLQQLQLLEIHHSLLMPMTTAINADTIQFQFQTEAHALSFESFKKETLSEKLRLALNVLDLDKALSLPVNFILHPSNLFLTKNATAKIAYRSLPGIMTPEKFGPEEFLYQFKCFVFALLTQHDYIELYNGAISVIEVSDFLKSIYYAETIQAVRDIITTDYEQQVEVETHTLAKVSKAKYKLYKYISVWLGALSTILLIPLVYLVFIHNPFKEKMLAADTSFIKVDYNQVINRLEHVKVSKLPYTQKYELAYSYINGMSFSEEQREVILNNVTLKTDELYLDYWINIGRGLDDDAIDAAKRLDDSDLVIYAIVQKMDQVRKDNSLSGKDREQKLSELQTDYDKYWKDRKTALTDEESKSKNSNNHSTNSNKESSESSSTTASTSSKTKSR

SEQ ID NO: 15381 - protein, 240 aa, Streptococcus agalactiae
ATGAATACACATATTAACATTACTCTAGATATGGGGGAAACCTCAAAAGATTTACGTATCCCTTTGAAAATTAGCGTTAAGCAATTAGTAATGGAATTAGATAGTATTTTTAGCCGTACTGAAAGGCGTACTAAATATCAACTAAGAGTTATAAATAAAGGTATTTTATTGGGAGAGAACGATATATTAGCGCACCATCCAGTAACAACTGGTGATCGTATAAGGATAGAGGAGTTTTAT

SEQ ID NO: 15382 - protein, 80 aa, Streptococcus agalactiae; identical to SEQ ID NO: 1952

SEQ ID NO: 15383 - protein, 471 aa, Streptococcus agalactiae; identical to SEQ ID NO: 10841

SEQ ID NO: 15384 - protein, 157 aa, Streptococcus agalactiae; identical to SEQ ID NO: 10842

SEQ ID NO: 15385 - protein, 2472 aa, Streptococcus agalactiae
ATGGTAAATGTTCAGTCAGGTAATATCTCAAATTACCAAAAAAATCTTTTAGATTCTGCAACTAATTTCCAAAATATCTTTCCAGCCCTCGTTAACCAGTATAGTAGTTCCATTACTGCTAACGAATCACTGAAAAAATCTTTAGAAGCTTCTGATAACATGTTTAATGATTTGATGACAACCCAGACAAATACTGGAAAAGATTTATCAAGCTTAATAGAACAGCGCCATCAAGATAGCATTTCGTATGAAGCGTTTTCGGCCTCATTACTAGAAATGAATAACGAGTTATTAGAGAAGCAATTATCTGATATTATCACACAAGCACAAAAAGACCAAGAAACATTATCATCACAACTCAATAGTATTATGGGTGATGATAACGATAATGATCATAATCATAAAGAAAACTCATCAGCTTATCTAAATGTTGCAAGGCAAAAAATCCAAGAACTATCTGAAGCACTCAAGTCACAAGATAACATCGCTAAAGATCAAAGTGAACAACTAGATAAAATTGTTAGAGAGGGACTAGCAAGTTACTTTGCTAAGAATAATAAAGATAATATTACTTTATTAGAATTATTGAAGAGTCATTCTACTAATGAGAAGACTTTGAAAGATTTTAAAGTTAAGGTAGCAGATTTCACAAATTCTCTCATTTCAAGCATTCCCTCACTAAACCTTTCGGAGTTGCACTTAACCCAAGAAGAAAAAGCCATTCAGTTTACATCTTCTGATTCGGAAATCATTAAAAAAGTAAGCAATGAAAGAACTCTGTATTTAAATACTAATTTATTGAATCGTCTTTTTGAAGCTAGGAAAAATAGAGATGAAGCCAAAAATAAAGTTAATCAATTAAAATTGCCATCTAGTTCTACTCGAACTGGTGAGCAGATAGTTTCTGTTGAATCAAATAATCCAGATTACAGGGTAGATACCTGGACGGTTAATGGTAAGCAAACAAGAACCTTGGACCCCAGCCAAAACAATAATATTATTATCAATAGCAGTTATCAAGGGGAATTATCTAACTCTAGTATTACAAAACCAAGCTATACAATCACTATCGGGAATCAGAAACAAATTGTACAAAATGATGACGGTGAAATTCAACGGTCTTACTTGGAGGCAGAAGCAACGTATCAACGAACTCTACAAGAAGTAATTGATGCATATAACACCACTCACGACTTAGTAGCTAAATACTACATTATTTCTGATGGCGAAGAACCGCAAAATTTATTTGATCAATTTTTAAATCAAAGTGTTAACGATACGATGGTTGATCTGGTCAAAAATGGTATAACTAAGTATTTGATGGATGAAAACACTGCTGATGCGCAACAGAAAGTTAAAGATGTCATGGAGGAAGTTGAAAATAGCCAAGATGAATTGGCGGATCAAATGGCAAAAGTAACTGAGACAAATGTACGACTAACAGATACAATCAAAAAACAGCTTGAGACTCTTCAAACAATTAACATGAAGGTCCAAAACATCACACAGGATCAATCTAAAGTAAACGACTCACAGAAAACAACTGATCAACAATTATCTGATTTGAAGAACCAGCTAGATGGGCTAATGACCTCTGCAACTGGCGTAAAAGATATGTCCAAATCTAATAGTCAAGAGGCGGACCAAGTTAATCAAATATTCACATCATTCAATAAAGATGTTCAAGATGCTAAAAATTCGGGCAACAAACTTTCGACGGATGCAACAGATTTAATGGCTAACTTCCAAAAAGAATTGGCCAATAACGGTGATTTCGTAGCTTCTTTCTCTAAAGTTTTTAATACTGCTTATAAAAATGGAGTGCCAAATGATATTCTCCTTAATTTCTTATCACGACCTGTCGCTGAATCAGCGTCTGCAGTTAGGGCAACTGAAAATACTTATCGCCCATTCACTTGGATACTATTATTAGAAGTTGTTAGCCTATTTATAGCATATATCTTTGCGACTCAAAACCTTATTAAGAAATTGACAGATAGGTATAATGTCAATCGCTGGCTTCAAACAGACTTTTTAAATATCATTGTCATTTCAGGCCTCTCTCTTGTGATTGGTTTAGCACTGGGAGTTATCTCATGCAGAAGTCTTCATGTCATGCCTGAATATGTACCATCTTGGTTCCTAGTTATGACTCTGTTTAGTTTTTTATTAATTCATAGTCAGTATTTCTTTATTAAAAATTTTAAAGCAGTTGGTATGGGTTTAGCTTTGTTTATGATTATTAGTTTTGTGTATCTATCAAATGCCGTAGGCACAGTAGCGACTGTTAGTGGATTTCCAAAATTACTAAAAGCTATTAATCCACTATCTATCCTTGAAAATCAATTATCATCTTATTTTGATAATGTAACAACTGGATTTATTTTCCTTATCTTAGTACTTCTTGTGGATGTTGCTTTTATTATCATGAATATTTTTATCACCTTAAATTTTGAAGCTAAAGTAAAAGAG

SEQ ID NO: 15386 - protein, 824 aa, Streptococcus agalactiae
MVNVQSGNISNYQKNLLDSATNFQNIFPALVNQYSSSITANESLKKSLEASDNMFNDLMTTQTNTGKDLSSLIEQRHQDSISYEAFSASLLEMNNELLEKQLSDIITQAQKDQETLSSQLNSIMGDDNDNDHNHKENSSAYLNVARQKIQELSEALKSQDNIAKDQSEQLDKIVREGLASYFAKNNKDNITLLELLKSHSTNEKTLKDFKVKVADFTNSLISSIPSLNLSELHLTQEEKAIQFTSSDSEIIKKVSNERTLYLNTNLLNRLFEARKNRDEAKNKVNQLKLPSSSTRTGEQIVSVESNNPDYRVDTWTVNGKQTRTLDPSQNNNIIINSSYQGELSNSSITKPSYTITIGNQKQIVQNDDGEIQRSYLEAEATYQRTLQEVIDAYNTTHDLVAKYYIISDGEEPQNLFDQFLNQSVNDTMVDLVKNGITKYLMDENTADAQQKVKDVMEEVENSQDELADQMAKVTETNVRLTDTIKKQLETLQTINMKVQNITQDQSKVNDSQKTTDQQLSDLKNQLDGLMTSATGVKDMSKSNSQEADQVNQIFTSFNKDVQDAKNSGNKLSTDATDLMANFQKELANNGDFVASFSKVFNTAYKNGVPNDILLNFLSRPVAESASAVRATENTYRPFTWILLLEVVSLFIAYIFATQNLIKKLTDRYNVNRWLQTDFLNIIVISGLSLVIGLALGVISCRSLHVMPEYVPSWFLVMTLFSFLLIHSQYFFIKNFKAVGMGLALFMIISFVYLSNAVGTVATVSGFPKLLKAINPLSILENQLSSYFDNVTTGFIFLILVLLVDVAFIIMNIFITLNFEAKVKE

SEQ ID NO: 15387 - protein, 468 aa, Streptococcus agalactiae
ATGATTCCAGATAGTAGTTTTAAAGTGCTATCAGATATGGCATATAATATTGAAAAATCCAAAGCAGAAAGTAATGGACACCTTAAAATTATAGAAGGTAGTCAAATTATTGATTTCCATCAAAAACGCTCTTTTATGGTATTAGAGGTTAATGATAATATCGATAATGGTATGCAGGCTATGGCATGTCAGTCTTTGGATGAGAGTAATCATATTGTTATAGCATATTCAGGAACGAACGCTTTTAATAAGAAAGATATCTTAACAGATATCGATTCAGTTGTATTGGGGAAGAACAATAAATTGCTAACTTGTCCTTCAAGTATTACCCTGAGAGAGGATGGCATTTCTCTGCCTTGTAAAAATCCAAGTCAAATTACAACATCTAAACTATTTGCACAAAAAATTAAGATGAACTATCCTGATGCAACCCTCTGGTTAACAGGCCATGGTAAATGTTCAGTCAGG

SEQ ID NO: 15388 - protein, 156 aa, Streptococcus agalactiae
MIPDSSFKVLSDMAYNIEKSKAESNGHLKIIEGSQIIDFHQKRSFMVLEVNDNIDNGMQAMACQSLDESNHIVIAYSGTNAFNKKDILTDIDSVVLGKNNKLLTCPSSITLREDGISLPCKNPSQITTSKLFAQKIKMNYPDATLWLTGHGKCSVR

SEQ ID NO: 15389 - protein, 321 aa, Streptococcus agalactiae
ATGTTAAAAACACGAACACATATTAATGAATTAGAAACAAAAATCGCCCTTGATTTAGTACACAGATATCTAGGTATTCAACAACTTGTTTTTTCAAAGTGGAGACATTCTTTAGAAACTGGTTCATGGTCTTCTATTATAACAATAAATGGCGCTAATATTATCAATTACATTGTTGATGATATTAGCGACAGTGATAGTATTTCAGGTATTATTTGTCATCCTAAAAGTTTTCATCTCAGACCTAGAGAAAAAAAGGAACCTATTCAGTCTATTGATGAGTTAGATATCATCTGGTCTTTGAATAGAGAGGAAAATGAA

SEQ ID NO: 15390 - protein, 107 aa, Streptococcus agalactiae
MLKTRTHINELETKIALDLVHRYLGIQQLVFSKWRHSLETGSWSSIITINGANIINYIVDDISDSDSISGIICHPKSFHLRPREKKEPIQSIDELDIIWSLNREENE

SEQ ID NO: 15391 - DNA, 3180 bp, Streptococcus agalactiae
atgccaaagcgcacagacatacgtaaaattatggttatcggttctggcccgattgtgattggacaagcagcagagtttgactattctggtacacaagcctgtctctctttaaaagaggagggataccaagttgttttggtcaattcgaatccggctactatcatgacagataaagatattgctgataaagtttatattgaacctattaccttggagtttgtcacaagaattctcaggaaggaaagacctgatgctctccttccaactcttggaggtcaaactggattgaatatggctatggctctatcaaaaaatggtatcctagaagaattgaatgttgaactattagggaccaaattatcagccattgataaagctgaagatcgtgatttatttaaacagttgatggaagaactcaatcaacctattccagaatccgagattgttaattcggtagaagaagctattcaatttgcagagcaaatcgggtatccattaattgttcgtcctgcctttactttaggaggtacaggtggaggcatgtgcgataatcaagaacaattggttgacatcacgacgaaggggttaaagttatcgcctgtgacacagtgccttattgaacgttcaattgctggctttaaagagattgaatacgaagttatgcgtgatgcagcagataacgctcttgttgtttgtaatatggagaattttgatcctgttggtatccatacaggggactctatagtttttgcacccgcacaaacgttatctgatgtggaaaatcagttattacgagatgcgagtttagatattataagagctttgaaaattgaaggaggatgcaatgttcaactagcccttgatccgaatagttttaaatactatgtcattgaagttaatccaagagtatcaagatcttctgctttagcttcaaaagctactggatatccaattgctaaattagcagctaagatagctgttggtttgacactagatgaggtaattaatcctattacaaaaacgacttacgctatgtttgaacctgctttagattacgtagtcgcaaaaatgccgagatttccttttgataaatttgaaagtggcgatagaaaattgggaacacagatgaaagctacaggcgaagtcatggcaataggacggaatatagaagaatctttgttgaaagcttgtcgttcactagaaataggtgtcgatcacattaaaatagcagatttagataatgtatcagatgatgttttattagaaaaaataagaaaggcagaagatgatcgcttattttatctagcagaagctttacgtagacattatagtattgaaaaattagcaagtttgactagcattgattctttcttccttgataagttaagagtgattgtagagttagaagatctattatctaaaaacagactggatatcaatattctcaaaaaggttaaaaataaaggtttttcagataaagctatagcgagtttatggcaaataaacgaagatcaagttcgtaacatgcgaaaagaagcaggaattcttccagtttataagatggttgatacatgtgcggctgagtttgattcagcaacgccctacttttattcgacttatgccgtagaaaacgagtcattgatatcagataaagcctctattttggttttaggatcgggcccaatccgaattggacagggagttgaatttgattattcaacggttcattctgttaaagccatcagagagtctggttttgaagcgattatcatgaactctaatccagagacggtctcaacggatttctctatttcagataagctttactttgaacctttgacttttgaagatgttatgaatgttattgacttagaaaaacctgaaggggtcatcttacaattcggtggtcagactgctattaatctagcaaaagatttaaacaaggcaggggttaaaatactaggcacacaattagaagatttggatcgtgctgaaaatagaaaacaatttgaagccactttacaagctctaaatatccctcaaccaccaggttttaccgccactacggaggaagaggcagttaatgcagcgcaaaagattggttatcccgtgttggttagaccatcatatgttcttggtggacgagctatgaagatagttgaaaacgaagaagatttacgtcattatatgacaaccgcggtaaaggcaagcccagatcatccagtgcttatagatgcataccttataggtaaagagtgtgaggttgatgctatatccgatggtcagaatatactgattcctggaataatggaacatatagagcgagctggtgttcattcaggagattccatggctgtataccctcctcaaacattgtctgagaccattatcgaaactattgtagattatacaaaacgcttagcaattggattaaactgtatcggtatgatgaatattcagtttgtaatcaaggatcagaaagtatatgttattgaagttaatcctcgtgctggtagaacacttccattcttatcaaaagtaactcacattcctatggcccaagtagcaacaaaagttatcttaggagataaactctgcaattttacatatggttatgatctctatccagcttcagatatggtccacattaaagcccctgtctttagttttaccaaacttgctaaagtagatagtttattaggtcctgaaatgaaatcaacaggcgaagtgatgggatcagatattaatcttcagaaagccttgtataaagcctttgaagcagcatatctccatatgccagactatggtaacattgtttttacagtagatgatacagacaaagaagaagctttagaacttgcaaaagtctatcaaagtattggttatcgtatttatgctacccaagggactgcaatttattttgatgctaatggtttagagacagttttagtaggtaagttaggagagaatgatcgaaatcatattcctgatttaattaaaaatggtaagattcaagcagttatcaacacagttgggcaaaataacattgataaccatgatgctctcatcatcagacgttctgcaattgaacaaggagttcctctatttacatctttagatactgcacatgcaatgttcaaagttcttgaaagcaaagcatttacattaaaagtactagat

SEQ ID NO: 15392 - protein, 1060 aa, Streptococcus agalactiae
MPKRTDIRKIMVIGSGPIVIGQAAEFDYSGTQACLSLKEEGYQVVLVNSNPATIMTDKDIADKVYIEPITLEFVTRILRKERPDALLPTLGGQTGLNMAMALSKNGILEELNVELLGTKLSAIDKAEDRDLFKQLMEELNQPIPESEIVNSVEEAIQFAEQIGYPLIVRPAFTLGGTGGGMCDNQEQLVDITTKGLKLSPVTQCLIERSIAGFKEIEYEVMRDAADNALVVCNMENFDPVGIHTGDSIVFAPAQTLSDVENQLLRDASLDIIRALKIEGGCNVQLALDPNSFKYYVIEVNPRVSRSSALASKATGYPIAKLAAKIAVGLTLDEVINPITKTTYAMFEPALDYVVAKMPRFPFDKFESGDRKLGTQMKATGEVMAIGRNIEESLLKACRSLEIGVDHIKIADLDNVSDDVLLEKIRKAEDDRLFYLAEALRRHYSIEKLASLTSIDSFFLDKLRVIVELEDLLSKNRLDINILKKVKNKGFSDKAIASLWQINEDQVRNMRKEAGILPVYKMVDTCAAEFDSATPYFYSTYAVENESLISDKASILVLGSGPIRIGQGVEFDYSTVHSVKAIRESGFEAIIMNSNPETVSTDFSISDKLYFEPLTFEDVMNVIDLEKPEGVILQFGGQTAINLAKDLNKAGVKILGTQLEDLDRAENRKQFEATLQALNIPQPPGFTATTEEEAVNAAQKIGYPVLVRPSYVLGGRAMKIVENEEDLRHYMTTAVKASPDHPVLIDAYLIGKECEVDAISDGQNILIPGIMEHIERAGVHSGDSMAVYPPQTLSETIIETIVDYTKRLAIGLNCIGMMNIQFVIKDQKVYVIEVNPRAGRTLPFLSKVTHIPMAQVATKVILGDKLCNFTYGYDLYPASDMVHIKAPVFSFTKLAKVDSLLGPEMKSTGEVMGSDINLQKALYKAFEAAYLHMPDYGNIVFTVDDTDKEEALELAKVYQSIGYRIYATQGTAIYFDANGLETVLVGKLGENDRNHIPDLIKNGKIQAVINTVGQNNIDNHDALIIRRSAIEQGVPLFTSLDTAHAMFKVLESKAFTLKVLD

SEQ ID NO: 15393 - DNA, 1074 bp, Streptococcus agalactiae
atgaagcgtctattattattggaagatggtagtgtgtttgagggtgaggctttcggagcggatgtaggaacaagtggtgaaattgtttttagtacaggaatgacagggtatcaagaatctataacagatcaatcttacaacggtcaaatcattacttttacttatcctcttattggaaattatgggataaatcgagacgattacgaatctattagaccaacatgtaagggagtaattgtttatgaatgggcagagtatccaagtaactggcgtcaacagatgacatttgatgaatttttaaaattaaaaggaatacctggaatttcaggtatagatactcgagcattaacaaaaattattcgaaaacatggaacaatgaaagcttgtttaataaacgagggaaattctattcatgaagcactagaaaaccttcaaaaaagtgttcttttaaataatcaaattgaacaagtatcaaccaaattagcttatgcttcgcctggagttggcaaaaatattgtattagttgactttggtttaaaacattctattctaagagaactgtcacaacgtcaatgtcatattacagtcgtccctcatactacgacagcgcaagaaatcttaaatctcaatccagatggagtactcttatctaacggccctgggaacccagaacaattaccgaatgctttacaaatgatccaagaaattcaaggtaaaattccaatttttggtatttgtatgggacatcaactatttgctaaagccaatggtgcaaagacttataaaatgacttttggtcatcgaggttttaaccatgctgttcgtcatttgcaaacaggacaggttgattttacaagtcaaaatcatggttatgctgtctcgagagaagatttccctgaggctctcttcattacacatgaagagattaatgataaaaccgtcgaaggtgttcgacataaatactatcctgccttttcagtgcagtttcacccagatgcagcaccagggccgcatgatacatcttatctttttgatgaatttattaatatgattgatgatttccagcaaaaaagc

SEQ ID NO: 15394 - protein, 358 aa, Streptococcus agalactiae
MKRLLLLEDGSVFEGEAFGADVGTSGEIVFSTGMTGYQESITDQSYNGQIITFTYPLIGNYGINRDDYESIRPTCKGVIVYEWAEYPSNWRQQMTFDEFLKLKGIPGISGIDTRALTKIIRKHGTMKACLINEGNSIHEALENLQKSVLLNNQIEQVSTKLAYASPGVGKNIVLVDFGLKHSILRELSQRQCHITVVPHTTTAQEILNLNPDGVLLSNGPGNPEQLPNALQMIQEIQGKIPIFGICMGHQLFAKANGAKTYKMTFGHRGFNHAVRHLQTGQVDFTSQNHGYAVSREDFPEALFITHEEINDKTVEGVRHKYYPAFSVQFHPDAAPGPHDTSYLFDEFINMIDDFQQKS

SEQ ID NO: 15395 - DNA, 921 bp, Streptococcus agalactiae
atgaatcatcaaacacaaacactttcattagaacattttgtcagtttagaagaattatcaaatcaagaagttatgtctttgataaagagaagtatcgaagttaaagaaaatcctagcaacattggttttgataaagattactatgtgtcaaatctcttttttgagaattcaacaagaacacataagtcatttgaaatggcagaactcaaattaggattaaaaacaattgaatttaatgctgatacaagttctgttaataaaggagaaaccctttatgacactatcttaacaatgagtgctctaggattggacgtttgtgtcattaggcaccctgatattgactattataaagaattgattgctagtccgaacattcattcagctattgtcaatgggggtgatggctcaggccaacatccaagccaatcacttttggatttggtaactatttacgaagaatttggatacttcaaaggactaaaaattgcgattgtaggagatctaactcactcacgggtagctaaatctaacatgcaagtgctaaaacgattaggagctgaaattttcttttctggacccaaagaatggtatagtagtcagttcgatgaatatgggcaatgtttaccaatagatcagttagttgatcaaattgatgtccttatgcttttacgtgttcaacacgaacgtcatgatggtaaaggggtgttttcaaaagaaagctatcatcaacaatttggtcttacaaaagaacgctataaacatttaagggatacagcaattattatgcacccagcacccgtcaatagggatgtagagattgctagcgatttagtagaagcagataaggctcgaatagtgaaacagatgagtaatggcgtctatgcaaggatagctatcttagaagcagtgctcaatagcaga

SEQ ID NO: 15396 - protein, 307 aa, Streptococcus agalactiae
MNHQTQTLSLEHFVSLEELSNQEVMSLIKRSIEVKENPSNIGFDKDYYVSNLFFENSTRTHKSFEMAELKLGLKTIEFNADTSSVNKGETLYDTILTMSALGLDVCVIRHPDIDYYKELIASPNIHSAIVNGGDGSGQHPSQSLLDLVTIYEEFGYFKGLKIAIVGDLTHSRVAKSNMQVLKRLGAEIFFSGPKEWYSSQFDEYGQCLPIDQLVDQIDVLMLLRVQHERHDGKGVFSKESYHQQFGLTKERYKHLRDTAIIMHPAPVNRDVEIASDLVEADKARIVKQMSNGVYARIAILEAVLNSR

SEQ ID NO: 15397 - DNA, 1290 bp, Streptococcus agalactiae
atgtatatcattaaaaacggattgattatcgaccctcaaagtggttttaatcaagtatcagacatgctgattgatcaaggaaaaattaaacaaatatcgaaagaaattgatattaaaggcattccaatcattgatgcaagcaataaaattgtagctccaggattagtcgatattcatgtacattttcgtgagcctggacagacacataaagaaaatatccatacaggagccttatcagctgcagcaggtggttttacgacagttcttatgatggccaatactaacccaacgatttctagctcagaaattgtaaaacaagttaaggagagtgcagcaaaagaagcaattaagattgaaacagttgctacaattactaaatccctgaatggtaaagatttagttaatttcgaagaattattagaagctggagttgctggattctcagacgatggtatccctttgacagatactaaggttttgcaagaagctatgaacttagctagaaaacatgatgttgtcctatcgttacatgaagaggatccatcgttaaatggtgttcttggtatcaacgaacatattgctcagaaaatttatcatgtctgtggagctagtggtcttgctgaatattcaatgattgcgcgagatgctatgattgcttaccaaacacaggcgaaagtccatatccagcatttgtcaagttcagaatcagtagaagtagttgattttgcgcagaagcttggtgctaacttaacagcagaagtaaccccccaacatttttcaaagacagaggacttacttttaactaagggtgctaatgcaaaattaaatccaccactgcgacttgaaaaggatagacaagccctcattgatggtcttaaaagtggtgttatttcaattattgcaagtgatcacgctccccatcatattatggagaaagcagcagataatattagtcaagcgccctctggtatgactggcttagagacatcattagccttagggattacttatttagtatctactaaagaactctcaatgattgactttttggcaaaaatgacatgtaatcctgcacagttatatggatttgatgcaggttatctcagagaaggtggacctgcagatatcgttatttttgatcaagctgaagagagaataataaaggcagaatttgcctccaaatccagcaactctccttttatcggtgataaattgaagggagttgttcactacacaatttgcaatggtgaaatagtctatcaaaaagatagccacgcagcgacattggta

SEQ ID NO: 15398 - protein, 430 aa, Streptococcus agalactiae
MYIIKNGLIIDPQSGFNQVSDMLIDQGKIKQISKEIDIKGIPIIDASNKIVAPGLVDIHVHFREPGQTHKENIHTGALSAAAGGFTTVLMMANTNPTISSSEIVKQVKESAAKEAIKIETVATITKSLNGKDLVNFEELLEAGVAGFSDDGIPLTDTKVLQEAMNLARKHDVVLSLHEEDPSLNGVLGINEHIAQKIYHVCGASGLAEYSMIARDAMIAYQTQAKVHIQHLSSSESVEVVDFAQKLGANLTAEVTPQHFSKTEDLLLTKGANAKLNPPLRLEKDRQALIDGLKSGVISIIASDHAPHHIMEKAADNISQAPSGMTGLETSLALGITYLVSTKELSMIDFLAKMTCNPAQLYGFDAGYLREGGPADIVIFDQAEERIIKAEFASKSSNSPFIGDKLKGVVHYTICNGEIVYQKDSHAATLV

SEQ ID NO: 15399 - DNA, 627 bp, Streptococcus agalactiae
atggatttagcaagacagattgccatggaactattagatattcaagctgtttacttaagaccccaacaaccctttacttgggcttcgggggtcaaatcgccaatttacactgataatcgtgtaaccttatcgtatcctgagacaaggacactgattgaaaatggttttgttaaacaaatacagaaacatttcccaaacgttgatatcatcgcaggaacagcgactgcaggcataccacatggcgctattatagctgataagatgaacttgccctttgcctatatacgctcgaaggcaaaggatcatggtgtggggaatcaaatcgagggacgtgtttactcaggccaaaaaatggttatcattgaagatttgatttcaacaggaggatctgttttagaggctgttacggctgcgcagagtcaaggtattgaggttttaggggtggtagcgatatttacatatcaattagctaaggctgaacaagcatttcgtgaagctgatattcctttggtgactttgacggattacaatcaattaattaaagttgctaaagttaatggatatattacagctgaccaactggtattactgaaaaaatttaaagaagatcaaatgaattggcaaagt

SEQ ID NO: 15400 - protein, 209 aa, Streptococcus agalactiae
MDLARQIAMELLDIQAVYLRPQQPFTWASGVKSPIYTDNRVTLSYPETRTLIENGFVKQIQKHFPNVDIIAGTATAGIPHGAIIADKMNLPFAYIRSKAKDHGVGNQIEGRVYSGQKMVIIEDLISTGGSVLEAVTAAQSQGIEVLGVVAIFTYQLAKAEQAFREADIPLVTLTDYNQLIKVAKVNGYITADQLVLLKKFKEDQMNWQS

SEQ ID NO: 15401 - protein, 699 aa, Streptococcus agalactiae
ATGTTAGAAAAATGCCCTATCATTGCCTTAGATTTTTCTGATTTGGCTTCTGTAACAACTTTTTTAGAACATTTTCCAAAAGAAGAATTGCTTTTTGTCAAAATAGGAATGGAGCTTTATTATTCCGAAGGTTCCTCAATTATTAGATATATTAAATCCTTAGGACATCGCATTTTTTTGGATTTAAAATTACATGATATCCCTAATACAGTTCGATTATCTATGTCTGTCTTAGCCAAATTAGGCATTGATATGACTAATGTCCATGCTGCAGGAGGAGTCGAAATGATGAAAGCAGCTAGAGAAGGTTTGGGGGAGGGTCCAATACTATTAGCAGTGACACAATTAACCTCGACTTCACAAGAACAAATGCAGGTGGATCAACATATTAACTTAAGTGTAGTTGATTCGGTTTGCCATTATGCTCAAAAAGCTCAAGAAGCAGGCTTAGATGGAGTAGTCGCATCGGCTCAAGAGGTAAAGCAAATCAAGAAACAGACTAACGAACATTTCATTTGCTTAACGCCTGGTATCAGACCTCCACAGACCAATCAGTTAGATGATCAAAAAAGAACGATGACTCCTGAGCAAGCACGTATAGTTGGGGCTGATTATATCGTTGTGGGAAGACCTATAACGAAAGCAGAAAATCCATATCAAGCATATCTAGACATAAAAGAAGAATGGAATCGTATTAAA

SEQ ID NO: 15402 - protein, 233 aa, Streptococcus agalactiae
MLEKCPIIALDFSDLASVTTFLEHFPKEELLFVKIGMELYYSEGSSIIRYIKSLGHRIFLDLKLHDIPNTVRLSMSVLAKLGIDMTNVHAAGGVEMMKAAREGLGEGPILLAVTQLTSTSQEQMQVDQHINLSVVDSVCHYAQKAQEAGLDGVVASAQEVKQIKKQTNEHFICLTPGIRPPQTNQLDDQKRTMTPEQARIVGADYIVVGRPITKAENPYQAYLDIKEEWNRIK

SEQ ID NO: 15403 - protein, 1229 aa, Streptococcus agalactiae
ATGCAAAATGATATGAGCGTTGTTCTTAGAGCTGGTAAATTACTGATTAAAGCGGAGCAGAAGTCTATCGTGTCGAAGACACAATGAAGCATTTTGCTAAGGCTCTTCAGATAGAAAATTTTGAAGCTTATGTGGTTAGTAGCAGTATTATCGCTTCCGGGATTAACCGCTATGGTAAACAAGAAGCTAAAGTATGCAATACAGATGGTGTAACAGCAAATTTAGGTAGACTTGAAGCTGTTAATAACCTTTCTAGGCAAATTGCTAAACAAGACTTAGTATCTCCAGAAGAAATTGTAAAGCAGTTAGACTTAATTGAACATCAAAAAGATTATAGTTTGCTTGTTACTTTAATTTCTTATTTTTGTGGAGCGGGTAGTTTTTCTTTAGCCTTGGGTAGTTCCTTATTAGATTCATTTTCCGCTGCTGTAACAGGCTTAATTTTAGGATATTTTTTGAATTTGATGGAAAGTCGTATACATACAGGATTTCTTTTGACCATTCTAGGTAGTTCTGTAGTGGCTTTAAGTGCTAATTTATTATATTTTTCAGGATTAGGTGAGCATCGTAGCATTATCATATTAGGGGCATTAATGGTTATGGTGCCAGGGGCTGCCTTTGTTAATTCGGTGAGAGAATTTTCACAGAATAATTTTTCAACAGGTTTAGCTTTGATTATGTCTGCTTTACTCATTTGTATTTCTATATCAGCAGGCGTGGCTATTACAATTGAAATTATTCCGTTTGCAGAACAAATGACAGGTTCTTTTTCTGGTGTTCCTAATACCATTCTTGAGATTATCATCAGAACACTAATGGCCGGTTTAGGGACGATAGCCTTCTCTATTCTCTACCATGTTCCAAAACGTTATTTCCTTGACTTAGGGATACTAGGAGCAATATCTTGGATGCTCTACCTGATCTTATGGCAACAATTTCACATGGATGCTATAGCCGTATTTTTTCCAGGGCTTTTCATCACTTATTTTTCACGGCTATTAGCTGCTAAACGTAAGTGTCCTGCCACTGTCTTTTTAGCGACAAGTATGTTTCCTCTTATCCCAGGACTTAGCTTCTATAGAGCCGTTTACTTTTTATTGACGGGAGCAGATGCCTTAGCAATGGAATATTTTAGATCCTGTTTTGTAACAGCTTTTACAATTGCTATAGCAATCAGTATTGTACAGCAGATTCCTCTATCGTTCTTTATTAGACGTAAAATGATAAAA

SEQ ID NO: 15404 - protein, 410 aa, Streptococcus agalactiae; identical to SEQ ID NO: 6562

SEQ ID NO: 15405 - protein, 876 aa, Streptococcus agalactiae
TTGAACGATGTTATCAATATTGTCTATCATGTTGAAAATCAAGATTTAGTAAGATATTCCGGTGATTATACTAATTTTGAATCAGTCTATGCAATGAAAAAGGCTCAATTAGAAGCAGCCTATGAACGTCAACAAAAGGAAATAGCTGATTTACAAGATTTTGTTAATCGTAATAAAGCACGCGTTGCAACACGTAATATGGCAATGTCTCGTCAAAAGAAACTAGACAAAATGGATATTATTGAGTTACAAGCAGAGAAACCAAAGCCAAGTTTTGATTTAAGATCTCGCACACCAGGACGTTTTATTTTCCAAGCTAAAGATCTTCAAATTGGATATGATCGTGCTTTAACAAAACCTCTAAACCTAACATTTGAACGTAATCAAAAAATAGCTATTGTTGGAGCAAATGGGATAGGAAAAACAACATTACTTAAGAGTTTACTAGGTATTATCCCCCCTATTTCTGGTAATGTTGAACGAGGTGATTTTATTGATTTAGGTTATTTTGAACAAGAAGTACCCGGAGGGAATCGCCAAACTCCACTTGAAGCAGTATGGGATGCTTTTCCTGCTTTGAACCAAGCAGAGGTTAGGGCAGCTCTTGCTCGTTGTGGTTTAACTTCAAAGCATATTGAAAGTCAGATTCAGGTGTTATCTGGTGGGGAGCAATCAAAGGTCAGATTTTGCTTATTAATGAATCGCGAAAATAATGTCCTTGTACTTGATGAACCAACCAATCATTTAGATGTAGATGCTAAAGATGAGTTAAAACGTGCTTTAAAAGCTTATAAGGGATCAATCTTGATGGTATGTCATGAACCGGACTTTTATGAAGGATGGATGGATGATGTTTGGGACTTTAACCAACTTAGT

SEQ ID NO: 15406 - protein, 293 aa, Streptococcus agalactiae
  VARIANT 95: Xaa = Any Amino Acid
MNDVINIVYHVENQDLVRYSGDYTNFESVYAMKKAQLEAAYERQQKEIADLQDFVNRNKARVATRNMAMSRQKKLDKMDIIELQAEKPKPSFEFXESRTPGRFIFQAKDLQIGYDRALTKPLNLTFERNQKIAIVGANGIGKTTLLKSLLGIIPPISGNVERGDFIDLGYFEQEVPGGNRQTPLEAVWDAFPALNQAEVRAALARCGLTSKHIESQIQVLSGGEQSKVRFCLLMNRENNVLVLDEPTNHLDVDAKDELKRALKAYKGSILMVCHEPDFYEGWMDDVWDFNQLS

SEQ ID NO: 15407 - protein, 546 aa, Streptococcus agalactiae
GTGGAGTCTCCTGCAAAAGCAAAGACTATCGAAAAATACTTAGGACGTAACTATAAAGTTGTAGCCTCAGTAGGTCATATCCGTGATTTAAAAAAGTCAAGTATGTCCATTGATTTTGAGAATAATTACGAGCCACAATATATTAATATTCGTGGTAAAGGACCTCTCATTAATGATTTAAAAAAAGAAGCTAAAAAGGCTAAAAAAGTTTACCTCGCGAGTGACCCGGACCGTGAAGGAGAAGCTATTTCCTGGCATTTAGCGCATATTTTAGATTTAGACAAAGAAGACAGAAACCGTGTTGTTTTCAATGAAATCACAAAAGATGCTGTTAAAAATGCTTTTGTGGAACCTCGTCAGATTAACATGGATCTCGTTGATGCTCAGCAAGCACGACGTGTTCTAGATCGCATTGTTGGTTATTCTATCTCACCTATTTTATGGAAAAAAGTAAAAAAAGGGCTATCAGCTGGACGTGTACAATCAGTTGCTCTTAAACTAATCATTGATCGTGAAAATGAGATTAAGGCTGTCCANNNNNTTAAT

SEQ ID NO: 15408 - protein, 182 aa, Streptococcus agalactiae
  VARIANT 179, 180, 181: Xaa = Any Amino Acid
MESPAKAKTIEKYLGRNYKVVASVGHIRDLKKSSMSIDFENNYEPQYINIRGKGPLINDLKKEAKKAKKVYLASDPDREGEAISWHLAHILDLDKEDRNRVVFNEITKDAVKNAFVEPRQINMDLVDAQQARRVLDRIVGYSISPILWKKVKKGLSAGRVQSVALKLIIDRENEIKAVXXXN

SEQ ID NO: 15409 - protein, 234 aa, Streptococcus agalactiae
ATGCGAAAAGAAGCAGGAATTCTTCCAGTTTATAAGATGGTTGATGCATGTGCGGCTGAGTTTGATTCAGCAACGCCATACTTTTATTCGACTTATGCCGTAGAAAACGAGTCATTGATATCAGATAAAGCCTATATTTTGGTAGTAGGATCGGGCCCAATCCGAATTGGACAGGGAGTTGAATTTGATTATTCAACGGTTCATTCTGTTAAAGCCATCAGAGANNNNNTTAAT

SEQ ID NO: 15410 - protein, 78 aa, Streptococcus agalactiae
  VARIANT 75, 76, 77: Xaa = Any Amino Acid
MRKEAGILPVYKMVDACAAEFDSATPYFYSTYAVENESLISDKAYILVVGSGPIRIGQGVEFDYSTVHSVKAIRXXXN

SEQ ID NO: 15411 - protein, 336 aa, Streptococcus agalactiae; identical to SEQ ID NO: 6565

SEQ ID NO: 15412 - protein, 112 aa, Streptococcus agalactiae; identical to SEQ ID NO: 6566

SEQ ID NO: 15413 - protein, 805 aa, Streptococcus agalactiae
GTGTAGTAGATAACACGTCATATTTTCGTCAGAATCCTGATGTTCCACTAGTTGTTCCTGAAGTAAATGCTCATGCCATGATTGGTCATAATGGTATCATAGCTTGTCCCAATGTTCTACTATTCAAATGATGATTGCTTTAGAGCCCATTCGTCAAAAATGGGGGATAGAGCGTGTTATAGTTTCCACCTATCAAGCTGTTTCGGGTTCAGGTGCACGTGCTGTTGAAGAAACTAAGGAACAGTTGAGACAAGTTTTAAATGATAACCTTTCACCTGATCAATTAATTGCAACGGTCTTGCCATGTTCTAGCGATCAAAAACATTATCCTATCGCATTCAATGCATTACCTCAAATTGATATTTTTACTGATAATGATTATACGTACGAAGAAATGAAAATGACTTTGGAGACAAAGAAAATTATGGAAGATGCTACTATTAAGGTTTCAGCTACCTGCGTCCGCATTCCCGTTTTATCGGGTCATTCTGAGTCTATTTATATTGAGACGAAAGAATTAGCCTCAATCTCTGAAATTAAAAAGGCTATTGCAAATTTTCCTGGTGCCGTCCTACAAGACCTTCCATCTCAGCAAATTTACCCTCAAGCGATTAATGCTGTAGGCCATAGGGAGACCTTTGTTGGTCGTATTCGAAAAGACCTTGATCAAGAAAATGGTGTTCATATGTGGGTAGTTTCAGATAATCTACTGAAGGGGGCAGCTTGGAATTCTGTTCAAATCGCAGAAACATTGCATAAGAATGGGCTGGTTAAACCAGCGAAAGAGTTAAAATTTGAATTAATA

SEQ ID NO: 15414 - protein, 269 aa, Streptococcus agalactiae
VVVDNTSYFRQNPDVPLVVPEVNAHAMIGHNGIIACPNCSTIQMMIALEPIRQKWGIERVIVSTYQAVSGSGARAVEETKEQLRQVLNDNLSPDQLIATVLPCSSDQKHYPIAFNALPQIDIFTDNDYTYEEMKMTLETKKIMEDATIKVSATCVRIPVLSGHSESIYIETKELASISEIKKAIANFPGAVLQDLPSQQIYPQAINAVGHRETFVGRIRKDLDQENGVHMWVVSDNLLKGAAWNSVQIAETLHKNGLVKPAKELKFELI

SEQ ID NO: 15415 - protein, 264 aa, Streptococcus agalactiae
ATGGGATATACCGTTGCTATCGTGGGTGCTACAGGTGCCGTAGGAACACAAATGATTCGTCAATTAGAACAATCGAATTTACCAATAGAACAAGTGAAACTTTTATCATCAAGTCGCTCAGCAGGTAAAATTTTACATTTTAAAGATGAGGCTATACGTGTTGAAGAGACAACAAAAGAATCATTTTACGATGTTGATATTGCCTTGTTTTCAGCTGGTGGATCTATTTCAGCAAAGTTCGCTCCTTATGNNNNNTTAATTAAT

SEQ ID NO: 15416 - protein, 88 aa, Streptococcus agalactiae
  VARIANT 84, 85: Xaa = Any Amino Acid
MGYTVAIVGATGAVGTQMIRQLEQSNLPIEQVKLLSSSRSAGKILHFKDEAIRVEETTKESFYDVDIALFSAGGSISAKFAPYXXLIN

SEQ ID NO: 15417 - protein, 654 aa, Streptococcus agalactiae
TTGTTCAATAAAATAGGTTTTAGAACTTGGAAATCAGGAAAGCTTTGGCTTTATATGGGAGTGCTAGGATCAACTATTATTTTAGGATCAAGTCCTGTATCTGCTATGGATAGTGTTGGAAATCAAAGTCAAGGTAATGTTTTAGAGCGTCGCCAACGTGATGCGGAAAACAAAAGTCAGGGTAATGTTTTAGAGCGTCGCCAACGTGATGCGGAAAACAAGAGCCAAGGCAATGTTTTAGAGCGTCGTCAACGCGATGTTGAGAATAAGAGCCAAGGCAATGTTTTAGAGCGTCGTCAACGTGATGCGGAAAACAAAAGTCAGGGCAATGTTCTAGAGCGCCGCCAACGTGATGCGGATAACAAGAGCCAAGTAGGTCAACTTATAGGGAAAAATCCACTTTTTTCAAAGCCAACTGTATCTAGAGAAAATAATCACTCTAGTCAAGGTGACTCTAACAAACAGTCATTCTCTAAAAAAGTATCTCAGGTTACTAATGTAGCTAATAGACCGATGTTAACTAATAATTCTAGAACAATTTCAGTGATAAATAAATTACCTAAAACAGGTGGTGATCAAAATGTCATTTTTAAACTTGTAGGTTTTGGTTTAATTTTGTTAACAAGTCGCTGCGGTTTGAGACGCAATGAAAAT

SEQ ID NO: 15418 - protein, 218 aa, Streptococcus agalactiae
MFNKIGFRTWKSGKLWLYMGVLGSTIILGSSPVSAMDSVGNQSQGNVLERRQRDAENKSQGNVLERRQRDAENKSQGNVLERRQRDVENKSQGNVLERRQRDAENKSQGNVLERRQRDADNKSQVGQLIGKNPLFSKPTVSRENNHSSQGDSNKQSFSKKVSQVTNVANRPMLTNNSRTISVINKLPKTGGDQNVIFKLVGFGLILLTSRCGLRRNEN

SEQ ID NO: 15419 - protein, 1591 aa, Streptococcus agalactiae
TTGATTTGGAGGGGGGAAAAACTTATCAGTAATAAAGTCAAAATTGTTCGTTTACTTAATAAGAGTAAGAAAAGTTTACTAAGGGGTATATTTAGTCGAACAACCGTTATCGCTATTTTATTGATTTTACAATTATTGTTTTTACTAGCCTCTTACTCATGGCTAGAGCAGTATCGTGTTTGGTTAGCAACCGTTGAGCATATCTTAACAATTGGAGCGGTCTTATATTTAGTTAATAGTGAAATGGATGCTTTGTCCCGAGTAACTTGGTTAATATTGGTAATGATTGCCCCTTTACTAGGGGCGATGTTCCTAATGTACACCAAATTCGACTGGGGTTATCGTGGTTTGAAACAAAGATTGGAGACATTGATTGATGAGAGTCAGATTTATCTAGAGGATGATCCTGAAACTTTGAATCAGCTTAAGTCGAGTACATCCACAACATATCATTTGGTTCAATATTTGAAAAAGCACATGGAAATTTCCCAGTTTATCGAAATACTGATGTGACATTTCTACCAACGGGAGAAGCATTCTTTGAAAAAATGAAAGAAGAACTACTAAAAGCTAAGAAGTATATCTTTTTAGAATTCTTTATCATTGACGAAGGAATAATGTGGGGAGAAATACTTAGTATTTTAGAACAAAAGGTGGAAGAAGGTGTTGAAGTCCGTATCTTATATGATGGTATGATAGAAATTACAAAATTATCCTTTGATTATACGAAACGACTTGAGAAAATAGGAATAAAAGCAAAAGCATTTTCTCCGATTTCTCCTTTTATTTCAACTTATTATAACTATCGTGACCATCGAAAAATTGTTGTTATTGATGGAGTAGTAGGCATGACTGGTGGTGTAAACTTAGCCGATGAGTATATTAATCACATTGAGTTATTTGGGCATTGGAAAGATTCAGGTATTATGTTAAAGGGGAAAGCAGTGGATAGTTTCCTCCTACTTTTCTTACAGATGTGGTCCATTACTGAGGAAAAAATGTTAGTAGCGCCTTACCTCGGTGTACACGATGATTTAGTTGAAAATGAAGGCTATGTTATTCCTTATGGAGATTCTCCTTTAGACACTGATAAAGTAGGGGAAAATGTTTATATAGATATTCTTAATCATGCTAGAGAATATGTTTACATCATGACACCTTATTTAATATTAGACAGTGAATTGGAACATGCCATTCAGTTTGCTGCGGAACGTGGTGTAGATGTACGTATTATTATGCCGGGTATCCCAGATAAGCCAATCCCTTATGCTCTTGCTAAAACTTACTATCAAGCATTAATAAAATCAGGTGTTAAAATATATGAATACACCCCTGGATTTGTTCATTCAAAAATATTCCTTAGTGATAATACAAAGGCTGTGTAGGTACGATAAATCTTGATTACCGTAGCCTGTATCACCATTTTGAATGTGCTGTTTATCTTTATAAGGTAGATGCAATCCAAGACATTTATCGAGATTATATGGATACGTTAAATAAATCAAGGTTAGTTAGCTTGAAAGATATAAATAATATTCCAAAATTCCAAAAAGTAATTGGCATAGTGACAAAAACTATTGCTCCCCTGCTT

SEQ ID NO: 15420 - protein, 531 aa, Streptococcus agalactiae
MIWRGEKLISNKVKIVRLLNKSKKSLLRGIFSRTTVIAILLILQLLFLLASYSWLEQYRVWLATVEHILTIGAVLYLVNSEMDALSRVTWLILVMIAPLLGAMFLMYTKFDWGYRGLKQRLETLIDESQIYLEDDPETLNQLKSSTSTTYHLVQYFEKAHGNFPVYRNTDVTFLPTGEAFFEKMKEELLKAKKYIFLEFFIIDEGIMWGEILSILEQKVEEGVEVRILYDGMIEITKLSFDYTKRLEKIGIKAKAFSPISPFISTYYNYRDHRKIVVIDGVVGMTGGVNLADEYINHIELFGHWKDSGIMLKGKAVDSFLLLFLQMWSITEEKMLVAPYLGVHDDLVENEGYVIPYGDSPLDTDKVGENVYIDILNHAREYVYIMTPYLILDSELEHAIQFAAERGVDVRIIMPGIPDKPIPYALAKTYYQALIKSGVKIYEYTPGFVHSKIFLSDNTKAVVGTINLDYRSLYHHFECAVYLYKVDAIQDIYRDYMDTLNKSRLVSLKDINNIPKFQKVIGIVTKTIAPLL

SEQ ID NO: 15421 - protein, 1668 aa, Streptococcus agalactiae
ATGAAAACAGATATTGAAATAGCGCAAAGCGTCGCCCTAAAGCCTATTGCTGAGATTGTTGAGCAAGTAGGAATTGGTTTTGATGATATAGAATTGTATGGTAAATACAAAGCAAAATTATCTTTTGATAAGATTGAAGCTGTAAGATCTCAAAAAGTAGGAAAGTTAATTTTAGTAACTGCTATTAATCCGACACCAGCAGGTGAGGGAAAATCCACTATGAGCATTGGATTAGCTGATGCTTTAAATAAAATTGGTAAAAAAACGATGATTGCGCTTCGCGAACCTTCTTTAGGTCCTGTAATGGGTATTAAAGGAGGAGCTGCTGGAGGTGGATACGCACAAGTACTACCAATGGAAGATATTAATTTGCATTTTACTGGTGATATGCACGCAATCACAACTGCTAATAATGCTTTATCAGCTCTACTTGATAATCATATTCATCAAGGCAATGAATTAGATATTGACCAACGTCGAGTGATTTGGAAGCGTGTAGTTGATCTTAATGATCGTGCTCTTCGTCAGGTGATCGTTGGCTTAGGAAGCCCTGTCAATGGGATACCACGTGAAGATGGCTTTGATATTACTGTTGCTTCTGAAATAATGGCTATTCTATGTTTAGCTACTGACCTATCAGATTTAAAGAAACGCCTGTCAAATATTGTTGTGGCTTACTCAAGGGACCGTAAACCAATCTATGTTAAAGATTTGAAGATTGAAGGAGCTCTCACACTTATCCTAAAAGATGCTATCAAACCTAATTTGGTTCAAACCATTTATGGGACACCGGCTCTTGTCCATGGGGGACCATTTGCTAATATTGCACATGGATGTAATTCTGTCTTAGCGACTTCAACAGCTCTACGCTTAGCAGATTACGTTGTTACTGAAGCTGGTTTTGGAGCAGACTTGGGCGCTGAAAAGTTTCTTGATATAAAAACGCCAAACCTTCCGACTTCTCCCGATGCGATTGTTATTGTTGCTACATTGCGTGCATTGAAAATGCATGGAGGTGTTTCAAAAGAAGATCTCTCACAAGAGAACGTCGAAGCAGTTAAAAGAGGTTTTACAAATCTCGAGCGTCACGTTAACAATATGCGTCAATATGGTGTTCCGGTAGTTGTAGCTATCAATCAGTTTACTGCAGATACAGAAAGTGAAATTGCAACTCTTAAAACCTTATGTAGTAATATTGATGTGGCAGTTGAATTAGCAAGTGTGTGGGAAGATGGAGCAGACGGTGGCCTTGAACTTGCACAGACTGTTGCTAATGTGATTGAAACACAATCATCCAATTACAAACGCTTATATAATGATGAAGACACTATTGAAGAAAAAATTAAAAAAATTGTTACTAAAATATATGGTGGTAATAAAGTTCATTTTGGACCTAAGGCACAAATACAATTAAAAGAGTTTAGTGACAATGGCTGGGACAAGATGCCTATTTGTATGGCAAAGACACAATATAGCTTTTCTGATAATCCAAATTTATTTGGTGCTCCAACTGACTTTGATATAACTGTTCGTGAATTTGTTCCAAAAACAGGAGCTGGTTTTATAGTTGCTCTTACTGGAGACGTATTGACAATGCCTGGTTTACCTAAAAAACCTGCAGCTCTCAATATGGATGTTTTAGAAGACGGTACAGCCGTTGGATTATTT

SEQ ID NO: 15422 - protein, 556 aa, Streptococcus agalactiae
MKTDIEIAQSVALKPIAEIVEQVGIGFDDIELYGKYKAKLSFDKIEAVRSQKVGKLILVTAINPTPAGEGKSTMSIGLADALNKIGKKTMIALREPSLGPVMGIKGGAAGGGYAQVLPMEDINLHFTGDMHAITTANNALSALLDNHIHQGNELDIDQRRVIWKRVVDLNDRALRQVIVGLGSPVNGIPREDGFDITVASEIMAILCLATDLSDLKKRLSNIVVAYSRDRKPIYVKDLKIEGALTLILKDAIKPNLVQTIYGTPALVHGGPFANIAHGCNSVLATSTALRLADYVVTEAGFGADLGAEKFLDIKTPNLPTSPDAIVIVATLRALKMHGGVSKEDLSQENVEAVKRGFTNLERHVNNMRQYGVPVVVAINQFTADTESEIATLKTLCSNIDVAVELASVWEDGADGGLELAQTVANVIETQSSNYKRLYNDEDTIEEKIKKIVTKIYGGNKVHFGPKAQIQLKEFSDNGWDKMPICMAKTQYSFSDNPNLFGAPTDFDITVREFVPKTGAGFIVALTGDVLTMPGLPKKPAALNMDVLEDGTAVGLF

SEQ ID NO: 15423 - protein, 1017 aa, Streptococcus agalactiae
ATGTATCTTATTGAACCAATTAGAAATGGTAAGCGTATCACAGACGGTGCGATTGCACTTGCCATGCAAGTTTATATTTTACAAAATGTTTTTTTAGATGATGATATTTTATTTCCATACTATTGTGATCCTAAAGTTGAAATCGGAAAATTTCAGAATGCAGTTATAGAGACAAATCAAGAATATTTGAAAGAACATGATATTCCTGTTGTTCGTCGAGATACTGGTGGAGGAGCTGTTTACGTTGACTCAGGTGCTGTAAATATTTGCTATCTAATGAAAGATCATGGACAATTTGGTGATTTCAAACGAGCTTATGAGCCAGCTATTAAGGCCCTAAAAACTTTAGGTGCTTCTAGTGTTGAAATGAGGGGACGAAATGACTTAGTTATTGATGGTAAAAAAGTATCAGGTGCAGCAATGACGATAGTAAACGGTCGTATTTACGGTGGTTACTCTCTTTTATTAGATGTTGATTTTGATGCTATGGAAAAAGTGTTAAATCCTAATCGGAAAAAAATTGAATCTAAAGGGATAAAATCTGTCCGAAGTCGAGTAGGAGATATTCGTAGCCACTTGTCAGAAGATTATCGTCATATCACAACCGATCAATTTAAAGATTTAATGGTTTGTCAATTATTACATATTGATCATATTGATCAGGCAAAACGCTATCATCTAACCGAAAAAGATTGGGCTGCGATTGACGCTCTAGCTGATGAAAAATATAAGAATTGGGATTGGAATTATGGTAACTCACCACAGTATTCGTATCACAGAGATGCTCGTTTTCCGTCAGGAACTTACGATTTTCACTTAGAAATTGAGAAAGGTATTATTACGAATTGCCGTATTTATGGTGACTTTTTCAGTTCTAAAGATATTTCAGATATTGAAAACCTTCTCATTGGTTGCCCTATGAAAGAAGAATTAGTCTTGGAAAAATTAAGTACTTTATCATTAGAAGATTATTTTGGTCAGACTAGTCCAGAAGAAATAAAAGCAGTTTTATTTTCA

SEQ ID NO: 15424 - protein, 339 aa, Streptococcus agalactiae; identical to SEQ ID NO: 6576

SEQ ID NO: 15425 - protein, 876 aa, Streptococcus agalactiae
ATGACAGTGTGGAAGACTCTAGAAAAAACTAATCATTCTCAATCAGAAATACTAAGTCAGTTAATAGAAGAATCAGATGCTATTGTAGTTGGTATTGGTGCAGGCATGTCTGCAGCGGATGGATTTACCTATATTGGCCCCAGATTTGAAGAAGCTTTTCCGGATTTTATTGCTAAATATCAACTATTAGATATGTTGCAAGCAAGTCTTTATGACTTTGAAGATTGGGAAGAATATTGGGCCTTCCAAAGTCGTTTTGTGGCACTTAATTATTTAGATCAACCGGTAGGACAAGCTTATCTTGATTTAAAGGATATTTTAGCGAAAAAAGAATATCATATTATTACAACTAATGCTGATAATGCCTTCGCTGTGGCTGATTATAATTTAGAAAAAGTTTTTCATATTCAAGGTGAATATGGCTTATGGCAGTGTAGTCAACATTGTCATCAACAAACTTATCGAAATGATCAGGCAATTCGTCAAATGATTGCACAACAAAAGGATATGAAGATTCCTAGTAACTTAATCCCCAAATGCCCAAAGTGTGATCAACCGTTTGAAATTAATAAACGTAACGAAGAAAAAGGTATGGTGGAAGATGCTGACTTTCATGCTCAACGACAACGTTATGAAAATTTCTTATCACAACATCAAAATGACAAAGTTCTTTATCTAGAGATTGGAGTTGGACATACCACGCCACAATTTATTAAGCATCCGTTTTGGCGATTCGTCTCTTTAAATGAAAACTCTTTATTTGTTACTCTTAATCACAAGCATTATCGCATTCCTCAAAAGATTCGCTCAAGGAGTGTGCAACTGACACAGCATATCGCTGAATTAATTGCTGAAGCGAAAAAAGAAATTATTGGA

SEQ ID NO: 15426 - protein, 292 aa, Streptococcus agalactiae; identical to SEQ ID NO: 10882

SEQ ID NO: 15427 - protein, 816 aa, Streptococcus agalactiae
ATGCCTAATCAAAAACAACTATTGCTAGCCATGATTGAGTATCTTCAGTCAGAAAAATTAACAGACGTTGATGACTTGAGGACCACCGATTTGCAAACGGTTTGGCGTGGTCTAGTTAATCAACAAGATCCTCAAAACATTAGTCAAGAGTACCTGTCTTTAGAAGATAGGTATTTGTCACATTGGTGGAATACTCAAAAAGTAAAAACGATAGACGTCTGTCATCAAACGGTATATTCAAATGTATTTACCTACCATGGGGATATTTGCTTATTACAAGTGGATGCTATTGTTAATGCAGCAAATAGTAAGTTGTTAGGTTGTTTTATTCCTAATCACCATTGTATTGACAATCAGATTCATACGTTTGCAGGTTCACGATTACGTTTAGCATGTCATCAATTGATGACACAACAAGGACGAATGGAAGCCGTAGGACAAGCTAAACTTACCGAATCCTATCATCTTCCTTGTAAGTATGTTATTCATACAGTCGGACCTTATGTAAAAGTTGATCAAAAGCCATCTCGTATAAGAGAGGATTTATTAAAGTCTTCTTATAAATCCTGCTTACAATTGGCAGCTCAAGCTAATCTTAAAACAATTGTCTTCCCTTGTATATCAACGGGAGAATTTGGTTTTCCTAATCAAAGAGCCGCTGAATTGGCTGTTCAAGAGATATTAGAGTGGCAACGCGAAAATCAGCACAAACTCTATATTATTTTCAATACATTCACACCTAAAGACCAAGAGATTTATCAAAAATTATTATTAAAAGAGGAAATAGATGACAGTGTGGAAGACTCTAGAAAAAAC

SEQ ID NO: 15428 - protein, 272 aa, Streptococcus agalactiae
MPNQKQLLLAMIEYLQSEKLTDVDDLRTTDLQTVWRGLVNQQDPQNISQEYLSLEDRYLSHWWNTQKVKTIDVCHQTVYSNVFTYHGDICLLQVDAIVNAANSKLLGCFIPNHHCIDNQIHTFAGSRLRLACHQLMTQQGRMEAVGQAKLTESYHLPCKYVIHTVGPYVKVDQKPSRIREDLLKSSYKSCLQLAAQANLKTIVFPCISTGEFGFPNQRAAELAVQEILEWQRENQHKLYIIFNTFTPKDQEIYQKLLLKEEIDDSVEDSRKN

SEQ ID NO: 15429 - protein, 330 aa, Streptococcus agalactiae
ATGAAAAAAATTGCGAACTACTTATTAATTGAAAAAAATGAAGAACTTTATACTATCAGCTTAACTCCCGAACTTCAAGATGACTTGGGAACTGTTGGATATGTGGAATTCACAGATGATACAAATTTAGAAGTTGATGATGTTATTTTAAATATTGAAGCTTCAAAGACGGTTATGGCAATTTTATCTCCTCTTACAGGTAAAGTTGTTAAAGTTAATACAGCTGCAAGTCAAGAACCAACTTTGTTAAATTCTGAAAAAGCTGACGAAAATTGGTTGGTTGTGTTAACAGATGTTGATTATGCTGCTTTTGAAGCTTTAGAAAATGCC

SEQ ID NO: 15430 - protein, 110 aa, Streptococcus agalactiae; identical to SEQ ID NO: 6582

SEQ ID NO: 15431 - protein, 984 aa, Streptococcus agalactiae
ATGAAATTAAGTGTCCTTGATTATGGGCTTATTGATTATGGAAAAACTGCAAGTGATGCAATACAAGAAACGATTCTTTTATCACAAGAGGCGGAGCAACTAGGCTATCATCAATTTTGGGTGGCTGAACATCACGGTGTTAAGGCATTCAGTATTAGCAATCCAGAATTAATGATAATGCATTTGGCTAACCAGACTAAATCTATCAAAATTGGCTCTGGAGGTATAATGCCTCTGCACTATAGTAGTTTTAAACTCGCGGAGACTCTCAAGACATTAGAGACATGTCATCCGAATCGAGTAAGTATTGGTTTAGGAAATTCACTAGGGACAGTTAAAGTTTCAAATGCACTTCGTAGCTTACATAAAGCACATGATTACGAAGAGGTACTGGAGGAATTGAAGTCATGGCTTATTGATGAATCATCCAGTAAGGAACCATTAGTTCAACCGACTCTTTCTAGCTTCCCAGACTTATATGTGTTGGGGAGTGGTCAAAAATCAGCTTATTTAGCGGCTAAACTTGGCTTAGGCTTTACCTTCGGTGTTTTTCCTTTTATGGACAAAGACCCATTGACAGAAGCTAAAAAGCTTTCATCTCTTTATTATCATCAGTTTGAAGAATATTATCCTAATAAGTCTCCTAATTTGATGGTAGCTCCATTTGTAGTTATAGCTGATACTTCAGAAGAAGCTGAAAACATAGCAAAGACTTTAGATATCTGGATGCTAGGAAATAAAGACTTCAATGAATTTGCAACATTTCCTACTATTGAAGAAGCTAATCATTACCAATTGACTCCTGAACAAAAAGCAAAAATTAAATCAAATCGCCACCGTATGATTGTAGGTGATCCAAAACAAGTTAAAGAAAGCCTTGACGCTTTAGTTAATGCTAGTCAAGCAGAAGAACTACTTTTGATTCCTCTTGTTCCAGGACTTGATCAACGAATCAAATCCTTAAAATTATTATCACAGTTATAT

SEQ ID NO: 15432 - protein, 328 aa, Streptococcus agalactiae
MKLSVLDYGLIDYGKTASDAIQETILLSQEAEQLGYHQFWVAEHHGVKAFSISNPELMIMHLANQTKSIKIGSGGIMPLHYSSFKLAETLKTLETCHPNRVSIGLGNSLGTVKVSNALRSLHKAHDYEEVLEELKSWLIDESSSKEPLVQPTLSSFPDLYVLGSGQKSAYLAAKLGLGFTFGVFPFMDKDPLTEAKKLSSLYYHQFEEYYPNKSPNLMVAPFVVIADTSEEAENIAKTLDIWMLGNKDFNEFATFPTIEEANHYQLTPEQKAKIKSNRHRMIVGDPKQVKESLDALVNASQAEELLLIPLVPGLDQRIKSLKLLSQLY

SEQ ID NO: 15433 - protein, 1197 aa, Streptococcus agalactiae
ATGAATAATGTCCAAGGTAATTTATTTCGTCCATTAACACTTCCCAATGGATTGAGCTTAGAAAATCGTTTTGTTCTATCACCTATGGTAACTAATTCTTCTACATCAGAAGGTTTTGTAACTGATGACGACATAGCATATGCTGTTCGTCGTGCTAAATCCGCTCCATTACAAATTACTGGAGCAGCATATATCACAGAATATGGTCAGTTATTTGAATATGGTTTTAGCGTTTCAAAGGATGAGGACATTCCTGGTTTGACTAAATTGGCTAAAGCAATGAAGTCTAAGGGAGCGAAAGCTGTTTTGCAGCTGACGCATGCTGGACGTTTCTCAAGTCACACTTTGGCAAGACACGGATATGTATATGGTCCCAGCCCTATGCAATTGCAATCGCCATACCCACATCAGGTTAAAGAACTAACACACAAAGATATACTAAGGATTATCGATGAATATGTCCAGGCTACAAGACGAGCTATACAAGCTGGATTTGATGGTGTTGAAATATCTTCTGCACAACGATTACTAATTCAAACTTTTTTCTCAACCTTCTCAAATCAAAGAAAAGATGAGTATGGTCCTCAAACTTTGACTAATCGCTGTCGTTTAGGCTTAGAAGTTTTTAAAGCGGTACAAAAAGTTATCAGAGAAGAAGCGGAGTCAGATTTTATCCTTGGTTTTAGAGCGACGCCTGAAGAAACTCGCGGTTCACAAATTGGATATAGCATTGAAGAGTTTATGGAATTTCTTGAAAAAATTTTAGCGATTGCTCAGGTAGATTATCTTGCCATTGCAAGCTGGGGGCATGATGTCTTTAGAAATACTATACGTTCTGAGGGAGTTTACAAAGGGCAGCTGGTTAATCAAGTTATATTTGAACATTTTGGTGATAGAGTTCCAATTATGGCAACTGGAGGTATTAATAGTGCTTCAAAGGTGTTTGAAGCCTTACAACATGCTCATATGATAGGAGCTTCCACGCCCTTAGTAGTTGATCCGGAATTTTTACAAAAAATAAAAGCTAAGCGTTCTGATCAGATTAATTTAAGGATTAAAGTGAATGATTTAGAAGGTTTGGCGATTCCAAAAGCCTCCTTTAAAGATATTGTTCCTTTGATGGATTATGGAGAATCTTTACCAAAGGAAGCTCGAGAAGTTTTTAGAGAACTTCGAAGCAATTATAGGGAGGAAAGA

SEQ ID NO: 15434 - protein, 399 aa, Streptococcus agalactiae
MNNVQGNLFRPLTLPNGLSLENRFVLSPMVTNSSTSEGFVTDDDIAYAVRRAKSAPLQITGAAYITEYGQLFEYGFSVSKDEDIPGLTKLAKAMKSKGAKAVLQLTHAGRFSSHTLARHGYVYGPSPMQLQSPYPHQVKELTHKDILRIIDEYVQATRRAIQAGFDGVEISSAQRLLIQTFFSTFSNQRKDEYGPQTLTNRCRLGLEVFKAVQKVIREEAESDFILGFRATPEETRGSQIGYSIEEFMEFLEKILAIAQVDYLAIASWGHDVFRNTIRSEGVYKGQLVNQVIFEHFGDRVPIMATGGINSASKVFEALQHAHMIGASTPLVVDPEFLQKIKAKRSDQINLRIKVNDLEGLAIPKASFKDIVPLMDYGESLPKEAREVFRELRSNYREER

SEQ ID NO: 15435 - protein, 834 aa, Streptococcus agalactiae
TTGGAGTGGCAAGATCTAGCGCAGTTACCTGTATCTATTTTTAAAGACTATGTTACAGATGCTCAAGACGCGGAAAAACCTTTTATATGGACAGAAGTATTTTTAAGGGAGATTAATCGCTCAAATCAAGAAATTATTTTGCATATTTGGCCGATGACTAAGACAGTCATTCTGGGGATGTTAGATCGAGAATTACCACATTTAGAATTAGCTAAAAAAGAAATCATCAGTCGTGGTTATGAACCAGTTGTTCGGAATTTTGGAGGTCTCGCAGTTGTAGCTGATGAAGGAATTTTAAATTTTTCATTGGTTATTCCAGATGTTTTTGAGAGAAAATTGTCTATCTCAGATGGGTATCTTATAATGGTCGATTTTATTAGAAGTATATTTTCGGATTTTTATCAACCTATTGAGCACTTTGAAGTAGAGACCTCCTATTGTCCTGGTAAGTTTGATCTTAGTATAAATGGCAAAAAATTTGCTGGCTTGGCTCAGCGCCGTATAAAGAATGGTATTGCGGTATCAATTTACCTTAGCGTTTGTGGCGATCAAAAAGGGCGGAGTCAAATGATTTCAGATTTTTATAAGATTGGTCTAGGTGATACGGGTAGTCCAATTGCTTATCCAAATGTAGATCCTGAAATTATGGCTAATCTATCTGATCTATTAGATTGTCCTATGACAGTAGAAGATGTTATTGATCGTATGTTGATTAGCCTTAAACAAGTAGGTTTTAATGATCGTTTACTGATGATTAGACCCGATTTAGTTGCAGAGTTTGATAGATTTCAGGCTAAGTCTATGGCTAATAAGGGGATGGTGAGCAGAGATGAA

SEQ ID NO: 15436 - protein, 278 aa, Streptococcus agalactiae
MEWQDLAQLPVSIFKDYVTDAQDAEKPFIWTEVFLREINRSNQEIILHIWPMTKTVILGMLDRELPHLELAKKEIISRGYEPVVRNFGGLAVVADEGILNFSLVIPDVFERKLSISDGYLIMVDFIRSIFSDFYQPIEHFEVETSYCPGKFDLSINGKKFAGLAQRRIKNGIAVSIYLSVCGDQKGRSQMISDFYKIGLGDTGSPIAYPNVDPEIMANLSDLLDCPMTVEDVIDRMLISLKQVGFNDRLLMIRPDLVAEFDRFQAKSMANKGMVSRDE

SEQ ID NO: 15437 - protein, 687 aa, Streptococcus agalactiae
ATGGCTATGAAAATTTTGATTACATCAGGTGGAACTACCGAGAAAATTGATACCGTTAGGAGTATCACGAATCACGCAACAGGAGCTTTAGGAAAAATAATTGCAGAAAAATATTTACGAGAAGGACATCAGGTGACACTCGTGACTACTAAAAATGCAGTCAAACCAGAATCTGCTACCAACTTATCCATATTTGAGATTGAGGACGTTGACTCATTAATAAAAACCTTGAAGCCATTAGTGAAAGAGCATGATATTTTAATTCATAGCATGGCAGTGTCTGACTATACCCCCGTCTACATGGCTGATTTCGAAAAGGTTAAATCAAGCGATGATTTAGATACTTTTTTGCGCAAAGATAACCACGAAGGGAAAATATCATCTGAATCAGAATATCAAGTCCTTTTTCTCAAAAAAACACCAAAAGTTATCAGCCTTGTGAAAAAATGGAATCCTCAAATTACTCTAGTAGGTTTTAAACTACTTGTGAACGTTACTAAAGAAAACCTTTTTAAAGTTGCTCGTCATAGCTTAATCAAAAATAAAGCTACGTTTATTTTAGCTAATGACCTCATTGATATTACCTCAAAACATCACATAGCCTACCTACTTGATCATGATAATGTGTATAAAGCTACCACCAAAGAAGATATTGCTCAATTAATTTACGAGAAGGTAAAAAAAATA

SEQ ID NO: 15438 - protein, 229 aa, Streptococcus agalactiae
MAMKILITSGGTTEKIDTVRSITNHATGALGKIIAEKYLREGHQVTLVTTKNAVKPESATNLSIFEIEDVDSLIKTLKPLVKEHDILIHSMAVSDYTPVYMADFEKVKSSDDLDTFLRKDNHEGKISSESEYQVLFLKKTPKVISLVKKWNPQITLVGFKLLVNVTKENLFKVARHSLIKNKATFILANDLIDITSKHHIAYLLDHDNVYKATTKEDIAQLIYEKVKKI

SEQ ID NO: 15439 - protein, 540 aa, Streptococcus agalactiae
ATGATTAAACGTATTACACTAGCCGTCACAGGTTCAATTTCGGCCTATAAAGCAGCAGACCTTACAAGTCAATTAACTAAAATTGGCTATGATGTTCATATCATAATGACACAAGCTGCCACACAATTTATTACACCGTTAACTCTGCAAGTATTATCAAAAAATCCTATTCATTTAGATGTTATGGATGAGCATAACCCAAAAATCATCAACCATATCGAATTAGCAAAACGCACAGATTTATTTATCGTTGCACCTGCCTCTGCTAATACTATTGCTCATCTAGCATATGGCTTCGCTGATAACATCGTAACAAGCGTTGCTCTTGCTATGCCCGATGAAACTCCAAAACTTATCGCACCAGCAATGAATACAAAGATGTATCATAATACAATCACCCAACGTAACATTGATATTTTGAAAAAAATAGGTTATCAGGAAATTGAACCTCGTATTAGTTTGCTTGCCTGTGGTGATACCGGTCAAGGAGCCCTAGCTGATATCTCTACTATACTTAAATGTATACAAGAAGTTGCAAAT

SEQ ID NO: 15440 - protein, 180 aa, Streptococcus agalactiae
MIKRITLAVTGSISAYKAADLTSQLTKIGYDVHIIMTQAATQFITPLTLQVLSKNPIHLDVMDEHNPKIINHIELAKRTDLFIVAPASANTIAHLAYGFADNIVTSVALAMPDETPKLIAPAMNTKMYHNTITQRNIDILKKIGYQEIEPRISLLACGDTGQGALADISTILKCIQEVAN

SEQ ID NO: 15441 - protein, 570 aa, Streptococcus agalactiae
ATGAAAAAGAAAAACAAATCCTCTAACATTGCTATAATTGCAATCTTTTTTGCTATTATGCTTGTCATTCATTTTTTGTCATCATTTATTTTTAGTTTTTGGTTAGTCCCTATTAAACCTACTTTGATGCATATCCCAGTTATTATTGCATCTATAGCCTATGGACCTCGTATTGGTGCAACTCTAGGCGCCTTAATGGGGGGGATCAGCGTAGCTAACAGCAGCATTGTTCTATTACCAACGAGTTACCTCTTCTCACCTTTTGTTGAAAATGGTAATTTTTATTCGCTAATTATTGCACTTGTACCACGTATTCTAATCGGGATTATTCCTTATTTCGTTTACAAATTACTACACAACCGCTTTGGTTTGGCTATCTCAGGTGCTATAGGCTCTCTAACAAACACAGTATTTGTTTTATCTGGAATTTTTATCTTTTTTTCAAGTACTTATAATGGGAATATCAAGCTAATGCTCGCTGGGATTATTTCATCTAATTCATTAGCTGAGATGGTCATTGCAGCTATCATTGTATATCTAACTGTTCCTCGTATTCTCAATATTAAACAT

SEQ ID NO: 15442 - protein, 190 aa, Streptococcus agalactiae; identical to SEQ ID NO: 2004

SEQ ID NO: 15443 - protein, 1715 aa, Streptococcus agalactiae
ATGACTTACACAGAAAATTTTCAAAAATGGTTAGATTTTGAGCAGCTTCCTGACTATCTTCGTCAAGAATTACTATCAATGGATGAAAAAACAAAAGAAGATGCTTTTTACACAAACTTAGAATTTGGTACTGCTGGTATGCGTGGTTATATTGGTGCTGGTACAAATCGTATTAATATTTATGTTGTCCGTCAAGCAACCGAAGGATTGGCAAAATTAATCGAAACTAAGGGAGAGGAAGCTAAAAAACGTGGTGTAGCCATTGCTTATGATTCACGCCACTTCTCTCCAGAATTTGCTTTTGAGTCTGCACAGGTCTTGGCACAGCATGGAATTAAATCTTACGTATTTGAAGCTCTTCGTCCAACACCAGAACTCTCTTTTGCTGTTCGCCATTTAAATGCCTATGCTGGTATTATGGTTACTGCAAGCCACAATCCAGCACCTTTCAATGGTTATAAAGTCTATGGACAAGACGGAGGTCAACTACCACCAGCTGATGCTGATGCACTAACAGACTTTATCCGTGCTATTGAAAATCCATTTGCAGTTGAACTTGCTGATTTAGATGAAAGCAAATCATCGGGCCTTATTCAGGTTATCGGTGAAGATGTTGATATTGAATATCTTAGAGAGGTTAAAGATGTTAATATCAATCAAGATTTAATCAATAACTTTGGAAAAGACATGAAAATTGTCTATACTCCTCTCCACGGAACTGGTGAGATGTTGACACGCCGTGCCCTTGCTCAAGCCGGTTTTGAATCTGTTGTTGTAGTAGAATCACAAGCTAAGGCAGATCCAGACTTTTCTACTGTTAAATCGCCTAACCCTGAAAGCCAAGCTGCCTTTGCTCTTGCTGAAGAACTCGGACGAGAAGTTAATGCAGATGTCTTAGTAGCTACTGATCCTGATGCAGACCGCCTAGGCGTTGAAATTCGCCAACCAGATGGTTCTTATAAAAACCTTTCTGGAAATCAAATTGGAGCGATTATTGCGAAATACATCCTGGAAGCTCATAAAACAGCAGGAACACTTCCAGAAAATGCTGCTCTCGCTAAATCATCGTATCAACAGAATTAGTAACAAAAATTGCCGAAAGTTATGGCGCTACAATGTTTAACGTTTTAACTGGATTCAAATTCATCGCTGAGAAAATTCAAGAGTTTGAAGAAAAACATAACCACACCTATATGTTTGGTTTTGAAGAGAGCTTCGGATATCTTATTAAACCATTTGTCCGTGATAAAGACGCTATTCAAGCAGTTCTTTTGGTTGCTGAGATTGCAGCTTATTACCGTTCGCGTGGTTTAACACTTGCAGATGGTATTGATGAAATTTACAAAGAATATGGTTATTTTGCTGAAAAAACGATTTCAGTAACACTTTCAGGAGTGGATGGAGCTGCTGAAATTAAGAAGATTATGGACAAATTCCGTGAAAATGGTCCAAAACAATTTAACAATACTGATATTGTATTATTAGAAGATTTCCAAAAACAAATCGCTACTAAAAATGATGGAACAATATCTAACTTAACAACTCCTCCAAGTAATGTTTTGAAGTACACGTTAGCTGATGATTCATGGATTGCAGTTCGCCCTTCAGGAACTGAACCAAAAATCAAGTTCTATATTGCTACGGTCGGTAATGATTTAGCAGATGCAGAAACAAAAATCGCCAATATTGAAAAAGAGATTACAACATTTGTAAAT

SEQ ID NO: 15444 - protein, 572 aa, Streptococcus agalactiae
MTYTENFQKWLDFEQLPDYLRQELLSMDEKTKEDAFYTNLEFGTAGMRGYIGAGTNRINIYVVRQATEGLAKLIETKGEEAKKRGVAIAYDSRHFSPEFAFESAQVLAQHGIKSYVFEALRPTPELSFAVRHLNAYAGIMVTASHNPAPFNGYKVYGQDGGQLPPADADALTDFIRAIENPFAVELADLDESKSSGLIQVIGEDVDIEYLREVKDVNINQDLINNFGKDMKIVYTPLHGTGEMLTRRALAQAGFESVVVVESQAKADPDFSTVKSPNPESQAAFALAEELGREVNADVLVATDPDADRLGVEIRQPDGSYKNLSGNQIGAIIAKYILEAHKTAGTLPENAALAKSIVSTELVTKIAESYGATMFNVLTGFKFIAEKIQEFEEKHNHTYMFGFEESFGYLIKPFVRDKDAIQAVLLVAEIAAYYRSRGLTLADGIDEIYKEYGYFAEKTISVTLSGVDGAAEIKKIMDKFRENGPKQFNNTDIVLLEDFQKQIATKNDGTISNLTTPPSNVLKYTLADDSWIAVRPSGTEPKIKFYIATVGNDLADAETKIANIEKEITTFVN

SEQ ID NO: 15445 - protein, 1731 aa, Streptococcus agalactiae
ATGAAAGCAAGTCATCCTAAAAAGATACAAAAAAAGCTTGTTCAAGATCTTCTTTCTAAAAAAAGCTTAGTAGGAATGGCATTATTAGGGACGGTAGTACAAGTTTGCCTCACTGTTTATTTGCCTGTTCTAATTGGACAGGCGGTAGACGTTGTATTATCGCCTCATTCTATGATATTATTGTTACCTATAATGTGGAAGATGGTTGCAGTTATTTTAGCAAATACTATTATTCAATGGATTAATCCTCTGCTCTATAACCGCTTAATTTTTCATTATGTTGCTTCTTTAAGAAAGGCTGTAATGGAAAAGTTGAGTCTATTACCTATAGCTTACCTTGATAAACGTGGCATAGGTGACTTGATTAGTCGTGTGACTACCGATACGGAGCAATTATCAAATGGTTTATTAATGGTTTTTAACCAGTTCTTTGTTGGTTTATTAACTATTCTAGTTACTATTTTTAGTATGGCAAAGATTGATTTATTAATGCTTTTTTTGGTATTATTTCTGACGCCTTTATCACTCTTTCTAGCCCGCTTTATTGCTAAAAAGAGTTATCACTTATATCAAAATCAAACGGCATCACGAGGACGACAAACTCAATTCATTGAAGAGATGGTGAGTCAAGAAAGCCTTATTCAAGCATTCAGTGCGCAAGAAGAAAGTAGTGATCATTTTAGGACTATTAATCAAGAGTATGCTAACTTTTCTCAATCAGCAATTTTTTATTCTTCAACTGTCAATCCATCAACCCGATTTATCAATAGTTTGATTTATGGCTTCTTAGCAGGGATTGGTGCCCTTCGTATTATGTCAGGTGCTTTTAGTGTTGGTCAATTAATCACTTTCTTAAATTATGTCAATCAATATACTAAGCCATTTAATGACATCTCTTCCGTCCTGTCTGAGATGCAAAGTGCTCTGGCTTGTGCAGAACGCCTTTACTCTATTTTAGAAGAATCGTCACCAAATATAACAGGTACAGAAAAACTTGATTCATCAACGGTCAAAGGTCAAATCGATTTTAAAAACGTTATTTTTGGTTATAATAAATCAAAACCACTATTGAATGGTATTAATTTACACATTCCAGCAGGAGCTAAGGTCGCTATTGTAGGACCAACAGGTGCTGGGAAGTCTACTTTAATCAATTTATTAATGCGTTTCTATGAAGTTGACGGGGGAAATATCCTTTTAGATGGTAAGCCTATTACTGATTATGAGCCATCACAATTAAGGCAAGAAATTGGAATGGTATTACAAGAAACGTGGTTAAAAAGTGCTACGATTCACGATAACATTGCATATGCCAATCCTAAAGCTAGCCGTGAAGAAGTGATAGAGGCTGCAAAAGCAGCTAATGCAGATTTCTTTATCAAACAATTACCGAATGGATATGATACGTATTTAGAAGATGCTGGAGATTCGTTATCACAGGGGCAATGTCAGCTATTGACAATTGCTCGTATTTTTCTTAAATTACCTAGAATATTGATATTAGATGAGGCGACATCGTCTATAGATACTCGTACTGAAGTTCTTGTTCAAGAAGCATTCCAAATGTTGATGAAGGGGAGAACAAGCTTTATTATTGCACATCGCTTATCTACCATTCAAACAGCAGATATTATTTTAGTTATGGTATCTGGTGAAATTGTAGAAGTGGGTAACCACTCTGAATTAATAGCTCAAAAAGGTATTTATTATCAAATGCAAAATGCACAAAAG

SEQ ID NO: 15446 - protein, 577 aa, Streptococcus agalactiae
MKASHPKKIQKKLVQDLLSKKSLVGMALLGTVVQVCLTVYLPVLIGQAVDVVLSPHSMILLLPIMWKMVAVILANTIIQWINPLLYNRLIFHYVASLRKAVMEKLSLLPIAYLDKRGIGDLISRVTTDTEQLSNGLLMVFNQFFVGLLTILVTIFSMAKIDLLMLFLVLFLTPLSLFLARFIAKKSYHLYQNQTASRGRQTQFIEEMVSQESLIQAFSAQEESSDHFRTINQEYANFSQSAIFYSSTVNPSTRFINSLIYGFLAGIGALRIMSGAFSVGQLITFLNYVNQYTKPFNDISSVLSEMQSALACAERLYSILEESSPNITGTEKLDSSTVKGQIDFKNVIFGYNKSKPLLNGINLHIPAGAKVAIVGPTGAGKSTLINLLMRFYEVDGGNILLDGKPITDYEPSQLRQEIGMVLQETWLKSATIHDNIAYANPKASREEVIEAAKAANADFFIKQLPNGYDTYLEDAGDSLSQGQCQLLTIARIFLKLPRILILDEATSSIDTRTEVLVQEAFQMLMKGRTSFIIAHRLSTIQTADIILVMVSGEIVEVGNHSELIAQKGIYYQMQNAQK

SEQ ID NO: 15447 - protein, 1719 aa, Streptococcus agalactiae
ATGAAAAGACTAACTTATTATTTTAAGGGGTATATCAAAGAAACTATCTTTGGGCCCCTTTTCAAATTATTAGAAGCCTCTTTTGAACTTTTGGTACCAATCGTTATTGCAAAAATGATTGACGAGACCATTCCACGAGGGGATAGAAGTAGTTTACTGTTGCAAATTGGATTGATTTTCTTTTTGGCTGCGGTGGGTGTTGTAGTAGCGATAACTGCTCAATATTATTCTTCAAAAGCCGCAGTTGGTTATACGAGACAATTGACAGAGGATCTCTATCAAAAAGTCATGTCACTGGGTAAAAAAGACAGAGATGAATTGGGAACTGCTAGTTTGATTACTCGTTTGACTGCTGATACATTTCACATCCAAACTGGTTTAAATCAATTTTTACGTTTATTTTTGAGGGCTCCGATTATTGTTTTTGGTGCCATAATTATGGCTTTTTCCATTAGTCCCTCATTGACTATTTGGTTCTTGATAATGGTTGTCACGTTATTTATCATTGTTTTTGTAATGTCTCGACTATTAAATCCTATTTACCTTAAAATCAGAACTTCAACCGATTATTTGGTAAAGTTGACTAGGCAACAACTTCAAGGTGTACGAGTTATCCGTGCCTTTAATCAAGTAGATAGAGAGAGTGAAGCATTTAATGATATCAATTATCACTATACGAATTTACAATTAAAAGCAGGTAGGCTTTCTAGTTTAGTAACGCCTCTAACATTTCTAGTTGTTAATATCACTTTGGTTGTGATTATTTGGCGTGGTAATTTAAATATAGCTAATCATCTTTTATCACAAGGAATGTTGGTTGCTTTAATTAATTACTTATTGCAAATTCTTGTTGAATTGTTAAAAATGACAATGTTGGTGACATCACTGAACCAAAGTTATATCAGTGCTAAGCGAATTATAGCCGTTTTTGAAAGACCGTCTGAAATAATTGATGACAAACTTGAGCCAAAATATTCGAATAAGGCTTTAGAAGTGCAAGAAATGGCATTTTCTTATCCAAACTCCTCTGAAAAAGCTTTATCTGATATTACTTTTTCTATGAATGTAGGAGAAACTTTAGGGATAATTGGTGGAACTGGCTCTGGGAAATCAACCTTGGTTAATTTACTGCTTCATATTTATAAAGTGCAAGAAGGGGATATTGATATATATCATCAGGGAAAAAGTCCAGATACAATTTCAAATTGGCGTAGCCTGGTAAGAGTTGTTCCTCAAAATGCTCAGTTGTTTAAAGGAACTATTCGTTCTAACCTTTCTTTGGGACTTGGTAAAGTTAGTGAGGAAAAACTTTGGACTGCTTTAGAAATAGCACAAGCTAGTGATTTTGTAAAAGAAAAAGATGGTCAACTTGATGCCCCTGTAGAGAGTTTTGGTAGGAATTTCTCTGGTGGTCAAAGGCAAAGGTTGACGATTGCAAGAGCTTTAGTTCAAGATAAGATTCCATTTTTGATTTTAGACGATGCAACATCTGCATTGGATTATTTAACAGAAGCTCGTTTATTTAAAGCTATAATTAAACATTTCAACCAAACTAATCTTATTATTGTATCACAGAGAATTAATAGTATACAAAATGCAGATAGAATCTTACTCCTTGATAAGGGCAAACAAGTTGGTTTTGATAATCATCAATCTTTATTAGCTCATAACAAAGTTTATAAGTCCATTTACCATTCACAAAATTTTAAGGAGGAGGAG

SEQ ID NO: 15448 - protein, 573 aa, Streptococcus agalactiae
MKRLTYYFKGYIKETIFGPLFKLLEASFELLVPIVIAKMIDETIPRGDRSSLLLQIGLIFFLAAVGVVVAITAQYYSSKAAVGYTRQLTEDLYQKVMSLGKKDRDELGTASLITRLTADTFHIQTGLNQFLRLFLRAPIIVFGAIIMAFSISPSLTIWFLIMVVTLFIIVFVMSRLLNPIYLKIRTSTDYLVKLTRQQLQGVRVIRAFNQVDRESEAFNDINYHYTNLQLKAGRLSSLVTPLTFLVVNITLVVIIWRGNLNIANHLLSQGMLVALINYLLQILVELLKMTMLVTSLNQSYISAKRIIAVFERPSEIIDDKLEPKYSNKALEVQEMAFSYPNSSEKALSDITFSMNVGETLGIIGGTGSGKSTLVNLLLHIYKVQEGDIDIYHQGKSPDTISNWRSLVRVVPQNAQLFKGTIRSNLSLGLGKVSEEKLWTALEIAQASDFVKEKDGQLDAPVESFGRNFSGGQRQRLTIARALVQDKIPFLILDDATSALDYLTEARLFKAIIKHFNQTNLIIVSQRINSIQNADRILLLDKGKQVGFDNHQSLLAHNKVYKSIYHSQNFKEEE

SEQ ID NO: 15449 - protein, 600 aa, Streptococcus agalactiae
ATGTTTAAATTTTTAAAACGTTTGATAGCATTAATTATTATTATTTTCATTGGGTACCGTCTAGTTATCATCCATGAAAATGTTAAAAAAGTGCTTCAATATCATGATTTAGTGCAGAATACTCTTGCAGAGAATGGTTCAGAGGCTAATGTGCACTTAGTATTATCTATGATTTATACTGAAACTAAGGGAGATGCTATAGATGTGATGCAATCAAGTGAAAGTATCAGTGGAACTACGAACAGTATTACGGATAGTCACACCAGTATTAAACATGGCGTCACTCTGTTGTCACAAAATATAAGTCAAGCTAAAAAAGCTAAGGTTGATGTATGGACTGCTGTCCAAGCATATAATTTTGGTTCTTCTTATATTGATTATGTAGCGGATCATGGGGGTGAAAATTCCATTGAGTTGGCCAAAAATTACTCTAAAAATGTTGTAGCTCCCAGCCTAGGAAATTATAACGGGGACACTTACTTTTACTATCATCCTCTCGCCTTAATTTCAGGAGGGAAGCTCTATAAAAATGGTGGTAATATTTACTACTCACGTGAAGTTCAATTCAACCTTTATTTGATAAAAATAATGGAGTTGTTT

SEQ ID NO: 15450 - protein, 200 aa, Streptococcus agalactiae; identical to SEQ ID NO: 2014

SEQ ID NO: 15451 - protein, 973 aa, Streptococcus agalactiae
ATGATGGATTTTTATATCAAACAGATTATTATACATCAGTTTTCTCCTAACGACACAGAGTTAGTGCTATCAGATACTCCGTTAACCCTAACTCCAAGGATTGATGACTACTTTCGTAAAAAATTAAGTAAAGTTTTTTCTGATGAAGCTAAGCGTGGCTATTTTGGAGAGGATAATGTATTTATGAGTCATTTACAAGATGATTTATATGTTTCTTCCTGTCAAATTGCGCAACTTTGGAAAGAAGAGTTTGTCATATCGGAAGATCAAAAAACGAATGACTTAGTTTTTATTCAATTTGACAAGGATGGAATGGAACATTTTGCTTTCCTTCGAATCTCATTAAAGGAACATTTTGCTCATGTTTCTGAAAATCAAGAGCAGCCAATTACAATAACACAGAATAACCTTCCAAGTGCTGCTCAAACTCCAGATGAAGCTTTGTGTTAACAAGTCATCAAAGCAATACTATTTAATTGAAAAGCGTATCAAACACAATGGTTCATTTGCTAATTATTTTTCTGAAAATTTATTACAAGTACAACCAGAACAGTCTGTTAAAAAATCTATAAAAATGGTTGAACAGACAGCTCAAAAAATTGCTGAAAATTTCAACAAAGATGATTTTTCTTTCCAATCAAAAATGAAATCGGCTATTTATAAGAATTTAGAAGAAGAGCAAGAATTGTCTCCAGAAAAATTAGCAGATCAATTATTTGATGATAATTTAACAGCCAGGCTGACTTTTGTTGATGAATTGAAAGACGCAATACCTGGATCTGTTCAAGTAAGTGATATTGATCATTCCCGTCAAATTAAGAAGTTAGAGAATCAGAAGCTATCTCTTTCAAATGGTATTGAATTGATTGTACCCAACAATGTCTACCAAGATGCCGAATCAGTTGAATTTATCCAAAACCCTGATGGTACATACTCAATACTAATCAAAAACATACAGGATATTCAAAATAAA

SEQ ID NO: 15452 - protein, 325 aa, Streptococcus agalactiae
  VARIANT 149: Xaa = Any Amino Acid
MMDFYIKQIIIHQFSPNDTELVLSDTPLTLTPRIDDYFRKKLSKVFSDEAKRGYFGEDNVFMSHLQDDLYVSSCQIAQLWKEEFVISEDQKTNDLVFIQFDKDGMEHFAFLRISLKEHFAHVSENQEQPITITQNNLPSAAQTPDEALXVNKSSKQYYLIEKRIKHNGSFANYFSENLLQVQPEQSVKKSIKMVEQTAQKIAENFNKDDFSFQSKMKSAIYKNLEEEQELSPEKLADQLFDDNLTARLTFVDELKDAIPGSVQVSDIDHSRQIKKLENQKLSLSNGIELIVPNNVYQDAESVEFIQNPDGTYSILIKNIQDIQNK

SEQ ID NO: 15453 - protein, 1254 aa, Streptococcus agalactiae
ATGATTTTTGATAAAGACAATTTTAAAGAATTTGACCAAGAACTTTGGCAGGCTATTCATGATGAGGAAATTCGCCAACAAAATAATATTGAATTAATTGCATCAGAAAACGTTGTTTCAAAAGCTGTTATGGCAGCACAAGGTTCTGTTTTGACAAATAAATATGCCGAAGGGTATCCTAGTCATCGTTATTATGGAGGAACAGATTGTGTTGATGTAGTTGAAAGTTTAGCTATAGAACGAGCTAAGATGTTATTTAATGCTGAGTTTGCTAATGTTCAACCACATTCTGGTAGTCAGGCTAATGCAGCAGCTTACATGGCTTTAATCGAGCCAGGAGATACTGTCTTAGGGATGGACTTAGCAGCAGGTGGGCACTTAACACATGGCGCTTCAGTTAGCTTCTCAGGAAAAACTTATCATTTTGTTTCTTACTCTGTTGATCCTAAGACGGAGATGCTAGACTATGATAACATTTTGAAAATAGCACAGGAAACGCAACCTAAATTAATTGTTGCAGGGGCGTCGGCCTATTCTCGCATTATTGATTTTGAAAAGTTTCGTCAAATAGCAGACGCAGTAGATGCTTACTTAATGGTTGACATGGCTCACATTGCAGGTTTAGTTGCTTCTGGTCATCATCCTAGTCCTATTCCTTATGCTCATGTAACGACAACGACAACACATAAGACTCTACGTGGACCTAGAGGTGGTTTGATTTTAACCAATGATGAAGCAATTGCTAAAAAAATTAATTCTGCAGTCTTTCCAGGACTCCAAGGCGGACCATTAGAACATGTAATTGCTGCAAAAGCTGTAGCTTTGAAAGAAGCTCTAGATCCTTCCTTTAAAATATACGGTGAGGATATTATTAAAAATGCTCAAGCCATGGCTAAAGTTTTTAAAGAAGATGATGACTTTCATTTGATTTCTGATGGTACTGATAATCATTTGTTCTTAGTAGACGTCACAAAAGTTATTGAAAATGGCAAAAAGGCACAAAATGTTCTTGAAGAAGTCAATATCACCCTTAACAAGAACTCTATACCGTTTGAGCGACTATCACCATTTAAAACATCAGGTATTCGAATTGGTACTCCAGCAATTACTAGTCGAGGAATGGGAGTTGAAGAATCTCGAAGAATCGCTGAATTAATGATTAAGGCACTCAAAAATCATGAAAATCAAGATGTCCTCACAGAAGTTCGTCAAGAAATTAAATCATTAACGGACGCTTTCCCTTTGTATGAGAAT

SEQ ID NO: 15454 - protein, 418 aa, Streptococcus agalactiae
MIFDKDNFKEFDQELWQAIHDEEIRQQNNIELIASENVVSKAVMAAQGSVLTNKYAEGYPSHRYYGGTDCVDVVESLAIERAKMLFNAEFANVQPHSGSQANAAAYMALIEPGDTVLGMDLAAGGHLTHGASVSFSGKTYHFVSYSVDPKTEMLDYDNILKIAQETQPKLIVAGASAYSRIIDFEKFRQIADAVDAYLMVDMAHIAGLVASGHHPSPIPYAHVTTTTTHKTLRGPRGGLILTNDEAIAKKINSAVFPGLQGGPLEHVIAAKAVALKEALDPSFKIYGEDIIKNAQAMAKVFKEDDDFHLISDGTDNHLFLVDVTKVIENGKKAQNVLEEVNITLNKNSIPFERLSPFKTSGIRIGTPAITSRGMGVEESRRIAELMIKALKNHENQDVLTEVRQEIKSLTDAFPLYEN

SEQ ID NO: 15455 - protein, 594 aa, Streptococcus agalactiae
ATGAATGATTTGGGACAGATTTTAGAGGATCATGGCGCAGTTATTATGCCAACAGAAACGGTCTACGGAATCTTTGCCAAAGCTTTGAGTGAAGAAGCTGTGAACCACGTCTATGAGCTTAAAAAAAGACCTCGTGATAAGGCTATGAACTTAAATATATGTGATTTTGAGACTATTTTAAAATATTCTAAAAATCAACCGACCTATTTGAAGCAATTGTACGATGCTTTTTTACCAGGACCGCTAACCATTATTTTGGAAGCTTCACAAGAAGTTCCGGATTGGATCAATTCTGGGTTATCAAGCGTAGGATTTCGGATGCCTAAGCACCCTGTAACCCTTGATATGATTGCTAACCATGGTCCATTGATTGGTCCTTCTGCTAATATTTCTGGATGTGATAGTGGTCGTGTATTCTCAGAAATTCAAAAACAGTTTAATCATCAAGTTTTAGGTATTGAAGATGATAAAGCATTGACAGGTGTGGATTCTACTATTATTGATTTGTCTGGTGATAGAGTTAAGATTTTAAGGCAAGGTGCAATCACGCAAGAGGTACTAACGGCTACGATACCTGAATTAATTTTTGAAAAT

SEQ ID NO: 15456 - protein, 198 aa, Streptococcus agalactiae
MNDLGQILEDHGAVIMPTETVYGIFAKALSEEAVNHVYELKKRPRDKAMNLNICDFETILKYSKNQPTYLKQLYDAFLPGPLTIILEASQEVPDWINSGLSSVGFRMPKHPVTLDMIANHGPLIGPSANISGCDSGRVFSEIQKQFNHQVLGIEDDKALTGVDSTIIDLSGDRVKILRQGAITQEVLTATIPELIFEN

SEQ ID NO: 15457 - protein, 828 aa, Streptococcus agalactiae
ATGAATTATGCGCAGTTAATCAAGCATTATGAACAGTTGTTAGAGGCTTGTGGTGAAGAAGTCGAAAATTTTATTTATGTATTAAAAGACCTAAAACAATGGTCAACAACTGATTACCTTTTAAATCAAAATAGTAGTGTGAGTGATACTGATCAGCAATTAATGGAAAATATTTTTCAACAGCTTAAAAAACATAGATCACCGCAGTATATTACAGGTAAAGCTTACTTTAGAGATCTTATTTTCTTTGTTGATGAACGAGTTTTAATTCCGAGGCCTGAGACAGAGGAGTTGGTTGATCTAATCTTATCAGAGAATAAAGTAGAAGATTGTTCTGTTTTAGATATTGGTACAGGTAGTGGAGCAATTGCCATTTCTCTAAAAAAAGAACGCCCCTCTTGGGATGTTCTAGCTAGTGACATTTCTGTATCTGCATTAGACTTGGCAAAGGAAAATGCTAATAATTGTGATGCGGAAGTGACTTTTATAGAATCAGATGTCTTTAGTAACATTTCAGATAAATTTGATATTATTGTGTCTAATCCTCCCTATATTTCTTACAATGACAAAGACGAGGTGGGGAAGAATGTGCTAGCTTCAGAGCCTCATAGTGCCCTTTTTGCAGACGAAGAAGGATTAGCTATTTATCGTAAAATCATTGAAAACTCAAGAGAATATTTGCAACCTAGAGGTAAATTATATTTTGAAATAGGTTACAAACAAGGTGATGATTTACGAAGTTTATTGAAAAGATATTTTCCAAACAATCGTTGCAGAGTTTTGAAAGATATATTTGGTAAAGATAGAATGGTGGTATTAGATAATGAA

SEQ ID NO: 15458 - protein, 276 aa, Streptococcus agalactiae
MNYAQLIKHYEQLLEACGEEVENFIYVLKDLKQWSTTDYLLNQNSSVSDTDQQLMENIFQQLKKHRSPQYITGKAYFRDLIFFVDERVLIPRPETEELVDLILSENKVEDCSVLDIGTGSGAIAISLKKERPSWDVLASDISVSALDLAKENANNCDAEVTFIESDVFSNISDKFDIIVSNPPYISYNDKDEVGKNVLASEPHSALFADEEGLAIYRKIIENSREYLQPRGKLYFEIGYKQGDDLRSLLKRYFPNNRCRVLKDIFGKDRMVVLDNE

SEQ ID NO: 15459 - protein, 1077 aa, Streptococcus agalactiae
ATGAATATTTATGATCAATTGCAGGCAGTTGAAGATCGTTATGAAGAGTTAGGTGAGTTACTTAGTGATCCAGATGTTGTTTCAGATACAAAGCGATTTATGGAATTATCACGTGAAGAAGCTAATACTCGAGAAACTGTCACAGCTTATAGAGAATATAAGCAAGTCATTCAAAATATTTCAGATGCTGAAGAAATGATCAAGGATGCTTCTGGTGATGCTGAATTGGAAGAAATGGCTAAAGAAGAACTTAAAGAATCAAAAGCAGCTAAAGAAGAGTATGAAGAAAGATTAAAAATCCTTCTATTACCTAAAGATCCTAACGATGATAAAAACATTATTTTAGAAATTCGTGGTGCTGCTGGTGGCGATGAAGCAGCGCTTTTTGCTGGTGATCTTTTAACAATGTATCAAAAATATGCTGAAACTCAAGGATGGCGTTTTGAAGTTATGGAATCATCCGTTAATGGTGTTGGTGGTATTAAAGAAGTGGTTGCTATGGTTTCTGGTCAGTCAGTTTATTCTAAGCTTAAATATGAATCAGGAGCTCATCGTGTTCAACGTGTTCCGGTGACAGAGAGTCAGGGTCGTGTTCATACTTCAACTGCAACTGTTCTGGTAATGCCAGAAGTTGAAGAAGTAGAATACGAAATTGATCAAAAAGATCTTCGCGTCGATATTTACCACGCGTCTGGTGCTGGTGGTCAGAACGTCAATAAAGTTGCTACTGCAGTTCGTATGGTACACATTCCTACAGGAATCAAAGTTGAAATGCAAGAAGAGCGTACTCAGCAAAAAAACCGTGATAAAGCGATGAAAATCATTCGTGCTCGTGTTGCTGACCATTTTGCGCAAATTGCTCAAGATGAACAAGATGCTGAACGTAAATCAACAGTTGGTACTGGTGATCGTTCAGAACGTATTCGCACTTATAATTTCCCACAAAATCGTGTAACAGATCATCGTATTGGTTTGACACTTCAAAAATTAGATACTATTTTATCTGGAAAAATGGATGAAGTTATTGATGCACTTGTTATGTATGATCAGACTCAAAAGTTAGAAGCCTTAAATAAA

SEQ ID NO: 15460 - protein, 359 aa, Streptococcus agalactiae; identical to SEQ ID NO: 2024

SEQ ID NO: 15461 - protein, 567 aa, Streptococcus agalactiae
TTGGCTCAACTCTATTATAAATATGGGACAATGAATTCTGGTAAAACCATTGAAATTTTAAAAGTTGCTCATAACTATGAAGAACAAGGAAAACCTGTGGTTATTATGACAAGCGCCTTGGACACTCGAGATGAATTTGGAGTCGTTTCAAGTCGTATTGGAATGCGTCGTGAAGCAGTTCCAATTTCAGATGATATGGACATTTTCTCCTATATTCAGAATTTACCACAAAAGCCTTATTGTGTTTTAATTGATGAATGTCAATTTTTGAGTAAGAAAAACGTCTACGATTTAGCTAGAGTAGTAGATGACTTAGATGTACCAGTCATGGCTTTTGGTTTGAAAAATGATTTCCAAAACAATCTTTTTGAAGGTTCAAAACATTTGCTATTATTGGCCGATAAGATTGATGAAATCAAAACAATTTGCCAATACTGTAGTAAGAAAGCAACCATGGTTTTAAGGACAGAAAACGGAAAACCTGTCTATGAAGGTGATCAGATACAAATTGGTGGTAATGAAACATATATCCCAGTTTGTCGAAAACATTATTTTAATCCAGATATT

SEQ ID NO: 15462 - protein, 189 aa, Streptococcus agalactiae
MAQLYYKYGTMNSGKTIEILKVAHNYEEQGKPVVIMTSALDTRDEFGVVSSRIGMRREAVPISDDMDIFSYIQNLPQKPYCVLIDECQFLSKKNVYDLARVVDDLDVPVMAFGLKNDFQNNLFEGSKHLLLLADKIDEIKTICQYCSKKATMVLRTENGKPVYEGDQIQIGGNETYIPVCRKHYFNPDI

SEQ ID NO: 15463 - protein, 180 aa, Streptococcus agalactiae; identical to SEQ ID NO: 6615

SEQ ID NO: 15464 - protein, 60 aa, Streptococcus agalactiae; identical to SEQ ID NO: 2028

SEQ ID NO: 15465 - protein, 936 aa, Streptococcus agalactiae
TTGCAACTTTCTCATAGTTTAAGACTCATGGGAACGACTATCGATATTCAAATTAATTCTAAAAATGCTCAAAAACAAATCCAAGAGGTCATAGAACTCTTGGAGCTCTACAAAAATCGCTTTAGTGCAAATGACTTTAATTCAGAGTTAATGGCTATAAATAACAACGCTGGTATCAAGCCTATTCAAGTACATCCAGACCTCTTTGAATTAATCACAATTGGGAAAGAACACAGCTTAGCTAGGCCTAGTAACCTAAATATTGCTATTGGTCCTTTAGTGCAAACTTGGAGAATTGGATTTTCAGATGCTAAACTACCTAGCCCTAGTGAAGTATCAGAAGCTATGATTTTATCTGACCCAACTCATATACTTCTAGATTCAAAAAATCAATCTGTTTTTTTAAATCAGATAGGAATGAAAATTGATTTGGGTGCACTTGCAAAAGGATATATTGCTGACAAAATTATGACCTATCTCAAAAATGAGATGATTGATTCTGCTATCATTAATTTAGGCGGAAACGTTTTAGTTCACGGAGATAATCCTAATCGTTCAGAAGGGTATTGGGTTATCGGCATTCAACATCCGAAAAAGAAACGGGGACAAAATATTGGAGCTGTCAAAATTAAAAACCAATCTGTTGTAACCTCAGGTACTTATGAACGCCGTCTGATTATTGACGATAAGGAATACCATCATATTTTTGATCGACAGACTGGTTATCCGATACAAACAGAGATGGCTAGCATTTCTATTGTTTCTAAACAATCCGTCGACTGTGAAATCTGGACCACAAGGTTGTTTGGCTTATCCATTAAAGAGGCTCTTGATATTTTAAACGCTGTTTCCTACATTGAAGGCATTATCATCACTAAAGATGACCGTATCTATTTATCTGATGGCTTAAAACATCATTTTCAACTATTTTATCAT

SEQ ID NO: 15466 - protein, 312 aa, Streptococcus agalactiae
MQLSHSLRLMGTTIDIQINSKNAQKQIQEVIELLELYKNRFSANDFNSELMAINNNAGIKPIQVHPDLFELITIGKEHSLARPSNLNIAIGPLVQTWRIGFSDAKLPSPSEVSEAMILSDPTHILLDSKNQSVFLNQIGMKIDLGALAKGYIADKIMTYLKNEMIDSAIINLGGNVLVHGDNPNRSEGYWVIGIQHPKKKRGQNIGAVKIKNQSVVTSGTYERRLIIDDKEYHHIFDRQTGYPIQTEMASISIVSKQSVDCEIWTTRLFGLSIKEALDILNAVSYIEGIIITKDDRIYLSDGLKHHFQLFYH

SEQ ID NO: 15467 - protein, 600 aa, Streptococcus agalactiae; identical to SEQ ID NO: 10923

SEQ ID NO: 15468 - protein, 200 aa, Streptococcus agalactiae; identical to SEQ ID NO: 2032

SEQ ID NO: 15469 - protein, 1233 aa, Streptococcus agalactiae
ATGAAATTTGTAGGTATTGTTGGCTCAAATGCAGAGCAATCATATAATCGTATGTTGCTTGAATTTATTCGCAAGAATTTTAAAACCAAATTTGAATTGGAAGTCCTTGAAATCGATGATATTCCAATGTTTAATCAAGTCCAAAATTGGGAAGAAAGTTTCCAACTTCGTCTTCTTAATAATAAGATCACACGAGCTGATGGCGTTATTATTGCCACTCCTGAACATAATCATACTATTACGGCCGCTCTTAAAAGTGTGCTTGAGTGGCTCTCATTTGCTGTGCATCCACTCGAAAATAAACCTGTTATGATTGTCGGTGCTTCATATTATGATCAAGGCACATCACGTGCTCAAATACACCTTCGTAAAATCCTTGATGCTCCTGGCGTTAATGCTTACACACTTCCAGGAAATGAATTCTTATTAGGAAAAGCTAAAGAAGCCTTTGATGATAATGGAAACATTATCAATCCTGGGACTGTTCAATTTTTAGAAACTTGTCTTGATAATTTTATCAAATATGTAGGAGTTGTATCATCATTGAGAAAACCTAAAGCTATTGAATCTGAAGACCTCTACTGTCAGGGACAAATCGATACAACCATTACTAGTATCGATCCAGATGATCCTGATTGGTTAGACAAGGCAGCCGAGAAAGTTAACGCCGTTGAAGGGGATGCTTACGTTAAACTAGACAATGGTTTACTTACTGTTAACCAACTTAATATGTTTTTAAATGCTATGCCATTTGAGCTAACATATGCAGATGATAATAATCAATTTCTATATTACAATAATAATCATCCAGATCCAGATACAATGTTAGGAAAACGTGTTCGTGAACAAGTAGGAAACCGTATGGCCACAGTTCATGGTAGTTTACCACCGGCACGAATGAAAAATGTTGAATGGGTTATCGGTACTCTTCGTAATGGAAATCAAGAATATGTACGTACAGTCGTTCCTGGTACACCTCCAGAAGTTATCAATACTCACAACTATCAAGCTATGTACTACCCAGACGGATCTTATGCTGGTATTAATGAAATTATCTTTAACTTTAAACCGTGGTTAGATTGGTACCTCCAAACTACTGGACAACGTTTGGTCGGTGGAACTACTGCTGCTCCTGGAGCTTCAGCAGTTGACGCTACTTCTAGCGCTTCAACTAGCACAGAGGATGCTCCCGTTGATCAAGCCACAGATGCCACTTCTGGTGCCTCTGAACAT

SEQ ID NO: 15470 - protein, 411 aa, Streptococcus agalactiae
MKFVGIVGSNAEQSYNRMLLEFIRKNFKTKFELEVLEIDDIPMFNQVQNWEESFQLRLLNNKITRADGVIIATPEHNHTITAALKSVLEWLSFAVHPLENKPVMIVGASYYDQGTSRAQIHLRKILDAPGVNAYTLPGNEFLLGKAKEAFDDNGNIINPGTVQFLETCLDNFIKYVGVVSSLRKPKAIESEDLYCQGQIDTTITSIDPDDPDWLDKAAEKVNAVEGDAYVKLDNGLLTVNQLNMFLNAMPFELTYADDNNQFLYYNNNHPDPDTMLGKRVREQVGNRMATVHGSLPPARMKNVEWVIGTLRNGNQEYVRTVVPGTPPEVINTHNYQAMYYPDGSYAGINEIIFNFKPWLDWYLQTTGQRLVGGTTAAPGASAVDATSSASTSTEDAPVDQATDATSGASEH

SEQ ID NO: 15471 - protein, 786 aa, Streptococcus agalactiae
ATGTCACTTTTTCAAGAAAAAATTGCTTACAATTGCGCTAAAAAGGAAGCGCTTTATAAAGAGAGTTTAGGACGCTACGCCTTGAGATCAATGCTAGCAGGGGCTTATTTGACAATGAGTACTGCTGCCGGTATCGTCGCAGCTGATACTATTGGTAAAATTTCTCCTGCTCTATCAGGTTTTGTATTTGCTTTCATCTTTAGTTTTGGACTTATTTATGTTTTAATATTTAATGGTGAATTGGCGACATCTAATATGCTTTATCTCACTGCAGGAGCCTATAATAAAAATATCTCTTGGAAAAAAGCCATAACAATTTTAATTTATTGTACTTTTTTCAACCTCGTTGGTGCTTGTATATTAGCTTGGTTGTTTAATCAATCGTACTCATTCCAGCATTTAACAAATGATAGCTTTTTAGGGCATGTCGTTGCTAAAAAGTTAGGAAAACCTAGTTCAGGAGCTTTCCTAGAAGGTATTATTGCTAATATGTTTGTGAATTTAGCTATCCTTGCTTACATGTTATTAAAAGAAGAATCGGCAAAAATGACGGTTATTTTATCTGCTATTTTTATGTTTGTTTTTCTATCAAACGAACACTTAATTGCTAATTTTGCATCCTTTATGTTAGCTGCTTTTAGCCATATCGAACATATTAAAGGTTTTACTCTTCTAAACGTTATCCGCCAATGGACACTTGTATTTTTTGGTAACTGGATAGGAGGGGGCGTTTTCATCGGCCTAGCCTATGCTTGGTTAAATAAAACAAAAACTTCTCACCATGAA

SEQ ID NO: 15472 - protein, 262 aa, Streptococcus agalactiae; identical to SEQ ID NO: 2036

SEQ ID NO: 15473 - protein, 1272 aa, Streptococcus agalactiae
ATGAAATTTAATGAGCAAAGTAATTCGCAAGCAGCACTTCTAGGCTTGCAACACCTGTTAGCTATGTATGCAGGATCCATTCTTGTACCTATCATGATTGCTAGTGCTCTTGGTTATAATGCTAAGCAACTAACTTATCTTATTGCGACAGATATTTTTATGTGTGGGATTGCCACCTTATTACAATTACGATTAAGTAAGCACTTTGGAGTGGGTCTTCCAGTTGTATTAGGGTGTGCCTTTCAGTCTGTAGCTCCTTTATCAATTATTGGTGCACAACAAGGTTCTGGCTATATGTTTGGAGCTTTAATTGCTTCAGGAATATATGTCGTTTTAGTTGCTGGCATTTTTTCTAAAGTTGCAAATTTCTTTCCTCCAATTGTAACAGGATCAGTTATTACTACAATTGGTTTGACATTAATACCAGTTGCGATGGGAAATATGGGTGATAATGCAAAAGAACCAAGCTTACAATCTTTAACTTTATCACTGGTAACGATTGGTGTTGTTTTATTAATTAATATTTTCGCAAAAGGCTTTTTGAAGTCAATTTCAATCCTTATTGGACTCATTTCAGGTACAATTCTTGCAGCATTTATGGGCTTAGTTGATGCTTCTGTGGTAGCAGAAGCACCACTTGTACATATTCCGAAGCCATTTTATTTTGGAGCTCCTAGATTTGAATTTACTTCTATTTTAATGATGTGTATTATTGCAACAGTTTCTATGGTAGAATCAACAGGTGTTTACCTTGCGCTTTCAGATATTACAAACGATAAATTAGACAGTAAGAGACTTCGTAATGGTTACCGTTCAGAAGGATTGGCAGTATTACTTAGCGGCTTATTTAATACCTTTCCATATACTGGTTTTTCTCAAAATGTGGGACTGGTACAGATATCTGGGATACGTACGCGTAAGCCGATATATTTTACAGCTCTCTTCTTAGTTATACTTGGCTTGTTACCTAAATTTGGCGCAATGGCTCAAATGATTCCAAGTCCAGTTCTTGGTGGTGCTATGTTAGTTTTATTTGGTATGGTAGCACTTCAAGGGATGAAAATGCTTAATCAGGTTGATTTTGAGCATAATGAGCATAACTTTATCATTGCAGCCGTATCAATTGCAGCAGGAGTAGGTTTTAATGAGACAAATCTCTTCATTAGTCTTCCTAATACTTTACAAATGTTTTTGACAAATGGTATTGTTATCTCAACCCTGACAGCTGTTGTTTTAAATATCATTTTGAATGGATTGCCTAAAAAATTAATA

SEQ ID NO: 15474 - protein, 424 aa, Streptococcus agalactiae
MKFNEQSNSQAALLGLQHLLAMYAGSILVPIMIASALGYNAKQLTYLIATDIFMCGIATLLQLRLSKHFGVGLPVVLGCAFQSVAPLSIIGAQQGSGYMFGALIASGIYVVLVAGIFSKVANFFPPIVTGSVITTIGLTLIPVAMGNMGDNAKEPSLQSLTLSLVTIGVVLLINIFAKGFLKSISILIGLISGTILAAFMGLVDASVVAEAPLVHIPKPFYFGAPRFEFTSILMMCIIATVSMVESTGVYLALSDITNDKLDSKRLRNGYRSEGLAVLLSGLFNTFPYTGFSQNVGLVQISGIRTRKPIYFTALFLVILGLLPKFGAMAQMIPSPVLGGAMLVLFGMVALQGMKMLNQVDFEHNEHNFIIAAVSIAAGVGFNETNLFISLPNTLQMFLTNGIVISTLTAVVLNIILNGLPKKLI

SEQ ID NO: 15475 - protein, 579 aa, Streptococcus agalactiae
ATGAAGTTATTGGAAGAACGTATTCTTAAAGATGGTGATGTTTTAGGTGAGAACATTTTAAAAGTTGATTCTTTTTTGACTCATCAGGTAAATTTTGAGTTAATGCAGGAAATAGGTAAAGTTTTTGCTGATAAATATAAAGAAGCCGGCATTACGAAGGTTGTTACAATTGAAGCATCTGGAATTGCGCCAGCAGTGTACGCAGCTCAAGCATTGGGCGTACCAATGATATTTGCTAAAAAAGCTAAGAACATTACTATGACTGAAGGTATCTTAACTGCTGAAGTGTATTCTTTTACAAAGCAAGTTACGAGTCAAGTTTCTATTGTGAGTCGCTTTTTATCTAACGATGATACTGTACTCATCATTGATGACTTTTTAGCAAACGGTCAAGCGGCTAAAGGATTACTTGAAATTATTGGTCAAGCTGAAGCTAAGGTTGCTGGTATCGGAATCGTTATTGAAAAATCTTTCCAAGATGGGCGTGATTTGTTAGAAAAAACAGGTGTTCCGGTTACTTCTCTTGCTCGTATTAAAGCGTTTGAAAATGGTCGAGTTGTTTTTGCGGAGGCTGATGCT

SEQ ID NO: 15476 - protein, 193 aa, Streptococcus agalactiae
MKLLEERILKDGDVLGENILKVDSFLTHQVNFELMQEIGKVFADKYKEAGITKVVTIEASGIAPAVYAAQALGVPMIFAKKAKNITMTEGILTAEVYSFTKQVTSQVSIVSRFLSNDDTVLIIDDFLANGQAAKGLLEIIGQAEAKVAGIGIVIEKSFQDGRDLLEKTGVPVTSLARIKAFENGRVVFAEADA

SEQ ID NO: 15477 - protein, 981 aa, Streptococcus agalactiae
ATGTTTAACGATATTCCTGTTTTTGATTATGAAGATATTCAATTAATACCAAACAAGTGTATTATATCTAGCCGCTCACAAGCTGACACAAGTGTCAAACTTGGAAACTATACCTTTAAACTTCCAGTAATCCCTGCTAATATGCAGACTATTATTGATGAAGAGGTAGCTGAAACATTAGCGTGTGAAGGTTATTTTTATATTATGCACCGTTTTAATGAAGAAGCAAGAAGACCTTTTATCAAGCGTATGCATGATAAAGGCTTAATTGCTTCGATTTCGGTTGGGGTCAAAGACTATGAATATGATTTTGTGACAAGTCTGAAAGAAGATGCTCCTGAGTTTATCACTATTGATATTGCACATGGCCATTCTAACAGTGTTATAGAGATGATCCAACACATTAAACAAGAGCTTCCAGGAACTTTCGTTATTGCTGGAAATGTAGGAACGCCTGAAGCTGTTAGAGAATTGGAAAATGCAGGTGCAGATGCAACTAAAGTTGGTATTGGACCTGGTAAAGTTTGTATTACTAAAGTCAAGACAGGTTTTGGTACTGGAGGTTGGCAATTAGCTGCCTTACGTTGGTGTTCTAAAGCTGCTCGCAAGCCAATTATTGCTGATGGTGGTATTCGAACACATGGGGATATTGCAAAATCTATCCGCTTTGGTGCTAGTATGGTAATGATTGGTTCGCTGTTTGCTGGTCACCTTGAAAGTCCTGGAAAACTTGTGGAAGTAGAAGGACAGCAATTTAAAGAATACTATGGCTCAGCTTCTGAATATCAAAAGGGAGAACATAAAAATGTTGAAGGTAAGAAAATTCTATTACCTGTTAAAGGGCGACTAGAGGATACTTTGACAGAAATGCAACAAGATTTGCAAAGTTCTATTTCTTACGCAGGTGGAAAAGAATTGGATAGCTTGAGACACGTTGATTACGTTATTGTTAAAAATTCTATTTGGAATGGTGATTCCATT

SEQ ID NO: 15478 - protein, 327 aa, Streptococcus agalactiae
MFNDIPVFDYEDIQLIPNKCIISSRSQADTSVKLGNYTFKLPVIPANMQTIIDEEVAETLACEGYFYIMHRFNEEARRPFIKRMHDKGLIASISVGVKDYEYDFVTSLKEDAPEFITIDIAHGHSNSVIEMIQHIKQELPGTFVIAGNVGTPEAVRELENAGADATKVGIGPGKVCITKVKTGFGTGGWQLAALRWCSKAARKPIIADGGIRTHGDIAKSIRFGASMVMIGSLFAGHLESPGKLVEVEGQQFKEYYGSASEYQKGEHKNVEGKKILLPVKGRLEDTLTEMQQDLQSSISYAGGKELDSLRHVDYVIVKNSIWNGDSI

SEQ ID NO: 15479 - protein, 356 aa, Streptococcus agalactiae
TGATAGGTTTAATTGGTACAGCTATATTCATTCCTGCGAAGTTTGTTGTAGTACTTTTAGCCTTTGATATTCTTACTAAAATTGGTATGGGGATTGGAGCAAGTAATATGGTTACGACAGCTTTAACAAAACTAAAGCCAGCACAGTCAGCGGATGGTAATAGTATCTTAAATACACTACAACAATTTGCGGGAGCTTTTGCAACCGCAGTAGCCTCACAAATTTTTACCATCGGACAAGTAGCTATTCCGAAAAATGGAGCTATAATTGGTAGTCAATTTGCAGTTCTATTCGTTATCGTTGTTGTTATCTTAGCTATTGTAGGATTAACTTATCTTCGAAAAAGAAAAGCAATA

SEQ ID NO: 15480 - protein, 119 aa, Streptococcus agalactiae
LIGLIGTAIFIPAKFVVVLLAFDILTKIGMGIGASNMVTTALTKLKPAQSADGNSILNTLQQFAGAFATAVASQIFTIGQVAIPKNGAIIGSQFAVLFVIVVVILAIVGLTYLRKRKAI

SEQ ID NO: 15481 - protein, 951 aa, Streptococcus agalactiae
GTGGGTCTTCCAGTTGTATTAGGGTGTGCCTTTCAGTCTGTAGCTCCTTTATCAATTATTGGTGCACAACAAGGTTCTGGCTATATGTTTGGAGCTTTAATTGCTTCAGGAATATATGTCGTTTTAGTTGCTGGCATTTTTTCTAAAGTTGCAAATTTCTTTCCTCCAATTGTAACAGGATCAGTTATTACTACAATTGGTTTGACATTAATACCAGTTGCGATGGGAAATATGGGTGATAATGCAAAAGAACCAAGCTTACAATCTTTAACTTTATCACTGGTAACGATTGGTGTTGTTTTATTAATTAATATTTTCGCAAAAGGCTTTTTGAAGTCAATTTCAATCCTTATTGGACTCATTTCAGGTACAATTCTTGCAGCATTTATGGGCTTAGTTGATGCTTCTGTGGTAGCAGAAGCACCACTTGTACATATTCCGAAGCCATTTTATTTTGGAGCTCCTAGATTTGAATTTACTTCTATTTTAATGATGTGTATTATTGCAACAGTTTCTATGGTAGAATCAACAGGTGTTTACCTTGCGCTTTCAGATATTACAAACGATAAATTAGACAGTAAGAGACTTCGTAATGGTTACCGTTCAGAAGGATTGGCAGTATTACTTAGCGGCTTATTTAATACCTTTCCATATACTGGTTTTTCTCAAAATGTGGGACTGGTACAGATATCTGGGATACGTACGCGTAAGCCGATATATTTTACAGCTCTCTTCTTAGTTATACTTGGCTTGTTACCTAAATTTGGCGCAATGGCTCAAATGATTCCAAGTCCAGTTCTTGGTGGTGCTATGTTAGTTTTATTTGGTATGGTAGCACTTCAAGGGGATGAAATGCTTAATCAGGTTGATTTTGAGCATAATGAGCATAACTTTATCATTGCAGCCGTATCAATTGCAGCAGGAGTAGGTTTTATGAGACAAATCTCTCAT

SEQ ID NO: 15482 - protein, 317 aa, Streptococcus agalactiae
MGLPVVLGCAFQSVAPLSIIGAQQGSGYMFGALIASGIYVVLVAGIFSKVANFFPPIVTGSVITTIGLTLIPVAMGNMGDNAKEPSLQSLTLSLVTIGVVLLINIFAKGFLKSISILIGLISGTILAAFMGLVDASVVAEAPLVHIPKPFYFGAPRFEFTSILMMCIIATVSMVESTGVYLALSDITNDKLDSKRLRNGYRSEGLAVLLSGLFNTFPYTGFSQNVGLVQISGIRTRKPIYFTALFLVILGLLPKFGAMAQMIPSPVLGGAMLVLFGMVALQGDEMLNQVDFEHNEHNFIIAAVSIAAGVGFMRQISH

SEQ ID NO: 15483 - protein, 1354 aa, Streptococcus agalactiae
ATGACTAAAAAGGGATGGCGTATTATGCCTGCCATAATTACAACGGCTATATTAGGTTTTTCAGGGATTCTTATTGAAACATCTATGAATGTCACTTTTCCGCTTTTGATGAAAGAATTTGGGGTTAACCCCGCTGTTATTCAATGGGTGACAACAGGAAATTTGTTAGCTGTTGCTGTGACTGTGCCTTTGTCAGCATTTATGATTAAAAATTTATCAGAGAGACAAATTTTTACATTGGCAAATGTGCTTTTTTTATTTGGTGTTTTAATTGATAGCTTTGCCCCTAATTTAGCTATATTGTTAGTAGGGAGAGTCTTGCAAGGTGTTGGGACAGGATTAGCCCTCCCTTTATTGTTTCATATCATTCTTACACAAATTCCGATGGAGCGTAGAGGACTAATGATGGGAGTAGCTGCTATGGTCACACTTTTAGCACCGGCAGTTGGACCTACTTATGGTGGTGTCATTTCAGGAATGTTAGGATGGAAGATGATTTTTATGCTTCTGGCACCAATACTTATCATATCTACCTTTATAGGTTTGGCTTCTATTCCCAAACGTCAAGTAAGAATTAATGATAAACTCAATTTTCCTGCCTTTGTCAGTTTAGGTATTGGCTTGGCAACCCTTCTTTTAGCTATTGAAAAGATGTCTATTTTTTACTTATTAGTAGCTATTGTTAGTTTTGTTATTTTTTACTATTTAAATAAACAGCTAGAATTTTTGAATTTGAATGTTTTTAAAGATAAAGATTTCTCAATCTTATTGTATGGCGTCCTGGCTTTTCAAATGATTCCTCTAGCACTTTCGTTCTTATTACCTAACCTCTTGCAACTTGTTTTACATCAAACTTCAACCAAAGCTGGTTTGTTTATGTTTCCAGGTGCAATAGCAGTAGTTTTTTTATCCCCTTTTGCAGGTTATCTCCTGGATAAAATTGGTGCATTTAAGCCAATTATGATAGGTATCTCCCTTTCTTTGATAGGTTTAATTGGTACAGCTATATTCATTCCTGCGAAGTTTGTTGTAGTACTTTTAGCCTTTGATATTCTTACTAAAATTGGTATGGGGATTGGAGCAAGTAATATGGTTACGACAGCTTTAACAAAACTAAAGCCAGCACAGTCAGCGGATGGTAATAGTATCTTAAATACACTACAACAATTTGCGGGAGCTTTTGCAACCGCAGTAGCCTCACAAATTTTTACCATCGGACAAGTAGCTATTCCGAAAATGGAGCTATAATTGGTAGTCAATTTGCAGTTCTATTCGTTATCGTTGTGTTATCTTAGCTATTGTAGGATTAACTTATCTTCGAAAAAGAAAAGCATATAATAAATGTAAAATCCTA

SEQ ID NO: 15484 - protein, 452 aa, Streptococcus agalactiae
  VARIANT 429: Xaa = Any Amino Acid
MTKKGWRIMPAIITTAILGFSGILIETSMNVTFPLLMKEFGVNPAVIQWVTTGNLLAVAVTVPLSAFMIKNLSERQIFTLANVLFLFGVLIDSFAPNLAILLVGRVLQGVGTGLALPLLFHIILTQIPMERRGLMMGVAAMVTLLAPAVGPTYGGVISGMLGWKMIFMLLAPILIISTFIGLASIPKRQVRINDKLNFPAFVSLGIGLATLLLAIEKMSIFYLLVAIVSFVIFYYLNKQLEFLNLNVFKDKDFSILLYGVLAFQMIPLALSFLLPNLLQLVLHQTSTKAGLFMFPGAIAVVFLSPFAGYLLDKIGAFKPIMIGISLSLIGLIGTAIFIPAKFVVVLLAFDILTKIGMGIGASNMVTTALTKLKPAQSADGNSILNTLQQFAGAFATAVASQIFTIGQVAIPKNGAIIGSQFAVLFVIVXVILAIVGLTYLRKRKAYNKCKIL

SEQ ID NO: 15485 - protein, 380 aa, Streptococcus agalactiae
TTGACTTATTTACCATCTCCCATATCGTTTTAGATTGCATAATAAGGACGGTCAAAATTTATTCGAACCATAAACCTGAAGATCCTTTTGATATTTATCCTGAAGAAGAATATCCTATAGACAAATGGGTTCAAAACAGTCTAATAGAGAAAAAAGCGAAAGAGCTACATTTACTCTTACCTGGCGCATCACAAGATTATATTCTAGTACAATCTTATAAACGCTTAGAAAATGATAGTGGGCAACTAGTTGGTTATATTGAACATGTCCATAATATTAAACCACTATTAGAGGGGTATTTAAAAGAATCCGGTCAAGCTATCGTTGGATGGTCTGATGTCACGTCTGGTGCTTCTATCTCTAACGATGATTTTGAACTA

SEQ ID NO: 15486 - protein, 128 aa, Streptococcus agalactiae
  VARIANT 5: Xaa = Any Amino Acid
MTYLXISPYRFRLHNKDGQTIYSNHKPEDPFDIYPEEEYPIDKWVQNSLIEKKAKELHLLLPGASQDYILVQSYKRLENDSGQLVGYIEHVHNIKPLLEGYLKESGQAIVGWSDVTSGASISNDDFEL

SEQ ID NO: 15487 - protein, 1993 aa, Streptococcus agalactiae
ATGCAACATGTCAATCATTCTTCTTTTGATAAAGCATCAAAAGCAGGATTTATTATTGCTTTAGGCATTGTTTATGGAGATATTGGTACAAGCCCACTCTATACGATGCAATCATTGGTTGAAAACCAAGGTGGTATTTCTAGTGTCACAGAATCGTTTATCTTAGGTTCTATATCTTTAATCATATGGACCTTGACACTTATTACAACTATCAAGTATGTGCTTGTAGCTTTAAAGGCGGATAATCACCACGAAGGTGGTATTTTTTCTTTATATACCCTTGTTAGAAAAATGACACCTTGGTTAATTTCCGGCTGTTATTGGAGGTGCAACCTTGTTGTCAGATGGAGCTTTGACGCCAGCTGTAACCGTAACTTCAGCCGTTGAAGGATTAAAAGTAGTTCCTAGTTTGCAGCATATTTTCCAGAATCAGAGTAATGTTATTTTTGCGACCTTGTTTATTTTACTGTTACTTTTTGCCATCCAAAGGTTTGGAACGGGTGTTATTGGGAAATTATTTGGGCCAATTATGTTTATATGGTTTGCCTTTTTAGGTATTAGCGGTCTCCTTATAGTTTTGCCCATCCAGAAGTTTTCAAAGCAATTAATCCATACTACGGTTTGAAATTGTTATTTAGTCCAGAGAATCATAAAGGTATTTTTATTTTAGGATCTATTTTCCTGGCGACAACGGGAGCAGAAGCACTATACTCTGACTTAGGTCATGTTGGGCGTGGAAATATACATGTTTCATGGCCGTTCGTTAAGGTTGCCATTATACTTTCTTATTGTGGGCAGGGGCATGGATTTTAGCTAATAAGAACGCAGGAAATGAATTGAATCCCTTTTTTGCTAGTATTCCTTCGCAATTTACAATGCATGTCGTTATTTTAGCTACTTTGGCAGCTATCATCGCTTCACAGGCACTGATTTCTGGATCATTTACCTTAGTTTCTGAAGCTATGCGACTAAAAATATTCCCACAATTTCGTTCAACTTATCCTGGTGACAATATTGGTCAAACCTACATACCTGTTATTAATTGGTTCTTATTTGCCATTACAACCTCTATTGTTTTGCTTTTTAAGACTTCAGCGCACATGGAGCAGCATATGGATTAGCGATAACAATTACGATGCTAATGACAACTATTTTACTGTCTTTCTTTTTAATTCAAAAAGGAGTAAAAAGAGGTTTAGTCTTATTGATGATGATTTTCTTTGGTATTTTAGAGGGAATCTTCTTCCTTGCTTCAGCTGTTAAATTTATGCATGGAGGCTATGTTGTTGTTATTATAGCAGTAGCAATTATATTCATCATGACTATCTGGTATAAAGGTAGTAAAATTGTTTCGCGTTATGTTAAGTTGTTGGATTTAAAAGATTACATCGGACAATTAGATAAACTTAGACATGATCATCGTTATCCGATTTATCATACTAACGTTGTTTATTTGACAAATCGTATGGAAGGAGACATGATTGATAAGTCTATCATGTATTCTATCCTTGATAAGCGCCCTAAAAAAGCACAAGTTTATTGGTTTGTAAACATTAAGGTCACTGATGAACCTTATACAGCTGAGTATAAAGTTGACATGATGGGAACCGACTTCATTGTGAAGGTAGAACTTTACCTTGGATTTAAGATGCGTCAGACTGTGTCACGCTATCTTCGTACGATTGTAGAAGAATTACTTGAAAGTGGACGTCTGCCTAAACAAGGAAAGACATACAGCGTTAGACCTGATAGTAAAGTAGGAGATTTTAGGTTTATTGTCCTTGATGAACGTTTTTCAAGCAGTCAAAACCTAAAACCTGGTGAACGATTTGTTATGCTAATGAAATCATCTGTAAAGCATTGGACAGCAACACCAATACGATGGTTTGGTCTACAATTTTCCGAAGTTACAACAGAAGTAGTTCCTTTGATTTTTACAGCTAATCGAGGTCTACCAATTAAAGAAAAAATTGAACTTACAACAACTGGAGAT

SEQ ID NO: 15488 - protein, 666 aa, Streptococcus agalactiae
  VARIANT 267: Xaa = Any Amino Acid
MQHVNHSSFDKASKAGFIIALGIVYGDIGTSPLYTMQSLVENQGGISSVTESFILGSISLIIWTLTLITTIKYVLVALKADNHHEGGIFSLYTLVRKMTPWLIVPAVIGGATLLSDGALTPAVTVTSAVEGLKVVPSLQHIFQNQSNVIFATLFILLLLFAIQRFGTGVIGKLFGPIMFIWFAFLGISGLLNSFAHPEVFKAINPYYGLKLLFSPENHKGIFILGSIFLATTGAEALYSDLGHVGRGNIHVSWPFVKVAIILSYCGXGAWILANKNAGNELNPFFASIPSQFTMHVVILATLAAIIASQALISGSFTLVSEAMRLKIFPQFRSTYPGDNIGQTYIPVINWFLFAITTSIVLLFKTSAHMEAAYGLAITITMLMTTILLSFFLIQKGVKRGLVLLMMIFFGILEGIFFLASAVKFMHGGYVVVIIAVAIIFIMTIWYKGSKIVSRYVKLLDLKDYIGQLDKLRHDHRYPIYHTNVVYLTNRMEGDMIDKSIMYSILDKRPKKAQVYWFVNIKVTDEPYTAEYKVDMMGTDFIVKVELYLGFKMRQTVSRYLRTIVEELLESGRLPKQGKTYSVRPDSKVGDFRFIVLDERFSSSQNLKPGERFVMLMKSSVKHWTATPIRWFGLQFSEVTTEVVPLIFTANRGLPIKEKIELTTTGD

SEQ ID NO: 15489 - protein, 99 aa, Streptococcus agalactiae
GTGTCATGGGTTGCTAGCCAACCAGAACACATTAATATTAATCGCATAGAAATAATGCCAGTCAGTCAAACTTATGGACCTCAACCTGTTTATCGTGAT

SEQ ID NO: 15490 - protein, 33 aa, Streptococcus agalactiae
MSWVASQPEHININRIEIMPVSQTYGPQPVYRD

SEQ ID NO: 15491 - protein, 916 aa, Streptococcus agalactiae
ATGCGTTCCTTATTTGGTGGTTTAAGAGAAAAAGTTGCAAGTGATTATGTTAAGATTGTTTTCCCTGAGGGAAGCGATGAACGTGTATTACGTGCAGCAGCTCGTTTGAAATTTGAAGGTCTTGTGGATCCTGTTATTTTAGGTAAGGCTGACGAAGTTCACGATTCTTTGGCAAGACTTGGTTTTGTTGATCAAGATTATAGCGTTATTGACCCTGAACAATACGAAAAATTTGAAGAGATGAAAGAAGCTTTTGTTGAGATTCGTAAAGGCAAAGCTACTATGGAAGATGCAGATCGTCTTTTGAAGGATGTTAACTATTTTGGGGTTATGTTAGTAAAACTTGGTTTGGCAGATGGTATGGTATCAGGGGCCATTCATTCAACAGCTGATACTGTACGTCCTGCTCTTCAAATTATTAAAACAAAACCAGGAATTTCACGCACTTCAGGTGTATTCTTGATGAACCGTGAAAATACACAAGAACGTTATATTTTTGCTGACTGTGCTATTAACATTGATCCTAATGCACAAGAGCTAGCAGAAATTGCAGTAAATACTGCGGATACAGCCAAATATTTGATATTAATCCCAAGATTGCTATGCTTAGTTTTTACAAAAGGAAGTGCAAAAGCGCCTCAAGCTGAAAAAGTTAGAAGCAGCTAAAATTGCCAAAGATTTATCTCCCGAATTAGCTGTTGATGGAGAATTACAATTTGATGCAGCTTTTGTTCCGGAAACTGCAGAAATTAAAGCTCCTAATAGTGATGTTGCTGGAAAAGCATATGTTTTTATTTTCCCAGACCTTCAATCAGGAAATATTGGCTATAAAATTGCACAACGTTTGGGTATGTTTGAAGCAATCGGACCGATCTTTACAGGATTGAATGCTCCAGTTAATGATTTNNNNNTTAAT

SEQ ID NO: 15492 - protein, 307 aa, Streptococcus agalactiae
  VARIANT 192, 304, 305, 306: Xaa = Any Amino Acid
MRSLFGGLREKVASDYVKIVFPEGSDERVLRAAARLKFEGLVDPVILGKADEVHDSLARLGFVDQDYSVIDPEQYEKFEEMKEAFVEIRKGKATMEDADRLLKDVNYFGVMLVKLGLADGMVSGAIHSTADTVRPALQIIKTKPGISRTSGVFLMNRENTQERYIFADCAINIDPNAQELAEIAVNTADTAXIFDINPKIAMLSFSTKGSAKAPQAEKVQEAAKIAKDLSPELAVDGELQFDAAFVPETAEIKAPNSDVAGKAYVFIFPDLQSGNIGYKIAQRLGMFEAIGPIFTGLNAPVNDXXXN

SEQ ID NO: 15493 - protein, 882 aa, Streptococcus agalactiae; identical to SEQ ID NO: 10947

SEQ ID NO: 15494 - protein, 294 aa, Streptococcus agalactiae; identical to SEQ ID NO: 6650

SEQ ID NO: 15495 - protein, 834 aa, Streptococcus agalactiae
ATGACACAGATGAATTTTACAGATAGAGCAACACGTGTTGCTATAATTGCTAACGGAAAATATCAAAGCAAGCGTGTAGCCTCAAAGCTCTTTGCTGCTTTTAAACATGATCCTGATTTTTATTTATCAAAAAAGGATCCTGATATTGTCATTTCTATTGGTGGAGATGGTATGCTTTTGTCAGCCTTCCATATGTACGAAAAACAACTGGATAAAGTAAGGTTTGTCGGTGTTCATACAGGACATTTAGGGTTTTATACAGACTATCGAGATTTTGAAGTTGACACATTAATTAATAATTTGAAAAATGATAAAGGTGAACAAATCTCCTATCCTATTTTGAAAGTAACTATTACCCTTGAAGATGGTCGAGTTATTCGTGCGCGTGCTTTAAATGAGTCTACTATTAAGCGTATTGAAAAAACAATGGTAGCGGATGTTGTTATTAATCAAGTGGTATTTGAAAGGTTTAGGGGAGATGGCATTTTAGTTTCTACACCAACCGGTAGTACTGCTTACAATAAATCACTAGGGGGGGCAGTACTCCACCCAACGATAGAAGCCTTGCAACTAACAGAAATTTCTAGTCTTAATAATCGCGTCTATCGTACCTTGGGGTCATCGGTTATCATCCCCAAAAAAGATGCTATAGAGATAGTTCCTAAACGAGTTGGTGTCTATACAATTTCTATAGATAACAAAACGGTCCATTACAAAAATGTTACCAAAATAGAATATAGTATTGACGAAAAAAGTATTAACTTTGTTTCAACTCCAAGTCACACTAGCTTTTGGGAACGTGTTAACGATGCTTTTATCGGAGAACCTGAACAT

SEQ ID NO: 15496 - protein, 278 aa, Streptococcus agalactiae
MTQMNFTDRATRVAIIANGKYQSKRVASKLFAAFKHDPDFYLSKKDPDIVISIGGDGMLLSAFHMYEKQLDKVRFVGVHTGHLGFYTDYRDFEVDTLINNLKNDKGEQISYPILKVTITLEDGRVIRARALNESTIKRIEKTMVADVVINQVVFERFRGDGILVSTPTGSTAYNKSLGGAVLHPTIEALQLTEISSLNNRVYRTLGSSVIIPKKDAIEIVPKRVGVYTISIDNKTVHYKNVTKIEYSIDEKSINFVSTPSHTSFWERVNDAFIGEPEH

SEQ ID NO: 15497 - protein, 669 aa, Streptococcus agalactiae
ATGTCAATGGATTGGGAAACATTTCTAGACCCTTATATTCAAACGGTTGGTGAATTAAAAATAAAGCTTCGTGGTATTCGTAAACAATTTAGAAAGCAAAATCGTCACTCTCCAATAGAATTTGTTACTGGACGCGTAAAGTCGGTTGAAAGTATTCAAGAAAAGATGGTTTTACGTGGTATTTCAGAAGAAAATCTTGCTCAGGACTTGCAAGATATTGCAGGTCTTCGTATCATGGTACAATTTGTAGATGACGTTGATGAAGTCCTTGCCTTGTTGAGAAAACGTCATGACATGACAGTGGTTCAGGAGCGAGACTATATTACCCATATGAAATCTAGTGGATATCGTTCATATCATGTCGTTGTAGAGTATCCTGTAGACACAATAGATGGACAAAAGAAAGTTTTAGCAGAAATACAAATTAGAACTCTGGCTATGAATTTTTGGGCAACCATCGAACATTCATTAAATTACAAGTATCAGGGGGACTTCCCTGAAGAAATTAAACAAAGACTGGAGAAAACAGCAAAAATCGCTTTAGAATTGGATGAAGAAATGCGTAAGATTCGCGAAGATATTCGTGAAGCACAGCTTTTATTTGATCCTTTAAATCGAAAATTGAGCGATGGTGTAGGAAATAGTGATGACACAGATGAATTTTACAGA

SEQ ID NO: 15498 - protein, 223 aa, Streptococcus agalactiae; identical to SEQ ID NO: 2064

SEQ ID NO: 15499 - protein, 570 aa, Streptococcus agalactiae
ATGACACACCTAGAAATTGAATACAAAACTCTATTGAATAAAGACGAATTTAATCGTCTAACAAGCTTATTTTCTCATGTTCAACCTATTACTCAAACCAATTACTATTTTGACACAGAAACATTTGAAATGAAAGCACACCGAATGTCACTTCGCATTAGAACGTTACCTAACCGTGCCGAACTAACACTAAAAATCCCTAGAGAAGTAGGAAATTTAGAGCACAATCATGACCTTACTTTAGAAGAAGCTAAATATATCGTTAAAAATGGCCAGTTCCCTGAAGATACTGAGATTGCTTCTTTAATCCTTGAAAAGGGAGTTGATCCAACCAAATTAGCTGTCTTTGGACAACTTACAACAACAAGACGAGAGATGGAAACTTCAATCGGCTTAATGGCTCTAGACAGCAATATATATGCTGATATTAAAGATTATGAACTTGAGTTAGAAGTCAAACAACCTAAACAAGGGAAAAGAGATTTCGACCAGTTTTTAAAAGAAAATAATATTAATTTTAAATACGCCAAAAGTAAGGTGGCTAGATTCTCTGCTACTTTAAAAAATAAC

SEQ ID NO: 15500 - protein, 190 aa, Streptococcus agalactiae; identical to SEQ ID NO: 2066

SEQ ID NO: 15501 - protein, 972 aa, Streptococcus agalactiae
ATGGCAGAACAATACGCCGATAAACAAATCAAACTTTTCTCATTAACCGCTAATAGAGAAATTGCTGAAAAAATTTCCCAAGCTTCAGGAATTCCTTTGGGTAAGATGTCATCACGTCAATTCTCTGATGGCGAAATTATGATTAATATTGAGGAAACGGTGCGCGGTGACGATATCTATATCATCCAATCTACAAGCTTCCCAGTCAATGATAATCTCTGGGAATTACTCATTATGATTGACGCTTGCAAACGTGCAAGTGCTAATACTGTTAACATCGTAGTCCCTTATTTTGGATACTCTCGTCAGGACCGCATCGCTGCATCTCGTGAACCTATTACTGCAAAATTGGTCGCTAATATGTTAGTTAAAGCTGGAGTTGATCGAGTTCTTACCCTCGACTTACATGCAGTGCAAGTACAAGGGTTCTTCGATATCCCAGTTGACAATCTTTTTACTGTCCCACTATTTGCTGAACACTATAATCAACTCGGTCTCTCTGGTGAAGATGTCGTCGTTGTTAGTCCTAAAAATTCTGGAATCAAGCGTGCTCGTAGTTTGGCAGAATACCTTGACTCTCCAATTGCTATCATTGATTATGCACAAGATGATTCTGAACGTGAAGAAGGCTATATTATTGGTGAGGTAGAAGGTAAGAAAGCTATTATTATTGATGATATTTTAAATACAGGAAAAACCTTTGCCGAAGCTGCAAAAATTTTAGAACGTGGTGGAGCAACTGAGATTTATGCTGTTGCTAGTCATGGGCTTTTTGCTGGCGGCGCAGCTGATATTTTAGAGTCTGCACCAATTAGAGAAATTATCGTAACAGACTCTGTTTTATCTAAAGAGCGTATTCCTAGCAATATTAAATATCTGACCGCTAGCCATCTCATTGCAGACGCTATTATCCGTATCCATGAAAGAAAACCTTTAAGTCCATTATTTTCATATCGTTCAGATAAGAAGGAT

SEQ ID NO: 15502 - protein, 324 aa, Streptococcus agalactiae; identical to SEQ ID NO: 2068

SEQ ID NO: 15503 - protein, 1113 aa, Streptococcus agalactiae
ATGATTTATTTAGACAATGCTGCTACTACCGCTCTAACCCCATCTGTTATTGAGAAAATGACCAATGTCATGACAAGTAACTATGGTAATCCATCTAGTATACATACCTTTGGGCGTCAAGCAAATCAACTTTTACGTGAATGTCGACAAATTATTGCTGAATATCTAAATGTTAATTCACGTGAAATTATTTTCACTTCTGGGGGAACTGAGAGCAACAATACAGCTATCAAAGGGTATGCTCTTGCAAATCAGCTAAAAGGTAAACATATTATTACCTCTGAAATTGAACATCATTCAGTCCTACATACTATGACTTACTTATCAGAGCGATTTGGTTTTGATATTACTTACTTAAAACCAAACCATGGACAAATTACTGCAAAAGACGTTCAAGAAGCTTTACGAGATGATACTATTATGGTATCTCTCATGTTTGCTAATAATGAAACCGGGGACTTTTTACCAATTCAAGAGATTGGTCAGCTTCTCAGGAACCACCAAGCTGTTTTTCACGTTGATGCCGTTCAAGTCTTTAGCAAAATGGAACTTGATCCTCATTCTTTAGGAATTGACTTTTTAGCTGCTTCTGCCCATAAATTTCACGGTCCAAAAGGTGTTGGGATACTTTACTGTGCTCCCCATCACTTTGATAGTCTACTTCATGGTGGAGACCAAGAGGAAAAAAGGCGTGCTTCAACTGAAAATATAATTGGTATTGCTGGAATGTCTCAAGCTCTTACTGATGCTACGACTAACACCCTTAAAAATTGGACTCACATTAGTCAGCTGAGAACGACCTTTTTAGATGCTATTTCAGACCTTGACTTCTATCTTAATAACGGTCAAGACTGCTTACCTCATGTACTTAATATAGGTTTTCCTAGACAGAATAATGGCTTGTTATTGACACAGTTAGATTTAGCTGGATTCGCAGTTTCAACAGGTTCTGCATGTACTGCAGGAACAGTCGAACCTAGTCATGTCTTAACAAGCTTGTATGGAGCCAACTCACCACGTCTAAATGAATCAATACGTATTAGTTTTTCAGAACTAAATACCCAAGAAGAAATTCTTGAATTAGCTAAAACCTTAAGAAAAATTATAGGAGAT

SEQ ID NO: 15504 - protein, 371 aa, Streptococcus agalactiae; identical to SEQ ID NO: 2070

SEQ ID NO: 15505 - protein, 345 aa, Streptococcus agalactiae
ATGGCATTTGAAAAAGAAATAAATCTTCCAGACTGCAATTACATTTACACTATCAGCCCGAACATTAAAAAATATACCTTACGCGATACTACATTCACTCAAAATCGCTTAGGTAATTATGAATTAGAGCGTCTCCTAGAAACAGTACCTAATTCTGGCGATGGCTTTCCTCTAAAGATTACAATCAATAAAGAACTTTCTGGTTTTAAGCTCTTAATTACTGATAAATCTGGCCTTAGAATAGTAAATATCTTTAAATCTACCGATCATAAAATTCTTCAAGACAAATTTTATTTCTTAATGGACAGCCTCGTTGAGCGTAATATCTTTACGAAAACTGCAAAA

SEQ ID NO: 15506 - protein, 115 aa, Streptococcus agalactiae; identical to SEQ ID NO: 2072

SEQ ID NO: 15507 - protein, 630 aa, Streptococcus agalactiae
ATGGATAAGTCTATTCCTAAAGCAACTGCTAAACGTTTATCACTGTACTACCGTATTTTTAAACGTTTTAATACTGATGGCATCGAAAAAGCTAGTTCCAAACAAATTGCAGATGCCCTAGGTATCGATTCTGCTACTGTTCGACGTGATTTTTCTTATTTTGGTGAACTAGGACGCCGTGGTTTTGGTTATGATGTCAAAAAACTTATGAACTTCTTTGCAGAAATATTGAACGATCATTCTACAACAAATGTTATGCTGGTGGGGTGTGGAAATATCGGTAGAGCTCTCTTGCATTATCGTTTCCACGATCGCAATAAAATGCAAATTTCAATGGCTTTTGATTTAGATAGCAATGATTTAGTTGGTAAAACAACCGAGGATGGAATTCCTGTCTACGGTATTTCGACTATCAATGACCATTTAATAGATAGTGATATTGAAACTGCTATCCTAACAGTACCTAGTACAGAAGCCCAAGAAGTTGCTGACATCTTAGTCAAAGCAGGTATAAAAGGCATCTTGAGTTTTTCTCCAGTTCATTTAACATTACCAAAAGATATCATTGTTCAGTATGTAGATTTAACAAGCGAATTACAAACTTTACTTTATTTCATGAACCAGCAGCGA

SEQ ID NO: 15508 - protein, 210 aa, Streptococcus agalactiae; identical to SEQ ID NO: 2074

SEQ ID NO: 15509 - protein, 678 aa, Streptococcus agalactiae; identical to SEQ ID NO: 10965

SEQ ID NO: 15510 - protein, 226 aa, Streptococcus agalactiae; identical to SEQ ID NO: 2076

SEQ ID NO: 15511 - DNA, 1131 bp, Streptococcus agalactiae
atgaaatttgaaaaacggcaggtctattatgttgtcataacatttgctatttgctatgctatacaggcttattggggagctgtttctaatattttaactacgcttcataaggcaatatttccttttttgatgggagctggaattgcctatattattaatattgtaatgtcagtctatgagcgattatatataaagctttttaaaggatctagactattaatggcaatcaagcgtagtgtttctatgattttatcctatgcaacttttattggtttaattgtctggctattttcaattgtcattccagatttgatttctagtttgagttctttattggttattgataccggagcacttgctaaattggttaataatctcaatgaaaataaacaaatttctgaggctttaaattatatgggaacagataaagacttagtttctactttaagtggttatagccagcagattttgaagcaagttttatctgttttaacaaatttactaacctcagtttcctctattgcggcaacacttctgaatgtttttgttagttttattttttcaatttacgttttggcaaacaaggagcagttgggacgtcaatttaatttgttaattgatacctatttaggttcaacaggcaaaacattccattacgttcgtcatatccttcatcaacgtttccatggtttttttgtaagccaaactttagaagctatgattttaggaagtttgacggttattggtatgttgatcttccaatttccttatgctttaacagttggggttttagttgcttttacagctctaataccggttgtgggagcctacattggtgttacaatcggtttcatcttaattgctactgaatcgcttactgaagcattcttgtttgttcttttcttgatccttttacaacaatttgagggaaatgtcatttatccgaaagttgtcggtggatcgattggactgccttctatgtgggttttaatggctattactatcggaggtgctttatgggggatcttaggcatgttacttgctgttcctgttgcagctactatctatcagattgtaaaagatcatattatcaagcgacaaacgcttagaaatcgtgcacgaacctatcgt

SEQ ID NO: 15512 - protein, 377 aa, Streptococcus agalactiae; identical to SEQ ID NO: 6668

SEQ ID NO: 15513 - DNA, 1434 bp, Streptococcus agalactiae
atggtaaaacaagtatttccaaaaggttttttatggggcggggcaactgctgccaatcaatgtgaaggagcttacaatgttgatggacgtggcctagcaaatgtagatgttgttcctactggagaagatcgatttgcaattatttcaggacaaaagaaaatgtttgattttgaggaaggatacttttatccagcaaaagaatcaatagatttttatcaccattataaagaagaccttgcattacttgcagaaatgggtttcaaaacctatcgtatgtcaatagcatggacgcgtatttttccaaagggtgatgagctatatccaaatgaagctggtcttcggttttatgaaaatatttttaaagagtgtcgtaagtatggtattgaacctttggtaaccatcacacattttgactgtcctatctaccttattaaacattacggtgggtggcggagccataaaatgattggtttttatgagcgccttgtacgagctttatttactcgttttaaggggttagttaaatattggttgacctttaacgaaatcaatatgattttacacgctccttttatgggcgctggcttatattttgaagatggtgaaaatcaagagcaaattaaatatcaagcagctcaccatgagttagtggcttcggctattgcagtaaaaattgctcatgaagttgatccaaatagtcaaatcggatgtatgttagctgcaggtcaatactatccaaatacgtgtcatccacaagattattgggcttcgatgcaaaaaaatagagaaaattatttttttattgatgtgcaagcgcgtggcaaataccctaattatgctaaaaaatattttgagcatttaggtatttcaattcaaatgacagcagaagatcttgctttgttaagagactatacggttgattttatttcattttcttactattcaagccgagtagcttcaggtaatccaactgtcagtgaacaggttcaagaaaatattttcgcatctcttaagaatccttacttgaaatcttctgaatggggatggcaaattgatccgcttggattacgcattaccttaaatgctatctgggatcgttatcaaaaaccgatgtttattgttgaaaatggacttggagcagtagatattcctgatgagaatggttacgtagaagatgattatcgtattgattacctccgtcagcacattgctgcaatgagagatgctatatatgtagatggtgttaatctaattggctatactacatggggatgtattgatttagtatctgcaggaactggtgaaatggaaaaacgctatggtttcatttatgttgatcgcaataataaaggagagggaacactcaagcgttacaagaaaaaatcgttttattggtacaagaaggttattgcaagtaatggcagtcaaatagaa

SEQ ID NO: 15514 - protein, 478 aa, Streptococcus agalactiae
MVKQVFPKGFLWGGATAANQCEGAYNVDGRGLANVDVVPTGEDRFAIISGQKKMFDFEEGYFYPAKESIDFYHHYKEDLALLAEMGFKTYRMSIAWTRIFPKGDELYPNEAGLRFYENIFKECRKYGIEPLVTITHFDCPIYLIKHYGGWRSHKMIGFYERLVRALFTRFKGLVKYWLTFNEINMILHAPFMGAGLYFEDGENQEQIKYQAAHHELVASAIAVKIAHEVDPNSQIGCMLAAGQYYPNTCHPQDYWASMQKNRENYFFIDVQARGKYPNYAKKYFEHLGISIQMTAEDLALLRDYTVDFISFSYYSSRVASGNPTVSEQVQENIFASLKNPYLKSSEWGWQIDPLGLRITLNAIWDRYQKPMFIVENGLGAVDIPDENGYVEDDYRIDYLRQHIAAMRDAIYVDGVNLIGYTTWGCIDLVSAGTGEMEKRYGFIYVDRNNKGEGTLKRYKKKSFYWYKKVIASNGSQIE

SEQ ID NO: 15515 - DNA, 612 bp, Streptococcus agalactiae
atgttagaagttattgacaaagctttaagagattatcaaatgaaacgagaacagttttttgagattaacaatcagacagtacaagaaggtgccattgttttcacaggagattctatcgttgagttttttcctttaaaaaaacatttaggacgtgactatcctttagttaatagaggagtagcaggatcagattcttattggcttttagaaaacttgagaacccaagtatgggaactattaccatccaaagtatttattttaattggaacaaatgatattggtttagggcattcacagtcagaaatcatagctaatatcacggatataattgcagaaattcgtgcggaatcttatatgacagagattaatatactgagtgttttacctgttagtgaagaagatgactatatagagcgtgtcaaggtaagaaataatcaagcaataaaagctttaaacaaaaccttatcagtaatttctggcattaattatattgaattgtatgatttattagttgacgaaaaaggtcagcttgctagcagttttacaaaagatggtttgcacctaacagatcaagcctatgctaaaatttctgaaacgataaaactccacctt

SEQ ID NO: 15516 - protein, 204 aa, Streptococcus agalactiae
MLEVIDKALRDYQMKREQFFEINNQTVQEGAIVFTGDSIVEFFPLKKHLGRDYPLVNRGVAGSDSYWLLENLRTQVWELLPSKVFILIGTNDIGLGHSQSEIIANITDIIAEIRAESYMTEINILSVLPVSEEDDYIERVKVRNNQAIKALNKTLSVISGINYIELYDLLVDEKGQLASSFTKDGLHLTDQAYAKISETIKLHL

SEQ ID NO: 15517 - DNA, 795 bp, Streptococcus agalactiae
atggatggaacttttctacgctcagataaaacttatgataaagcacggttttcttctttattaacgttgatggagaagtatgatattaaatttgtagctgctagtggtaatttatacgatcaattgttgttaaactttttggaataccctaatcgtatcgcctacgtcgctgaaaatggtggtcgtgtcattgaccaagatggcacattactaaaagaaacttatttatctaatgatacagttgcagctgttttatcctatttatatcagaactatcctgagacactcatcagcttatctggtgaaaaacgttcataccttgagcgaagaactcctattaataggcggactgaattagaatactatatgcctaattttatctataaagaccatttgctgcccttagatgatgaccgatattttcaaatgacactttgggtaaatgaaaatcttgtttctgagatgttgttagatattagtgaacactttaaaaatcatcatatcagattgacctctagtggttttggttgtatcgatgtcttaccagctgatgtcaataaagcggatggtatcgctattctccttgaaaagtggggattgaaacaggatcaagtgatggtttttggtgatgggggcaatgatgtggaaatgttgagagcagcaaatatttcttacgctatgtcaaatgcgccagaagaaattaaagctattgctaaatatcaaacagttagtaacgatcaagatggtgtgttagaaacgatagagaactttcttcacaagatgagtgataatgaa

SEQ ID NO: 15518 - protein, 265 aa, Streptococcus agalactiae; identical to SEQ ID NO: 6674

SEQ ID NO: 15519 - DNA, 927 bp, Streptococcus agalactiae
atgaactcacttgataatttactatcacataatttagaagataaccggcatttattaccctatgaacacatgcatactgaggttagaaatggttaccctgacattttatttcactggcatccggaacttgaaatttcatatgtccacgaggggaccgcacgttatcacatcgattatgatttttttaatagccaatctggtgatattatcttgatccgtccaaatggtatgcattctattcatccgattgaaaataaagagcatatcacagatagcattaaatttcacttagatttaataggatattctattgtagaccaagttagccttcgttatttacaaccgttgcagactagctcttttaagtttattcaatgtatcaaacctagtatgacaggatataatgatatcaaaaattgtttgtttgatatttttaatatttcaaaagaagaaaatcgacattttgagctactcctaaaagctaaattaaacgaactcttgtatttactctattatcatcaatatgtcattaaaaaacatactgatgatacctacagaaaaaacgagagaattcgtgatctgattgattatattaataataattaccagcaaaatcttaccattgaatttttagctgattatatggggtatagtaagacacattttatgaccgtatttaaacagcatactggaacatcctgtacagaatttatcatacaagttcgtcttaataaagctagtgagcatcttattaactccactacggccattattgatattgccaacagcgttggttttaataatctatcaaattttaatcgccaatttaaacgctattatcatacaactcctcgccagtaccgcaaacaatttaccaacaaaaaagacggtagtacgcttgtctatagaaatataaatacaaaaaaa

SEQ ID NO: 15520 - protein, 309 aa, Streptococcus agalactiae; identical to SEQ ID NO: 2086

SEQ ID NO: 15521 - protein, 1530 aa, Streptococcus agalactiae
ATGGAAAATCATAAAAATGAATTTCAGTTTTCACTTGAATCAATTCTGGGATTTGTTTGGAGAGGAATAGTAGTAGGCTTAATAGCAGGATTTGTTGTCAGCATATTTCGATTAGCGATTGAAAAAATTTTTTTAGTTGTTATGGAACTTTATAAAAGTGCCCATTATCAACCAATTATTTTATTGAGTATTACGGTTACTAGTATTATCGCTGCAGTGATAATAGGTTTTTTTATCAAATCTGATCCTGATATTAAAGGTTCAGGTATCCCGCATGTTGAAGGTGAACTTAAAGGAATGCTATCGCCAGACTGGTTTAGTATTGTATGGAAGAAATTCATTGCGGGTATTTTAGCTATTTCTTCGGGACTTATGCTTGGTCGCGAAGGTCCCAGTATTCAGTTAGGAGCTATGACAGGTAAGGGAATTGCACAGTATCTCAATGCTAGTCGAATGGAAAAACGTGTTTTAATTGCTAGTGGTGCAGCAGCAGGTCTTTCAGCAGCCTTCAATGCTCCTATTGCAGGCCTTTTATTTGTAGTTGAAGAAATTTACCATCATTTTTCTCGCTTAGTTTGGATAACAGCTTTGGTAGCAAGTTTAGTGGCAAACTTTGTCTCACTTAATATCTTTGGTTTAACCCCAGTTTTAGCTTTACCATCAGAATTACCATCTTTAAATCTCAACTTTTATTGGATTTTTTTACTCATGGGTCTCTTTTTGGGTATCTTAGGCTTTATCTATGAGTGGGTAATTTTGAGATTTCATGTGATCTATGATTATTTAGGTAAACTATTTCATCTACCATCTCACCTATATGGTATATTAGCGGTAATTTTTATTCTTCCTATTGGTTACTATTTCCCACAATTATTGGGGGGTGGAAATGGCTTAATTGTATCACTGCCTAGGAGTAATCTTAGTCTGATGATGTTAGGATTATTTTTCCTCATTCGTTTTTTATGGAGTATGTTGAGTTACAGTAGTGGCTTGCCAGGAGGAATTTTTTTACCAATTCTAGCTTTAGGATCTTTAGCAGGTGCTTTTTTTGCAGTAGGTATGCAGTACTTTGGTATAATATCTCATCAGCAGATATCTTTATTTGTTGTTCTAGGAATGGCGGGCTATTTTGGTGCAATCTCAAAAGCACCACTAACAGCTATGATTTTGGTTACAGAAATGGTTGGCGATTTAAAACAATTAATGGCTATTGGAATTGTAACAATGGTATCTTATATTGTCATGGATTTATTAAAGGGAGAACCTATTTATGAAGCGATGTTGGCTAAAATGACCTTCAATCCAAAAGATAAAGTAATGACACCTACATTGATTGAATTAACTGTTTCAGATAAAATATCAGGAAAGTATGTCCGAGATTTAGAATTACCAGAAAATGTGCTAATAACGACTCAAATTCATCATAAGACATCGGCTGTAGTATCAGGAAATACTATCTTGAATGCTGGCGACACCATTTTTTTAGTTGTGAATGAATCGGAAATTAAAGAAGTACGTGAGCAGCTGATG

SEQ ID NO: 15522 - protein, 510 aa, Streptococcus agalactiae; identical to SEQ ID NO: 6680

SEQ ID NO: 15523 - protein, 1071 aa, Streptococcus agalactiae; identical to SEQ ID NO: 10979

SEQ ID NO: 15524 - protein, 357 aa, Streptococcus agalactiae; identical to SEQ ID NO: 2092

SEQ ID NO: 15525 - protein, 774 aa, Streptococcus agalactiae
ATGAAAAAATTCGCAAATATCTATTTAGCATTTGTTTTTATTATCCTTTATATTCCTATTATTTATTTGATTTTTTATTCTTTCAATAAAGGTGGGGATATGAATTCTTTTACTGGATTCACCTTTAGTCACTATGGAGAACTGTTTCAGGATAGCCGCTTAATGCTAATTTTAGTGCAAACATTCTTTTTGGCTTTTCTTAGCGCCTTATTAGCTACAATTATTGGTACCTTTGGAGCTATTTGGATTTATCAGGTAAGACGTAGACATCAAACCTCTATTTTATCGCTTAATAATATCCTTTTAGTAGCACCAGATGTTATGATTGGTGCAAGTTTTCTCTTAGTATTTACTGTTATTGGTTTACAGTTAGGTTTCACTTCTGTATTATTGAGCCATGTTGCATTCTCTATTCCTATTGTTGTTTTAATGGTCTTACCTCGTTTAAAAGAAATGAATGATGATATGATTAATGCTTCCTATGATTTAGGAGCTTCAACTTGGCAAATGCTTAAAGAAGTTATGTTACCCTATTTGTCGTCGGGTATTATTTCAGGTTTCTTTATGGCTTTCACTTACTCGCTAGATGATTTTGCGGTTACTTTCTTTGTTACAGGTAATGGCTTTTCAACGCTTTCAGTAGAAATCTATTCACGCGCACGTCGCGGTATATCATTGGAAATTAATGCCTTGTCAACTATTGTCTTTTTATTTAGTATTTTATTGGTAATTGGTTATTACTATATTTCGAAAGAGAAGGGAGAAAAGAATGCG

SEQ ID NO: 15526 - protein, 258 aa, Streptococcus agalactiae
MKKFANIYLAFVFIILYIPIIYLIFYSFNKGGDMNSFTGFTFSHYGELFQDSRLMLILVQTFFLAFLSALLATIIGTFGAIWIYQVRRRHQTSILSLNNILLVAPDVMIGASFLLVFTVIGLQLGFTSVLLSHVAFSIPIVVLMVLPRLKEMNDDMINASYDLGASTWQMLKEVMLPYLSSGIISGFFMAFTYSLDDFAVTFFVTGNGFSTLSVEIYSRARRGISLEINALSTIVFLFSILLVIGYYYISKEKGEKNA

SEQ ID NO: 15527 - protein, 792 aa, Streptococcus agalactiae
ATGAAGAAAACCTCTAGTCTATTTTCAATTCCTTATATGGCTTGGTTATTCTTATTTGTATTAGCACCTGTTGCTTTGATTGCTTGGAACTCGTTCTTTGATATTAATGGGCACTTTACTTTAGCTAATTACCAGACGTTTTTTAGCTCAGGAACCTATCTTAAAATGAGCTTTAACTCGGTCCTATATGCAGGCATCGTTAGTTTCATAACGCTTTTGATTAGCTATCCAGCTGCTTATTTGCTTACAAAATTAAAACACAAGCAATTATGGCTAATGCTAATTATTTTGCCAACATGGATTAATCTTTTGTTAAAAGCCTATGCTTTTATGGGGATATTTGGTCAACAAGGGGGAATTAACGCCTTCTTAACCTTTATAGGTATCGGCCCAAAACAGATTCTATTTACAGATTTTTCATTTCTTTTTGTAGCAGCTTACATTGAATTACCGTTTATGTTATTACCCATTTTTAATGCCTTGGATGATATTGATCAAAATCTCATTTATGCAAGTGATGACTTGGGTGCAAATGCATGGCAAACTTTTCAGAAGGTTATATTTCCTCTATCTCTGAATGGTGTAAGAGCAGGTGTACAATCTGTCTTTATTCCTAGTTTAAGTCTCTTTATGCTTACGCGTCTTATTGGTGGTAATCGAGTTATTACTTTAGGGACAGCCATAGAACAACATTTTTTAATCACACAAAATAAAGGTATGGGCTCAACCATAGGGGTTATTTTAATTTTAGTGATGGTTGCTATTATGTGGTTAACAAAGGAGAGGAAAGCA

SEQ ID NO: 15528 - protein, 264 aa, Streptococcus agalactiae
MKKTSSLFSIPYMAWLFLFVLAPVALIAWNSFFDINGHFTLANYQTFFSSGTYLKMSFNSVLYAGIVSFITLLISYPAAYLLTKLKHKQLWLMLIILPTWINLLLKAYAFMGIFGQQGGINAFLTFIGIGPKQILFTDFSFLFVAAYIELPFMLLPIFNALDDIDQNLIYASDDLGANAWQTFQKVIFPLSLNGVRAGVQSVFIPSLSLFMLTRLIGGNRVITLGTAIEQHFLITQNKGMGSTIGVILILVMVAIMWLTKERKA

SEQ ID NO: 15529 - protein, 1152 aa, Streptococcus agalactiae; identical to SEQ ID NO: 10985

SEQ ID NO: 15530 - protein, 384 aa, Streptococcus agalactiae; identical to SEQ ID NO: 2098

SEQ ID NO: 15531 - DNA, 900 bp, Streptococcus agalactiae
atgattaaaacaatacaaaaagaattagaaggtctcgatattcgctttgatgagcctttaaagaaatatacttatactaaagtaggaggacctgctgattatcttgcattcccaaggaatcgccttgaactatcgcgtattgttaagtttgctaacagtcaaaatattccttggatggttttaggaaatgcgagtaatattatcgttagagatggtggtatccgtggttttgttatcatgtttgataaactgtcaactgttacagtcaacggttatgttattgaagcagaagcaggagctaatctcattgaaacaactcgtattgcacgttatcatagtttaactggctttgagtttgcttgcggaattcctggaagtgtaggtggagcagtctttatgaatgctggcgcttacggtggtgaaattgctcatattttattgtctgcacaagttttgacaccacagggtgaactcaaaacgattgaagctaggaatatgcaatttggttatcgtcattctgtcattcaagagagtggagatattgttatatcagctaagtttgccttaaaaccaggagatcatctcatgattactcaggaaatggatcgtttaacctatctccgtgagctgaaacaacctttagaatacccttcttgtggttctgtgttcaaacgtcctccaggacattttgcagggcaactcattagcgaagcacatcttaaaggtcaacgtattggtggagtagaggttagtcaaaaacatgctggttttatggttaacattgcagaaggttcagctcaagattatgaaaatcttattgaacatgttattaacaccgttgaatcaacttcaggtgtccatttggaaccagaagttcgtattatcggtgagtcgctatta

SEQ ID NO: 15532 - protein, 300 aa, Streptococcus agalactiae; identical to SEQ ID NO: 2100

SEQ ID NO: 15533 - DNA, 486 bp, Streptococcus agalactiae
atgacaaccgtttacttgagtttaggtagtaatattagtgatagagaaacttttctgaagcaggctctcttttcaattgatcatttgcaaaagacaaaagtcgcgcaaatttccgctatttatgaaacagctgcttgggggaatactaaccaagaagatttttttaatatatgttgtcaggtagagacagacttagcaccttttgaattattggattattgtcaagaaattgaaaaacgcttaaagcgcgtgagacatgagcactggggtccaaggacaatagatattgatatcttactttttggtaatcaagtgattaaccaagaagatttagtagtaccccatccgtatatgacgaagcgagcatttgttctagttccgttactcgaaatagcacctcaactaagtttacctaatggttctaagctagaagactatctcgaaaaattgaatttaggagaagttcattatttaaaaccagtcgaa

SEQ ID NO: 15534 - protein, 162 aa, Streptococcus agalactiae
MTTVYLSLGSNISDRETFLKQALFSIDHLQKTKVAQISAIYETAAWGNTNQEDFFNICCQVETDLAPFELLDYCQEIEKRLKRVRHEHWGPRTIDIDILLFGNQVINQEDLVVPHPYMTKRAFVLVPLLEIAPQLSLPNGSKLEDYLEKLNLGEVHYLKPVE

SEQ ID NO: 15535 - DNA, 360 bp, Streptococcus agalactiae
atggataagatttatttaaataaatgtcggttttatggttatcatggtgctttttcggaagaacaaacattggggcaagtttttcaagttgatgctgttctatcacttgatttagcaaaagcatcacaaactgatgatttaattgatacggttcattatggtgaagtttttgactgtattaaaaatcatgttgaaaacgaacagtatcaattaatagagaaattagcaggtgttattgttgaagatattttcttacagtttcatccagtacaagctattacattaaagattacaaaagacaatccaccaattaatgggcactatgaatcagttggaattgaattggagcgcaagcgagta

SEQ ID NO: 15536 - protein, 120 aa, Streptococcus agalactiae; identical to SEQ ID NO: 2104

SEQ ID NO: 15537 - DNA, 801 bp, Streptococcus agalactiae
atgaaaataggacaatatgatattacaggtaaagcttgtatcatggggattttaaatgtaacgcctgattccttctcagatggtggttcttataccacaattgattcagctttaaatcaagttggtgagatgcttgaacaaggggtggcaattgtagatattgggggagaatcaacgcggccaggtgcagtatttgtgactgctgaagaagaaattaaacgtgtagttccaatgattaaagctattagagaggtctaccctgatcttttgttatcaatagatacttataaaacagaggtagctcaagcagcccttgatgcaggtgtacatattttaaatgacgtttggtcaggtttatatgatggtaaaatgctatctttagcagcagaacgaaatgttccaattattttgatgcataaccaggaagaagctgtttatcaagatatcaaaaaagaagtttgtgaattcttacttgaaagagcagagcgtgctttagaagcaggtgtttcaaaggataatatttggatagatcctggctttggttttgctaaaacagaggagcaaaatttagagctattaaaaggtttggaacaagtgtgtgatttaggttatcctgtgttatttgggatctctcgaaaacgtactgttaattatcttctaggtggtaatagggaagtaactgaacgtgatatggggactgctgctttatcggcatgggcaatagcaaaggggtgtcagattgtacgtgttcacaatgttgaagtaaataaggacattgtgacagtaattagtcagttggtg

SEQ ID NO: 15538 - protein, 267 aa, Streptococcus agalactiae; identical to SEQ ID NO: 2106

SEQ ID NO: 15539 - DNA, 561 bp, Streptococcus agalactiae
atgaccaatcaagaaaaaatggaaaaagctatttatcaatttttagaggctttaggagaaaatcctgatcgagaagggttgaaagatacaccgaagcgtgtggcaaaaatgtatatagaaatgttctcaggacttaatcaagatccaaaggagcaattcactgcagtcttttctgaaaatcatgaagaggttgtgattgtcaaggatattccattctattccatgtgtgaacatcatttggttcctttttatggtaaagctcatattgcttatttaccaaacgatggacgtgttactggacttagtaagcttgcacgtgcagttgaagtggcgagtaagcgtcctcaacttcaggaacgtttaacagcacaagttgcacaagctttagaggatgctttagcgcctaaaggtatttttgttatgatagaagcagagcatatgtgcatgacaatgcgtggcattaaaaaaccaggaagtaagacgattacaacggtagctcgtggtttatacaaggacgatcgatatgaaagacaagaaattctatcgctaatacaaaaagga

SEQ ID NO: 15540 - protein, 187 aa, Streptococcus agalactiae
MTNQEKMEKAIYQFLEALGENPDREGLKDTPKRVAKMYIEMFSGLNQDPKEQFTAVFSENHEEVVIVKDIPFYSMCEHHLVPFYGKAHIAYLPNDGRVTGLSKLARAVEVASKRPQLQERLTAQVAQALEDALAPKGIFVMIEAEHMCMTMRGIKKPGSKTITTVARGLYKDDRYERQEILSLIQKG

SEQ ID NO: 15541 - protein, 1259 aa, Streptococcus agalactiae
ATGACTTATCAAGAAGCGCTAGAATGGATTCATAGCAAATTAGCTTTTGGTATTAAACCAGGTTTGGAACGTATGAGATGGATGCTAGAGCAGTTAGGAAACCCTCAAAACAACCTATCTGCCATTCATGTTGTTGGAACGAATGGTAAAGGATCAACAACTAGTTATTTACAACATATTTTTACAAATTCTGGTTATCAAGTTGGAACATTTACATCACCATATATTGTTGACTTTAGAGAGCGTATTAGCATTGATGGTCAAATGATTCCAGAGTCTGATTTTATCAAACTTGTTGAGACTGTTCGTCCAGTTGTTGAACGGTTGCACCTTGAGACCAACCTAGAACCAGCTACAGAATTTGAAGTTATAACAGTTTTGATGTTCTATTATTTTGGCAATAGCTGTCCAGTTGATATCGTCATTATTGAGGCTGGAATGGGCGGTTATTATGATTCTACCAACATGTTCAAGGCTTTAGCGGTTACTTGTCCGTCAATTGGATTAGATCATCAGGAGGTTTTAGGACGAACTTATGTAGATATAGCTGAACAAAAAGTAGGTGTTTTAAAAAAAGGAGTTCCATTCGTATATGCTAATGATCGTCAGGATGTTGAAGAAGTCTTTCAAATAAAAGCCAAGGAAACCCACAGCCAGACTTATCGTTTACACAATGACTTTTATATAAAAGAAGAGGAAAATTATTTTAACTATATAGGTCCTCAAGCAAATATTGATCATATTCAGTTGCAAATTCCGGGACATCACCAAGTTTCCAATGCTAGCATAGCTATAACTACCAGTTTATATTAAGAGACAAATATCCAAAGTTAACCCTACAGACCATTAAAGATGGGCTTGAAATGACAAAATGGGTAGGCCGTACAGAATTAATCTTTCCAAATGTAATGATTGATGGCGCTCATAATAATGAAAGTGTCGATGCTCTCGTTCAAGTTATAAAAAAATATCAGCAGAAAAACGTGCATATTCTATTTGCTGCAATTAATACTAAACCGATAGAGAGTATGTTAGAATCATTGTCTAGTATCGCTCCGGTTTCGGTTACTAGCTTTGATTACCCTAAATCAATAAACTTAGACAAATATCCTAAAGCGTACACTAGAGTTAGTGATTGGAAGAAATGGCTACATGATATAAATCTGACATCAGATAAAGATTTCTATGTGATTACTGGCTCCCTTTATTTTATTTCTCAAGTTCGTCAGGAACTACTATTAATCAAAACTACAACAACT

SEQ ID NO: 15542 - protein, 420 aa, Streptococcus agalactiae
MTYQEALEWIHSKLAFGIKPGLERMRWMLEQLGNPQNNLSAIHVVGTNGKGSTTSYLQHIFTNSGYQVGTFTSPYIVDFRERISIDGQMIPESDFIKLVETVRPVVERLHLETNLEPATEFEVITVLMFYYFGNSCPVDIVIIEAGMGGYYDSTNMFKALAVTCPSIGLDHQEVLGRTYVDIAEQKVGVLKKGVPFVYANDRQDVEEVFQIKAKETHSQTYRLHNDFYIKEEENYFNYIGPQANIDHIQLQIPGHHQVSNASIAITTSLLLRDKYPKLTLQTIKDGLEMTKWVGRTELIFPNVMIDGAHNNESVDALVQVIKKYQQKNVHILFAAINTKPIESMLESLSSIAPVSVTSFDYPKSINLDKYPKAYTRVSDWKKWLHDINLTSDKDFYVITGSLYFISQVRQELLLIKTTTT

SEQ ID NO: 15543 - protein, 885 aa, Streptococcus agalactiae; identical to SEQ ID NO: 6701

SEQ ID NO: 15544 - protein, 295 aa, Streptococcus agalactiae; identical to SEQ ID NO: 2112

SEQ ID NO: 15545 - protein, 864 aa, Streptococcus agalactiae
ATGAGGATAATTGTACCTGCAACTAGTGCGAATATTGGTCCAGGCTTTGATTCAATAGGAGTTGCGTTATCAAAGTATTTAAGCATTGAAGTATTAGAAGAAAGTACAGAGTGGTTAGTTGAACACAATTTAGTAAATATTCCAAAAGATCATACTAACCTCCTTATTCAAACAGCTTTGCATGTTAAGTCGGATTTGGCACCACACCGCTTAAAAATGTTTTCAGATATTCCTTTGGCCAGAGGTTTAGGTTCTTCTTCCTCTGTAATTGTTGCAGGAATAGAATTAGCCAATCAATTAGGAAATTTGGCTCTTTCTCAAAAAGAAAAATTAGAGATAGCTACCCGATTAGAAGGACATCCTGATAATGTAGCACCGGCCATTTTTGGTGATTTAGTTATTTCATCAATAGTGAAAAATGATATTAAAAGTTTGGAAGTGATGTTTCCAGATAGTTCCTTTATCGCTTTTATTCCAAATTATGAATTAAAAACAAGTGATAGTCGAAATGTACTACCTCAAAAATTGAGTTATGAGGATGCAGTTGCTTCAAGCAGCGTCGCTAATGTGATGGTTGCGTCGTTGTTGAAAGGTGATTTGGTAACTGCTGGATGGGCTATAGAAAGGGACCTCTTTCATGAAAGATATCGTCAACCTTTGGTGAAGGAATTTGGAGTTATAAAACAAATCAGCACTCAAAACGGTGCGTATGCTACTTATTTGTCTGGAGCAGGACCGACGGTAATGGTTCTGTGTTCGAAAGAAAAAGAACAACCAATTGTCACAGAGTTAAGTAAATTATGTTTAGATGGACAGATTCAAGTACTTAATATTGAGCGAAAAGGAGTGAGAGTTGAGAAAAGA

SEQ ID NO: 15546 - protein, 288 aa, Streptococcus agalactiae; identical to SEQ ID NO: 2114

SEQ ID NO: 15547 - protein, 1281 aa, Streptococcus agalactiae
ATGACTATTAAAATAGCTTTATTAGGTTTTGGAACGGTTGCTAAGGGTATTCCATATTTGCTAAAAGAAAATCAACATAAGCTACTTTCTTTAGAAGGCGAAGATATTGTAATTGATAAAGTATTAGTAAGAGATAATGAAAGCCGCCAGCGTTTCATCAATCAGGGATTTACTTATAACTTTGTGACAGAGATAAATACTATTCTTCAAGATCCACAAATTGATATTGTAGTGGAATTAATGGGGGGGATTGAGCCAGCTAAAACTTATTTGAGTCAAGCATTAGGATTTGGTAAACATATTGTGACAGCCAATAAAGATCTCATTGCTTTACACGGAAAAGAGTTGATGGATTTAGCAGACGCTAGAGGTCTAGCTTTATTCTATGAGGGAGCAGTTGCTGGAGGCATTCCTATTTTAAGGATCCTATCGCATTCGTTTGCCTCAGATAAAATGACACGTTTATTAGGAATTCTCAACGGTACCTCCAACTTCATGTTAACAAAAATGTTTGAAGAGGGATGGTCTTATGAACAAGCTCTAAAAAAGGCACAAGAGTTAGGTTATGCCGAAAGTGATCCTACAAATGATGTTGAAGGTATTGATACTGCCTACAAAGCCACTATCTTAAGTCAATTTGGATTTGGTATGCCTATTGATTTTGATGATGTTAATTATAAGGGGATTTCTAGTATTCGCTCAGAGGACGTTGAAGTAGCTCAGGAGATGGGCTTTGCCATTAAGTTGGTAACTGATCTTCGTGAAACTCCAACTGGTATAAGTGTAGACGTTTCTCCGACACTAATTTCTCAAGAGCATCCCTTAGCTGCAGTTAATCATGTGATGAATGCAGTATTCATTGAATCAATAGGGATTGGTCAGTCTCTTTTTTATGGACCAGGTGCGGGACAAAATCCAACAGCAACCTCTGTTTTAGCCGATATCATCGATATTAGTCGTAGTATTCGATCACAGATAAAAATTAAGCCTATGAATACTTATCATTGTCCGTGTAGGTTGTCAATGCAGTCTGATATCTTCAATGAGTACTATCTAGCTATTTCTTTGAGAAATGCTGAAGATAGTGATACACTTGGAAGGTACTTTGAGCAAGAAAATATAGGTTTGAAAAATGTTATTGAAAAAGCATTGGATGATAAACAACAAGAAATCTATGTATTAACAGATGAAGTTAGCCAAGAGAAAATAACTCAATTTATTGAGGAGTTTCCTGAGAGTGGTGTCATTCAGTTAATCAATGTTTTCAAAGTAATAGGAGGG

SEQ ID NO: 15548 - protein, 427 aa, Streptococcus agalactiae
MTIKIALLGFGTVAKGIPYLLKENQHKLLSLEGEDIVIDKVLVRDNESRQRFINQGFTYNFVTEINTILQDPQIDIVVELMGGIEPAKTYLSQALGFGKHIVTANKDLIALHGKELMDLADARGLALFYEGAVAGGIPILRILSHSFASDKMTRLLGILNGTSNFMLTKMFEEGWSYEQALKKAQELGYAESDPTNDVEGIDTAYKATILSQFGFGMPIDFDDVNYKGISSIRSEDVEVAQEMGFAIKLVTDLRETPTGISVDVSPTLISQEHPLAAVNHVMNAVFIESIGIGQSLFYGPGAGQNPTATSVLADIIDISRSIRSQIKIKPMNTYHCPCRLSMQSDIFNEYYLAISLRNAEDSDTLGRYFEQENIGLKNVIEKALDDKQQEIYVLTDEVSQEKITQFIEEFPESGVIQLINVFKVIGG

SEQ ID NO: 15549 - protein, 426 aa, Streptococcus agalactiae
ATGGCACACACACCTACTAGTCATCGTAAACCACGAAAACGTTCCCCATGGTTAGCTATTGCTTCTGTCTTTTTTTTGTTAATAGCTTTAATCGGCATATTTCTATTCTTCAACAATCGTTCAAAGCAAGAAATAAAAACAAAAACGAACGCCTCTAGTCATCGAAAAATTGTCACATCTATCAAAAAAAAGAAATGGGTTAAGCAAAAGACTCCTGTTAAAATACCCATTTTAATGTACCATGCTGTTCATGTTATGGACCCTTCTGAAGCCGCCAGTGCTAACTTAATTGTGGCACCTGACATTTTTGAAAGTCATATAAAACGTCTCAAAAAGGAAGGATATTACTTCTTAGCCCCTAACGAGGCATATCGTGCACTAAACGAAAATGCTTTACCTGAAAAAAAAAGTCATTTGGATTACTTT

SEQ ID NO: 15550 - protein, 142 aa, Streptococcus agalactiae
MAHTPTSHRKPRKRSPWLAIASVFFLLIALIGIFLFFNNRSKQEIKTKTNASSHRKIVTSIKKKKWVKQKTPVKIPILMYHAVHVMDPSEAASANLIVAPDIFESHIKRLKKEGYYFLAPNEAYRALNENALPEKKSHLDYF

SEQ ID NO: 15551 - DNA, 498 bp, Streptococcus agalactiae
atgctttacctgaaaaaaaaagtcatttggattacttttgatgatggaaatgccgatttctacactaaggcataccctatactcaaaaagtacaaggttaaagccactaataatatcatcactggctttgttcaagaaggacgagaatctaacctcaacgttcaacaaatgctagaaatgaagcaaaacggcatgtcattccaaggacatacggttactcaccccaatctttctctcttaactccagaactacaaacccaagaaatgacactatcaaaactgtttttagatcaaaaactctctcaagatactcttgcgattgcttatccatcaggacgctacaatcctacaactttggatattgctagtcaatattataaactagggcttacaacaaacgaaagagttgcaacaaaagataacggtttgctttctcttaatcgagttcgtatcttaccaactactagcgatgatgatttgatcaaaacgattaaccaa

SEQ ID NO: 15552 - protein, 166 aa, Streptococcus agalactiae
MLYLKKKVIWITFDDGNADFYTKAYPILKKYKVKATNNIITGFVQEGRESNLNVQQMLEMKQNGMSFQGHTVTHPNLSLLTPELQTQEMTLSKLFLDQKLSQDTLAIAYPSGRYNPTTLDIASQYYKLGLTTNERVATKDNGLLSLNRVRILPTTSDDDLIKTINQ

SEQ ID NO: 15553 - DNA, 894 bp, Streptococcus agalactiae
ttgggtgttcccaataatgcatttgttcaaattgttattatccttattacaacagctttatttgttatgtcagctttatcaggtttaggaaaaggtgttaaaattttatcgaacttaaatttgattttagcggtagccctcttagctttagttattgtattgggaccaacggttcgtatttttgataccctaacagagtctttaggctcttatttacaaaatttctttggaatgagctttcgtgcagctgcttttgacaatactaaacgttcttggattgataattggacgattttttattgggcgtggtggatttcctggtctccttttgttggagttttcatcgctcgtatttctaaagggcgtagcattcgggagtttttaacggtagttcttttaataccgacattattgagttttgtatggtttgcagcatttggcacattatcaactcaggtacaacaactgggtattaatttgacaaagtttgcaacagaggaagtattgtttgctacttttaatcactacactttaggttggcttttatccactattgctatcattttaattttttcattttttattacatcagcagattctgcaacgtacgttttggctatgttgacagaagatggtaatttaaatccaaaaaatcgaactaaagtaatttgggggctagtgttggcagtgattgctattgtcttactcttgtctggtggtctgttagcgctgcagaacgttttaattattgtcgctctgccattttcattcgtaatgattttgatgatgctagcgctattagtggagcttttccatgagaaaaaagaaatgggcttatcgatttctccagatcgttatccacgtaaaaatgaaccatttaaatcttatgaagaa

SEQ ID NO: 15554 - protein, 298 aa, Streptococcus agalactiae; identical to SEQ ID NO: 2120

SEQ ID NO: 15555 - DNA, 519 bp, Streptococcus agalactiae
gtgtttacaggttcactaattgtatcgcttattttagtcttattaggaattattgttcctcgtggttttcaatcttggacacaaatcttgcgtgaacaggtatctaccaatttcggttggttgtacttgttgttagttacttcaattcttgctttgtgtgtcttttttattatgagtcctcttggacaaatacgtttagggcgacctcattcacgtcctgaatattcaactgtatcatggatagcaatgatgttttcagcaggtatggggattggtttggtcttctacggagcagctgaccccttatcgcattttgctatttcgacacctggcgcacctaaggaatcgcaaacagcattagctgatgcatttcgttttacattttttcactgggggatacatgcttgggcagtatatgcattggttgctttggctctagcttattttggatttcgaaagcaagagaaatacctcttgtctgtcactttaaagcctcttttcggtgataagacagatggt

SEQ ID NO: 15556 - protein, 173 aa, Streptococcus agalactiae
MFTGSLIVSLILVLLGIIVPRGFQSWTQILREQVSTNFGWLYLLLVTSILALCVFFIMSPLGQIRLGRPHSRPEYSTVSWIAMMFSAGMGIGLVFYGAADPLSHFAISTPGAPKESQTALADAFRFTFFHWGIHAWAVYALVALALAYFGFRKQEKYLLSVTLKPLFGDKTDG

SEQ ID NO: 15557 - DNA, 1374 bp, Streptococcus agalactiae
atggcatataaaacaatttatccgtacactaacgaagtattgcatgaattcgataatatcagtgacagtgatctcgaacagtcattagacatagcgcatgccctctacaagacatggcgcaaagaagataatgttgaagaacgccaaaatcaattgcataaagtagcagatttattacgtaaggaccgtgataagtacgctgaagttatgactaaagatatgggaaaacttttcactgaagcacaaggagaagtggacttgtgtgcagacatagctgactattatgctgataatgggcaaaagtttttaaaacctgttccgttagaaagtccaaatggagaggcttactatttgaaacaagctgtcggtgttttacttgctgtcgagccatggaatttcccattttatcagattatgcgtgtatttgcccctaactttatagtgggtaatactatgcttttaaaacatgcttctatttgtcctgcatcagctcaagcatttgaggatttagtccgagaagcaggagctccagaaggagcgtttaaaaatatttttgcttcgtatgatcaagtttcaaaccttatatcagatcctcgtgttgcaggtgtgtgtttaactggttctgagcgtggtggggcatcaatagcagctgaggctggtaaaaatttgaaaaaatcgtctatggaattaggtgggaacgatgcttttcttattttagatgatgctgattttgatttacttagtaaaacaatattctttgcgcgtttatataatgcaggtcaagtatgtacatcttcaaaacgtttcattgttatggctgataagtatgacgaatttgtaaatatggtagttgagacctttaagtctgctaaatggggtgacccaatggattcggaaacaaccttggctccactgtcatctgcaggtgcaaaggatgatgttttaaaacaaattaaattggcggtagaccacggtgctgaggtagtttttggaaatgacactatagatcatccaggaaacttcgtcatgccaactgttttaacgaatatcactaaagcaaatccaatctataatcaagaaattttcggccccgtagcctctatctataaagtggatactgaagaagaagctattgctttagctaatgattctagttatggtttaggaagtactgttttctcttctgatccagaacatgctaaaaaagtggcggctcagattgaaacagggatgacatttattaattcagggtggacatcattaccggaattaccgtttggaggtattaaaaattcaggatatggtcgtgaattgagccaacttggatttgatacctttgtcaacgaacatttggtatttacaccaaatagtgat

SEQ ID NO: 15558 - protein, 458 aa, Streptococcus agalactiae
MAYKTIYPYTNEVLHEFDNISDSDLEQSLDIAHALYKTWRKEDNVEERQNQLHKVADLLRKDRDKYAEVMTKDMGKLFTEAQGEVDLCADIADYYADNGQKFLKPVPLESPNGEAYYLKQAVGVLLAVEPWNFPFYQIMRVFAPNFIVGNTMLLKHASICPASAQAFEDLVREAGAPEGAFKNIFASYDQVSNLISDPRVAGVCLTGSERGGASIAAEAGKNLKKSSMELGGNDAFLILDDADFDLLSKTIFFARLYNAGQVCTSSKRFIVMADKYDEFVNMVVETFKSAKWGDPMDSETTLAPLSSAGAKDDVLKQIKLAVDHGAEVVFGNDTIDHPGNFVMPTVLTNITKANPIYNQEIFGPVASIYKVDTEEEAIALANDSSYGLGSTVFSSDPEHAKKVAAQIETGMTFINSGWTSLPELPFGGIKNSGYGRELSQLGFDTFVNEHLVFTPNSD

SEQ ID NO: 15559 - DNA, 1005 bp, Streptococcus agalactiae
atgttatttaaggaaaaaattcctggactaatattatgctttattattgctataccatcttggttgcttgggctttatctccctttaataggagcaccagtctttgctatcttgattggaataattgttggatccttttatcaaaatcgacaattgtttaataagggtattgcttttacgtctaaatatattttacaaacagcagttgtcttattgggttttggactaaacctcatgcaagtgatgaaagttggtatatcatcgttacccatcattattatgacgatttccatttcattgattattgcttatgttttgcaaaagttatttaagttagataaaacgattgctactttaataggtgttggttcatctatttgtggtggatccgcaattgcagcgactgcaccagttattaatgctaaagatgatgaagtagcacaagctatttcggttatttttttattcaatatcttagcggctttaatttttccaacgctggggaattttattggtctctctgatcacggttttgcattatttgcagggactgctgtcaatgatacctcgtcagttacagcaactgctactgcatgggatgctatcaatcacagcaatactttgggcggagctactattgttaaattgacacgaacattagccatcattccaattacgattgtattatctatttatcatatgaaacaaacgcagaaagaacaatctgtaagtgttactaagatatttccgaagtttgtgctttattttatcttagcttctttgctaacaacgatagttgcttcattaggtttttcgttacgtatctttgagccacttaaggttttatctaaattttttattgttatggcaatgggggcaattggtataaatactaatgtcagcaaactaattaaaactggaggaaaatcaattcttttaggtgcagcgtgttggttaggcattattatagttagtttaacaatgcaagctatccttggaacttgg

SEQ ID NO: 15560 - protein, 335 aa, Streptococcus agalactiae; identical to SEQ ID NO: 6724

SEQ ID NO: 15561 - protein, 174 aa, Streptococcus agalactiae
ATGGTAAAGTACATTCGCTTAACAAGTGTTATTAAAGTATCGCATATCAATAAAAAGGCAAATGCGTTCTATGGTAATATTGTGAAAAATGGTGAAAAAACAGCCTATAAAAAAGAGGGCTCAAAATTGATTTTAGGTAACGAAAAATCATATCCATTTATGAAAGTAACTAAA

SEQ ID NO: 15562 - protein, 58 aa, Streptococcus agalactiae
MVKYIRLTSVIKVSHINKKANAFYGNIVKNGEKTAYKKEGSKLILGNEKSYPFMKVTK

SEQ ID NO: 15563 - protein, 707 aa, Streptococcus agalactiae
ATGGGTTTCAAAACCTATCGTATGTCAATAGCATGGACGCGTATTTTCCAAAGGGTGATGAGCTATATCCAAATGAAGCTGGTCTTCGGTTTTATGAAAATATTTTTAAAGAGTGTCGTAAGTATGGTATTGAACCTTTGGTAACCATCACACATTTTGACTGTCCTATCTACCTTATTAAACATTACGGTGGGTGGCGGAGCCATAAAATGATTGGTTTTTATGAGCGCCTTGTACGAGCTTTATTTACTCGTTTTAAGGGGTTAGTTAAATATTGGTTGACCTTTAACGAAATCAATATGATTTTACACGCTCCTTTTATGGGCGCTGGCTTATATTTTGAAGATGGTGAAAATCAAGAGCAAATTAAATATCAAGCAGCTCACCATGAGTTAGTGGCTTCGGCTATTGCAGTAAAAATTGCTCATGAAGTTGATCCAAATAGTCAAATCGGATGTATGTTAGCTGCAGGTCAATACTATCCAAATACGTGTCATCCACAAGATTATTGGGCTTCGATGCAAAAAAATAGAGAAAATTATTTTTTTATTGATGTGCAAGCGCGTGGCAAATACCCTAATTATGCTAAAAAATATTTTGAGCATTTAGGTATTTCAATTCAAATGACAGCAGAAGATCTTGCTTTGTTAAGAGACTATACGGTTGATTTTATTTCATTTTCTTACTATTCAAGCCGAGTANNNNNT

SEQ ID NO: 15564 - protein, 236 aa, Streptococcus agalactiae
  VARIANT 235, 236: Xaa = Any Amino Acid
MGFKTYRMSIAWTRIFPKGDELYPNEAGLRFYENIFKECRKYGIEPLVTITHFDCPIYLIKHYGGWRSHKMIGFYERLVRALFTRFKGLVKYWLTFNEINMILHAPFMGAGLYFEDGENQEQIKYQAAHHELVASAIAVKIAHEVDPNSQIGCMLAAGQYYPNTCHPQDYWASMQKNRENYFFIDVQARGKYPNYAKKYFEHLGISIQMTAEDLALLRDYTVDFISFSYYSSRVXX

SEQ ID NO: 15565 - protein, 408 aa, Streptococcus agalactiae
ATGCGTAGAGTTTATTCCTTTTTAGGCGGTATTATTCTTGTTATCCTGATCCTCTTTGGTTTAACCACTTACTTAGAAAAGAAGAGTAGTTCAACACCTAACTCAGATAAGTTAGTTATTTATAACTGGGGAGACTATATTGATCCAGCCTTATTAAAAAAATTTACAAAAGAAACTGGAATTGAAGTACAATACGAAACGTTTGACTCTAATGAGGCTATGCACACCAAAATTAAGCAGGGTGGGACGACATATGATATTGCTGTACCTAGTGATTATATGATTGACAAAATGATAAAAGAAAACCTTCTGGTTAAACTTGATCATTCAAAGATAGCTAATTGGGATGCTATTGGAGCTAGGTTTAAAAATTTGAGTTTCGATCCTAAAAATAAATATTCGNNNNNT

SEQ ID NO: 15566 - protein, 136 aa, Streptococcus agalactiae
  VARIANT 135, 136: Xaa = Any Amino Acid
MRRVYSFLGGIILVILILFGLTTYLEKKSSSTPNSDKLVIYNWGDYIDPALLKKFTKETGIEVQYETFDSNEAMHTKIKQGGTTYDIAVPSDYMIDKMIKENLLVKLDHSKIANWDAIGARFKNLSFDPKNKYSXX

SEQ ID NO: 15567 - protein, 204 aa, Streptococcus agalactiae
ATGCAATTGATTTTGGCGTTCTTCAACATTATCTTCTTTGTTACAGGTAATGGCTTTTCAACGCTTTCAGTAGAAATCTATTCACGCGCACGTCGCGGTATATCATTGGAAATTAATGCCTTGTCAACTATTGTCTTTTTATTTAGTATTTTATTGGTAATTGGTTATTACTATATTTCGAAAGAGAAGGGAGAAAAGAATGCG

SEQ ID NO: 15568 - protein, 68 aa, Streptococcus agalactiae
MQLILAFFNIIFFVTGNGFSTLSVEIYSRARRGISLEINALSTIVFLFSILLVIGYYYISKEKGEKNA

SEQ ID NO: 15569 - protein, 174 aa, Streptococcus agalactiae
TTGCATAAAGTAGCAGATTTATTACGTAAGGACCGTGATAAGTACGCTGAAGTTATGACTAAAGATATGGGAAAACTTTTCACTGAAGCACAAGGAGAAGTGGACTTGTGTGCAGACATAGCTGACTATTATGCTGATAATGGGCAAAAGTTTTTAAAACCTGGNNNNNTTAAT

SEQ ID NO: 15570 - protein, 58 aa, Streptococcus agalactiae
  VARIANT 56, 57: Xaa = Any Amino Acid
MHKVADLLRKDRDKYAEVMTKDMGKLFTEAQGEVDLCADIADYYADNGQKFLKPGXXN

SEQ ID NO: 15571 - DNA, 363 bp, Streptococcus agalactiae
  misc_feature 354, 355, 356, 357, 358: n = A,T,C or G
atgcgtagagtttattcctttttaggcggtattattcttgttatcctgatcctctttggtttaaccacttacttagaaaagaagagtagttcaacacctaactcagataagttagttatttataactggggagactatattgatccagccttattaaaaaaatttacaaaagaaactggaattgaagtacaatacgaaacgtttgactctaatgaggctatgcacaccaaaattaagcagggtgggacgacatatgatattgctgtacctagtgattatatgattgacaaaatgataaaagaaaaccttctggttaaacttgatcattcaaagatagctaattgggatgctatnnnnnttaat

SEQ ID NO: 15572 - protein, 121 aa, Streptococcus agalactiae
  VARIANT 118, 119, 120: Xaa = Any Amino Acid
MRRVYSFLGGIILVILILFGLTTYLEKKSSSTPNSDKLVIYNWGDYIDPALLKKFTKETGIEVQYETFDSNEAMHTKIKQGGTTYDIAVPSDYMIDKMIKENLLVKLDHSKIANWDAXXXN

SEQ ID NO: 15573 - DNA, 762 bp, Streptococcus agalactiae
  misc_feature 753, 754, 755, 756, 757: n = A,T,C or G
ttgctagaggcgagtacaggcgatatttacttagatgggaaacgcatcaatgatgttcccactaataaacgggatgttcataccgttttccaaaactatgctttgtttccacatatgacggtttttgaaaacgttgcttttccattaaagttgaaaaaaatggataagaaagaaattcaaaaacgtgttcaagaaactctaaaaatggttcgtttagaagggtttgaaaagcgagctattcaaaaattatcaggaggacaacgccagcgtgttgcgatagcgcgtgctatcatcaatcaacctaaagtagtcttactagatgaacccttatcagcattggatttgaaattgcgtacagagatgcaatatgaattgcgcgaactgcaacaacgtttaggaattacctttgtttttgtcacacatgatcaagaagaagcgttggcaatgagtgattggattttcgtcatgaatgaaggtgaaattgttcaatcaggaacaccagtagatatctacgatgaacctatcaatcattttgtagcaacttttataggtgaatcaaatatcttatctggcaagatgattgaggattatttggttgaatttaacggtaagcgctttgaggctgttgatggcggtatgcgccctaatgaatcagtccaagtagttattcgtccagaagatcttcaaattaccctacccgatgaaggaaaacttcaagttaaagtggacacacaaaaattcgaggtgtccacnnnnnttaat

SEQ ID NO: 15574 - protein, 254 aa, Streptococcus agalactiae
  VARIANT 252, 253: Xaa = Any Amino Acid
MLEASTGDIYLDGKRINDVPTNKRDVHTVFQNYALFPHMTVFENVAFPLKLKKMDKKEIQKRVQETLKMVRLEGFEKRAIQKLSGGQRQRVAIARAIINQPKVVLLDEPLSALDLKLRTEMQYELRELQQRLGITFVFVTHDQEEALAMSDWIFVMNEGEIVQSGTPVDIYDEPINHFVATFIGESNILSGKMIEDYLVEFNGKRFEAVDGGMRPNESVQVVIRPEDLQITLPDEGKLQVKVDTQKFEVSTXXN

SEQ ID NO: 15575 - DNA, 1341 bp, Streptococcus agalactiae
  misc_feature 375: n = A,T,C or G
atgtctaggaaaacatttaaacgtatactatcgattggagtttgcacgctcgtactatcgatgagtctttattacactgaaaaagcccacgctattgctggtcctagtgaccgccaatacgtagaaaacccaaatcctcacattattgtaaatgttacaggtactgatcaaaacggaaatagcattttaccgcattatatcgaagtcaatgtaaagatgggacaaactttaagtaaagaagaaattctagattatattgctcgaaatttaaactctagtgttggaggagaaagtaaaaacgttcaatacagcaacatcgagtttaaggaaagtgcttatctgaagcgtcaattagatgatggcaagacagaaganatagcaattgataacgacggtgttactgtacctaaagacggtccaaacaaattttggattgacgttccagtaacttgtactgttactcctatcgtaacagaaacacatgaagttcgatgggggactccagtcgctatatcacaccgtatttactttgttgaagaatcttctggaaaagttttagatgaatacacaaatctacacactgctgattcggaacttaacggttatcgtgktggagattatatcacagactatgcactttctaagtctgcttacgaagcttttttaaactctcgtttagataaagaaggttacaaacttcaacatcgtattagcacgaatgtacgacaaaaccttcaaattaataaattgattttcaattatgactttaatgaggaaaatatttactaccaaatcgggaatatccgtccactattaagtcgctcatcagctgaagtagaatctgacatcattacagaacgctactatgtttctaaaaatgctaaaagtttagcacgtacagaatcaaccatttcgattaaaatggttgatgccaaaactgaacaaccgctatttaaccacacattaactggttatcaattggtaactgtctcccatgtctataacagactctttgaagaaaatcttatcccmactacaaaatcaggagaaagatattttattcaaaatatgaaaaaaacagctgaacaagaatatactgkttatctttcagaaacaccttattctaaagagaacgctcccgtaatttcttatgatgcaagacctgttgatysggattatcactcaggcgcttcaggatcacttgaaaatcagcctaacatctatactgaagaagattcaactgaatttttgggtaataaaccacaagcagcttgttatccaaacaaacaatttgcttgcgaaaatactgactctaaatacaactatagctatttagaaaaa

SEQ ID NO: 15576 - protein, 447 aa, Streptococcus agalactiae
  VARIANT 125, 204, 367, 391: Xaa = Any Amino Acid
MSRKTFKRILSIGVCTLVLSMSLYYTEKAHAIAGPSDRQYVENPNPHIIVNVTGTDQNGNSILPHYIEVNVKMGQTLSKEEILDYIARNLNSSVGGESKNVQYSNIEFKESAYLKRQLDDGKTEXIAIDNDGVTVPKDGPNKFWIDVPVTCTVTPIVTETHEVRWGTPVAISHRIYFVEESSGKVLDEYTNLHTADSELNGYRXGDYITDYALSKSAYEAFLNSRLDKEGYKLQHRISTNVRQNLQINKLIFNYDFNEENIYYQIGNIRPLLSRSSAEVESDIITERYYVSKNAKSLARTESTISIKMVDAKTEQPLFNHTLTGYQLVTVSHVYNRLFEENLIPTTKSGERYFIQNMKKTAEQEYTXYLSETPYSKENAPVISYDARPVDXDYHSGASGSLENQPNIYTEEDSTEFLGNKPQAACYPNKQFACENTDSKYNYSYLEK

SEQ ID NO: 15577 - DNA, 531 bp, Streptococcus agalactiae
atgaaagaaaagaaaaatttggggataaaattaataaaatccctatatggtattaatggcccattcgatgaatacagagaacaaaaaatcaattaccttggaaatctattatttgcaaccactagtctctatcacattttatcctctatcatcgcctggttcacggtaagtaaatatcccacagagactgcatgtactctcctagctttaacattctttctatatttttgtatttttctaattgttattccctcttatctcaacagtcatgatttaataacgccactagaagtctcaaaaaatgactatccagtagcaataaagaaaaacaaacaaaaatttatcaaaatcgggatattttatactgtcatccagtggcttatcttgggtttaacaactaacaataacactccgctgattgtatcactattttctttaaaagttattttgtctagtattatgtccggtgtagcttacaatggagttatgtatctaatatttaaaaacaatgttgatattgaaaaagatgaa

SEQ ID NO: 15578 - protein, 177 aa, Streptococcus agalactiae
MKEKKNLGIKLIKSLYGINGPFDEYREQKINYLGNLLFATTSLYHILSSIIAWFTVSKYPTETACTLLALTFFLYFCIFLIVIPSYLNSHDLITPLEVSKNDYPVAIKKNKQKFIKIGIFYTVIQWLILGLTTNNNTPLIVSLFSLKVILSSIMSGVAYNGVMYLIFKNNVDIEKDE

SEQ ID NO: 15579 - DNA, 492 bp, Streptococcus agalactiae
atgacgacatttcttggaaatcctgttacttttacaggaaaacagctacaagttggggatattgcaaaagattttttactaatagctacagacttatctcaaaaatctttaaaagattttgaagggaaaaagaaagttattagcgttgttccttctattgatacaggtatttgttcaaaacaaacacgtacttttaatgaggaattatcagagctagataacacagtggttattactgtttctatggaccttccatttgctcagaagcgttggtgcagcgctaaaggtcttgataacgtgattttattatcagatttttatgatcattcgtttggtcaagagtacgctcttttgatgaatgagtggcatttgttaacgcgtgcagttcttattttggatgagcataataaggtgacttacaccgaatacgttgacaatgttaattcagatgttgactacgaagcggcgattaatgctgcaaagatattacca

SEQ ID NO: 15580 - protein, 164 aa, Streptococcus agalactiae
MTTFLGNPVTFTGKQLQVGDIAKDFLLIATDLSQKSLKDFEGKKKVISVVPSIDTGICSKQTRTFNEELSELDNTVVITVSMDLPFAQKRWCSAKGLDNVILLSDFYDHSFGQEYALLMNEWHLLTRAVLILDEHNKVTYTEYVDNVNSDVDYEAAINAAKILP

SEQ ID NO: 15581 - protein, 657 aa, Streptococcus agalactiae
ATGGATTTATTCCTAAGTTTAGAGAGGAAATTTAAAGCTGCAAGTGACAAAGAAGTTTCTAAGCAACAGGAGGCTTATTTACGCCATCATTTTAAGTGCTATGGTATTAAATCACCTGAGCGACGTATGCTCTACAAAGAGCTTATAAAGGCCGCTAAAAGACAAGCAAAAATTGATTGGCAATTGCTTGATAAATGTTGGCAAAGTGACTATCGTGAATATCATCATTTTGTACTTGATTATCTATTAGCTATGAGTCAATTTCTCACCTATAATGATTGCTCTAGACTAGAGTTTTACGCTCGTCATCAACAGTGGTGGGATAGTATTGATGTTCTGACTAAGATTTTTGGGAACTTATCCTTAAAAGATGACAAGGTTATGAATTTACTGTCAGAATGGTCACTTGATCAAGATTTTTGGATGAGGCGACTAGCTATTGAGCATCAACTAGGATTTAAAGAAAAAACAAATACTGATATTTTGTCACTTTTTATTTTAAGAAATACAGGAAGTCAAGAATTTTTTATCAATAAGGCGATTGGCTGGGCGCTTAGGGATTATTCAAAGTATAATAAAGTATGGGTAAAGGACTTTATCAGTAATCATTATGATGAGTTGTCGACTTTGAGCATACGCGAAGGAAGTAAGTACCTC

SEQ ID NO: 15582 - protein, 219 aa, Streptococcus agalactiae
MDLFLSLERKFKAASDKEVSKQQEAYLRHHFKCYGIKSPERRMLYKELIKAAKRQAKIDWQLLDKCWQSDYREYHHFVLDYLLAMSQFLTYNDCSRLEFYARHQQWWDSIDVLTKIFGNLSLKDDKVMNLLSEWSLDQDFWMRRLAIEHQLGFKEKTNTDILSLFILRNTGSQEFFINKAIGWALRDYSKYNKVWVKDFISNHYDELSTLSIREGSKYL

SEQ ID NO: 15583 - protein, 192 aa, Streptococcus agalactiae
ATGTCAGAATTCGTGAGGAAATACAGATATCCACTAGGAGGTGCAGTTATTGGGCTCGTTTTAGCTGCAATGATTGTAACCATTGGATTCTTTAAAACAATTCTTGCTCTTGTTATCATTGTGCTAGGTGCTTATGCTGGGCTTTATGTGCAAAGAACAGGTATGCTTGACCAATTCTTTAATAAGAGAAAA

SEQ ID NO: 15584 - protein, 64 aa, Streptococcus agalactiae; identical to SEQ ID NO: 6754

SEQ ID NO: 15585 - protein, 578 aa, Streptococcus agalactiae
ATGTCAAAAGGACTAAAAAGTTTATATACTTTGCTAGGTCTAATCTCCCTTACCCTACTAGGATTTGTAGCTGTTATCAGTAAACAACACATTTATCTACCATCTTTTAATTGGTTAGATTGGGATTTTAATTTGCCATCACCGATTGACGTTGGTATGTATCATTATTTCTTTTGGGGAGCATTAGTGCTGTTTGTAATCGTTTTACTGGCTATATTGGTAGTTCTGTTTTATCCAAGACGATACACAGAGTATAAACTGGCTGATAAAACTGGTAAATTGATGTTAAAAAAATCTGCAATAGAGGGATTTGTTAAAACAGAAGTATTAAAAACTGGTTTGATGAAATCTCCTAGTGTGACAGCTCATTTATATAAGAAAAAAGTGAAAGTTGATGTTAAAGGTCTTTTAACTTCTCGTACAAATGTACCGGAACAACTTGAACATATTCAAAGTGATGTTGAACTTGGCTTAAAAGAATTCTTTGGGTTGGAAAAGAAAATGACACTAGAGTATTTGTTAAGCAAGTTGAAGAAGAAAATGTTGGAAATGCTAAGACGAATAAAAGTCGTGTAGAA

SEQ ID NO: 15586 - protein, 193 aa, Streptococcus agalactiae; identical to SEQ ID NO: 11042

SEQ ID NO: 15587 - protein, 246 aa, Streptococcus agalactiae
ATGAGTTTAATTTGGTCATTAATCGTAGGTGCTATTATCGGTGCTATTGCAGGGGCTGTTACTAACAAAGGTGGTTCAATGGGTTGGATAGCTAACATCTTAGCTGGTTTAGTTGGTTCATTTGTTGGTCAAAGTTTACTAGGAACATGGGGGCCTAAATTAGCAGGTATGGCTTTGATTCCTTCAATCGTAGGTGCGATTATTGTTGTCATTGTTACTTCATTTGTACTAGGTAAAATGAATAAC

SEQ ID NO: 15588 - protein, 82 aa, Streptococcus agalactiae; identical to SEQ ID NO: 6758

SEQ ID NO: 15589 - protein, 336 aa, Streptococcus agalactiae
TTGCCGAGTGGTCACTTTAGAAACTCTTGTTATTTAGTTAAGAACAAAATAAGTTTGTACACTGAGATGTACTTAGGAAGAAAGGTATTTATCATGGGGTTAATTTGGTCATTAATCGTTGGTGCTATTATTGGTGCTATTGCAGGAGCAATCACTAACAAAGGTGGTTCAATGGGTTGGATAGCTAACATCTTAGCTGGTTTAGTTGGTTCATTTGTTGGTCAAAGTTTACTAGGAACATGGGGGCCTAAGTTAGCAGATATGGCTTTGATTCCTTCAATCGTAGGTGCGATTATCGTTATCATTGTTACTTCATTTGTATTAGGCAAAAAATCA

SEQ ID NO: 15590 - protein, 112 aa, Streptococcus agalactiae
MPSGHFRNSCYLVKNKISLYTEMYLGRKVFIMGLIWSLIVGAIIGAIAGAITNKGGSMGWIANILAGLVGSFVGQSLLGTWGPKLADMALIPSIVGAIIVIIVTSFVLGKKS

SEQ ID NO: 15591 - DNA, 2277 bp, Streptococcus agalactiae
atgaatcctttaataattggaatgaatgataaacaagcagaagcggtacaaacgacagacggaccgcttttgattatggcaggagctggctctggaaaaacacgtgttctgactcatcgtattgcttatttaatagatgaaaaatatgttaatccttggaatattttagcgattacttttactaataaagcagcgcgtgaaatgcgtgaacgtgctatcgccttgaatccagctacccaagatactttgattgcaacttttcatagtatgtgtgttcgtattttacgtcgtgaagctgattatattggatataatcgtaactttacaatcgttgatccaggtgagcagcgtactttaatgaagcgaatcattaagcaattaaatttggacacaaaaaagtggaatgaacgttcaattttaggtacaatctctaatgctaaaaatgaccttcttgatgaaattgcatatgagaagcaagccggagatatgtatacacaggtaattgctaaatgctataaagcttatcaagaggaattacgtagaagtgaggccatggatttcgatgacttgattatgatgacacttcgattatttgatcagaataaagatgttttggcctattaccaacagaggtatcaatatatccatgtagacgagtatcaagatactaaccacgctcaataccaattagttaagttattagcttcgcgtttcaaaaatatttgtgttgttggtgatgccgatcaatccatttatggatggcgtggagctgatatgcaaaatattcttgattttgaaaaggactatccgcaagccaaagttgtattattagaagaaaattatcgatcaactaagaaaatacttcaagctgctaataatgtgatcaatcataataaaaatcgccgtcctaaaaaattatggactcaaaatgatgaaggtgagcaaattgtatatcatagagctaacaacgagcaagaagaagccgtttttgtagcgtcaactattgataacatcgttcgagaacaaggaaaaaatttcaaagattttgccgttctttatcgtacgaatgcgcaatctcgtactattgaggaagcacttttaaaatccaatattccatatacaatggttggtggaacaaaattctatagtcgtaaagaaattcgagatgttattgcttatctcaatatccttgcaaatacttctgataatatttcttttgagcggattgtaaatgaacctaaaagaggggtggggccaggaactttagaaaaaatacggtcatttgcctatgaacagaacatgtctcttcttgattcctcttcaaatgtcatgatatcgcccttaaaagggaaggctgctcaagctgtttgggatttagctaatctgattttgactctacgtagtaagctagatagtttaactgtaacggagattacagaaaacctactggataagacaggatatctagaagcacttcaagttcaaaatacattagaaagtcaagcgcgtattgaaaatattgaagaattcttatcagtgactaaaaattttgacgataacccagagattacagtagagggtgaaactggtttagatcgtctatcgcgttttttaaatgatttagctttaatagcagatactgatgatagcgccactgaaacggctgaagtcactttaatgacattacatgctgccaagggtctagaatttccagttgttttcttaatcggtatggaagaaggagtatttcctttatcgcgtgcaatagaggatgctgatgaattagaagaagagcgtcgtttagcttatgtcgggattacgagagcagaacaaatacttttccttaccaatgctaatacccgtactttatttggtaaaactagttataatagaccaacccgttttatacgtgagattgatgatgagctgatacaacatcaagggttggctcgaccagttaattcttcatttggtgtgaaatattcaaaagaacagcctacacaatttggtcaaggaatgagtcttcaacaagcgcttcaggcacgtaaaagtaattcacaacctcaagtaactgcccaactccaggctcttaacgcgaacaatagccatgagacatcatgggagattggtgatgttgcaactcataaaaaatggggggacggtacggtgcttgaagtttcaggtagcggaaagactcaagagttaaaaataaattttccaggtattgggttaaagaaattattagcgagtgtcgctcctattagtaaaaaggaaaac

SEQ ID NO: 15592 - protein, 759 aa, Streptococcus agalactiae
MNPLIIGMNDKQAEAVQTTDGPLLIMAGAGSGKTRVLTHRIAYLIDEKYVNPWNILAITFTNKAAREMRERAIALNPATQDTLIATFHSMCVRILRREADYIGYNRNFTIVDPGEQRTLMKRIIKQLNLDTKKWNERSILGTISNAKNDLLDEIAYEKQAGDMYTQVIAKCYKAYQEELRRSEAMDFDDLIMMTLRLFDQNKDVLAYYQQRYQYIHVDEYQDTNHAQYQLVKLLASRFKNICVVGDADQSIYGWRGADMQNILDFEKDYPQAKVVLLEENYRSTKKILQAANNVINHNKNRRPKKLWTQNDEGEQIVYHRANNEQEEAVFVASTIDNIVREQGKNFKDFAVLYRTNAQSRTIEEALLKSNIPYTMVGGTKFYSRKEIRDVIAYLNILANTSDNISFERIVNEPKRGVGPGTLEKIRSFAYEQNMSLLDSSSNVMISPLKGKAAQAVWDLANLILTLRSKLDSLTVTEITENLLDKTGYLEALQVQNTLESQARIENIEEFLSVTKNFDDNPEITVEGETGLDRLSRFLNDLALIADTDDSATETAEVTLMTLHAAKGLEFPVVFLIGMEEGVFPLSRAIEDADELEEERRLAYVGITRAEQILFLTNANTRTLFGKTSYNRPTRFIREIDDELIQHQGLARPVNSSFGVKYSKEQPTQFGQGMSLQQALQARKSNSQPQVTAQLQALNANNSHETSWEIGDVATHKKWGDGTVLEVSGSGKTQELKINFPGIGLKKLLASVAPISKKEN

SEQ ID NO: 15593 - DNA, 384 bp, Streptococcus agalactiae
atgaaattcaatttagaacaagtaaaagtatttgagaattacgaaattgaaaactgggaagaaggtcaagttaccttaacaacgaaggtcgttgactcttcgctcaactattatggtaatgctcatggtggttatttgtttacactgtgtgatcaagtcagtggtttagttgctatttcaacaggatatgaagcggtaactctacaatcaaatatcaactatttgagggcaggccgattagatgatctgcttactgtcatcggtacttgtgttcataatggtcgtactacaaaagtcgttgatgttcacattaaaaatcagaaagacgaaatggttacaactgctatttttacaatgtttgtaactggagagagaaaagagaag

SEQ ID NO: 15594 - protein, 128 aa, Streptococcus agalactiae; identical to SEQ ID NO: 6764

SEQ ID NO: 15595 - DNA, 1347 bp, Streptococcus agalactiae
atgcccaagaggactagtttagatatgactttaaatgctaaaggtgaaagtaatcaaattctagtagataaggaagtacattctactaacttattactagatatcgatgaaaaaccagaattatttcaaggtttgcttttaagttttcaacatgtttttgccatgtttggagctacgatattagttccgcttattttagggatgcctgtatcagtggctttatttgcttctggttgcggaacgctcatttatcaagttgcgacaaaatttaaagtccctgkttatctaggctcatcatttgcttatattacagctatggcattagccatgaaacaaatgcatggcgatatttcggctgctcaaacaggtattctttttgtaggtctaatctatgtcgttgtggcgacggttattaagttcgtaggaaattcatgggttgataagattttgccaccaataatcattggacctatgattattgttattggtttaggtttggcaaactctgctgtaactaatgcaggttttgtcgctaaaggtgattggcgtaaaatgctagttgctgttgttacattcttgattgcagcttttatcaatactaaagggaaaggttttatcaagattattccatttttatttgcaattattggaggttatattttatcaatcattcttggcttggtagatttatctccagttgaaaaagctgcctggtttgaattaccaaaattctatttaccgtttaagacaggtttatttcacagttataaactttactttggaccagaaatgcttgcaattcttccaatctcaattgtaacgattgctgaaaatatcggtgatcatacagttttaggtcagatttgtgggcgtaactttctaaaaaaaccaggtttaaatcgtcttttaattggagatggtttagcaaccgcattttctgctcttataggagggccagctgaaactacttatggtgaaaatacaggtgttattggcatgacgcgtatagcttctgtaacggttattcgtaatgcagcttttattgcaatcgctttttcattctttggtaaatttacagctttgatctctacaattcctagtgcagtacttggtggaatggctatattactttatggtgttattgcaagtaatggattaaaagtgttgattgaaaatcgtgtcaattttgctgaggttcgtaatctgattattgccagttccatgttagttttaggcctcggtggagcagtccttgatctaggtgctctaactttatcaggaacagcattaagtgctatagtgggtattatattaaatttaatattgccaaaagaaagcatgaaatca

SEQ ID NO: 15596 - protein, 449 aa, Streptococcus agalactiae
  VARIANT 94: Xaa = Any Amino Acid
MPKRTSLDMTLNAKGESNQILVDKEVHSTNLLLDIDEKPELFQGLLLSFQHVFAMFGATILVPLILGMPVSVALFASGCGTLIYQVATKFKVPXYLGSSFAYITAMALAMKQMHGDISAAQTGILFVGLIYVVVATVIKFVGNSWVDKILPPIIIGPMIIVIGLGLANSAVTNAGFVAKGDWRKMLVAVVTFLIAAFINTKGKGFIKIIPFLFAIIGGYILSIILGLVDLSPVEKAAWFELPKFYLPFKTGLFHSYKLYFGPEMLAILPISIVTIAENIGDHTVLGQICGRNFLKKPGLNRLLIGDGLATAFSALIGGPAETTYGENTGVIGMTRIASVTVIRNAAFIAIAFSFFGKFTALISTIPSAVLGGMAILLYGVIASNGLKVLIENRVNFAEVRNLIIASSMLVLGLGGAVLDLGALTLSGTALSAIVGIILNLILPKESMKS

SEQ ID NO: 15597 - DNA, 681 bp, Streptococcus agalactiae
atgctaacactttttactcatatcaatagcttcgtttggggtccacctttacttgctttattagtcggaacaggtatttacctatcatttcgcttaggttttgttcaattgagacaactttctagagctttcaaattgattttccgagaagataatggacaaggagatatttcaagttatgctgctcttgcaactgctcttgctgcaacggtagggacaggtaatatcgttggtgtggctacggctattaaatctggaggaccaggagctttgttttggatgtgggtagccgccttttttggaatggcaacaaaatacgcagaaggattattagctatcaaatatcgcacaaaagatactaatggagaaatttctgggggaccaatgtactacattgtcaatggaatgggacaaaaatggaaaccattagcagtctttttttctgcagcaggtatcttagtagctcttttaggaatagggacattcactcaagtcaatgcaattgcctcttctcttgagcatactttcaaaatatcaactagatttaccagcctcattcttgctgttatagaattatttattataatttggaggtataaaatctatttcaaaagtttcagaaaaaatagtgccttttatggctataagctatattttagcaactctgattattattgcagt

SEQ ID NO: 15598 - protein, 227 aa, Streptococcus agalactiae
MLTLFTHINSFVWGPPLLALLVGTGIYLSFRLGFVQLRQLSRAFKLIFREDNGQGDISSYAALATALAATVGTGNIVGVATAIKSGGPGALFWMWVAAFFGMATKYAEGLLAIKYRTKDTNGEISGGPMYYIVNGMGQKWKPLAVFFSAAGILVALLGIGTFTQVNAIASSLEHTFKISTRFTSLILAVIELFIIIWRYKIYFKSFRKNSAFYGYKLYFSNSDYYCS

SEQ ID NO: 15599 - DNA, 162 bp, Streptococcus agalactiae
  misc_feature 149, 150, 151, 152, 153: n = A,T,C or G
atggctataagctatattttagcaactctgattattattgcagttaattacaataagattccacatactttcccactcatctttagcggtgctttttctgggacagcagcccattggtggtttttctggagctatcgtttaagaacaannnnnttaattaat

SEQ ID NO: 15600 - protein, 54 aa, Streptococcus agalactiae
  VARIANT 50, 51: Xaa = Any Amino Acid
MAISYILATLIIIAVNYNKIPHTFPLIFSGAFSGTAAHWWFFWSYRLRTXXLIN

SEQ ID NO: 15601 - protein, 514 aa, Streptococcus agalactiae
TTGGGTTCTGCTCCAATAGCTGCAGCAGCAGCTAAAACAAAAGAACCTGTTGAACAAGGGCTTATTTCAATGACAGGAACCTTCATTGACACTATTGTTATTTGTACTTTGACAGGGATTGCAATTTTAGTTACAGGAAAATGGCTAGAATTTGATTTACAGGGTGCTCCGTTAACACAAGCATCTTTTAATACCGTATTTGGCTCACTAGGTAGTTTTGCCCTAACCTTCTGCCTTGTCTTATTTGCTTTTACTACTATTTTAGGATGGAGCTACTACGGAGAGCGTTGCTTTGAATATCTATTGGGGACTAAATTTATTAACGCTTATCGCATTATTTTTGTCATTATGGTCGGCTTAGGTGGTTTCTTACAGCTCGATCTCATTTGGGTTATCGCTGATATCGTTAATGGTTTAATGGCTTTACCAAATCTAATAGCTCTCCTAGCTTTGTCACCAATTATTGTTAAAGAACACAGAAATATTTTTCAGAGACTAAAAATATCACTAAGCC

SEQ ID NO: 15602 - protein, 172 aa, Streptococcus agalactiae
  VARIANT 159: Xaa = Any Amino Acid
MGSAPIAAAAAKTKEPVEQGLISMTGTFIDTIVICTLTGIAILVTGKWLEFDLQGAPLTQASFNTVFGSLGSFALTFCLVLFAFTTILGWSYYGERCFEYLLGTKFINAYRIIFVIMVGLGGFLQLDLIWVIADIVNGLMALPNLIALLALSPIIVKEXQKYFSETKNITKP

SEQ ID NO: 15603 - protein, 1233 aa, Streptococcus agalactiae
ATGGCAACTTCTACTGAAAACTTACAACTTGCAAAAAGAGGGCCTATTATTAGTATCATTGCCTATATAACACTGGCAGTCGCTAAATTAGCTGCAGGTTATTGGTTTGATGCTACTTCACTTGTAGCAGATGGATTTAATAACTTATCTGATATCTTAGGAAATGTAGCACTCTTAATTGGTTTACACTTGGCTAGTCAACCAGCCGACTCAAACCATCGTTTTGGTCACTGGAAAATTGAAGATTTAGCAAGCCTGATTACCTCTTTTATCATGTTTGTCGTAGGTATTCAAGTTTTTATTCAAACTGTCACTAAGATTATTAATAATACTGATACTAACATTGATCCTCTAGGTGCTATAGTAGGTGCTATATCTGCTCTTGTTATGCTTGGCGTTTGTTTCTATAATAAACAATTATCTCAAAGAGTAAAGTCTAGCGCTCTGGTTGCAGCTTCTAAAGATAACCTTTCTGATGCTGTGACATCTATCGGCACATCTATTGCTATCATTGCGGCTTCTCTAAATTTTCCTATTATTGATCGTTTAGCTGCTATCATTATTACTTATTTTATTCTTAAAACAGCTTATGATATTTTTATAGAATCTGCTTTCAGCTTATCGGATGGTTTCGATGATTATCAATTAAAACAATACGAAAAAGCTATATTAACAATTCCTAAAATATCCGCTGTAAAATCTCAACGTGGACGTACTTACGGTAGTAATATTTACCTTGATATTGTTCTCGAAATGAACCCTGATCTCTCAGTCTTTGAAAGTCATGCCATTACCGAAAAAGTGGAAAAACTACTCAGTGATAAATTTTCTGTATATGACATAGATATTCATGTAGAACCCGCTTCTATCCCAGAAGACGAAATTTTCGATAATGTTTACCAAAAATTATACAAAAACGAAAAAATCATCCTAGCAAAAATCCCCGGTTATGAGACTTTTATTAGCCCTGACTTTTATATGATTAATGAAAAGGGAAATATTATCACTTCTGACATGCTTACTAATGCTACAAATCATTCATTGGCAAGCAACTTTAAATATTTCAATGTAAAATCAATTAGTCAAAAAACAAAACTTGTGTCTTATGAATTGGAAGGTAAACGACATACTAGTATTTGGCGCCGTAATGAAAAATGGTTCTTAATCTACCATCAAATAACTGCCAAGTCAAGTCCGTATAAAACGAGACGATATCAAATCACTTCCCTTGAT

SEQ ID NO: 15604 - protein, 411 aa, Streptococcus agalactiae
MATSTENLQLAKRGPIISIIAYITLAVAKLAAGYWFDATSLVADGFNNLSDILGNVALLIGLHLASQPADSNHRFGHWKIEDLASLITSFIMFVVGIQVFIQTVTKIINNTDTNIDPLGAIVGAISALVMLGVCFYNKQLSQRVKSSALVAASKDNLSDAVTSIGTSIAIIAASLNFPIIDRLAAIIITYFILKTAYDIFIESAFSLSDGFDDYQLKQYEKAILTIPKISAVKSQRGRTYGSNIYLDIVLEMNPDLSVFESHAITEKVEKLLSDKFSVYDIDIHVEPASIPEDEIFDNVYQKLYKNEKIILAKIPGYETFISPDFYMINEKGNIITSDMLTNATNHSLASNFKYFNVKSISQKTKLVSYELEGKRHTSIWRRNEKWFLIYHQITAKSSPYKTRRYQITSLD

SEQ ID NO: 15605 - protein, 390 aa, Streptococcus agalactiae
ATGAAATTATACGTTCAATTAATGGTTATTTTAACCTTTTCATTCGCTGGTGAGGTTCTATCTACTATATTCAACTTACCTATACCAGGTAGTATTATTGGATTAATATTACTATTCCTAGCGTTAAAATACAAAATCATCAGGCTCAGGCATATTGATACTGTGGGGAATTTTCTATTAGCAAATATGACCATTTTATTTTTACCACCAGCAGTTGGACTGATGGAGCACTTTCAAGACATAAAGCCCTATCTTTTTGGGATAGCTATCATTATCTTAGGAGCGCTATTTCTCAATATTCTAACTATTGGACTGGTATCCCAATGGATCAAAAAGAGATATGAAGGAGATTATCCAGAAATTGGAGGTAAAAATGGCAACTTTAACGAA

SEQ ID NO: 15606 - protein, 130 aa, Streptococcus agalactiae
MKLYVQLMVILTFSFAGEVLSTIFNLPIPGSIIGLILLFLALKYKIIRLRHIDTVGNFLLANMTILFLPPAVGLMEHFQDIKPYLFGIAIIILGALFLNILTIGLVSQWIKKRYEGDYPEIGGKNGNFNE

SEQ ID NO: 15607 - protein, 691 aa, Streptococcus agalactiae
ATGGCAACTTTAACGAATAACCCTATCTTTGGTATTATGTTAACCGTATGGGCGTATTACATTGGCATAAGGATTTTTAGAAAATATCCTTCCCCTGCAACAACTCCACTTTTTGGCGACTATTTTATTAATTGCTTTTTTAAAATTAACACATATCTCCTATAAAGATTACTACAATGGTGGTTCATTTCTAACGATGTTAATTACGCCTTCAACGGTTGTATTGGCTATTCCTCTCTATAGAACCTTTCATTTAATGAAGCATCACATTAAAAGTATTAGCATTAGCATCATCTTAGCTTCTGTTATCAACACAGTTTTTACCGCAATAGTTGCTAAGTTTTTTGGTATGAAATATTTCTTAGCAATCTCACTTTTCCCAAAGTCCGTAACTACAGCTATGGCCGTTGGAATTACAAGTAAAGCAGGTGGATTAGCTACTATCACTCTGGTCGTAGTTGTTATTACAGGCATCTTAACAAGCGTTTTGGGGCCTATTTTTCTAAAATTATTAAAAATAGAAGATCCTGTTGCTATAGGGCTCGCGCTAGGAGGAACTGGGCATGCTATAGGAACTGGACAAGCCTTAAAATATGGCCAAGTTCAAGGCGCCATGGCTGGACTAGCAATTGGTATCACAGGAATTTGCTATGTTATTGTCAGTCCTTTAGTTGCAGGCTTAATATTGAAA

SEQ ID NO: 15608 - protein, 231 aa, Streptococcus agalactiae
MATLTNNPIFGIMLTVWAYYIGIRIFRKYPSPATTPLLLATILLIAFLKLTHISYKDYYNGGSFLTMLITPSTVVLAIPLYRTFHLMKHHIKSISISIILASVINTVFTAIVAKFFGMKYFLAISLFPKSVTTAMAVGITSKAGGLATITLVVVVITGILTSVLGPIFLKLLKIEDPVAIGLALGGTGHAIGTGQALKYGQVQGAMAGLAIGITGICYVIVSPLVAGLILK

SEQ ID NO: 15609 - protein, 465 aa, Streptococcus agalactiae
TTGAAATTTAATAAAGTAAAGTTAGGGGTTAAAGCAAATAACTTTAAAGGAGGCACTAGTCTCGCTGAATTAAAACAATTATTTGGTGGCGAACCAAATGAAAAATTTGATACACCAGCGGGAAATGTCACTCTTAAAGGCTATCGTTGGAATGTCGATGATATCTCCATCACTATACAATTATTAAACGATAGTAGCATTGTTCGTTCAATTAGTAATTTTAAGTTTATTCGTGATGCCAACATCACAACAAAAGATTATAATAGTTTAAAAAATGGCATGTCATACAATAAAGTAAAAGAACTTCTAGGAGAACCTGATGATATTTCTCAAGCAGTTTCTTCAGATAAAGAGGAACTACAGGCTGCATGGATTAGTGGCATCCAGTCGTCAGACAGTGACCCGGGAATTAACCTTACATTTGAAAATGATAAACTCACTAACAAACAACAGCATGGTTTAAAA

SEQ ID NO: 15610 - protein, 155 aa, Streptococcus agalactiae
MKFNKVKLGVKANNFKGGTSLAELKQLFGGEPNEKFDTPAGNVTLKGYRWNVDDISITIQLLNDSSIVRSISNFKFIRDANITTKDYNSLKNGMSYNKVKELLGEPDDISQAVSSDKEELQAAWISGIQSSDSDPGINLTFENDKLTNKQQHGLK

SEQ ID NO: 15611 - protein, 309 aa, Streptococcus agalactiae
GTGTTACCTGGCATTGATGGACTTGTACACATTTCACAAATTTCACACAAACGTGTTGAAAATCCTAAAGACGTATTATCTGCAGGACAAGAAGTTACTGTTAAAGTTCTTGAAGTTAATTCAGATGCAGAACGTGTATCACTTTCAATGAAAGCTCTTGAAGAGCGTCCAGCGCAAGCAGAAGGTGAAAAAGAAGAAAAACGTCAATCACGTCCACGTCGTCCACGTCGTCAAGAAAAACGCGACTATGAGCTTCCAGAAACACAAACTGGATTCTCTATGGCTGACTTATTCGGTGATATTGAATTA

SEQ ID NO: 15612 - protein, 103 aa, Streptococcus agalactiae
MLPGIDGLVHISQISHKRVENPKDVLSAGQEVTVKVLEVNSDAERVSLSMKALEERPAQAEGEKEEKRQSRPRRPRRQEKRDYELPETQTGFSMADLFGDIEL

SEQ ID NO: 15613 - protein, 294 aa, Streptococcus agalactiae
TTGAGTCCTTCAATTTTACCTTCAATTACTAAATATTCATTGCTTTACCTTGCTAAAGAAAGGTTTGGTATGGAAGCGATTGAAGGAGATGTCTTTGTCGACGAATTAGATAAATTCACAGAAGCTGGCGCATGTGGTACAGCCGCAGTTATTTCACCAATTGGAGGAATTCAAAACGGAGATGACTTCCATGTCTTCTACAGTGAGACAGAAGTTGGTCCAGCGACACGTAAACTATATGATGAGTTAGTAGGGATCCAGTTTGGTGATGTTGAAGCACCAGANNNNNTTAAT

SEQ ID NO: 15614 - protein, 98 aa, Streptococcus agalactiae
  VARIANT 95, 96, 97: Xaa = Any Amino Acid
MSPSILPSITKYSLLYLAKERFGMEAIEGDVFVDELDKFTEAGACGTAAVISPIGGIQNGDDFHVFYSETEVGPATRKLYDELVGIQFGDVEAPXXXN

SEQ ID NO: 15615 - protein, 479 aa, Streptococcus agalactiae
ATGACAGTAAATTTAGATTGGGATAATTTAGGTTTTGCTTACAGAAAATTACCATTCCGATACATTTCGCATTTTAAAGATGGGAAATGGGATGATGGCAAGTTGACAGATGATGCAACGCTACATATTTCAGAAAGTTCTCCTGCCCTCCACTATGGGCAACAAGCTTTTGAAGGATTGAAAGCTTATAGAACTAAAGATGGCTCTATTCAGTTATTTCGTCCAGATCAAAATGCAGAACGACTTCAAAGAACAGCAGATCGTCTTTTAATGCCACATGTTCCGACAGACAAATTTATTGCAGCGGTTAAATCTGTTGTACGCGCTAATGAGGAGTTTGTTCCACCGTATGGTACAGGGGCAACATTATACATTCGTCCCTTATTAATTGGTGTGGGAGATATTATTGGAGTTAAACCTGCTGAAGAATATATTTTTACGGTATTTGCAATGCCAGTAGGTAGTTATTTAAAGGTGGT

SEQ ID NO: 15616 - protein, 160 aa, Streptococcus agalactiae
MTVNLDWDNLGFAYRKLPFRYISHFKDGKWDDGKLTDDATLHISESSPALHYGQQAFEGLKAYRTKDGSIQLFRPDQNAERLQRTADRLLMPHVPTDKFIAAVKSVVRANEEFVPPYGTGATLYIRPLLIGVGDIIGVKPAEEYIFTVFAMPVGSYFKGG

SEQ ID NO: 15617 - protein, 2457 aa, Streptococcus agalactiae
ATGTCTAATATTCAAAATATGTCCCTTGAGGACATTATGGGAGAGCGTTTTGGGCGCTATTCTAAGTATATCATTCAAGAACGGGCGTTGCCGGATATTCGTGATGGCTTAAAACCTGTTCAACGTCGAATCCTTTATTCAATGAATAAAGATGGTAATACTTTTGAAAAGGGATTTCGCAAATCTGCAAAATCAGTCGGTAATGTTATGGGGAATTTCCATCCTCATGGGGATTCCTCTATCTATGACGCGATGGTTCGTATGTCTCAAGATTGGAAAAATCGTGAGACATTGATTGAAATGCACGGAAATAATGGTTCTATGGATGGAGATCCTGCGGCAGCTATGCGTTATACGGAAGCCCGTCTATCAGAAATTGCTGATTATCTTCTTCAAGATATTGATAAGAATACTGTACCCTTTGCGTGGAATTTTGATGATACAGAGAAAGAACCAACTGTTTTACCAGCTGCCTTTCCTAATCTTTTAGTCAACGGAGCAACAGGAATATCTGCAGGCTATGCGACAGATATTCCACCACATAATTTAGCAGAAGTCATTGATGCTGTCGTGTACATGATTGATCACCCTAAAGCTAAATTAGATAAATTAATGGAATTTCTACCTGGTCCAGATTTTCCAACTGGCGCTATCATTCAAGGAAAAGATGAAATTCGTAAGGCATATGAGACTGGTAAGGGGAGAGTAGCGGTTCGCTCGCGAACTGCTATTGAAACCTTAAAAGGTGGTAAGAAACAAATTATTGTTACTGAAATTCCTTATGAAGTTAATAAGTCAGTTTTAGTAAAACGAATCGATGATGTTCGTGTTAATAATAAAGTTCCAGGAATAGCAGAAGTGCGTGATGAGTCTGATAGAGATGGCCTTCGTATCGCTATTGAGCTCAAAAAAGAAGCCGATGAAACAATTGTCTTAAATTATCTTTTTAAATATACAGACCTACAAGTTAATTATAATTTCAATATGGTTGCTATCGATGACTATACCCCTAAGCAGGTGGGTCTATCAAGAATATTAACTAGCTATATCGCTCACCGAAGAGAAATTATTATTGCTCGTTCAAAATTTGATAAAGAAAAAGCCGAAAAACGTCTCCATATTGTTGAGGGACTGATTAGGGTTCTTTCTATTTTGGATGAAGTGATTGCATTAATTCGTGCTTCTGAGAATAAAGCTGATGCGAAAGAGAATTTGAAGGTCAGCTATGAGTTTTCAGAAGCTCAAGCAGAGGCTATCGTCACATTGCAATTATATCGTCTCACAAATACTGATATTGTGACGTTGAGAGAAGAAGAAGAAGAACTTCGTCAACAAATCACAATGCTCAAGGCAATTATTAGTGATGAACGTACGATGTATAACGTAATGAAACGTGAGTTACGTGAGGTCAAAAAGAAATTTGCCAATACTAGACGTTCTGAACTTCAAGAATTAGCTGAAACTATTGAAATCGATACTGCAAGTTTAATTATCGAAGAGGACACATACGTCAGTGTTACTAGAGGCGGATATGTAAAACGCACCAGCCCTCGCTCTTTCAATGCATCAACCGTTGATGAACTTGGTAAGCGAGAAGATGACGAATTGATATTTGTGAGCAATGCAAAGACTACCCAACATTTATTGATGTTTACTAACCTTGGTAATCTTGCTTATCGTCCAGTTCATGAATTAGCTGATATTCGATGGAAAGACGTTGGTGAACATTTATCACAAAATCTTGTTAACTTTGCTTCAAATGAAGAAATTATTTATGCTGAATTAGTAGATGATTTTACTAAAGAAACTTATTTTGCTGTCACTAGTTTAGGGCAAATAAAGCGTTTTGAACGTCAAGAAATCAGTCCATGGCGGACATATAAGTCAAAAACAGCTAAATATGCTAAGTTAAAAAATGTAGATGATTACGTTGTGACTGTTGCTCCTATCCAATTAGAGGATGTTATACTTGTCACTTATAATGGTTATGTGTTGAGATTTAGTATAAATGATGTACCAGTCGTTGGTAGTAAAGCCGCAGGTGTAAAAGCGATGAATTTAAAAGATAGTGATCACATCGTATCTGCATTTATAGCTAACACCACAAGTTTATATTTATTAACTCATAGAGGAAGTCTTAAACGAATGGCCATTGATGTTATCCCCACAACTAGTCGTGCTAATCGAGGACTTCAAGTTCTTCGTGAATTGAAATCCAAACCGCATCGCGTTTTTAAAGCAGGACCTGTATATTTAGAGGATTCATCTTTTGAATTTGATTTATTTAGTTCAGTATCGAATCATGAAGGAGATACTTTCGTACTTGAGATTATGTCTAAAACAGGAAAAGTTTACGATGTTGATTTAAGTCAATGGAGTTTTTCTGAACGTACAAGTAATGGCTCTTTTGTATCTGATAAGATTTCTGACGAAGAAGTATTCTCAGTTAAAATTAAG

SEQ ID NO: 15618 - protein, 819 aa, Streptococcus agalactiae
MSNIQNMSLEDIMGERFGRYSKYIIQERALPDIRDGLKPVQRRILYSMNKDGNTFEKGFRKSAKSVGNVMGNFHPHGDSSIYDAMVRMSQDWKNRETLIEMHGNNGSMDGDPAAAMRYTEARLSEIADYLLQDIDKNTVPFAWNFDDTEKEPTVLPAAFPNLLVNGATGISAGYATDIPPHNLAEVIDAVVYMIDHPKAKLDKLMEFLPGPDFPTGAIIQGKDEIRKAYETGKGRVAVRSRTAIETLKGGKKQIIVTEIPYEVNKSVLVKRIDDVRVNNKVPGIAEVRDESDRDGLRIAIELKKEADETIVLNYLFKYTDLQVNYNFNMVAIDDYTPKQVGLSRILTSYIAHRREIIIARSKFDKEKAEKRLHIVEGLIRVLSILDEVIALIRASENKADAKENLKVSYEFSEAQAEAIVTLQLYRLTNTDIVTLREEEEELRQQITMLKAIISDERTMYNVMKRELREVKKKFANTRRSELQELAETIEIDTASLIIEEDTYVSVTRGGYVKRTSPRSFNASTVDELGKREDDELIFVSNAKTTQHLLMFTNLGNLAYRPVHELADIRWKDVGEHLSQNLVNFASNEEIIYAELVDDFTKETYFAVTSLGQIKRFERQEISPWRTYKSKTAKYAKLKNVDDYVVTVAPIQLEDVILVTYNGYVLRFSINDVPVVGSKAAGVKAMNLKDSDHIVSAFIANTTSLYLLTHRGSLKRMAIDVIPTTSRANRGLQVLRELKSKPHRVFKAGPVYLEDSSFEFDLFSSVSNHEGDTFVLEIMSKTGKVYDVDLSQWSFSERTSNGSFVSDKISDEEVFSVKIK

SEQ ID NO: 15619 - protein, 1926 aa, Streptococcus agalactiae
GTGACGAATTATGGCGACGATGCTATTCAAGTCTTAGAAGGATTAGATGCTGTTCGTAAGCGTCCAGGGATGTATATCGGTTCCACAGATGGAACTGGTTTACATCATTTAGTGTGGGAAATTGTAGATAATGCAGTTGATGAAGCTCTATCAGGTTTTGGAAATCGCATTGATGTGATTATTAACAAAGATGGGAGTATAACTGTTACAGACCATGGACGTGGTATGCCAACTGGAATGCATGCTATGGGAAAACCTACTGTTGAAGTCATCTTCACGGTGCTTCATGCAGGTGGAAAATTTGGACAAGGTGGTTATAAAACATCAGGTGGTCTCCATGGTGTTGGATCATCTGTAGTTAATGCTTTGTCTTCTTGGTTAGAAGTTGAAATCATTCGCGACGGAGCTATTTACAGACAACGTTTTGAAAATGGTGGTAAGCCCGTTACAACTCTGAAAAAAATTGGCACGGCACCAAAATCAAAATCTGGAACTTCTGTCAGCTTTATGCCAGATCAATCAGTATTTTCAACGATAGATTTTAAGTTTAATACAATTGCAGAGCGCTTAAAGGAATCTGCCTTTCTCTTAAAAAATGTTACTTTAACCTTAACAGATAATCGTTCAGAAGAAGCAGAGCATCTAGAATTTCATTATGAAAACGGTGTTCAAGATTTTGTAGAGTATTTAAATGAAGATAAAGAAACGTTGACACCAATCATGTTTTTCGAAGGTGAAGAACAAGAATTTCATATCGAAGTTGCTTTGCAGTATAATGATGGTTTTTCAGATAATATCCTTTCTTTTGTCAATAATGTTCGTACTAAAGATGGTGGAACACATGAAACTGGCTTGAAATCAGCTATTACAAAGTCTATGAATGACTATGCACGTAAAACAGGACTTCTTAAAGAAAAAGATAAAAACCTTGAAGGTTCTGATTATCGTGAGGGGCTATCAGCCATTTTATCTATTCTTGTACCTGAGGAGCACTTGCAATTTGAAGGTCAAACTAAAGATAAACTAGGAAGTCCCTTAGCACGACCAATTGTTGATGGTATTGTTTCTGAAAAGTTAACTTACTTTCTTATGGAAAATGGAGATTTAGCATCTAATTTAATCCGTAAGGCAATAAAAGCACGTGATGCGCGTGAAGCTGCACGTAAAGCACGTGATGAAAGTAGGAATGGGAAAAAGTCGAAAAAAGATAAAGGTCTACTTTCTGGAAAATTAACCCCTGCACAATCAAAAAATGCTAAGAAAAATGAACTCTATTTAGTCGAAGGAGACTCTGCAGGTGGCTCTGCTAAGCAAGGTCGTGATAGAAAGTTTCAAGCTATTTTACCGTTGCGAGGAAAAGTATTGAATACAGCTAAGGCAAAGATGGCTGATATTATAAAAAACGAAGAAATTAATACAATGATCCATACCATTGGTGCAGGTGTTGGTCCTGATTTTAATCTTGACGATATTAATTATGATAAAGTTATCATTATGACCGATGCTGATACTGACGGAGCTCATATTCAGACACTATTATTAACTTTCTTTTATCGCTATATGAGACCTCTTGTTGAAGAGGGACATGTCTATATTGCTTTGCCACCTTTGTATAAAATGTCAAAAGGAAAAGGTAAGAAAGAAATTGTTGAGTATGCTTGGACGGATATAGAGTTAGAAGAATTACGACAAAAATTTGGTAAAGGCTCACTATTACAACGATATAAAGGGCTTGGAGAAATGAATGCCGATCAATTGTGGGAAACCACTATGAACCCTGAGACAAGGACATTAATTCGTGTAACAATTGAAGATTTAGCAAGAGCAGAACGTCGAGTTAATGTCTTGATGGGTGATAAAGTTCCTCCAAGACGCCAATGGATTGAAGATAATGTCAAGTTTACTTTAGAAGAGAATACAGTATTT

SEQ ID NO: 15620 - protein, 642 aa, Streptococcus agalactiae
MTNYGDDAIQVLEGLDAVRKRPGMYIGSTDGTGLHHLVWEIVDNAVDEALSGFGNRIDVIINKDGSITVTDHGRGMPTGMHAMGKPTVEVIFTVLHAGGKFGQGGYKTSGGLHGVGSSVVNALSSWLEVEIIRDGAIYRQRFENGGKPVTTLKKIGTAPKSKSGTSVSFMPDQSVFSTIDFKFNTIAERLKESAFLLKNVTLTLTDNRSEEAEHLEFHYENGVQDFVEYLNEDKETLTPIMFFEGEEQEFHIEVALQYNDGFSDNILSFVNNVRTKDGGTHETGLKSAITKSMNDYARKTGLLKEKDKNLEGSDYREGLSAILSILVPEEHLQFEGQTKDKLGSPLARPIVDGIVSEKLTYFLMENGDLASNLIRKAIKARDAREAARKARDESRNGKKSKKDKGLLSGKLTPAQSKNAKKNELYLVEGDSAGGSAKQGRDRKFQAILPLRGKVLNTAKAKMADIIKNEEINTMIHTIGAGVGPDFNLDDINYDKVIIMTDADTDGAHIQTLLLTFFYRYMRPLVEEGHVYIALPPLYKMSKGKGKKEIVEYAWTDIELEELRQKFGKGSLLQRYKGLGEMNADQLWETTMNPETRTLIRVTIEDLARAERRVNVLMGDKVPPRRQWIEDNVKFTLEENTVF

SEQ ID NO: 15621 - protein, 636 aa, Streptococcus agalactiae
ATGAATATTATAATTATGATTATCATTGCCTATCTGTTAGGCTCTATCCAAACTGGGCTTTGGATTGGTAAATATTTTTACCAAGTCAATCTTCGTCAACACGGTAGTGGTAATACTGGCACCACGAACACCTTCCGTATTTTAGGTGTAAAAGCTGGCATTGTCACTTTGACTATTGACATTTTAAAAGGGACTCTAGCAACACTTATTCCTATCATATTAGGTGTAACGACAGTATCTCCATTTTTTATCGGTTTTTTTGCTATTATAGGTCACACTTTCCCTATTTTTGCACAATTCAAAGGTGGGAAAGCCGTTGCTACAAGCGCTGGGGTTTTGCTAGGATTTGCACCTTCTTTTTTCCTTTACTTATTAGTGATCTTTTTATTAACGCTTTATCTTTTTAGCATGATTTCGCTATCCAGTATTACAGTAGCTGTCGTAGGTATCCTTAGTGTCTTAATTTTTCCATTAGTAGGTTTTATATTAACGGACTATGACTGGATATTTACCACTGTGGTTATCTTAATGGCCCTCACGATTATTATCCGACATCAGGATAATATCAAACGTATTCGAAAAAGGCAAGAAAATTTGGTTCCGTTTGGCTTAAACCTAAGTAAACAAAAAAATAAA

SEQ ID NO: 15622 - protein, 212 aa, Streptococcus agalactiae
MNIIIMIIIAYLLGSIQTGLWIGKYFYQVNLRQHGSGNTGTTNTFRILGVKAGIVTLTIDILKGTLATLIPIILGVTTVSPFFIGFFAIIGHTFPIFAQFKGGKAVATSAGVLLGFAPSFFLYLLVIFLLTLYLFSMISLSSITVAVVGILSVLIFPLVGFILTDYDWIFTTVVILMALTIIIRHQDNIKRIRKRQENLVPFGLNLSKQKNK

SEQ ID NO: 15623 - protein, 651 aa, Streptococcus agalactiae
ATGAAACATTCCAGTTGGCATGATTTAATAAAAAGAGAACTACCCAATCATTACTACAATAAAATTAATACATTTATGGATGCAGTTTACGAAAGCGGAATCGTTTATCCTCCAAGAGATAAGGTGTTCAATGCCATACAGATAACACCACTAGAAAACGTAAAAGTAGTGATTATTGGCCAAGATCCTTACCATGGCCCTCAACAAGCTCAAGGACTCTCATTTTCTGTTCCAGACAATTTACCAGCTCCTCCTTCACTTCAAAATATTCTAAAAGAATTAGCAGAAGATATTGGGTCACGTTCACATCATGACTTAACATCATGGGCGCAACAAGGAGTGCTGCTATTGAATGCTTGTTTAACAGTTCCAGAACACCAAGCTAATGGTCATGCTGGGCTTATATGGGAACCTTTTACTGATGCTGTCATCAAAGTGGTTAACCAAAAGGAAACCCCAGTAGTCTTTATTCTGTGGGGTGGCTATGCTCGAAAGAAAAAGTCGCTAATTGATAATCCTATTCATCATATTATTGAGAGTCCTCATCCGAGTCCCCTATCTGCTTATCGTGGTTTCTTTGGTAGCAGACCTTTTTCTAGAACAAATCATTTCTTAGAAGAAGAAGGAATAAATGAGATTGATTGGTTAAAT

SEQ ID NO: 15624 - protein, 217 aa, Streptococcus agalactiae; identical to SEQ ID NO: 6802

SEQ ID NO: 15625 - protein, 483 aa, Streptococcus agalactiae; identical to SEQ ID NO: 11079

SEQ ID NO: 15626 - protein, 161 aa, Streptococcus agalactiae; identical to SEQ ID NO: 11080

SEQ ID NO: 15627 - protein, 1237 aa, Streptococcus agalactiae
ATGAAGCCAATTTGTATTATTCCTGCGCGATCAGGGTCAAAAGGATTACCAGATAAGAATATGTTATTCCTAGCAGGTAAACCCATGATTTTCCATACTATAGATGCTGCAATTGAATCTGGAATGTTTGATAAGAAAGATATTTTGTTAGTACAGATTCAGAATTGTACAGAGAGATTTGTTAGAACGCGGTATTTCAGTGGTGATGAGAAAACCGGAACTTTCAACTGATCAGGCAACTTCGTATGATATGTTAAAAGATTTTTTATCTGACTATGAAGATAATCAGGAGTTTGTGTTACTTCAAGTAACCTCTCCACTAAGAAAATCATGGCATATAAAGGAAGCAATGGAGTATTATTCTTCACATGATGTTGACAATGTTGTAAGTTTTTCTGAAGTTGAGAAACACCCTGGTCTGTTTACGACATTGTCTGATAAAGGCTATGCTATAGATATGGTGGGAGCAGATAAAGGTTATCGTCGCCAAGATTTACAACCTTTATACTATCCGAACGGCGCTATTTTTATTTCTAATAAAGAAACTTACTTAAGGGAAAAAAGCTTTTTCACCTCTAGGACATATGCTTATCAAATGGCAAAGGAATTTTCATTAGATGTTGATACGAGAGATGATTTTATCCACGTCATCGGTCACCTCTTTTTCGATTATGCCATTAGGGAAAAAGAGAATAAAGTTTTTTATAAAGAAGGCTATAGTCGTTTGTTCAATAGAGAAGCTTCAAAGATAATTTTAGGTGATTCAAAAACGATATCTATCTCACTAGAAAATTACCATAATTATTCCCAAGGTGGTGTAACATTAGCAACGATGTTGGAAAACTTACCTAACTTTTTGACAGCTAATGTAACAGAGGCTTTTGTTTCTATAGGGGTAAATGATCTCATTACAGGTCATAGTGTGGAAGAAATATTCAGCAATTTCCAAAAACTCTACTCATTATTAGCTGAGAATAAAATAAAGATGAGATTGACAACTATTGCTTACACCCTTTTTAGAGAAACTGTCAATAATGCAGATATTGAGAAAATCAATCAATGGCTAACAGAATTTTGTTATCAAAATCAGATTCCACTGTTAGATATTAATAGATTTTTATCAAAGGATGGTAATCTAAATTATCATTTAACTAGTGATGGATTACATTTTACTCAAGAGGCTAATGATTTGTTACAAAGTCAATATCAATTATTTGTAGACGAAGTTAAAACCTTA

SEQ ID NO: 15628 - protein, 413 aa, Streptococcus agalactiae
MKPICIIPARSGSKGLPDKNMLFLAGKPMIFHTIDAAIESGMFDKKDIFVSTDSELYREICLERGISVVMRKPELSTDQATSYDMLKDFLSDYEDNQEFVLLQVTSPLRKSWHIKEAMEYYSSHDVDNVVSFSEVEKHPGLFTTLSDKGYAIDMVGADKGYRRQDLQPLYYPNGAIFISNKETYLREKSFFTSRTYAYQMAKEFSLDVDTRDDFIHVIGHLFFDYAIREKENKVFYKEGYSRLFNREASKIILGDSKTISISLENYHNYSQGGVTLATMLENLPNFLTANVTEAFVSIGVNDLITGHSVEEIFSNFQKLYSLLAENKIKMRLTTIAYTLFRETVNNADIEKINQWLTEFCYQNQIPLLDINRFLSKDGNLNYHLTSDGLHFTQEANDLLQSQYQLFVDEVKTL

SEQ ID NO: 15629 - protein, 627 aa, Streptococcus agalactiae
ATGAAAAAAAAGTTGGCATTTTTAGGCGCAGGAAGTCATGCTGATGCGATTGCTCCGGTTATTGATCCTCTTGTGTATGATTTCGTAGGTTTTTTTGATGATAAAGATATTACGGAGCATGATGGTTATCCTGTTCTTGGAAAACTTTATGATGTGCTACCTTACCTTGAAGATGGCTCAATAGATGCAGTATTTATTACAATAGGTGATAATGCTAAAAGGAAAGAACTATTTGAATATGTAGCAAAGGATTATTATGACTTTATTATTAACATCATTAGTCCCAATGCTTTAGTATTGACACCAGATAGTATTTGTGGGCGTGGTATCTTTATTGGTTTTGGGGCTTTTATAGGTTCTAAAGTGAAGCTGTTTGATAACAACGTTGTTAATACAGGAGCGCTCATTGAACATCATACTGTTGTAGAATCACACTGTAATATAGCACCTAATGCTACCATAAATGGTCTTTGTTATATTAGAGAAGAAGTTTATGTAGGTAGTGCCAGTGTTATTATTCAAACCTTGGATATTTCATCGTGTACGACAATTGGCGCAGGAGCTGTTGTTGTAAAAGATATTATAGAACCTGGAACCTATGTAGGGGTTCCAGCCAAAAAAATAAAA

SEQ ID NO: 15630 - protein, 209 aa, Streptococcus agalactiae; identical to SEQ ID NO: 2168

SEQ ID NO: 15631 - protein, 834 aa, Streptococcus agalactiae
ATGTTACCAGTTGTGAATGTAGCGTTGATTTATAATGTCCCAGTATGCCACCTTCATGGAGGGGAGACCTCATTAGGCAATTTTGATGAGTATATTCGCCATGCAATTACTAAGATGAGTCACCTACACTTAGTCTCTACAGAGGACTTTCGTCAACGTGTGATTCAGATGGGAGAACAACCTCAATTTGTAATTAACACAGGAGCTCTCGGAGTGGAAAATGCTCTATCAATCCCTTCTCTAACCAAAGAAGCAATAGAAAAGCAATTAGGTATTGTACTAGAGGAATCCTATTTTGTTGTTCTCTATCATCCTGTTACTTTTGAACAAGGAAAAAGTGCTGGAGAACAGATGAAAGCGGTACTATCAGCCCTTTCTAAATTTGGTGTCCAGTGTCTATTTATAGGATCCAATTCAGATACTGGTTCTGATGATATTGCAAAGGCTATCAATACTTATTTGATAAATCATGAAAATAGTTATTGCTTTGCTTCTTTATCAACCCAACTTTATCATTCCTTAATTCGTCATTCACTAGGACTGATTGGTAATTCGTCTTCTGGTTTAATAGAAGTTCCTTCTTTGATGAAACCTACTCTTAATATTGGTGATCGCCAAAAAGGTAGGCTACATGGAGAAAGTGTAGTAAGTGTACCAGTCGAAACCCCCTCTGTATTGGAGGGATTATCAAAATTGAATGAAGTGACCAACTTTGACAATCCCTACTACAAAGAGAATGCTTCATCTATTGCATATGAAGCAATAAAGCTTTATTTGAAAGATGAACCTTCAATTTCCCAACCATTTTATGATTTAAAGGAGAATAATCTAAAA

SEQ ID NO: 15632 - protein, 278 aa, Streptococcus agalactiae
MLPVVNVALIYNVPVCHLHGGETSLGNFDEYIRHAITKMSHLHLVSTEDFRQRVIQMGEQPQFVINTGALGVENALSIPSLTKEAIEKQLGIVLEESYFVVLYHPVTFEQGKSAGEQMKAVLSALSKFGVQCLFIGSNSDTGSDDIAKAINTYLINHENSYCFASLSTQLYHSLIRHSLGLIGNSSSGLIEVPSLMKPTLNIGDRQKGRLHGESVVSVPVETPSVLEGLSKLNEVTNFDNPYYKENASSIAYEAIKLYLKDEPSISQPFYDLKENNLK

SEQ ID NO: 15633 - protein, 286 aa, Streptococcus agalactiae
ATGAAAAAAATTTGTTTAGTAACCGGATCGCGTGCTGAATACGGAATAATGAAGCCATTGATTCAAAGATTATCAAAAGATAAAGAAGTCAACTTACAAATTATTGCAACAGCAATGCATCTGGAAGAAAAGTACGGCTATACTTATCGTCAAATTGAAGAAGACGGTTTGATATTGCTTATAAAGTTCCCTTACATCTTTATGATACTGACAGAAGAACTGTATCTACTGCAATGGCGCATTTACAACTAGGATTGACCAAAATTTGACAAGGAAGACTATGATC

SEQ ID NO: 15634 - protein, 96 aa, Streptococcus agalactiae
  VARIANT 57: Xaa = Any Amino Acid
MKKICLVTGSRAEYGIMKPLIQRLSKDKEVNLQIIATAMHLEEKYGYTYRQIEEDGXDIAYKVPLHLYDTDRRTVSTAMAHLQLGLTKILTRKTMI

SEQ ID NO: 15635 - protein, 1023 aa, Streptococcus agalactiae
ATGGTTTATATTATTGCAGAGATTGGTTGCAATCATAATGGAGATATTAATCTTGCGAAAAAAATGGTAGATGTTGCCGTGTCTTGTGGTGTTGATGCTGTTAAATTTCAGACTTTTAAAGCTGAGAAACTTATTTCTAAATTTGCTCCCAAAGCTGAATATCAAAAAGCAACTACAGGAACAGCAGACAGTCAACTTGAGATGACGAAACGTTTAGAGTTAAGCTTTGAAGAATACTTAGAAATGCGTGATTATGCAATTTCAAAAGGTGTGGAGACCTTTTCAACACCTTTTGATGAAGAGTCATTAGAGTTCTTAATTTCTACAGATATGCCAATTTACAAAATTCCATCAGGAGAAATCACTAATTTACCTTACTTAGAAAAGATTGGCAAGCAACAAAAGAAAGTTATTCTTTCGACGGGTATGGCGGTAATGGAAGAGATCCATCAAGCGGTGAATATTTTACGTCAGAATGGTACAACCGACATTTCTATTTTACATTGTACAACAGAGTACCCAACACCTTACCCCTCTCTAAATTTAAACGTTATTCATACTTTGAAAGATGAATTTAAAGATTTAACGATAGGTTATTCGGATCATTCAATTGGATCAGAAGTACCTATCGCAGCAGCAGCAATGGGTGCAGAAGTTATTGAAAAACACTTTACTTTAGATACTAATATGGAAGGTCCGGATCATAAAGCCAGTGCAACACCTGATATTTTAGCTGCTTTAGTTAAAGGGGTTCGCATTGTTGAACAAGCCTTAGGTAGATTTGAAAAAATCCCAGATCCAGTAGAAGAGAAAAATAAGATTGTTGCTCGTAAATCAGTCGTTGCTTTAAAACCAATTAAAAAAGGCGATATTTATTCAATAGAAAATATTACGGTGAAGCGCCCAGGTAATGGTATTTCTCCTATGAACTGGTATGACATCTTGGGACAAGAAGCGCAAGATGATTTCGAAGAGGATGAAGTTATTCGTGATTCACGCTTTGAAAATCAATTGCCCGAGTTA

SEQ ID NO: 15636 - protein, 341 aa, Streptococcus agalactiae; identical to SEQ ID NO: 2172

SEQ ID NO: 15637 - protein, 1398 aa, Streptococcus agalactiae
ATGAATACTAAGAAATTACTTCAATCTGGTTTTATTTATACACTCGGGAATTTATTGGTGCAAGGATTAGCCTTTATCACACTTCCCATCTATACTCGGGTTATCTCAACAGAAGTTTATGGCCAATATAGTTTATATGTCGCTTGGATGAATATTATTATGCTTTTTATTGGCCTTCAGACGAGCGGTTCTTTAAGTTCAGCCCGGGTCAAATACGGAGAAGAATTTAAAAGCTATTCAGGGAGTGCCTTTTCTGTAGGTAATATATGGTTTCTTATTATACTTTTGATAGCTTTTCTATTTAGAAGTTTTCTTGCACCATTAGTTGGTTTTTCTGAATCTATTTTTTTATTAATGGTGTGTCAAAGTTACGCTAGCTATGTGGTGACTTTCTTTGGTCAGTATTTTATACAACAACAGAGGAGTTTGGCTAATTTAATATTATCCTTAGCCAATGCAGTTTCATCTGTTGCACTATCTCTATTTTTAATTTTTCATTGGTCCGATGACTTTTTATCTAGGGTTTTTGGAGCTTTTGTTCCTACTATAATAACTGGAATAGTTGCCTTTGCTTATATTTATTATCATAGCAAATCTTTTTACAATCCTAAGTATTTTCGGTTCATTGTCACTGTGTCTGTTCCCTTGATTTTCCATTTGTTAGGACACCAGTTGTTGGGGCAATTAGATAGAATTATGCTAGCTCGTTTATACAATACTAAAGAAGTTGCAATGTATAGTTTCGGTTATTCGCTTGGAATGATTATTCAGATTGTTTTGAATAGTATTAATATGGCTTGGATTCCATGGTTTTTTGATGCTAGAAAAGAAAAATTACTGCAACTTTCAACTTATATTAGCCGTTATCTCTACTTAGGAGTTTTCTTAACATTAGGTTATTTGACTGTTTTTCCTGAGTTAGCTCAAATAATGGGAGGAGACAAGTATAGTAGTAGTGTTCAATTTATTTCTTTAATTATTGTCAGCTACTTTTTAGTTTTTCTCTATACATTTCCTGTAAATATCCAATTCTTCTATGCTAATACGACATGGATTCCTATTGGGACATTATTAGCTGCTGGTGTAAATTGGTTACTAAACCTTGTATTAATTCCTCATTATGCAGCCTATGGCGCTGCTATGGCTACAATAATATCTTATTTAGCCTTGTTGATTTTTCATCATATTGTTTCGAAAGTTAAATACCATTATTCAGATGTCTCAGTTAGGCAGTACATCATTTTAAGTGGTATAGTATTTAGTTATGCTATGTTAATGAACATGTTCCTAGATAATATCGTTATTAGATGGAGTTTAGGAATAATTATTCTTATAGTATATAGCATTGTTTTTCAAAAAGTCATTTTAGACTTATTGAGTAAAAAAAGAAGGAGAAGA

SEQ ID NO: 15638 - protein, 466 aa, Streptococcus agalactiae; identical to SEQ ID NO: 6814

SEQ ID NO: 15639 - protein, 954 aa, Streptococcus agalactiae
ATGACTAATTTTGTTTGTCATACTTTATACCATCTACTGATTACTATAATAAAGTTAAAAGATAAAGAAAATACTAGAATATTTATTTGTGACACTATCACGGATTATGAAACTTGGGTAAAGATATTAAATGATCAGGGAATAAGAACTGAATCATTTAAAGAGTTTGCTTATCGGGAGCAGTTACAAAATAAAAATATTGAAGAAGTGATGGAGCTTGTAGATTCAGACTTAAATCACTACTTTGAGAGAGTAGATACACAAGTCTATCTATTTAATGATGATACTTTAATAGGTCGCTATATGGTGTATTTAGGTAAAAATTATCATCTAATTGAAGATGGTTATAACTGTTTTCAAGCCAAGTTATTCTTGGGTGGTTCTGTCGTAAAACGAGTAATTAAAACTTACTTATTTAAAAAGTATGTTCCGTATGGTTTTTCAAAATATTGTCTCTCAATTGAGGTTAATTCTTTAGTGGGGTTACCTCATGACATAAGGAGTAAGAAATATAAAGAACTACCGAGAAAAAAATTATTTGATAGTCTTAACAAAGAACAAAAATCACTGATTTTCAAAATATTTAAAACAAAACCATTAACTATAACTCCAAAGTCAGTATTATTGTTGACACAGCCACTTGCACAAGATAAATGTTATAAAACACCTACAGAGAGGTTTCAAAGTATTCAAGAGCAATACGATTATTTTGACGATATTGTCCAGGAATATAGAACGTTAGGGTACAATGTTTATTTAAAAGTTCATCCTAGAGATGTAGTAGATTATTCCAAATTGCCGGTAGAGCTATTACCATCAAATGTTCCTATGGAAATTATAGAGTTGATGTCAACAGGTCGGTTCGAATGTGGGATAACACATTCGTCCACTGCGCTGGATTTTTTAACTTGTGTTGATAAAAAAATAACTTTAGTAGATCTGAAGGATATTAAA

SEQ ID NO: 15640 - protein, 318 aa, Streptococcus agalactiae
MTNFVCHTLYHLLITIIKLKDKENTRIFICDTITDYETWVKILNDQGIRTESFKEFAYREQLQNKNIEEVMELVDSDLNHYFERVDTQVYLFNDDTLIGRYMVYLGKNYHLIEDGYNCFQAKLFLGGSVVKRVIKTYLFKKYVPYGFSKYCLSIEVNSLVGLPHDIRSKKYKELPRKKLFDSLNKEQKSLIFKIFKTKPLTITPKSVLLLTQPLAQDKCYKTPTERFQSIQEQYDYFDDIVQEYRTLGYNVYLKVHPRDVVDYSKLPVELLPSNVPMEIIELMSTGRFECGITHSSTALDFLTCVDKKITLVDLKDIK

SEQ ID NO: 15641 - protein, 945 aa, Streptococcus agalactiae
ATGATAAAGAAAATTGAAAAGGATTTAATAAGTGTAATTGTACCTATTTATAATGTTGAAGATTATTTAGTTGAATGTATAGAAAGCCTTATTGTTCAAACATATCGAAATATTGAAATATTATTGATTAATGATGGTTCGACGGATAATTGTGCAACAATTGCCAAAGAATTTTCTGAAAGAGATTGTAGAGTTATCTATATAGAAAAGTCGAATGGTGGGTTGTCAGAAGCTAGAAACTATGGAATTTATCATTCAAAGGGAAAATACTTAACTTTTGTTGATTCAGATGATAAAGTTTCCTCTGATTACATAGCGAATTTGTATAATGCTATTCAAAAACATGATTCGTCTATAGCTATCGGTGGCTATTTAGAATTTTATGAAAGACATAATAGCATAAGAAATTATGAATATTTAGACAAAGTGATATCAGTTGAAGAAGCACTACTAAACATGTATGACATTAAAACTTATGGTTCAATTTTTATTACTGCATGGGGAAAATTATTCCATAAATCTATATTCAATGATTTAGAATTTGCATTAAATAAGTATCATGAGGATGAGTTCTTTAACTATAAAGCATACTTAAAAGCTAATTCTATAACATACATAGACAAGCCTCTCTATCATTATCGTATACGAGTAGGTAGTATCATGAATAATAGTGATAATGTTATAATTGCTAGAAAGAAACTTGATGTTTTATCAGCATTAGACGAGCGAATAAAACTTATAACAAGTTTACGTAAGTATTCCGTTTTTTTACAAAAAACAGAAATATTTTATGTCAATCAATATTTTAGGACTAAAAAATTTTTAAAACAACAATCTGTAATGTTTAAAGAAGATAACTATATCGATGCTTATAGAATGTATGGACGGTTACTTAGAAAAGTGAAGTTAGTTGATAAATTAAAACTTATAAAAAATAGGTTTTTC

SEQ ID NO: 15642 - protein, 315 aa, Streptococcus agalactiae
MIKKIEKDLISVIVPIYNVEDYLVECIESLIVQTYRNIEILLINDGSTDNCATIAKEFSERDCRVIYIEKSNGGLSEARNYGIYHSKGKYLTFVDSDDKVSSDYIANLYNAIQKHDSSIAIGGYLEFYERHNSIRNYEYLDKVISVEEALLNMYDIKTYGSIFITAWGKLFHKSIFNDLEFALNKYHEDEFFNYKAYLKANSITYIDKPLYHYRIRVGSIMNNSDNVIIARKKLDVLSALDERIKLITSLRKYSVFLQKTEIFYVNQYFRTKKFLKQQSVMFKEDNYIDAYRMYGRLLRKVKLVDKLKLIKNRFF

SEQ ID NO: 15643 - protein, 966 aa, Streptococcus agalactiae
ATGAAAGAAAAAGTAACAGTCATTATACCTATATACAACTCAGAAGCATACCTTAAAGAATGTGTGCAATCCGTACTACAACAGACTCATCCATTGATAGAAGTTATACTAATTGATGATGGATCCACTGATAATAGTGGAGAAATTTGTGATAATTTATCTCAGGAAGATAATCGCATACTTGTATTTCATAAAAAAAATGGAGGGGTCTCTTCGGCAAGGAACCTAGGTCTAGATAAATCCACAGGAGAATTCATAACATTTGTGGATAGTGATGATTTTGTAGCACCGAATATGATTGAAATAATGTTAAAAAATTTAATCACTGAGAATGCTGATATAGCAGAAGTAGATTTTGATATTTCGAATGAGAGAGATTATAGAAAGAAGAAAAGACGAAACTTTTATAAAGTTTTTAAGAATAATAACTCTTTGAAAGAATTTTTATCAGGTAATAGAGTGGAAAATATTGTTTGTACAAAATTATATAAAAAAAGTATAATTGGTAACTTGAGGTTTGATGAGAACTTAAAAATTGGTGAGGATTTACTTTTTAATTGCAAACTCTTATGTCAAGAGCACCGTATAGTCGTAGATACGACTTCTTCCTTATATACTTATCGAATTGTAAAAACTTCTGTAATGAATCAGAAATTCAACGAAAACTCATTAGATTTTATAACAATTTTTAATGAAATAAGTAGTTTGGTTCCTGCCAGATTAGCTAATTATGTTGAAGCGAAATTTTTAAGAGAAAAGATAAAGTGTCTCCGAAAAATGTTTGAATTAGGTAGTAATATTGACAATAAAATCAAAGTACAACGAGAGATTTTTTTCAAAGACATTAAATCATACCCGTTCTATAAAGCGGTCAAATACTTATCATTAAAGGGATTATTAAGCTTTTATTTAATGAAATGTTCACCTAAACTATATGTTATGGCATATAGAAGATTTCAAAAACAG

SEQ ID NO: 15644 - protein, 322 aa, Streptococcus agalactiae
MKEKVTVIIPIYNSEAYLKECVQSVLQQTHPLIEVILIDDGSTDNSGEICDNLSQEDNRILVFHKKNGGVSSARNLGLDKSTGEFITFVDSDDFVAPNMIEIMLKNLITENADIAEVDFDISNERDYRKKKRRNFYKVFKNNNSLKEFLSGNRVENIVCTKLYKKSIIGNLRFDENLKIGEDLLFNCKLLCQEHRIVVDTTSSLYTYRIVKTSVMNQKFNENSLDFITIFNEISSLVPARLANYVEAKFLREKIKCLRKMFELGSNIDNKIKVQREIFFKDIKSYPFYKAVKYLSLKGLLSFYLMKCSPKLYVMAYRRFQKQ

SEQ ID NO: 15645 - protein, 1143 aa, Streptococcus agalactiae
ATGAGGAAATATCTAGATTTAGATTATTCTTTATTTTATGCTCTTTGGGTACTTATTTTAGTACCAAACCAATGGTATCAGTTTTTAATTATTACCATTATAGTTCTATTATTACTTTGGAAGAGTGAGTTTAGAATATCTATAAGCAATTCTTCAATACTATTTCTGCTTTGGTTATTTATTTATTTATTTGCAATACTCATTAGAGGTACTCAAGAGGATATAACGTTTCAGCGATTTATTGCTGAGCTATTAAAACTAATTAGTACAGGATATGCTTTATTTTTTTATAATTATTATAGAAAAGCTGATTTTAATAGTTCAGTTGTAAGGAATGTGGTAAAGGTTAACTATTTTGTGTTGTTTCTTATAACAGTTTTATATTTATTTTTTCCTATGCTGAAGCCAACTTTATTTGGAAGAGAATTGTTTTCAATAGAGTGGTTTCCACATATGAGAATAAGACTTGCGGCATATTTTGAATATGCTACACTAATTGGTCAGTTTATTTTATTTTCTTATCCCATACTTTTTTTGAAACCCCAAAAACATATGGAAAATATTTTAATATCCTTACTGTTGACTATATGTTCATACTTTTCTGGCGCTAGAATACTATTGGTCTGTATGTTGGTTTTATTAGCATCGCTTCTTTTAGATTATATCCTTTTTAAAACTAATTTGAAATTGACCAAGAAAAACACTTTTATACTTGGTATGACTTTCTTATTTATCACCGCTTGTTTTTCTTATAACATATGGTCAATAATTGAAAAAATAATTATGTACAGAAACCAAAGTACTATCACTAGGATGATAGTTTATCAAGAAAGTATTATTGAAGTTCTAAAAGGAAATATTTTATTTGGACAGGGTATAAGGATTCCATCAAGTGAAGGAATATTCCTAGGATCGCATTCTACTTATATTAGTGTCTTTTACAGGACTTCTTTATTAGGAATTGTTCTTTATTTTTCTGCCTTTATACTTTTATATAAAGAAGCGATTTCAAAAAATTATAAAATCTACAGATTATTTTTTTATACGTTATTATGTTACACGCTCTTTGAGGAAATAGATCCTAATCATTGGAGTATTGTATTATTATTCTCAACTTTTGGTATAGTGGGAAGGGCTAAAAAA

SEQ ID NO: 15646 - protein, 381 aa, Streptococcus agalactiae
MRKYLDLDYSLFYALWVLILVPNQWYQFLIITIIVLLLLWKSEFRISISNSSILFLLWLFIYLFAILIRGTQEDITFQRFIAELLKLISTGYALFFYNYYRKADFNSSVVRNVVKVNYFVLFLITVLYLFFPMLKPTLFGRELFSIEWFPHMRIRLAAYFEYATLIGQFILFSYPILFLKPQKHMENILISLLLTICSYFSGARILLVCMLVLLASLLLDYILFKTNLKLTKKNTFILGMTFLFITACFSYNIWSIIEKIIMYRNQSTITRMIVYQESIIEVLKGNILFGQGIRIPSSEGIFLGSHSTYISVFYRTSLLGIVLYFSAFILLYKEAISKNYKIYRLFFYTLLCYTLFEEIDPNHWSIVLLFSTFGIVGRAKK

SEQ ID NO: 15647 - protein, 471 aa, Streptococcus agalactiae
ATGATTTTTGTCACAGTGGGGACACATGAACAGCAGTTCAACCGTCTTATTAAAGAAGTTGATAGATTAAAAGGGACAGGTGCTATTGATCAAGAAGTGTTCATTCAAACGGGTTACTCAGACTTCGAACCTCAGAATTGTCAGTGGTCAAAATTTCTCTCATATGATGATATGAACTCTTACATGAAAGAAGCTGAGATTGTTATCACACATGGCGGCCCAGCGACGTTTATGTCAGTTATTTCTTTAGGGAAATTACCAGTTGTTGTTCCTAGGAGAAAGCAGTTTGGTGAACATATCAATGATCATCAAATACAATTTTTAAAAAAAATTGCCCACCTGTATCCCTTGGCTTGGATTGAAGATGTAGATGGACTTGCGGAAGCGTTGAAAAGGAATATAGCTACAGAAAAATATCAGGGAAATAATGATATGTTTTGTCATAAATTAGAAAAAATTATAGGTGAAATA

SEQ ID NO: 15648 - protein, 157 aa, Streptococcus agalactiae
MIFVTVGTHEQQFNRLIKEVDRLKGTGAIDQEVFIQTGYSDFEPQNCQWSKFLSYDDMNSYMKEAEIVITHGGPATFMSVISLGKLPVVVPRRKQFGEHINDHQIQFLKKIAHLYPLAWIEDVDGLAEALKRNIATEKYQGNNDMFCHKLEKIIGEI

SEQ ID NO: 15649 - protein, 447 aa, Streptococcus agalactiae; identical to SEQ ID NO: 6825

SEQ ID NO: 15650 - protein, 149 aa, Streptococcus agalactiae; identical to SEQ ID NO: 4194

SEQ ID NO: 15651 - protein, 1386 aa, Streptococcus agalactiae
TTGAAAGAAAAAGAAAATATACAAAAGATTATTATAGCGATGATTCAAACAGTTGTAGTTTATTTTTCTGCAAGTTTGACATTAACATTAATTACTCCCAATTTTAAAAGCAATAAAGATTTATTGTTTGTTCTATTGATACATTATATTGTTTTTTATCTTTCTGATTTTTACAGAGACTTTTGGAGTCGTGGCTATCTTGAAGAGTTTAAAATGGTATTGAAATACAGCTTTTACTATATTTTCATATCAAGTTCATTATTTTTTATTTTTAAAAACTCTTTTACAACGACACGACTTTCCTTTTTTACTTTTATTGCTATGAATTCGATTTTATTATATCTATTGAATTCATTTTTAAAATATTATCGAAAATATTCTTACGCTAAGTTTTCACGAGATACCAAAGTTGTTTTGATAACGAATAAGGATTCTTTATCAAAAATGACCTTTAGGAATAAATACGACCATAATTATATCGCTGTCTGTATCTTGGACTCCTCTGAAAAGGATTGTTATGATTTGAAACATAACTCGTTAAGGATAATAAACAAAGATGCTCTTACTTCAGAGTTAACCTGCTTAACTGTTGATCAAGCTTTTATTAACATACCCATTGAATTATTTGGTAAATACCAAATACAAGATATTATTAATGACATTGAAGCAATGGGAGTGATTGTCAATGTTAATGTAGAGGCACTTAGCTTTGATAATATAGGAGAAAAGCGAATCCAAACTTTTGAAGGATATAGTGTTATTACATATTCTATGAAATTCTATAAATATAGTCACCTTATAGCAAAACGATTTTTGGATATCACGGGTGCTATTATAGGTTTGCTCATATGTGGCATTGTGGCAATTTTTCTAGTTCCGCAAATCAGAAAAGATGGTGGACCGGCTATCTTTTCTCAAAATAGAGTAGGTCGTAATGGTAGGATTTTTAGATTCTATAAATTCAGATCAATGCGAGTAGATGCAGAACAAATTAAGAAAGATTTATTAGTTCACAATCAAATGACAGGGCTAATGTTTAAGTTAGAAGATGATCCTAGAATTACTAAAATAGGAAAATTTATTCGAAAAACAAGCATAGATGAGTTGCCTCAATTCTATAATGTTTTAAAAGGTGATATGAGTTTAGTAGGAACACGCCCTCCCACAGTTGATGAATATGAAAAGTATAATTCAACGCAGAAGCGACGCCTTAGTTTTAAGCCAGGAATCACTGGTTTGTGGCAAATATCTGGTAGAAATAATATTACTGATTTTGATGAAATCGTAAAGTTAGATGTTCAATATATCAATGAATGGTCTATTTGGTCAGATATTAAGATTATTCTCCTAACACTAAAGGTAGTTTTACTCGGGACAGGAGCTAAG

SEQ ID NO: 15652 - protein, 462 aa, Streptococcus agalactiae
MKEKENIQKIIIAMIQTVVVYFSASLTLTLITPNFKSNKDLLFVLLIHYIVFYLSDFYRDFWSRGYLEEFKMVLKYSFYYIFISSSLFFIFKNSFTTTRLSFFTFIAMNSILLYLLNSFLKYYRKYSYAKFSRDTKVVLITNKDSLSKMTFRNKYDHNYIAVCILDSSEKDCYDLKHNSLRIINKDALTSELTCLTVDQAFINIPIELFGKYQIQDIINDIEAMGVIVNVNVEALSFDNIGEKRIQTFEGYSVITYSMKFYKYSHLIAKRFLDITGAIIGLLICGIVAIFLVPQIRKDGGPAIFSQNRVGRNGRIFRFYKFRSMRVDAEQIKKDLLVHNQMTGLMFKLEDDPRITKIGKFIRKTSIDELPQFYNVLKGDMSLVGTRPPTVDEYEKYNSTQKRRLSFKPGITGLWQISGRNNITDFDEIVKLDVQYINEWSIWSDIKIILLTLKVVLLGTGAK

SEQ ID NO: 15653 - protein, 131 aa, Streptococcus agalactiae
TTGCGATGGTTTTATTTTAGTCCCAAGCAGGCAGAATAAAACGTAATTATGTTGAAAAAGCAAAAGAACAGATGGAAACAAGTGGGTCAAAGTTCTTAGGTATTATTCTTAATAAAGNNNNNTTAATTAAT

SEQ ID NO: 15654 - protein, 44 aa, Streptococcus agalactiae
  VARIANT 40, 41: Xaa = Any Amino Acid
MRWFYFSTQAGRIKRNYVEKAKEQMETSGSKFLGIILNKXXLIN

SEQ ID NO: 15655 - protein, 539 aa, Streptococcus agalactiae
ATGACTCGTTTAGAAATAGTTGATAGCAAGTTAAGACAAGCAAAAAAAACAGAAGAATACTTCAATGCGATCCGTACAAACATACAGTTTAGTGGAAAGGAAAATAAAATTCTTGCAATTGCCTCTGTTAGGGAAGGGGAAGGAAAATCCACTACTTCAACAAGTTTAGCTTTATCTTTAGCTCAAGCAGGATTTAAAACATTATTAATTGATGCGGATACTAGGAACTCTGTTATGTCTGGAACCTTTAAAGCAACTGGAACTATTAAAGGCTTGACGAATTATTTATCAGGTAATGCAGATCTTGGAGATATTATCTGTGAAACCAATGTTCCTAGACTGATGGTCGTTCCTTCAGGAAAAGTACCACCAAATCCAACAGCATTACTTCAGAACGCTTATTTTAATAAGATGATTGAAGCTATTAAAAATATATTTGATTATATTATCATCGATACTCCACCTATTGGTTTAGTTGTTGATGCCGCAATAATCGCTAATGCTTGCGATGGTTTTATTTTAGTCCCAAGCAGGCAGAA

SEQ ID NO: 15656 - protein, 180 aa, Streptococcus agalactiae
MTRLEIVDSKLRQAKKTEEYFNAIRTNIQFSGKENKILAIASVREGEGKSTTSTSLALSLAQAGFKTLLIDADTRNSVMSGTFKATGTIKGLTNYLSGNADLGDIICETNVPRLMVVPSGKVPPNPTALLQNAYFNKMIEAIKNIFDYIIIDTPPIGLVVDAAIIANACDGFILVPKQAE

SEQ ID NO: 15657 - protein, 690 aa, Streptococcus agalactiae
ATGAATAAAATAGCTAATACAGAAGTTGAAATAAATATATTCAACCTTTTAAAAAAATTGTGGAAAAAGAAATTTTTAATCACATTTGTTGCCATTGCGTTTGCAACAGCTGGACTTTTCTATAGTCTTTTTATTGTTACGCCACAATATACTTCTTCAACAAGGATATATGTCATTAACCCTAATACCCCTAATAATAGTATTACTGCACAAGATCTACAAGCGGGGAGTTTTCTTGCAAATGACTATAAGGAGATTATTACGTCTACTGACGTTCTAGAAAAAGTTATTTCTTCTGAAAAATTGAATTATCCTTCGTCTCAGTTGCTACAAAAAATAACAGTTTCTATTTTAAAAGATACACGTGTTATTTCAATATCGGTCGAAGATGCTAATCCAAAAATGTCTCAAAAATTAGCAAATTCAGTTAGAGAAGCAGCAGTTTCAAAAATCAAGGCAGTTACTCAAGTAGAGGATATCACTACTCTTGAGAAGGGAAATTTACCTAAAGCACCATCTTCTCCTAATATTAAAAAGAATGTACTAATCGGGTTTATTGTTGGTGCAGGATTATCAACTATTGTTTTAGTTATTATGGGGATTTTGGATGATCGTGTTAATACTGAAGAAGATATTGAAAAGGTCTTAGGACTTACTTCTTTAGGTATAGTACCAGATTTGAATAAACTT

SEQ ID NO: 15658 - protein, 230 aa, Streptococcus agalactiae; identical to SEQ ID NO: 11108

SEQ ID NO: 15659 - protein, 729 aa, Streptococcus agalactiae
ATGATTGATATTCATTCTCATATCGTTTTTGATGTAGATGATGGGCCCAAAACGCTTGAAGAGAGTTTATCTTTAATAGAAGAAAGTTATCGACAAGGTGTTAGAATAATTGTTTCGACATCACATAGAAGAAAAGGTATGTTTGAAACACCTGAAGATATTATCTTCAAAAACTTTTCTATAGTTAAACACGAAGCGGAAAAAAGATTTGAACATCTTCAAATCTTATATGGTGGAGAATTATACTATACAAGTGATATGTTAGAAAAACTGAAGTTAAAGCAAATTCCAACTTTAAACAATACGAAATTTGCTTTAATTGAATTTTCTATGCAAACTTCTTGGAAAGATATTCATACAGCTTTGTCAAATGTTTTAATGCTTGGTATTACACCAGTCGTTGCGCATATAGAGAGGTATAACGCTTTAGAGAATCAAAAAGAACGGGTGAAGGAAATTATTAATATGGGGTGTTACACACAAATAAATAGTTTCCATATTTTGAAACAAAAACTTTTTAATGATAAGCATAAACGCTTTAAGAAAAGAGCCCGTTATTTTTTAGAGGAAAATTTAGTGCATTTTGTAGCGAGTGATATGCATAACCTTGATGTTAGACCGCCATTTTTAGCAGAAGCTTATAAGATTATCTGTAGAGATTTCGGTAAAGAACGTGCTAACCAACTTTTTATTGAAAATGCTCAATCTATATTAAAAAACCATTACATT

SEQ ID NO: 15660 - protein, 243 aa, Streptococcus agalactiae
MIDIHSHIVFDVDDGPKTLEESLSLIEESYRQGVRIIVSTSHRRKGMFETPEDIIFKNFSIVKHEAEKRFEHLQILYGGELYYTSDMLEKLKLKQIPTLNNTKFALIEFSMQTSWKDIHTALSNVLMLGITPVVAHIERYNALENQKERVKEIINMGCYTQINSFHILKQKLFNDKHKRFKKRARYFLEENLVHFVASDMHNLDVRPPFLAEAYKIICRDFGKERANQLFIENAQSILKNHYI

SEQ ID NO: 15661 - protein, 1455 aa, Streptococcus agalactiae
ATGTCTAATCATTCGCGCCGTCACCAAAAGAAACACTCACATACACCTCTACGGGTGATTAATTTATTTCTTTTGGTGATTTTTATTTTGTTAAGTGTAGTCTCATTATTTCTTATGTATCGTCACCATTTTTTGGCATTTAGACACTTGAACGTCATTTATGGAGTTGTAATTATTTTAATCATTTTAGCAAGTTTATTTCTTTGTATTAAGAATAAAGCTAGAATTTTTACAACTATAATTTTAGTACTATCCTCTATTTTCGTTGCTACTACTTTATATGGATTTAAGTCAACCATTGATTTGACAAATAATCTAAATAAAACTGCTTCATACTCTGAAATTGAGATGAGTGTAGTTGTACCAAAAGATTCTAAAATAACCAATATAGAAGCTGTCAGCAAATTAGCCGCACCAGTTAAAAACGATACTTCAAATATTACTGATTTGATAGAACATATAAAATCAGAAAAAGGAATCTCTATTACACCACAAAAAACAGATTCTTACCAGGATGCATACAATAGAATTAAAAATGGTGATAGTCAAGCTATGGTTTTAAATAATGCTTATGTTAGCTTAATTGAACTTAGTACCCCTGATTTTAAATCGCAGATAAAAACGATTTATACTTACAAAATTAAGAAAAAAATTAATCGTAAAAATACTAATCATAAAGAAGGGGTATTTAATATCTATATTAGCGGTATTGATACTTTTGGCTCTATATCAACAGTATCAAGATCTGATGTAAATATTATTATGACGGTTAATACCAATACCCACAAAGTATTGTTAACGACAACACCACGAGATGCCTATGTAAAAATTCCAGATGGTGGGGGCAATCAATATGATAAATTAACCCATGCAGGTTTGTATGGTGTTGAGACATCAATGAAAACACTTGAAAACCTTTACGACATCAACCTTGATTATTATGCTAGAATTAATTTTTCATCATTTTTAAAATTAATAGACCTCTTGGGAGGAGTGACAGTTTATAACGATCAAGCTTTTACAAGTAAACATGGTAATTTTGACTTTCCTGTTGGTCAAGTAACATTGAATTCTGAGCAGGCTTTGGGCTTTGTTAGAGAACGTTATTCTCTACAAGGAGGCGATAACGATAGAGGTAGAAATCAAGAAAAAGTGATTGCAGCTATTATAAATAAGTTAGCTTCTAGTCAGTCAGTAACAAAATTAAATAGCATTACCTCACAGCTCCAAACGTCCGTTCAAACTAATATGACTATTGATAATATTAATGATTTGATTAACAATCAATTGTCAACTGGACAACGCTTCACTGTCGAGTCACAAGCATTAACTGGTCATGGTTCAACGGGTGAACTCCCTTCATATGCAATGCCAGGAGCTCAACTTTATATGATGTCAATTGATCAATCTAGCTTATCTAATGCAAAATCAAAAATTAAGAACACAATGGAGGAA

SEQ ID NO: 15662 - protein, 485 aa, Streptococcus agalactiae
MSNHSRRHQKKHSHTPLRVINLFLLVIFILLSVVSLFLMYRHHFLAFRHLNVIYGVVIILIILASLFLCIKNKARIFTTIILVLSSIFVATTLYGFKSTIDLTNNLNKTASYSEIEMSVVVPKDSKITNIEAVSKLAAPVKNDTSNITDLIEHIKSEKGISITPQKTDSYQDAYNRIKNGDSQAMVLNNAYVSLIELSTPDFKSQIKTIYTYKIKKKINRKNTNHKEGVFNIYISGIDTFGSISTVSRSDVNIIMTVNTNTHKVLLTTTPRDAYVKIPDGGGNQYDKLTHAGLYGVETSMKTLENLYDINLDYYARINFSSFLKLIDLLGGVTVYNDQAFTSKHGNFDFPVGQVTLNSEQALGFVRERYSLQGGDNDRGRNQEKVIAAIINKLASSQSVTKLNSITSQLQTSVQTNMTIDNINDLINNQLSTGQRFTVESQALTGHGSTGELPSYAMPGAQLYMMSIDQSSLSNAKSKIKNTMEE

SEQ ID NO: 15663 - protein, 921 aa, Streptococcus agalactiae
ATGAGAATTCAACAATTACAATATGTTATTAAGATTGTAGAAACTGGTAGCATGAATGAAGCCGCTAAACAACTCTACATTACCCAACCTTCACTTTCAAACGCTGTTAGGAACCTTGAGACTGAGATGGGTATCCAAATTTTTATTCGAAATCCAAAAGGAATAACGTTAACAAAAGATGGTATGGAATTTCTGTCATATGCGCGACAAATTCTAGAACAAACAGCACTTCTTGAAGAGCGTTATAAGGGTGATAATACAAGTCGTGAGCTGTTCAGCGTTTCTTCACAACACTATGCATTTGTGGTTAACGCTTTTGTAGCTCTCTTTAATGGCACAGACATGACCCAATACGAACTTTTTTTACGTGAAACTAGGACTTGGGAAATTATTGATGATGTTAAAAATTTCCGTTCAGAGATTGGTGTTCTGTTTCTTAATAGCTATAATAGAGATGTATTAACCAAATTATTCGACGATAATTCCTTAATTGCCACAACTCTTTTTACTACTACACCTCATATTTTCGTGAGCAAATCCAATCCCTTAGCTAATAGAAAAAAATTAAGTATGAAAGATTTAGAAGATTATCCTTATCTGAGTTATGATCAAGGCCTGCATAATTCTTTCTACTTTTCTGAGGAAATGATGTCTCAAATTCCTCACCCAAAATCCATTGTTGTCAGTGATAGAGCAACTCTGTTTAATTTAATGATTGGATTAGATGGTTATACAGTGGCAACTGGTATCCTCAACTCAAAATTGAACGGTGACGAAATTGTCGCAATCCCTCTTGACGTGGATGATGTTATTGATATTGTCTATATCCGACACGACAAAGCAAACCTTTCAAAAATGGGACAAAAATTTATTGACTATTTATTAGAGGAAGTTTCGTTTAATCATAAAAATAAACAGTCC

SEQ ID NO: 15664 - protein, 307 aa, Streptococcus agalactiae; identical to SEQ ID NO: 2184

SEQ ID NO: 15665 - protein, 356 aa, Streptococcus agalactiae
TGAAACAGGTTCAAACCATGCTTGAGAGGGCTTTTCCTGCGGCTTCATACAGCGAAACCATTCTCCACAGCGACCAAGGCTGGCAGTACCAGCACAAGTCCTACCATCAATTTCTGGAGGACAAAGGCATTCGTCCTTCTATGTCACGGAAGGGGAACAGTCCTGACAACGGTATGATGGAATCTTTCTTTGGGATTCTAAAGTCTGAGATGTTCTATGGCTTGGAGAAGTCTTACAAATCACTTGATGACCTTGAGCAAGCTATCACAGATTACATTTTTTACTACAACAACAAGCGAATCAAAGCAAAACTAAAAGGACTTAGTCCTGTGCAATACAGAACTAAATCCTTCACT

SEQ ID NO: 15666 - protein, 119 aa, Streptococcus agalactiae
  VARIANT 1: Xaa = Any Amino Acid
XKQVQTMLERAFPAASYSETILHSDQGWQYQHKSYHQFLEDKGIRPSMSRKGNSPDNGMMESFFGILKSEMFYGLEKSYKSLDDLEQAITDYIFYYNNKRIKAKLKGLSPVQYRTKSFT

SEQ ID NO: 15667 - protein, 440 aa, Streptococcus agalactiae
ATGGTCACAGGAGGATTCCGACTAGACCTCTTACTTGAGATAACTAAGATAGCTCGTGCAACTTACTATTATCAACTAAAGAAACTGAATAAACCAGATAAAGACAAAGCAATCAAATCTGACATTCAATCCATTTATGATGAACATAGAGGAAACTATGGCTATCGTCGGATTTATTTAGAACTGCGAAATCGTGGCTTTGTCATCAACCACAAAAGGGTGCAAGGCTTGATGAAAAGTATGGGCTTGACTGCTCGTATTCGTCGTAAGCGCAAGTATGCCTCTTACAAAGGTGAGGTTGGTAAGAAGGCTGATAACCTGATTCAACGCCAGTTTGAGGGGTCGAAGCCCTATGAGAAGTGCTATACCGATGTGACGGAGTTTGCTACCTGAAGGGAAACTTTATCTATCGCCTGTTCTTGATGGCTATAACAGTGAGA

SEQ ID NO: 15668 - protein, 147 aa, Streptococcus agalactiae
MVTGGFRLDLLLEITKIARATYYYQLKKLNKPDKDKAIKSDIQSIYDEHRGNYGYRRIYLELRNRGFVINHKRVQGLMKSMGLTARIRRKRKYASYKGEVGKKADNLIQRQFEGSKPYEKCYTDVTEFAYLKGNFIYRLFLMAITVR

SEQ ID NO: 15669 - protein, 547 aa, Streptococcus agalactiae
NTGGGGTGCTTTTCTGATATTAAGTTATGAAGATAAACTAGAAATATACGAGTTAAGAAAGATCGGGATGTCCTGGTCTCAGATTAGTCAACGATATGATGTTCGTATCTCGAATCTTAAATACATGATAAAACTCATGGATCGGTATGGTGTAGAAATCGTCGAAAAAGGTAGAAATGAGTATTATCCACCTGAATTAAAGCAGGAAATGATAGATAAAGTCTTGATTCATGGTTGTTCTCAACTCTCTGTTTCTCTTGATTATGCTCTCTCTAATTGTTCTATACTCACAAATTGGCTTTCCCAATTTAAGAAAAATGGTTATACTATTGTTGAGAAAACAAGAGGGAGACCGAGTAAAATGGGACGTAAGCGTAAGAAAACTTGGGAAGAAATGACAGAGCTCGAGCGACTTCAGGAAGAAAATGAGCGCTTGAGAACGGAGAATGCCTTTCTAAAAAAGTTGAGGGATTTGCGCTTGAGGGACGAAGCCTTACAGAGCGAACGGCAGAAACAATTAGAGAAATGGTCACAGGAGGATTCCGAC

SEQ ID NO: 15670 - protein, 183 aa, Streptococcus agalactiae
  VARIANT 1: Xaa = Any Amino Acid
XGCFSDELSYEDKLEIYELRKIGMSWSQISQRYDVRISNLKYMIKLMDRYGVEIVEKGRNEYYPPELKQEMIDKVLIHGCSQLSVSLDYALSNCSILTNWLSQFKKNGYTIVEKTRGRPSKMGRKRKKTWEEMTELERLQEENERLRTENAFLKKLRDLRLRDEALQSERQKQLEKWSQEDSD

SEQ ID NO: 15671 - protein, 765 aa, Streptococcus agalactiae
ATGACAGATTTTTCAACTGCTCTTAAAGTATTAGTGGAACAGTATTCTTATCATAATGCTTTCTTATTATTACGAAAACATGGTCCTTTAAACTCAGATTTATTATTTTTATTAGAAATGATGAAAGAGCGTCGAGAGTTAAACATTGATTTTCTTTTTGCTCATCAAGAACAAGTTGTTATATTACAAGAAAAATACAATATAAAGCTTTTGCATAACTCGTATGATTTAGAGTTGCTGGCAAATTACATCATGGATTTAGAAGCAAAAGTAAAAAATGGATTAATCATAGATTTTGTCCGTAGTGTTAGTCCTATTTTATATCGTCTATTTATGATTTTACTTGCACAAGAAGTACCTCACTTGCATGATTACATCTATAATGCAAGAGATGATCACTACGATACTTGGAAGTTTAAAGAATTAAAGGAGTCAAACCATCCAGTCCTTTTGGCATTCTCTGAAAGGTGGCACGATAGTCGCTTGACTTCTAAAAGCCTTGCAGAATGTTTACAATTAACCGACCTTGATGAAGAAGTGAAATCGACCATCATTCAATTAAGACAGTTCGAAAAATCAGTCAGAAATCCTTTGGCTCACCTGATTAAACCTTTTGATGAGCAAGAACTATATCGTACAACTCAATTTTCTTCTCAAGCATTTTTAGACCAGATTATCTTCTTGGCAAAGGTAATTGGTGTTGAGTATGATACTGTTAATTTTCACTACGATACGGTTAACAAGCTTATTATAAAGATACTTGAG

SEQ ID NO: 15672 - protein, 255 aa, Streptococcus agalactiae
MTDFSTALKVLVEQYSYHNAFLLLRKHGPLNSDLLFLLEMMKERRELNIDFLFAHQEQVVILQEKYNIKLLHNSYDLELLANYIMDLEAKVKNGLIIDFVRSVSPILYRLFMILLAQEVPHLHDYIYNARDDHYDTWKFKELKESNHPVLLAFSERWHDSRLTSKSLAECLQLTDLDEEVKSTIIQLRQFEKSVRNPLAHLIKPFDEQELYRTTQFSSQAFLDQIIFLAKVIGVEYDTVNFHYDTVNKLIIKILE

SEQ ID NO: 15673 - protein, 708 aa, Streptococcus agalactiae
ATGTCAATCCATATTGAAGCAAAACAAGGTGAAATTGCAGATAAAATTTTACTTCCAGGAGATCCACTCCGTGCGAAATTTATTGCCGAGAATTTTTTAGAAGATGCGGTGTGTTTTAATACAGTTCGCAATATGTTTGGTTATACAGGTACCTATAAAGGACATCGTGTTTCTATTATGGGAACTGGTATGGGTATGCCTTCAATTTCAATTTATGCTCGCGAACTAATTGTTGATTATGGGGTTAAAACATTGATTCGCGTAGGAACAGCAGGTGCTATTAATCCTGATATCCATGTTCGTGAACTTGTTTTGGCACAAGCAGCAGCAACAAATTCTAATATTATCCGTAATGATTGGCCTGAATTTGATTTTCCGCAAATTGCTGATTTTAAACTTTTGGATAAAGCTTATCACATCGCAAAGGAAATGGATATTACAACTCATGTAGGCAGTGTATTATCTTCAGACGTGTTTTATTCAAACCAACCAGATCGTAATATGGCTTTGGGTAAACTAGGTGTTCATGCTATTGAGATGGAAGCAGCAGCTCTCTACTATCTTGCAGCTCAACACAATGTTAATGCTCTTGCTATGATGACGATTTCAGACAACTTGAATAATCCAGAAGAAGATACAAGTGCAGAAGAGCGTCAAACAACATTTACTGATATGATGAAAGTTGGGCTCGAAACACTTATTTCTGAA

SEQ ID NO: 15674 - protein, 236 aa, Streptococcus agalactiae
MSIHIEAKQGEIADKILLPGDPLRAKFIAENFLEDAVCFNTVRNMFGYTGTYKGHRVSIMGTGMGMPSISIYARELIVDYGVKTLIRVGTAGAINPDIHVRELVLAQAAATNSNIIRNDWPEFDFPQIADFKLLDKAYHIAKEMDITTHVGSVLSSDVFYSNQPDRNMALGKLGVHAIEMEAAALYYLAAQHNVNALAMMTISDNLNNPEEDTSAEERQTTFTDMMKVGLETLISE

SEQ ID NO: 15675 - protein, 1170 aa, Streptococcus agalactiae
ATGCACTATGTATTAATGTTTACAGAGTGGTTAGCATTTGGTGATAGTAGAGAAAATACTCTGTCTTTGTTAAATAGTGTCACACCAATTAAAAGAGTGTTATCACTTACTTTAGTCTCCTTTTTAGCATCCCTTAGTTGGTATTACTTACAAATCAAGCCAAAGCAAATAACTAGTATTAAACAACAGGTTGTTTTTAAGGATTTTTCTGTAAAAAAATCACCTTACTGGCTACATATAGGTCACGCATTTTTGCAATTGATTTATGTAGGAGCTGGTGGTCCTATTGGAAAAGAAGGAGCGCCACGAGAGTTTGGAGCCATAAATGCTGGGAAAATATCGGATTTATTAGCACTTAAAGTGCTGGATAAACGTTTATTAATCGTTAGTGGTGCAGCTGCAGGTTTGTCAGCAGTTTATCAAGTACCCTTAGCTAGTGTATTCTTTGCTTTTGAAACTTTAGCTTTAGGAATTTCACTGAAAAATATTGTGACATTGCTAGTCTCTACTTTTGGTGCAGCTAGTATTGCTCAATTAGTTATTTCGACAGCCCCTCTTTATCATATTTCAAAGATGAGTCTGAATTCACAGTCATTAGCTTTTATGTTCTTGATCGTTTTATGTGTAACTCCGATTGCGATTAGCTTTAGATATTTAAATCAAAAAGTGACAGAGAGACGTATTAAAAATATAAAAATATTGTTAAGTTTGCCAGTAGTGTCATTGATAGTATCTGTTTTATCAATAATCTATCCCCAGATTTTAGGAAATGGTAATGCCCTAGTTCAAGAAGTCTTTAAAGGGACCACAGTTAGCTTAATCGCTATTTTAGTTGTTCTCAAGATGATAGCAACATTATCCACTCTTTACGCTGGTGCTTATGGCGGTATACTGACACCATCTTTTTCCATTGGTGCTTGTTTAGGTTTTTTGTTAGCTAGTATTTCTATTCCTTTACTTCCCCACCTATCGATAGTAACCAGTATGTTGGTTGGTGCAGCTATTTTTTTAGCTATTACAATGAGAGCGCCACTGACAGCTGTCGGTTTAGTCATATCTTTTACTGGTCAATCTGTTATAACTATTGTTCCCCTAACTATAGCAGTACTTTTTGCTACTGCCTATGATTATTTTATAAGAAAAATGAGGAGTTTATATGTCAATCCATAT

SEQ ID NO: 15676 - protein, 390 aa, Streptococcus agalactiae
MHYVLMFTEWLAFGDSRENTLSLLNSVTPIKRVLSLTLVSFLASLSWYYLQIKPKQITSIKQQVVFKDFSVKKSPYWLHIGHAFLQLIYVGAGGPIGKEGAPREFGAINAGKISDLLALKVLDKRLLIVSGAAAGLSAVYQVPLASVFFAFETLALGISLKNIVTLLVSTFGAASIAQLVISTAPLYHISKMSLNSQSLAFMFLIVLCVTPIAISFRYLNQKVTERRIKNIKILLSLPVVSLIVSVLSIIYPQILGNGNALVQEVFKGTTVSLIAILVVLKMIATLSTLYAGAYGGILTPSFSIGACLGFLLASISIPLLPHLSIVTSMLVGAAIFLAITMRAPLTAVGLVISFTGQSVITIVPLTIAVLFATAYDYFIRKMRSLYVNPY

SEQ ID NO: 15677 - protein, 807 aa, Streptococcus agalactiae
ATGACATTATTAGAAAAAATTAATGAGACTAGAGACTTTTTGCAAGCAAAAGGCGTCACAGCACCAGAATTTGGTCTTATTTTAGGCTCTGGTTTAGGAGAATTAGCTGAAGAAATCGAAAATCCCATTGTTGTGGATTATGCAGACATCCCAAATTGGGGACAGTCAACAGTAGTTGGTCATGCTGGAAAATTAGTGTATGGGGATTTATCAGGCCGTAAGGTATTAGCGCTTCAAGGTCGTTTTCACTTTTATGAAGGAAATACAATGGAAGTCGTTACTTTCCCAGTACGTATCATGAGAGCATTGGCTTGCCACAGTGTGCTTGTGACTAATGCAGCGGGTGGGATTGGATACGGACCAGGAACTTTAATGCTGATCAAAGACCACATCAATATGATTGGGACTAACCCTCTCATAGGTGAGAACCTTGAAGAATTTGGACCACGTTTCCCAGACATGTCGGATGCTTATACAGCAACATATCGACAAAAAGCTCACCAAATTGCTGAAAAACAGAATATCAAACTCGAAGAAGGTGTGTACTTGGGTGTATCAGGACCCACTTATGAAACACCTGCAGAAATTCGTGCATTCCAAACAATGGGCGCACAAGCGGTAGGTATGTCCACGGTTCCAGAGGTGATCGTTGCAGCTCACTCAGGGCTTAAAGTGTTAGGAATTTCAGCAATTACTAACTTTGCCGCTGGCTTCCAATCAGAGCTCAATCATGAGGAGGTCGTTGAAGTTACTCAGCGTATTAAAGAAGATTTCAAGGGATTAGTTAAATCATTAGTTGCTGAACTT

SEQ ID NO: 15678 - protein, 269 aa, Streptococcus agalactiae; identical to SEQ ID NO: 2192

SEQ ID NO: 15679 - protein, 405 aa, Streptococcus agalactiae
ATGGAAAAAGTTAGGATTTACCATAACCCAAATTGTGGGACATCAAGGAACGTACTTGCCATTATTCGTCATTGTGGTATTGAACCAGAAATTATTTATTATCTGAAAACACCACCTAGCAAGATGGCACTAGTTGAACTGTTGTTAGAAATGAAACTTTCTGTGAGAGAACTTCTAAGAACAGATGTTCCTGCTTATGAGAAATTCAATTTGGAATCTTCTAGCGTTACAGATGAAGAAATGATTGATGCGATGATACAAGATCCTGTTCTTATCAATCGTCCCATAGTTGTTACGAGTAAAGGTGCAAAACTCTGCCGACCCTGTGAAGAAATTTTAACCATTTTACCTGTAAAGATGGAAAAAGATTTTGTTAAAGAAGATGGGCAGATTATCCAAAGTTTA

SEQ ID NO: 15680 - protein, 135 aa, Streptococcus agalactiae
MEKVRIYHNPNCGTSRNVLAIIRHCGIEPEIIYYLKTPPSKMALVELLLEMKLSVRELLRTDVPAYEKFNLESSSVTDEEMIDAMIQDPVLINRPIVVTSKGAKLCRPCEEILTILPVKMEKDFVKEDGQIIQSL

SEQ ID NO: 15681 - protein, 1209 aa, Streptococcus agalactiae
ATGTCACAATTTGATCGCATTCACTTAGTTGTCTTAGATTCAGTGGGTATTGGAGCGGCACCAGATGCCAATGATTTTGTCAATGCAGGAGTTCCTGATGGTGCTTCAGACACGCTTGGCCACATTTCAAAAACAGTTGGACTTGCGGTGCCAAACATGGCTAAAATCGGACTTGGTAATATTCCTCGTCCCCAAGCGCTTAAGACCGTCCCTGCAGAAGAAAATCCAAGTGGCTACGCGACGAAGTTACAAGAAGTATCACTTGGTAAGGATACAATGACAGGGCATTGGGAGATCATGGGCTTAAATATTACAGAGCCATTTGATACTTTCTGGAATGGTTTTCCAGAAGATATTATCACAAAGATTGAGGATTTTTCAGGACGTAAAGTTATTCGTGAAGCGAATAAACCTTATTCAGGGACAGCTGTTATTGATGACTTCGGACCACGCCAAATGGAAACTGGTGAGCTCATCATCTATACCTCAGCTGATCCAGTCCTACAAATTGCAGCTCATGAGGATATCATCCCTCTAGAAGAACTCTACCGTATTTGTGAATATGCTCGTAGTATCACAATGGAGCGTCCAGCTCTCCTTGGTCGTATTATCGCTCGTCCATATGTGGGTGAACCAGGCAACTTTACGCGTACAGCCAACCGTCACGACTATGCAGTATCACCATTTGAAGATACCGTATTAAATAAACTAGATCAAGCTGGCATCGATACTTATGCTGTTGGTAAAATCAATGATATTTTCAATGGTTCAGGCATTAATCATGATATGGGACATAACAAATCAAATAGTCATGGTATTGATACTTTGATAAAAACGATGGGGTTATCAGAGTTTGAAAAAGGCTTCTCCTTTACTAATTTGGTTGACTTTGATGCTCTCTATGGTCACCGTCGTGATCCTCATGGTTATCGTGATTGTCTTCATGAGTTTGATGAGCGTCTTCCAGAGATCGTTTCAGCGATGCGTGACAAAGACTTACTTTTGATCACTGCCGATCATGGTAATGACCCAACTTATGCAGGTACAGACCATACAAGAGAATACATTCCTCTCTTAGCCTATAGCCCATCTTTCACAGGAAACGGCCTTATCCCAGTAGGGCATTTCGCAGATATTTCAGCAACAGTTGCGGATAACTTTGGTGTTGATACTGCGATGATTGGAGAGAGCTTCTTGCAGGACTTGGTA

SEQ ID NO: 15682 - protein, 403 aa, Streptococcus agalactiae; identical to SEQ ID NO: 6850

SEQ ID NO: 15683 - protein, 669 aa, Streptococcus agalactiae
ATGGACGAACTAAAAAAACTTGCTGGAGTGACCGCTGCAAAATACGTTAAAAACGGTATGATTGTGGGTTTAGGGACAGGTTCTACAGCATATTTTTTTGTTGAAGAAATTGGACGCCGTGTCAAAGAAGAGGGATTGCAAGTCATAGGCGTTACAACGTCAAACCGTACGACTGAGCAGGCAAGAGGATTAGGTATTCCGTTGAAATCAGCAGATGATATTGATGTCATTGATGTCACTGTGGATGGAGCAGATGAAGTAGACCCTGATTTTAATGGTATCAAGGGGGGCGGTGGTGCGCTGCTCATGGAAAAAATAGTAGCTACTCCAACTAAAGAATATATCTGGGTTGTCGATGAGAGCAAACTTGTTGAAACGTTAGGTGCATTTAAATTGCCTGTTGAGGTTGTTAGATATGGTTCTGAGCGTCTTTTTCGGGTTTTTAAATCAAAAGGTTATTGTCCTTCTTTCCGTGAAACAGAAGGTGACCGCTTTATCACTGATATGGGGAACTACATCATCGACCTAGATTTGAAAAAAATAGAGGATCCAAAGCAGTTAGCGAATGAACTTGACCATACAGTTGGTGTTGTTGAACATGGTTTATTTAATGGTATGGTTAATAAAGTTATAGTAGCAAGCAAAAATGGTCTTGACATACTTGAAAAA

SEQ ID NO: 15684 - protein, 223 aa, Streptococcus agalactiae
MDELKKLAGVTAAKYVKNGMIVGLGTGSTAYFFVEEIGRRVKEEGLQVIGVTTSNRTTEQARGLGIPLKSADDIDVIDVTVDGADEVDPDFNGIKGGGGALLMEKIVATPTKEYIWVVDESKLVETLGAFKLPVEVVRYGSERLFRVFKSKGYCPSFRETEGDRFITDMGNYIIDLDLKKIEDPKQLANELDHTVGVVEHGLFNGMVNKVIVASKNGLDILEK

SEQ ID NO: 15685 - protein, 708 aa, Streptococcus agalactiae
ATGAGAACACTATTTAGAATGATATTTGCTATTCCAAAGTTTATCTTTAGATTGATTTGGAATATCATTTGGGGAATATTCAAGACAGTTCTTGTTATTGCGATTATTTTATTTGGCTTGTATTACTATGCGAATCACAGTCAATCAGAATTTGCTAATCAACTTAGTGACATTATTCAGACAGGAAAAACATTTTTAAATTTTGCTGACACTAATCAGCTCAAAAATTCCTTTGCTAATCTAGCTACGGATAATGTTCATCATTCAGAAAATACTAGATGGGATAAAAATCAGGCAACTATCTATATAGCAACTAGAGATTCTGAGTTGGCCTCTGCTTACAAGCAAGCAATCTCCAATTGGAATGCAACAGGTGCTTTTGTGTTACAAACAACAGATAATCCTAATGCTGATATTATTGCTAAGGATTACTCAGATGCTAAAACACAAGCTGCAGGTGTAGCTGAAACCGAGAGAAATGCTTTAACTAATCGTATTTCAAAGGTAACAGTTAAATTAAACACATTTTACCTTAGGAATAAACAGTTTGGTTATGACCATACTAGGATTGTTAATACGGCCGAACATGAATTAGGACATGCTTTAGGTCTAGGACATAATGATCAACAACATTCCGTTATGCAGTCAAAAGGTTCGCATTATGGCATTCAAGAAGTTGATATTCAAACGCTAAAAAACTTATATGCA

SEQ ID NO: 15686 - protein, 236 aa, Streptococcus agalactiae
MRTLFRMIFAIPKFIFRLIWNIIWGIFKTVLVIAIILFGLYYYANHSQSEFANQLSDIIQTGKTFLNFADTNQLKNSFANLATDNVHHSENTRWDKNQATIYIATRDSELASAYKQAISNWNATGAFVLQTTDNPNADIIAKDYSDAKTQAAGVAETERNALTNRISKVTVKLNTFYLRNKQFGYDHTRIVNTAEHELGHALGLGHNDQQHSVMQSKGSHYGIQEVDIQTLKNLYA

SEQ ID NO: 15687 - protein, 786 aa, Streptococcus agalactiae
ATGGCATTTTTTAATATTGAATATCACTCTAAGGTACTAGGAACGGAACGTCAAGTCAATGTTATTTACCCAGATGCTTTTGAGATGTCTGATGATAAAATTGATGATTGTGACATTCCTGTTTTGTATCTTCTCCATGGAATGGGGGGAAATGAGAATTCTTGGCAAAAACGCACAAATATAGAGCGTCTTTTACGTCATACTAATCTTATCGTCGTGATGCCATCAACAGACTTAGCATGGTATACCAACACAAAGTATGGGTTGGATTATTTTGATGCAATAGCTATTGAGTTACCAAAAGTTTTGAAACGTTTCTTTCCTAATATGTCTGATAAGAGAGAGAAAAATTTCATTGCCGGATTATCTATGGGGGGATATGGAGCATATAAAATAGCTCTACTGACTAATCGTTTTTCTCATGCTGCCTCTTTGTCAGGTGCACTTTCTTTTGACTTTGATTTATTATTCAATAATGGCAACGATAACACTAACTATTGGTCGGGAATTTTTGGTGATTTGAATAACACTGATAACATAGAGCGTCATTCACTAAGGCGTTACGTTGAGTCTTTTGATATGAAGACTAAATTTTATGCATGGTGTGGTTATGAAGATTTTCTTTTTGAAGCTAATGAAGTCGCAATTGATGAACTTCGTCAATTAGGTTTAACTATTGACTATTCCAATGATCATGGTAAACATGAATGGTATTACTGGAATCAACAATTAGAAAAAGTCTTAGAATGGCTCCCTGTTGATTATGTCAAAGAAGAGCGCCTTTCT

SEQ ID NO: 15688 - protein, 262 aa, Streptococcus agalactiae
MAFFNIEYHSKVLGTERQVNVIYPDAFEMSDDKIDDCDIPVLYLLHGMGGNENSWQKRTNIERLLRHTNLIVVMPSTDLAWYTNTKYGLDYFDAIAIELPKVLKRFFPNMSDKREKNFIAGLSMGGYGAYKIALLTNRFSHAASLSGALSFDFDLLFNNGNDNTNYWSGIFGDLNNTDNIERHSLRRYVESFDMKTKFYAWCGYEDFLFEANEVAIDELRQLGLTIDYSNDHGKHEWYYWNQQLEKVLEWLPVDYVKEERLS

SEQ ID NO: 15689 - protein, 1659 aa, Streptococcus agalactiae
ATGAGCGACATAAAAATCATTGCTCTTGGAGGTGTTCGTGAAAACGGAAAAAACCTATATGTAGTAGAAGTCAATGATTCTATCTTTGTTTTGGATGCTGGACTCAAATATCCTGAAAATGAACAACTGGGTGTTGATGTTGTTATTCCAAATCTTGATTACTTAATTGAAAATAAAAAACGTGTTCAGGGGATTTTCTTAACCCATGGACATGCGGATGCTATTGGTGCATTGCCTTATATTATCGCCGAAGTCAAAGCACCTGTGTTTGGTTCACCTCTCACAATTGAATTAGCTAAGTTATTCGTTAAAAATAGTACAGCAGTCAAGAAATTCAATAATTTCCATGTGATTGATAGTGAAACGGAAATTGAATTTCAAGATGCGGTGATTTCGTTCTTTAAAACGACTCATTCAATTCCAGAGTCAATGGGAATTGTTATTGGGACAAAAGAGGGAAATATCGTTTACACAGGTGACTTTAAATTTGATCAAGCTGCAAGGAAATATTACCAAACAGATCTGGCGCGTTTAGCTGAAATTGGTCGTGATGGTGTTTTAGCACTTTTATCAGATTCTGCAAATGCTACAAGCAATGAGCAAGTTGCTAGCGAATATGAGGTCGGTGATGAAATTAAGAGCGTTATTGAAGACGCAGAAGGTAGAGTCATCGTAGCGGCAGTTGCAAGTAATCTCATTCGTATTCAACAAGTCTTTGATGCAGCGGCAGAAAACGGTCGTCGAGTAGTTTTAACGGGTTTTGATATTGAAAATATTGTTCGTACGGCCATTCGTATGAAACGCATTCATATTGCTGATGAAAATATGATTATCAAACCTAAAGATATGACACGTTACGAAGATAACGAATTATTAATCCTTGAAACTGGACGTATGGGAGAGCCGATAAATGGTCTCCAAAAAATGGCGATCGGACGTCATCGTTATGTTCAAATTAAAGATGGTGATTTAGTATTTATCGTAACAACACCAAGTATTGCAAAAGAGGCAGTTGTAGCGCGTGTTGAAAATCTGATTTATAAAGCTGGTGGCTCAGTTAAATTGATAACACAGAATTTGCGCGTATCAGGTCATGCAAATGGTCGCGAATTACAATTATTAATGAATCTATTGAAACCTAAATACCTTTTCCCAATTCAAGGAGAGTATAGGGATTTGTCAGCACATGCGGGCTTAGCTCAAGAGGTAGGAATGTCAGCAGATGATATTTATATTGTGAAGCGTGGTGACATCATGGTTCTTGAAAAAGATGGCTTCTTCCATAGTGGATCTGTTCCTGCTGGAGATGTTATGATTGATGGAAATGCTATTGGTGACGTTGGTAATATTGTACTTCGTGACCGCAAGGTATTATCTGAAGATGGAATTTTTATTGTTGTTATAACTGTCAGCAAAAAAGAAAAGAAAATTATTTCTAAAGCTCGTGTTAATACGCGTGGTTTTGTGTATGTGAAAAAAAGCAGAGATATTTTGCGTGAGAGCGCAGAATTAGTTAATACAACGGTAGAAGATTACTTAAGTAAAGATACATTTGACTGGGGTGAACTTAAAGGGAAAGTGCGTGATGAGGTCAGCAAGTTCTTATTTGACCAAACGAAACGTCGCCCAGCAATCCTTCCTGTGGTTATGGAAGTTCGT

SEQ ID NO: 15690 - protein, 553 aa, Streptococcus agalactiae
MSDIKIIALGGVRENGKNLYVVEVNDSIFVLDAGLKYPENEQLGVDVVIPNLDYLIENKKRVQGIFLTHGHADAIGALPYIIAEVKAPVFGSPLTIELAKLFVKNSTAVKKFNNFHVIDSETEIEFQDAVISFFKTTHSIPESMGIVIGTKEGNIVYTGDFKFDQAARKYYQTDLARLAEIGRDGVLALLSDSANATSNEQVASEYEVGDEIKSVIEDAEGRVIVAAVASNLIRIQQVFDAAAENGRRVVLTGFDIENIVRTAIRMKRIHIADENMIIKPKDMTRYEDNELLILETGRMGEPINGLQKMAIGRHRYVQIKDGDLVFIVTTPSIAKEAVVARVENLIYKAGGSVKLITQNLRVSGHANGRELQLLMNLLKPKYLFPIQGEYRDLSAHAGLAQEVGMSADDIYIVKRGDIMVLEKDGFFHSGSVPAGDVMIDGNAIGDVGNIVLRDRKVLSEDGIFIVVITVSKKEKKIISKARVNTRGFVYVKKSRDILRESAELVNTTVEDYLSKDTFDWGELKGKVRDEVSKFLFDQTKRRPAILPVVMEVR

SEQ ID NO: 15691 - protein, 759 aa, Streptococcus agalactiae
ATGATGATGAAAATCATAGAGTTAAAAGAAGCAACCGTACAAGTCAGTAATGGTTTAGCAGAAATGAAAACGATATTAGATCATGTTAATTTGAGTATTTATGAACATGACTTCATTACAATATTGGGTGGAAATGGAGCTGGAAAATCAACGCTTTTTAATGTAATTGCAGGTACCTTGATGTTAAGCAGTGGAAATATTTACATCATGGGACAAGATGTTACTAATTTATCAGCAGAAAAACGAGCTAAATATTTATCACGGGTATTTCAAGATCCGAAAATGGGAACAGCACCTAGGATGACAGTTGCTGAAAATTTATTAGTTGCTAAATTTCGAGGTGAAAAGAGACCGTTAGTTCCTAGAAAGATTACTAACTATACCGAAGAATTTCAAAAATTGATTGCTAGAACTGGTAATGGACTTGATCGCCATTTAGAGACACCTACAGGTTTATTATCAGGTGGACAAAGACAAGCGCTTAGTTTATTAATGGCAACTTTGAAAAAACCAAATCTGTTATTATTGGACGAACACACAGCAGCGCTTGATCCTAGAACAAGTGTTTCGCTTATGGGCTTGACTGATGAGTTTATCAAACAAGATTCGTTGACTGCCTTAATGATTACACATCATATGGAAGATGCTCTCAAATATGGAAATCGTGTATTAGTAATGAAAGATGGCAAGATTGTCAGAGATTTAAATCAGGCACAAAAAAACAAGATGGCTATAGCTGACTATTATCAATTATTTGAT

SEQ ID NO: 15692 - protein, 253 aa, Streptococcus agalactiae
MMMKIIELKEATVQVSNGLAEMKTILDHVNLSIYEHDFITILGGNGAGKSTLFNVIAGTLMLSSGNIYIMGQDVTNLSAEKRAKYLSRVFQDPKMGTAPRMTVAENLLVAKFRGEKRPLVPRKITNYTEEFQKLIARTGNGLDRHLETPTGLLSGGQRQALSLLMATLKKPNLLLLDEHTAALDPRTSVSLMGLTDEFIKQDSLTALMITHHMEDALKYGNRVLVMKDGKIVRDLNQAQKNKMAIADYYQLFD

SEQ ID NO: 15693 - protein, 860 aa, Streptococcus agalactiae
ATGATTATTTCATCAGTTTCACAAGGTTTATTATGGGGGATATTAGGATTAGGGATATACTTAACCTTTAGAATCTTAAAATTTCCAGACATGACAACAGAGGGCTCCTTCCCTCTAGGGGGAGCGGTTTGTGTTACCTTAATGAATCAAGGGGTTAATCCTATTTTGGCGACGATTCTAGGCATGCTATCAGGGATGTTAGCGGGATTTGTTACTGGTTTACTTTATACTAAAGGAAAGATACCGACGATTTTAGCAGGGATTTTAGTAATGACCTCATGCCACTCTATTATGCTAATGGTTATGAAAAGAGCAAATCTAGGTTTAAATGAGATTCAAACATTGAAAGATTTTCTTCCGTTTTCAAATGATTTAAATCTTCTCGTATTAGGTTTGATAGCTATTCTCTTGGCGATTTCTGTCTTAATTTATTTTCTCTATACACGCTTGGGGCAAGCTTATATTGCAACAGGAGACAACCCTGATATGGCAAAGAGCTTCGGCATTGATACCGACAAAATGGAAATGCTTGGCTTAATTGTATCAAATGGCTTAATTGCTTTATCAGGAGCTTTAGTAAGTCAACAAGATGGATATGCTGATGTATCAAAAGGTATAGGTGTTATTGTTATTGGGTTAGCTAGTATTATTATGGAGAGGTACTTTACTCTACTGGTTTAACTCTCTTTGAACGTTTAATTGCTATAGTGGTGGGTTCTATTCTTTATCAATTTTTAATAACGGCAGTAATCGCCTTAGGATTTAATACGAATTACCTAAAATTATTTAGTGCAATAGTGCTTGGAATTTGTTTAATGGTTCCTGTCCTAAAAACGAAGATTTTGAAAGGAGTACGCTTA

SEQ ID NO: 15694 - protein, 287 aa, Streptococcus agalactiae
MIISSVSQGLLWGILGLGIYLTFRILKFPDMTTEGSFPLGGAVCVTLMNQGVNPILATILGMLSGMLAGFVTGLLYTKGKIPTILAGILVMTSCHSIMLMVMKRANLGLNEIQTLKDFLPFSNDLNLLVLGLIAILLAISVLIYFLYTRLGQAYIATGDNPDMAKSFGIDTDKMEMLGLIVSNGLIALSGALVSQQDGYADVSKGIGVIVIGLASIIIGEVLYSTGLTLFERLIAIVVGSILYQFLITAVIALGFNTNYLKLFSAIVLGICLMVPVLKTKILKGVRL

SEQ ID NO: 15695 - protein, 1002 aa, Streptococcus agalactiae
ATGAAAAATAAAGGACTGATAGCTACGCTAATTCTATTGACCATATTAGTGGTTGGGGAATTATTTTATAACAAATCAGAAAAACATCTTAATTTATCAGAAAAGCAAGTTGTTAAAATTGGTATTTTACAGTATGTAACCCATGATGCTTTGGATGCTATTGAAAAGGGAGTTGAAGATGGTCTAGCTCAAGAAGGATATAAAGGGAAAAAAGTTAAATTAACCGTTTTAAACGCCGAAGCTGATCAAAGTAAAATTCAAGCGATGAGTAAACAATTAGTTAATCATCACAATGATATTTTGATTGGAATTGCGACACCATCAGCACAAGGTTTAGCAGCTTCGACTAAGGATACTCCTATAATCATGGGAGCTGTTTCTGATCCTTTAGGGGCCAAGTTAGTAACGAATATGAAGAAACCAACAACTAATGTTACAGGATTATCAAACGTTGTTCCGACCAAGCAAACTGTGCAATTAATCAAGGATATAACTCCCAATGTTAAACGTATAGGAATTCTTTACGCTAGTAGCGAAGATAATTCTGTGTCACAAGTAACTGAGTTTACAAAATATGCTCAAAAAGCAGGGCTAGAAGTTCTTAAATATTCTGTACCATCTACAAATGAAATTAAAACAAGTATGTCAGTCATGACCAAAAAAGTAGACGCTGTCTTTGTTCCACAAGATAATACTATTGCGAGTGCTTTTAGAACAGTTATCGTAGCAGCAAACCAAGCTAATATACCTGTGTATTCCAGTGTTGATACCATGGTTGAACAAGGAAGTATAGCATCAGTAGCGCAGAGTCAATATGGCTTAGGGTTAGAAACTGCAAAACAGGCCATTAAAGTCCTAAGAGGGAAGCCGGTTAAAGATGTACCAGTCAAAGTTATTGATACAGGGAAGCCAAGCCTCAATTTGAAAGCAGCCAAACACTTAGGAATTAAAATTCCTAAGAAGATTATGAAACAGGCAGAAATTACCGTTAAGGTTGACGAT

SEQ ID NO: 15696 - protein, 334 aa, Streptococcus agalactiae; identical to SEQ ID NO: 6868

SEQ ID NO: 15697 - protein, 1653 aa, Streptococcus agalactiae
ATGTCTTTTGATGGATTTTTTTTACATCACCTCACAAATGAATTACAAGAACAGATTGAAAAAGGACGTATCCAAAAAGTTAACCAACCTTTTGACCATGAATTGGTATTAACAATACGCAATAATCGTCGCAACTATAAACTACTCCTATCTGCTCACCCTGTATTTGGACGTATCCAAACTACCGAAGCAAATTTCCAAAATCCTCAAAATCCAAATACTTTTACAATGATCATGAGAAAGTATTTGCAAGGTGCAGTGATTGAAACCATTCAACAAATTGAAAATGACCGTATATTAGAAATCATCGTGTCTAATAAAAACGAAATCGGTGATCACATTAAAGCGACACTTGTTGTTGAAATCATGGGAAAACACAGTAACATTATCTTGATTGATAAAAATGAACATAAAATTATTGAATCAATTAAGCATGTTGGTTTCTCGCAAAACTCCTACCGTACTATCCTTCCTGGTTCAACTTACATTGCCCCACCCAAAACAAAAGCAATCAATCCTTTTGATATTTCTGATCAAACTCTATTTGAGCTGCTTCAAACCAATGACCTAAGCCCTAAAAACCTCCAACAGCTCTTCCAAGGTTTAGGACGCGATACTGCGCTAGAATTATCTCACTGTTTGAAAGACAATAAACTTAACGATTTTCGTCAATTCTTTTCGAGAGAATATTATCCTAGCCTAACAGAAAAATCGTTTTCCGCTGTCCAATTCTCAAGCAGTCACGAAACATTTCAGTCTCTTGGACAATTGTTAGATTATTACTACCAAGAGAAGGCTGAAAAAGATCGCATAGCACAGCAAGCTAGTGACCTCATTCACCGTGTTCAAAGTGAGTTAGAGAAAAATATCAAAAAACTAGCTAAGCAACAAGACGAACTTCTAGCTACTGAAAATGCAGAGGAGTTTCGCCAAAAAGGAGAGCTTCTAACTACCTATCTCTCTATGGTGCCAAATAATCAAGATATCGTTGTTCTTGATAATTATTACACCAACCAAACGATTGAAATTTCACTTGATCGAGCTTTAACACCCAACCAAAATGCCCAACGCTACTTTAAAAAATATCAAAAATTAAAAGAAGCTGTAAAACATTTAAAAGGAATTATTTCAGATACGAAAAATACAATCACCTACCTTGAATCTGTTGAAACATCGCTAAATCATGCTTCTATGGAAGATATCAATGATATTCGTGAAGAACTTGTTGAAACTGGATTTATTAAGCGACGCGCACATGATAAACAACATAAGCGTAAAAAACCTGAACAATATTTAGCATCCGATGGCAAGACTATTATTATGGTGGGACGTAATAATCTCCAAAATGACGAGTTAACATTTAAAATGGCTCGTAAAGGGGAGTTGTGGTTTCATGCCAAGGATATCCCCGGAAGCCATGTGTTAATTCGGGATAACCTCAATCCAAGTGACGAGGTTAAGACAGATGCCGCCGAGTTAGCTGCTTATTACTCTAAAGCTCGTCTCTCCAATCTTGTTCAAGTAGACATGATTGAAGCAAAAAAACTCAATAAACCAAGTGGTACTAAGCCAGGTTTTGTAACTTACACTGGTCAAAAAACCTTACGAGTCACTCCCACACAAGAAAAAATAGATAGCCTTAAACTAAAAAAA

SEQ ID NO: 15698 - protein, 551 aa, Streptococcus agalactiae
MSFDGFFLHHLTNELQEQIEKGRIQKVNQPFDHELVLTIRNNRRNYKLLLSAHPVFGRIQTTEANFQNPQNPNTFTMIMRKYLQGAVIETIQQIENDRILEIIVSNKNEIGDHIKATLVVEIMGKHSNIILIDKNEHKIIESIKHVGFSQNSYRTILPGSTYIAPPKTKAINPFDISDQTLFELLQTNDLSPKNLQQLFQGLGRDTALELSHCLKDNKLNDFRQFFSREYYPSLTEKSFSAVQFSSSHETFQSLGQLLDYYYQEKAEKDRIAQQASDLIHRVQSELEKNIKKLAKQQDELLATENAEEFRQKGELLTTYLSMVPNNQDIVVLDNYYTNQTIEISLDRALTPNQNAQRYFKKYQKLKEAVKHLKGIISDTKNTITYLESVETSLNHASMEDINDIREELVETGFIKRRAHDKQHKRKKPEQYLASDGKTIIMVGRNNLQNDELTFKMARKGELWFHAKDIPGSHVLIRDNLNPSDEVKTDAAELAAYYSKARLSNLVQVDMIEAKKLNKPSGTKPGFVTYTGQKTLRVTPTQEKIDSLKLKK

SEQ ID NO: 15699 - protein, 717 aa, Streptococcus agalactiae
ATGTCAGAAACAGTTAAATTATTTCAATACAGCACCTTGAGTTCACTGATGGCAGGATTGTACAAAGGCAGTCTAACTATCGGAGAATTATTAACTCACGGTGACTTAGGAATCGGTACTGTTCATATGATTGATGGTGAATTGATTGTATTGGATGGGAAAGCTTATCAAGCTATTGGTACAGATGGTAAAGCAGAGATTATCCAATTATCAGATGATGTGACAGTACCCTATGCAGCGGTTTTACCACACCATATCCAAAAACAATTTGATATCAATGCTGAGACAGATAATAAGGATTTGGAAGAGATGATTCTAAAAAACTTTGAAGGTCAAAATCTCTTTAAGTCTTTAAAAATCAAAGGAACGTTTTCAAGAATGCACGTTCGTATGATTCCAAAATCTCCACAACATAAACGTTTTGCAGATATTGCATCTAATCAGCCAGAATTTACCAGAGAGAATGTATCTGGTACGTTGGTTGGGATTTGGACGCCGGAATTATTTCATGGTGTGGGGGTAAAAGGGTTCCATGTCCACTTTATTTCAGACGATTTAACTTTCGGTGGGCATGTTATGGATTACTCGCTCACACAAGGAAAAGTTGAAATTGGAAAGGTTGACCAACTTGACCAATGTTTCCCAACTCAAGATCAAGAATTTTTGAAAGCTAACTTTGACCTACAAAAGCTTAGAGAAGATATTGATTTAAGTGAA

SEQ ID NO: 15700 - protein, 239 aa, Streptococcus agalactiae
MSETVKLFQYSTLSSLMAGLYKGSLTIGELLTHGDLGIGTVHMIDGELIVLDGKAYQAIGTDGKAEIIQLSDDVTVPYAAVLPHHIQKQFDINAETDNKDLEEMILKNFEGQNLFKSLKIKGTFSRMHVRMIPKSPQHKRFADIASNQPEFTRENVSGTLVGIWTPELFHGVGVKGFHVHFISDDLTFGGHVMDYSLTQGKVEIGKVDQLDQCFPTQDQEFLKANFDLQKLREDIDLSE

SEQ ID NO: 15701 - protein, 1680 aa, Streptococcus agalactiae
ATGACAGAATCACATAATCAATATGGGGCTGACTTAATTGTCGATAGCCTCATTAATCATGATGTCAAATATGTTTTTGGTATCCCAGGAGCTAAGATTGACCGCGTATTTGACACTCTAGAAGATAAAGGTCCAGAGTTAATTGTTGCTCGTCATGAGCAGAACGCGACTTTTATGGCTCAGGCTGTCGGGCGTATTACGGGAGAACCAGGAGTTGTTATTGCAACTAGTGGACCTGGGATCTCGAACTTGGCAACAGGGTTAGTTACCGCGACAGATGAAGGTGATGCTGTTCTTGCAATTGGTGGACAGGTTAAGCGAGGAGATTTATTGAAACGTGCTCATCAATCAATGAATAACGTTGCTATGCTAGAACCTATTACAAAATATTCTGCTGAGGTTCATGACCCTAATACTTTGTCAGAAACTGTTGCAAACGCCTATCGTCTTGCTAAATCTGGTAAACCAGGAGCAAGTTTTATCTCTATTCCTCAAGACGTTACAGACAGTCCAGTCTCAGTAAAAGCAATCAAACCTCTTAGTGCACCTAAATTGGGTTCGGCATCTGTTTTAGATATTAATTATTTAGCGCAAGCTATTAACAATGCTGTTTTACCGGTACTGTTATTAGGAAATGGCGCATCTTCAGAGGGAGTAACTGCTGCCGTACGTCGACTTCTTGATGCTGTTAAACTACCAGTAGTAGAAACTTTCCAAGGTGCGGGTATTGTGTCACGTGAGCTCGAGGATGAAACATTCTTTGGTCGTGTAGGCCTCTTCCGTAATCAACCTGGAGATATGCTTTTGAAGCGTGCAGACCTAGTTATTGCTATCGGGTATGACCCTATTGAATATGAGGCGCGTAACTGGAATGCTGAAATTTCTGCTCGTATTATCGTTATTGACGTTGAACAAGCAGAAATTGATACGTATTTCCAACCCGAGCGAGAACTGATTGGGGACATGGCACATACACTTGATTTACTTTTACCAGCTATTAAAGGATATGAATTGCCAGAAGGTTCAAAAGAGTATTTGAAAGGTCTTCGTAATAACATTGAAAACGTTAGCGATGTTAAATTTGATCGTGACTCAGCTCATGGACTTGTTCATCCTCTTGATCTCATTGATGTACTCCAAGATAATACCACCGATGACATGACTGTTACAGTTGATGTGGGAAGCCATTATATTTGGATGGCTCGCTACTTTAAATCATATGAAGCGCGTCACTTGCTCTTCTCAAACGGAATGCAAACATTAGGAGTTGCTCTACCTTGGGCAATTTCTGCGGCTCTTTTGCGTCCCAACACAAAAGTTATTTCAGTTTCTGGTGATGGTGGCTTCTTATTCTCAGCTCAAGAGTTAGAAACTGCAGTTCGTCTTCATCTACCAATTGTTCACATTATTTGGAACGATGGAAAATATAACATGGTTGAATTCCAGGAAGAAATGAAGTATGGGCGTTCTTCAGGTGTTGACTTTGGACCAGTTGATTTTGTAAAATACGCTGAAAGTTTCGGTGCTAAAGGTTACCGTGTAGACAGCAAAGACAGTTTTGAAGAAACACTCAAACAAGCTCTAATCGATGCTGAAAATGGACCAGTGTTGATTGATGTGCCTATTGACTATAAAGATAACGTGACACTAGGTGAAACAATCTTACCTGACGAGTTCTAC

SEQ ID NO: 15702 - protein, 560 aa, Streptococcus agalactiae
MTESHNQYGADLIVDSLINHDVKYVFGIPGAKIDRVFDTLEDKGPELIVARHEQNATFMAQAVGRITGEPGVVIATSGPGISNLATGLVTATDEGDAVLAIGGQVKRGDLLKRAHQSMNNVAMLEPITKYSAEVHDPNTLSETVANAYRLAKSGKPGASFISIPQDVTDSPVSVKAIKPLSAPKLGSASVLDINYLAQAINNAVLPVLLLGNGASSEGVTAAVRRLLDAVKLPVVETFQGAGIVSRELEDETFFGRVGLFRNQPGDMLLKRADLVIAIGYDPIEYEARNWNAEISARIIVIDVEQAEIDTYFQPERELIGDMAHTLDLLLPAIKGYELPEGSKEYLKGLRNNIENVSDVKFDRDSAHGLVHPLDLIDVLQDNTTDDMTVTVDVGSHYIWMARYFKSYEARHLLFSNGMQTLGVALPWAISAALLRPNTKVISVSGDGGFLFSAQELETAVRLHLPIVHIIWNDGKYNMVEFQEEMKYGRSSGVDFGPVDFVKYAESFGAKGYRVDSKDSFEETLKQALIDAENGPVLIDVPIDYKDNVTLGETILPDEFY

SEQ ID NO: 15703 - protein, 1224 aa, Streptococcus agalactiae; identical to SEQ ID NO: 11149

SEQ ID NO: 15704 - protein, 408 aa, Streptococcus agalactiae; identical to SEQ ID NO: 11150

SEQ ID NO: 15705 - protein, 1188 aa, Streptococcus agalactiae
ATGAATCAACCATCAGAAAAAGAATTTAAAAATAGTTTGTTTTTTAAATGGATCTTAAATAATCAAGCAGTTATTGCTCTCATGATTACCTTTTTGGTATTTTTAACGATTTTTATTTTTACCAAAATCTCTTTTATGTTTAAACCTGTGTTTGATTTTCTTGCTGTGCTGATATTGCCGCTTGTAATTTCTGGCTTGCTTTATTACCTATTAAAACCTATGGTTACATTTTTAGAGAAGCGGGGAATTAAGCGTGTAACAGCGATATTATCAGTTTTTACTATTATAATCCTTCTGTTAATTTGGGCAATGTCTAGTTTTATTCCCATGATGAGTAATCAATTACGCCATTTTATGGAAGATCTCCCTTCATATGTGAATAAAGTGCAAATGGAAACAAGTTCGTTTATAGATCACAACCCTTGGTTAAAATCTTATAAAGGGGAAATATCGAGCATGTTATCTAATATCAGTAGCCAAGCGGTCTCTTATGCTGAAAAATTTTCAAAGAATGTTTTAGATTGGGCAGGAAATTTAGCTAGTACAGTTGCACGTGTGACAGTAGCAACAATCATGGCTCCCTTTATTTTGTTTTATCTTTTAAGAGATAGTCGCAACATGAAGAATGGTTTCTTAATGGTTTTACCAACCAAACTACGCCAACCAGCTGATCGTATTTTGCGAGAAATGAATAGTCAAATGTCAGGATATGTGCAAGGACAAATCATTGTTGCTATTACTGTTGGTGTTATTTTTTCAATAATGTATAGTATTATAGGCCTTAGATATGGCGTGACATTAGGGATTATTGCCGGTGTGTTAAATATGGTTCCCTATTTGGGAAGTTTTGTCGCCCAAATTCCAGTGTTTATCTTAGCGCTTGTCGCAGGACCTGTTATGGTTGTTAAAGTTGCGATTGTTTTTGTTATTGAGCAAACTCTAGAGGGACGCTTTGTCTCACCTTTGGTTTTAGGTAATAAACTTAGCATTCATCCAATTACAATTATGTTTATTTTATTAACCTCTGGAGCGATGTTTGGTGTTTGGGGAGTATTCCTCAGTATTCCGATTTATGCATCTATCAAAGTTGTTGTTAAAGAATTGTTTGATTGGTACAAAGCTGTCAGTGGGCTATATACAATAGATGTTGTTACTGAAGAAAGAAGTGAAGAAGTTAAAAATGTTGAA

SEQ ID NO: 15706 - protein, 396 aa, Streptococcus agalactiae
MNQPSEKEFKNSLFFKWILNNQAVIALMITFLVFLTIFIFTKISFMFKPVFDFLAVLILPLVISGLLYYLLKPMVTFLEKRGIKRVTAILSVFTIIILLLIWAMSSFIPMMSNQLRHFMEDLPSYVNKVQMETSSFIDHNPWLKSYKGEISSMLSNISSQAVSYAEKFSKNVLDWAGNLASTVARVTVATIMAPFILFYLLRDSRNMKNGFLMVLPTKLRQPADRILREMNSQMSGYVQGQIIVAITVGVIFSIMYSIIGLRYGVTLGIIAGVLNMVPYLGSFVAQIPVFILALVAGPVMVVKVAIVFVIEQTLEGRFVSPLVLGNKLSIHPITIMFILLTSGAMFGVWGVFLSIPIYASIKVVVKELFDWYKAVSGLYTIDVVTEERSEEVKNVE

SEQ ID NO: 15707 - protein, 480 aa, Streptococcus agalactiae
TTGAAAAGACGGTTAATTTTTATGAAAAATAGAGATTTTAGGGTTAGAGACCAGCTCGAAACATTCGGAGTCAGAGTTTCTGCTTTAATCATAGAAAATCAAAAACTGCTATTAATATATGCTCCTCATCTCTATAAATACTATTTGCCAGGTGGGGCGCTTCAAGTTGGAGAAGATAGCAATAAGGCTGTTGCGAGAGAAGTACTTGAGGAAATAGGTCTTCACAGCCAAGTTGGTGATTTAGCCTATATTGTTGAGAATCAGTTTAATATTAAGAGACATCATTATCACTCAGTTGAATTTTTATATTTTGTTAATCTCTTGGGTCAGGCGCCAGAATCTATCAAAGAAGGAACGCATAAGCGACATTTTGTATGGCTTCCAATAAAAGAATTAACAAAAATTGATTGTAATCCTAATTTTTTAGCACAGGATTTGATAGAATGGCCAGGTCATGTTGTGCATAAAATCGTTCAAAAT

SEQ ID NO: 15708 - protein, 160 aa, Streptococcus agalactiae
MKRRLIFMKNRDFRVRDQLETFGVRVSALIIENQKLLLIYAPHLYKYYLPGGALQVGEDSNKAVAREVLEEIGLHSQVGDLAYIVENQFNIKRHHYHSVEFLYFVNLLGQAPESIKEGTHKRHFVWLPIKELTKIDCNPNFLAQDLIEWPGHVVHKIVQN

SEQ ID NO: 15709 - protein, 480 aa, Streptococcus agalactiae
ATGACTAAATTAGCAACAATTTGTTACATTGACAATGGCAAGGAATTACTTCTATTGCATCGCAACAAAAAAGAGAATGATGTTCATGAGGGAAAGTGGATCTCGGTAGGCGGTAAACTGGAGGCAGGTGAAACTCCGGATGAATGTGCTAAGCGTGAAATTCTAGAAGAAACCCATTTAACAGTAAAAAAAATGGATTTTAAAGGAGTCATCACTTTTCCTGAATTTACGCCAGGTCATGATTGGTATACCTATGTCTTTAAAGTAACAGATTATGAAGGAGAGTTAATTTCAGATGATGAATCACGAGAAGGAACCTTAGAATGGGTACCATATGATCAAGTTCTCTCTAAGCCAACGTGGCAAGGAGATTACGAAATTTTTAAATGGATTTTAGAAGATGTTCCTTTCTTTTCTGCTAAGTTTGTTTATGATGAACACCAAAATTTAATTGAAAAGACGGTTAATTTTTATGAAAAA

SEQ ID NO: 15710 - protein, 160 aa, Streptococcus agalactiae; identical to SEQ ID NO: 2228

SEQ ID NO: 15711 - DNA, 3216 bp, Streptococcus agalactiae
atggaaatcaaaaagaaacatcgtattatgctttattcagcccttattttaggaacaatattggttaacaatagttaccaagctaaagctgaagagcttaccaaaactacctcaacgtcccaaataagagatactcaaactaataatattgaagttctccagactgaaagtaccactgtcaaggagactagcaccacaaccacacaacaagatctgtctaaccccacagcttcaactgcaactgcaacagccactcatagcacaatgaaacaagtagtagataatcaaactcaaaataaggagctggtgaaaaacggagattttaatcaaactaaccctgtatctggaagctggtcacatacaagcgctagggaatggtctgcttggattgataaaggaaatactgctgataaatcacctattatccaacgtaccgaacaaggccaagtaagtctatccagcgacaaaggctttagaggtgctgtaacacaaaaagtgaacattgatcccactaaaaaatatgaggttaagtttgatattgaaacaagtaacaaggctggacaagctttccttcgtattatggagaaaaaagacaacaatacgcgactttggctttctgagatgaccagcggtactactaacaaacataccttaacaaagatatataacccaaagttaaatgtctccgaggtgacacttgaactttattatgaaaaaggaactggttttgttacttttgataatatatcaatgaaagcaaaaggccctaaagactcagagcatccacaacccgtcacaacacaaattgaaaaaagcgttaatacggctttaaacaaaaattacgtttttaataaagctgactaccaatacactctaaccaatccgtctcttgggaaaattgttggtggaatattgtatccaaacgctactggttcaacaactgttaaaatatctgataaatctggcaaaataattaaagaagtaccgttatcagttacagcttcaacagaagataactttacaaaactcctcgacaaatggaacgacgtgactattggtaattatgtttacgatactaatgattcgaacatgcaaaagcttaatcagaaattagatgaaactaacgccaaaaacatcgaagctatcaaactggattctaatcgcactttcctttggaaagatttagataatctcaataattcagcacagttaaccgctacttatcgtcgtttggaagatttagctaaacaaatcaccaatccacactctactatttacaaaaatgaaaaagctattcgtactgtaaaagagagtctggcttggcttcatcaaaacttctacaatgttaataaagatatagaaggctctgccaattggtgggattttgaaatcggtgttcctcgctcaattacaggtaccctatctctcatgaataactacttcactgacgctgaaataaaaacttataccgacccaattgaacactttgttcctgatgcagaatatttccgtaaaacgcttgtcaatccatttaaagcccttggtggtaatctagtagatatggggcgcgttaaaatcattgaaggtttacttcgtaaagacaatactattatcgaaaaaacttctcattctctaaaaaatctttttactactgctactaaagctgaaggcttctatgctgacggttcttacatcgaccatacaaatgttgcttatactggcgcctatggtaatgttctgatagatggtttgacacaattgctgcctatcattcaagaaactgactataaaatctctaatcaagaacttgatatggtttataaatggattaatcaatcatttttacctttaattgtaaaaggtgagttaatggatatgagtcgtggacgctcaattagtagagaggcagcttcttcgcatgcggctgcagttgaagttctcagaggtttcctcagattggctaacatgtctaatgaagagcgaaacttagacctcaaatcaactattaaaacgattatcacttcaaataaattctacaatgtcttcaataacctcaaatcgtattccgatattgccaacatgaataagctgcttaatgacagtacagtcgctactaaacctttaaaaagtaatttatcaacctttaatagcatggaccgcttagcttattataatgccaagaaagactttggtttcgcgctttcattacattctaaacgtaccctcaactatgaaggaatgaatgatgaaaatacacgtggttggtataccggagatggtatgttctatatttataatagtgatcaatctcattatagtaatcatttttggccaaccgtcaatccttataaaatggctggaacaactgaaaaagatgctaagcgtgaagataccactaaggaattcatgagcaaacatagcaaagacgctaaagaaaaaaccggtcaagttacaggaacatctgactttgttggttccgtcaaacttaatgatcactttgctcttgccgctatggattttactaactgggatcgcaccttaacagcacaaaaaggttgggttatcttaaatgataagattgtctttttaggtagcaacatcaagaatactaacggcattggaaatgtttctacaacaattgatcaacgaaaagacgattctaaaacaccttatactacatacgtcaatggaaaaactattgatttaaaacaagcaagttctcaacaatttacagatacaaaaagtgtctttttagaatcaaaagaacctggtcgcaatattggttatatcttctttaaaaatagcactattgatattgaacgcaaagagcaaacaggtacttggaacagcattaatcgtacttctaaaaatacctcaatcgttagcaatccttttatcactataagccaaaagcatgacaacaaaggtgatagctatggttacatgatggttccaaacattgatcgcacaagttttgataaattagccaacagcaaagaagtagaattactagaaaatagttcaaaacaacaagttatctatgataaaaacagtcaaacttgggctgttatcaaacacgataatcaagagagtctcattaacaatcaattcaaaatgaataaagcgggactttacctagtacaaaaagttggtaatgactatcaaaatgtctattaccaacctcaaaccatgacaaaaacagaccaattagctatc

SEQ ID NO: 15712 - protein, 1072 aa, Streptococcus agalactiae
MEIKKKHRIMLYSALILGTILVNNSYQAKAEELTKTTSTSQIRDTQTNNIEVLQTESTTVKETSTTTTQQDLSNPTASTATATATHSTMKQVVDNQTQNKELVKNGDFNQTNPVSGSWSHTSAREWSAWIDKGNTADKSPIIQRTEQGQVSLSSDKGFRGAVTQKVNIDPTKKYEVKFDIETSNKAGQAFLRIMEKKDNNTRLWLSEMTSGTTNKHTLTKIYNPKLNVSEVTLELYYEKGTGFVTFDNISMKAKGPKDSEHPQPVTTQIEKSVNTALNKNYVFNKADYQYTLTNPSLGKIVGGILYPNATGSTTVKISDKSGKIIKEVPLSVTASTEDNFTKLLDKWNDVTIGNYVYDTNDSNMQKLNQKLDETNAKNIEAIKLDSNRTFLWKDLDNLNNSAQLTATYRRLEDLAKQITNPHSTIYKNEKAIRTVKESLAWLHQNFYNVNKDIEGSANWWDFEIGVPRSITGTLSLMNNYFTDAEIKTYTDPIEHFVPDAEYFRKTLVNPFKALGGNLVDMGRVKIIEGLLRKDNTIIEKTSHSLKNLFTTATKAEGFYADGSYIDHTNVAYTGAYGNVLIDGLTQLLPIIQETDYKISNQELDMVYKWINQSFLPLIVKGELMDMSRGRSISREAASSHAAAVEVLRGFLRLANMSNEERNLDLKSTIKTIITSNKFYNVFNNLKSYSDIANMNKLLNDSTVATKPLKSNLSTFNSMDRLAYYNAKKDFGFALSLHSKRTLNYEGMNDENTRGWYTGDGMFYIYNSDQSHYSNHFWPTVNPYKMAGTTEKDAKREDTTKEFMSKHSKDAKEKTGQVTGTSDFVGSVKLNDHFALAAMDFTNWDRTLTAQKGWVILNDKIVFLGSNIKNTNGIGNVSTTIDQRKDDSKTPYTTYVNGKTIDLKQASSQQFTDTKSVFLESKEPGRNIGYIFFKNSTIDIERKEQTGTWNSINRTSKNTSIVSNPFITISQKHDNKGDSYGYMMVPNIDRTSFDKLANSKEVELLENSSKQQVIYDKNSQTWAVIKHDNQESLINNQFKMNKAGLYLVQKVGNDYQNVYYQPQTMTKTDQLAI

SEQ ID NO: 15713 - DNA, 1044 bp, Streptococcus agalactiae
atgactgaatttaaaaacattatcgtaactggtggagctggtttcatcggatcaaactttgtacactatgtttacaataaccacccagatgttcatgtaactgtccttgataaattgacatatgcaggtaaccgtgctaacattgaagccattcttggtgatcgtgttgagttagttgttggtgacatcgctgacgctgaattggtagacaaattggctgccaaagcggatgctattgttcactatgcggctgagagtcacaacgataactcattggaagatccaagtccatttatccatacaaactttatcggaacttacactttgcttgaagcagctcgtaaatacgatatccgtttccaccacgtgtcaactgatgaagtttatggagatcttccacttcgtgaagaccttccaggaaatggtgaaggaccaggtgaaaaattcactgctgaaacaaaatacaatccatcatcaccttactcatcaactaaggcagcttctgaccttatcgttaaggcatgggtacgttccttcggcgtaaaagcgaccatttcgaactgttcaaataactatggaccataccaacacatcgaaaaattcattccacgtcaaattacaaatatcttggcaggaatcaaaccaaaactttatggtgaaggtaaaaacgtccgtgactggatccacacaaatgaccattcaacaggtgtctgggctattttgactaagggtcgtattggtgaaacataccttattggtgccgacggtgagaaaaacaacaaggaggttcttgaacttatccttgagaaaatgggtcaaccaaaagacgcttacgatcacgtaactgaccgtgctggtcatgatcttcgttacgctatcgattctacaaaattgcgtgaagaactcggctgggaaccacaatttacaaacttttcagaaggtttggaagaaactattaaatggtatacagaaaatgagacatggtggaaagcagaaaaagatgctgtagaagccaagtatgctaaaactcaagaagtcattaag

SEQ ID NO: 15714 - protein, 348 aa, Streptococcus agalactiae; identical to SEQ ID NO: 11160

SEQ ID NO: 15715 - DNA, 591 bp, Streptococcus agalactiae
atgactgaacaattttttgataaagaattaacttgtcgcccaattgaagccattcctggattgttggaattcgatattaccgttcgtggagacaaccgtggatggttcaaagagaactttcaaaaagaaaaaatgataccgcttggtttcccagaaagcttctttgaggcagacaaactacaaaataatatttcgtttaacaaaaaaaatactttgcgaggtctccatgcagagccttgggataaatatgtttcgatcgctgatgaaggacgtgtgatcggtacttgggttgacctccgtgaaggtgacagttttggtaacgtttaccaaacgattatcgatgcctcaaaaggtatttttgttccacgcggcgttgctaatggtttccaagttctttcagataaagcagcttatacttatctcgttaacgattattgggcacttgaactcaaaccaaaatatgctttcgttaactatgcagatccaaatctaggcattcagtgggaaaaccttgaagaagcagaagtctcagaagcagataagaatcacccacttctcaaagatgtaaaacctttgaagaaggaagatttg

SEQ ID NO: 15716 - protein, 197 aa, Streptococcus agalactiae
MTEQFFDKELTCRPIEAIPGLLEFDITVRGDNRGWFKENFQKEKMIPLGFPESFFEADKLQNNISFNKKNTLRGLHAEPWDKYVSIADEGRVIGTWVDLREGDSFGNVYQTIIDASKGIFVPRGVANGFQVLSDKAAYTYLVNDYWALELKPKYAFVNYADPNLGIQWENLEEAEVSEADKNHPLLKDVKPLKKEDL

SEQ ID NO: 15717 - DNA, 867 bp, Streptococcus agalactiae
atgaaaggtattattttagcgggaggttcaggtactcgcttgtacccattaactcgtgctgcatcaaaacaattgatgccaatttatgataaaccaatgatttattatccattgtcagttttgatgttggcaggaataaaagaaatactgattatttctactccacaagatttgcctcgctttgaagatatgcttggagatggttcagaactaggaatctctctttcttatgctgaacaaccaagcccagatgggttagcacaggccttcattatcggtgaagaatttattggcgatgatcacgttgccttagtattaggtgataatatttaccatggaccaggtttatctgcaatgctacaacgtgcagctagtaaagaaagtggagcaaccgtctttggctatcaagtaaaagatccagaacgttttggtgttgtcgagtttgatactgatatgaatgccatttctattgaagaaaaaccagcgcaacctaagtctaattatgctgtcacaggtctttatttctatgataacgatgtggttgaaatagctaaaaatattaagccaagtcctcgtggagaacttgaaattactgatgttaacaaagcctaccttgatagaggtgatttatcagttgagttaatgggacgtggatttgcgtggttagacactggaactcacgaaagtcttcttgaagcagcacaatatattgaaacagtacaacgcatgcaaaacgttcaagttgctaaccttgaggaaattgcttaccgcatgggctacatcactcgtgaacaagtccttgagttggcacaaccacttaagaaaaatgagtatggtcaatacctacttcgtttgattggagaagcc

SEQ ID NO: 15718 - protein, 289 aa, Streptococcus agalactiae; identical to SEQ ID NO: 2236

SEQ ID NO: 15719 - DNA, 1101 bp, Streptococcus agalactiae
atgaaaaagatagcaattattggtgcaggagcagtcggagcgacactagcctattacttatcaaaagaaaaggatattcaggttactgtttttgattatggagttggacaagcaactaaggctgctgcggggattattagcccatggttttcaaaacgtcgtaataaagcctggtatcgcatggcgaggttgggggctgatttttattcaaagctagtcacggatttacaaaaagatggttttgaaacaaaattttatcagcaaactggtgttttcttattaaaaaaggacgagagtcagttagagtcattgtttgcactagcagataaacgtcgactagaatctcctctaataggtgatttacaaatactaaataaaagtgaagcaaatactcactttcctgagttagatggctatgaacagttactttatgcgagtggaggagcgcgagtagaaggggcggacttaacacgaatattgttagaagcaagtggtgttaatgtcatcaaggatgaagttcactttacgataactgataatggctttcgtgttcaaggaattgattttgataaacttgttttagcgagtggagcctggctagctaagatattagatgagcacaactatcaggtagatattcgccctcaaaaagggcaattgcgagactattattttagcaatattaatacaggaaaatatcctgttgtaatgccagaaggcgagctagatattatcccatttgataatggtaaagtctctgtaggtgcaagtcacgaaaatgatatggcttttgatttaaacattgattttaaagtcttagacaagtttgaagagcaagctattggctattttccgcaattaaaaaaagcagatacgacttctgaacgtgttggaattcgtgcctatacaagtgatttttctccattttttggccctgtcccttgtatggagggtgcatatgctgcaagtggattaggatcaactggcttaacagtgggcccattaattggttatgaattatgtcaattaatcttaaataaagaaaatcagctaaatttagaggattacgatattacgaaatacgtgaaaaagattagtaga

SEQ ID NO: 15720 - protein, 367 aa, Streptococcus agalactiae; identical to SEQ ID NO: 2238

SEQ ID NO: 15721 - protein, 786 aa, Streptococcus agalactiae
ATGAAAGCTAGAGAACTTATTGATGTATATGAAACTTATTGTCCACAGGAATTATCTATGGAAGGAGATATTTCAGGTCTTCAAATTGGATCTTTAGATAAAGAAATAAAGACAGTCATGGTAGCTTTAGATGTTCGAGAGACTACAGTAGCTGAAGCAATTGAACGTCAAGTAGATCTTCTTATTGTAAAGCATGCTCCTATTTTTCGTCCATTAAAGGATTTGGTAGCAACACCGCAAAATAAGATTTATATAGACCTTCTTAAATCAGACATTGCTGTTTATGTGAGCCATACTAATATAGATATCGTTCCTAATGGACTTAACGACTGGTTTTGTGAATTATTAGATATTCAATATCCCGATATATTATCTGAGACAAGTAATGGTTATGGTATTGGTCGCATTGGTGATGTTAGACCCCAGAGTTTTGAATTTTTTGCATGGAAAATTAAAGATGTGTTTGGTTTAGATAGCGTTCGTTTAGTTTCATATGATAAATCTAATCCTGAAATTCAACGAGTTGCTATTTGTGGGGGTAGTGGGCAAAGTTTCTACAAAGAAGCTATTGCAAAAGGAGCAGATGTTTTTGTAACGGGAGATATTTATTATCATACTGCACAAGAAATGATCACAAATGGTTTGCTTGCGATTGACCCAGGCCATCATATTGAGGTTTTATTTGTTTCTAAAATAGCTACTATGATTGAGCAGTGGAAACTTGAAAAAGGCTGGGATATTTCAGTTTTAGAGAGTAAAGCTCCAACAAATCCCTTTTACCATATG

SEQ ID NO: 15722 - protein, 262 aa, Streptococcus agalactiae; identical to SEQ ID NO: 2240

SEQ ID NO: 15723 - protein, 681 aa, Streptococcus agalactiae
ATGGATTTACAATTATCAAAACGATTACAAAAAGTTGCAAACTATGTTCCAAAAGGAGCTCGGTTATTAGATGTAGGAAGTGATCATGCTTACTTACCTATTTTTTTGTTGCAGATGGGATACTGTGATTTTGCCATTGCTGGTGAAGTGGTGAATGGACCGTATCAGTCTGCGTTGAAAAACGTTTCAGAACATGGTCTCACTTCAAAGATAGATGTTCGCTTAGCAAATGGTTTGTCAGCTTTTGAAGAAGCAGATAATATTGATACGATAGCTATCTGTGGAATGGGTGGTCGTTTGATTGCTGATATTTTGAATAACGATATAGACAAACTTCAGCACGTTAAAACACTAGTCTTACAACCTAATAATCGGGAAGATGATTTAAGAAAATGGTTAGCTGCAAATGATTTTGAAATAGTAGCAGAAGATATCTTGACTGAAAATGACAAATGCTATGAAATTTTAGTTGTTAAGCATGGTCATATGAATTTAACTGCTAAAGAATTGCGATTTGGTCCATTTTTATTATCCAATAACACAACAGTTTTTAAAGAAAAATGGCAAAATGAGCTTAATAAATTAACTTTTGCTTTAAACTCTATTCCCAATAGTAAAATGGAAGAACGTGCTATTTTGGAAGATAAAATACAGGATATAAAGGAGGTTCTTGATGAAAGC

SEQ ID NO: 15724 - protein, 227 aa, Streptococcus agalactiae; identical to SEQ ID NO: 2242

SEQ ID NO: 15725 - protein, 678 aa, Streptococcus agalactiae
ATGACTTATTTGGAACAATATCAGTCAGGGCAATTGACTCTACCAAGTGCTTTATTTTTTCACTTTAAATCTATTTTTAAGACAGCAGACGATTTTTTAGTTTGGCAATTTTTCTATTTACAAAATACAACTAATTTATCCGATCTAACACCGAGTCGTATTGCGACATCACTTGATAAAACAGTGGCAGATATCAATCGTTCTATATCGAATTTAACAAGTCAAGGTTTACTAGATGTCAAAACAATTGAGTTGAATCACGAAATCGAGATTATCTTTGATACAAGCCCTGTGTTTGCTAAATTAGATAAACTTTTCGAAGAGGATAATCAAGTAATAATAGACAATAAAACCGCTGATTCGAATCGTCTGAAAGATTTAGTAGGAGACTTCGAACGTGAATTAGGTCGCTTATTAAGTCCTTTTGAATTAGAAGATTTACAAAAGACACTGCAAGAAGATCAGACAGATCCTGATATTGTTAGGGCAGCTCTTAGAGAAGCGGTTTTCAATGGGAAAACAAGTTGGAATTATATCAATGCTATCCTTCGCAACTGGCGGCGTGAAGGATTGACGACACTTCGACAAATTGAAGAGAGAAAACAAGCACGTGAAGATAACCAAATGAAAGATTTAGCGATTTCGGATGATTTTAAAAATGCAATGAATTTATGGGAA

SEQ ID NO: 15726 - protein, 226 aa, Streptococcus agalactiae; identical to SEQ ID NO: 2244

SEQ ID NO: 15727 - protein, 516 aa, Streptococcus agalactiae
ATGGATTTAAATAATTACATCGCTTCAATTGAAAACTATCCTCAAGAAGGAATTACTTTCCGTGATATCTCCCCATTAATGGCTGATGGTAAAGCATACAGCTATGCTGTTCGTGAAATTGTACAATATGCTGCTGATAAAGATATTGATATGATTGTTGGACCAGAAGCTCGTGGCTTTATTGTTGGTTGCCCAGTTGCTTATGCTCTTGGTATTGGTTTTGCTCCAGTCCGTAAACCAGGTAAATTACCACGCGAAGTTATTTCAGCTGACTATGAAAAAGAATATGGTCTTGATACATTGACAATGCACGCAGATGCTATTAAACCAGGTCAACGTGTTTTAATTGTTGATGACCTTTTAGCTACTGGTGGAACAGTAAAAGCGACAATTGAAATGATTGAAAAACTTGGTGGCGTTGTCGCAGGCTGTGCTTTCCTAGTTGAACTTGATGGATTAAATGGTCGTAAAGCTATTGAAGGTTATGATACTAAGGTATTGATGAACTTTCCAGGA

SEQ ID NO: 15728 - protein, 172 aa, Streptococcus agalactiae; identical to SEQ ID NO: 2246

SEQ ID NO: 15729 - protein, 2562 aa, Streptococcus agalactiae
ATGAGACCTATCGTTAGAAAAAAGATGTACAAAAAAGGTAAATTTTTGGTCATTGCAGGTATCGTTACTATTTTAGGTGGTAGTGCAATTCTTGGTCAAGATGTCAAGGCAGAACAGGCAGAAGCAGTAACTTCAACGATCTCAGAGAAAACTGATAGCAGTCAGACTATTTCGGATATTTCCAAGTTAACGTTACCTGTTAATTCCTCGGAGGCTATGAAAAATAGTGCAGAGCCTTTAATAAAAACAGGCTTTGCTACATCTGTTTCATCTAATCCTAGAGAGATAGCAGCTACCCCAGTCAAAACCTTTGATGCTAGTTCAAAAGTTGTTGTAAAAGCTAGTACTGCTGAGCACTCAGCAAATCAAACAAATTCTAATGTTAATCAAGTAGCTAATGATAGTGAAGTTATTACTCAACAAAATTCAACAAAGCAATTACCAACAGTGACTTACTCTGCTCATGTTCAAGATATTGGATGGCAAAAGTCGGTTGATAATGCAACAGTTTCAGGAACAGTAGGACAGGAAAAGCAGGTTGAGGCAATAAAATTGTCTATTAAAGCCCCTGAAGGAATAACAGGAAAACTTAGCTATAAAACTTATGTTAAAGGACAAGGTTGGCAACCTTCAGTAGAGAGTGGTCAAGTTAGTGGTACTGTTGGTCAGAGTAGACCTATTGAAGCACTAAGCATTAACCTTACTGATAATTTACAAAAATTATATGATGTCTATTATCGTGTTCATGTTCAAGATATCGGGTGGATGGCTTGGGCTAAAAATGGAGCTTACGCTGGGACTTTGGGAATGTCAAAGCGCCTTGAAGCTTACAAAGTAAAGTTTACCCTTAAAGGACAATCTGTTTTAACACCAACTATACTTAAGGAAGAGAGACCTGTCTTAAATTATCAGGTTAAGGTAGGCCAAAATGGTTGGCAATCTAATAAACTTGAAGGACAAATGGCGGGAACTTTAGGAGAATCCAAAGCCCTAGATGGAGTAAAATTCACTCTTAGCACCTTGAAGTATGGGGACATTCTCTATCGTACTCATGTACAAGATAAAGGTTGGGGAGAAATTTTAGGTAGTCAAACAAGTAAGGATTATCAAGGAAAAAGACTAGAAGCTATTCAATTGGACTTAAGTGGGAATTTAAAACAAAATTATGATATTTATTATCGCGCTCACGTCCAAGATAAAGGTTGGATGGCTTGGCAAAAAAATAATAGTGTAGCAGGTACAGTCGGAGAATCGAAACGTTTAGAGGCTTTGGAAGTAAAACTAGTAGCTAAAGCTTCAGATTTTAGTTCCCAAACAAATCATTCATTCTTAGAAATGAAGCATCCTGGATTAAGTTATCAAACTTATCTTCAAAAAGATGGTTGGAAACCAACGGTTTTGGAAGGCCAATTAGGAGGTAGTATTGGACTTTCAAAATCTATAAAAGCCATCAAACTTAACTTAGGTAGTACAGCTCTAGGAAATATAGAATATAGAACTTTTCTTAATGGTTCAGGTTGGCAAACTGTTGTTAATTCAGGGAGAGAAAGTAATGTACCAAATGAATCTCAACAAGTAGAAGCTATTCAGATGCGATTGACAGGTCTGCTATCGAAAACCTATAGTGTGATGTATCGAGTTCACATGCAAGATTATGGTTGGCAGGATTGGACTTATAACAATGACATCGCTGGTAGTACTAACCAAGGAAAACGAATTGAAGCAATCGAAATTAAATTAGTTGAGACTGCTAAAATGCCTATAACTGTCCAAACGACCTATAAGGGAACTGGAAACTATAATGTACGAGTGACAAATGTTATTAGTCCTGGGAATTTAAAAATTGCTATTTGGTCAGATAAAAACAATCAGGATGACCTTAAGTGGTATACCGTCACACCCAAAAATCATGAAGCTAGATTGACATTTAATGTTACAAATCATAGAGACAATGGTAAATACTTTATCCATGTTTATCAGGAAAATGCTTCTAATCAAAAACAATTATTGGTAAAAACTTCTCTACAAGTCGCACATTCAAATTATAATACTCCTTACTTTAGCCAACGTGATGGAAGGTGGGCAAGTCGAAGATATGGTATGGCAACTTTAGGAGAAACTGGTTGTGTACCAACTTCTCTAGCTATGATTTTGTCTTCTTTGAAAGGAGAAACTGTTTTACCAACGCAAATTGCAGATTACCTTTACCATAAGACAGTTGAATTTAATCGTGGTGTTCAAGGAACAACTTCTAGAGGAATCTTAAAAGCAGCCAAAGAATGGGGTGTAACAGCAACTGCATTAGGAACTCAAGCTAACCTTGTACAAGCGTTGAAGGATGGTTATCATGTCCTAGCGGCAGTACAAAATAATGTTTTTGTTCTTCATGGAAGTCATGAAATCGTTCTCAAAGGATATAATAACGGACTGACACATGTCTCTGACCCTTACACACCGTCCTTGTCTGGTTGGTATCCAATTTCACAACTTTGGAAAGAACAGAGCTATTATAGTGAGGATAGAATTGATATTGGAGCACCTTTTGTCAAGGTAACAGATGCC

SEQ ID NO: 15730 - protein, 854 aa, Streptococcus agalactiae
MRPIVRKKMYKKGKFLVIAGIVTILGGSAILGQDVKAEQAEAVTSTISEKTDSSQTISDISKLTLPVNSSEAMKNSAEPLIKTGFATSVSSNPREIAATPVKTFDASSKVVVKASTAEHSANQTNSNVNQVANDSEVITQQNSTKQLPTVTYSAHVQDIGWQKSVDNATVSGTVGQEKQVEAIKLSIKAPEGITGKLSYKTYVKGQGWQPSVESGQVSGTVGQSRPIEALSINLTDNLQKLYDVYYRVHVQDIGWMAWAKNGAYAGTLGMSKRLEAYKVKFTLKGQSVLTPTILKEERPVLNYQVKVGQNGWQSNKLEGQMAGTLGESKALDGVKFTLSTLKYGDILYRTHVQDKGWGEILGSQTSKDYQGKRLEAIQLDLSGNLKQNYDIYYRAHVQDKGWMAWQKNNSVAGTVGESKRLEALEVKLVAKASDFSSQTNHSFLEMKHPGLSYQTYLQKDGWKPTVLEGQLGGSIGLSKSIKAIKLNLGSTALGNIEYRTFLNGSGWQTVVNSGRESNVPNESQQVEAIQMRLTGLLSKTYSVMYRVHMQDYGWQDWTYNNDIAGSTNQGKRIEAIEIKLVETAKMPITVQTTYKGTGNYNVRVTNVISPGNLKIAIWSDKNNQDDLKWYTVTPKNHEARLTFNVTNHRDNGKYFIHVYQENASNQKQLLVKTSLQVAHSNYNTPYFSQRDGRWASRRYGMATLGETGCVPTSLAMILSSLKGETVLPTQIADYLYHKTVEFNRGVQGTTSRGILKAAKEWGVTATALGTQANLVQALKDGYHVLAAVQNNVFVLHGSHEIVLKGYNNGLTHVSDPYTPSLSGWYPISQLWKEQSYYSEDRIDIGAPFVKVTDA

SEQ ID NO: 15731 - DNA, 96 bp, Streptococcus agalactiae; identical to SEQ ID NO: 11177

SEQ ID NO: 15732 - protein, 32 aa, Streptococcus agalactiae; identical to SEQ ID NO: 11178

SEQ ID NO: 15733 - DNA, 2196 bp, Streptococcus agalactiae
atgatatctgctaagtatagttgggtcctcaataaccaaaagccagacgctggcttttttgaggcttcaaaaaaagaaaagataagtgaagcggtggcttccttaatttattcgcgaggtattaagacatcagcggaattacatcattttttacaaactaatttggaaaatctccatgatccttatttgttaaatgatatggataaagctgttaatcgtattagacgagctattgaaaataatgaaactattttagtttatggagactatgatgctgatggaatgacatcagcatcaatcatgaaagaagcattagatatgatgggagctgaagtccaggtttatctcccaaatcgctttacagatggttacggtcccaatcaaagtgtttataaatattttattgaacaacaagatgtttcattaatcattacggttgataatggtgtggcagggcatgaagcaattgcatatgctcaaaatcaaggtgtggacgtggtagttactgatcatcacagtatgccagcagatttaccttgtgcttatgctattattcacccagaacatcctgatgctaattatccatttccttatttagcagggtgtggtgttgctttcaaagtagcttgtgctctcttagaaacaatcccgacagaaatgttggatttggttgctattgggacgattgcagatatggttagcctaactgatgaaaatcgtatcatggtaaaagctggacttgaagttatgaaagatagtgaaagaataggcttacaggagctaatatctttatcaaatattgatttaaaaacactaaatgaagaaactattggatttaaaattgctccacaattaaacgctttaggaagacttgatgaccctaatccagctattgaattactaacagggtttgatgatgaagaatctcaagcaatagcccaaatgattgatcaaaaaaatgaagagcgcaaagaaatcgttcaaactatctttgaccaagctatgcaaatgcttgatcaaacaaagcctgtacaagttttagcaaaagaaaattggcatccaggggttttaggtattgtggcgggtcgtattttagagagaactggacaacctgttattgttttgaatattgaagatggtattgctaaaggaagtgccagaagtgtagaagcacttgatatttttcaagcttttgaccagcatcgagaattattcattgcttttggaggtcacagcggagcagcaggcatgactttagaggaaagtaaggtaggtgatctttctcaagttttatgtgactatatctctaaaaaacaattggacatgagtcagaaaaaaactctgacaattgatagtgagctacgttttgacgaacttagtttagacactgttagagattttgaaaagttagcgccatttggaatggataataaaaaaccagtctttttgttaaaagattttaaagtgagtcaagccagagtcatggggcaaaacggtgctcatctgaaattaaaactagaacaagatggacaagcacttgatttggtagcatttaatatggggagtcaactacaagagtttcaacaagcacaacatttggagttagctgtcactttatctgttaatcaatggaatggtgccacaaccctacaattaatgttggaggatgcgcgtgtagatggtattcaattatttgatattagaagcaaagcaagtagcttacctcatggagtgccaatcctgtctcaagaagagcagagcaaagaagttattcttttgactgttcccgatcatccacaagaattaaaacaaatgactcaaggtaaacagtttgatgctatctattttaaaaatgagataccaaaaaattattttatatctggttatggtacacgtgatcaatttgctagtttatataaaacaatatatcaattcccagaatttgacgttcgttataagttaaaagagctcagttcctaccttcatattcctgatattttattaattaaaatgattcaaatttttgaagaactacattttgttacgattacagaggggattatgacagtcaataaagaagcagaaaagcgagatatctctgagagtcaaatttatcaagaattaaaagagacagttaagtttcaagaattaatggctttagggacacctaaagaaatatatgattttatgatgagt

SEQ ID NO: 15734 - protein, 732 aa, Streptococcus agalactiae
MISAKYSWVLNNQKPDAGFFEASKKEKISEAVASLIYSRGIKTSAELHHFLQTNLENLHDPYLLNDMDKAVNRIRRAIENNETILVYGDYDADGMTSASIMKEALDMMGAEVQVYLPNRFTDGYGPNQSVYKYFIEQQDVSLIITVDNGVAGHEAIAYAQNQGVDVVVTDHHSMPADLPCAYAIIHPEHPDANYPFPYLAGCGVAFKVACALLETIPTEMLDLVAIGTIADMVSLTDENRIMVKAGLEVMKDSERIGLQELISLSNIDLKTLNEETIGFKIAPQLNALGRLDDPNPAIELLTGFDDEESQAIAQMIDQKNEERKEIVQTIFDQAMQMLDQTKPVQVLAKENWHPGVLGIVAGRILERTGQPVIVLNIEDGIAKGSARSVEALDIFQAFDQHRELFIAFGGHSGAAGMTLEESKVGDLSQVLCDYISKKQLDMSQKKTLTIDSELRFDELSLDTVRDFEKLAPFGMDNKKPVFLLKDFKVSQARVMGQNGAHLKLKLEQDGQALDLVAFNMGSQLQEFQQAQHLELAVTLSVNQWNGATTLQLMLEDARVDGIQLFDIRSKASSLPHGVPILSQEEQSKEVILLTVPDHPQELKQMTQGKQFDAIYFKNEIPKNYFISGYGTRDQFASLYKTIYQFPEFDVRYKLKELSSYLHIPDILLIKMIQIFEELHFVTITEGIMTVNKEAEKRDISESQIYQELKETVKFQELMALGTPKEIYDFMMS

SEQ ID NO: 15735 - DNA, 759 bp, Streptococcus agalactiae
atggcaagaacgatactgattacaggagcttctggtggtttagcacaggcaattattaaccaattacctcaagacgaccatttaattgtcacagggagatcaagagaaaaacttgaaaagctttatggaaagagaccaaacaccttatgtttatcactagacataactaatgacaatgctgtaacgaatatgattgaaaaaatttatgttgaatttggtcaaattgatattttaattaataatgctggatttggttcttttaaagaattttgggattatagtgatgaagaagtcaaagacatgtttgctgtgaatacatttgcaacgatgtctatagctcgtcagataggacataagatgtctcttgtaaaatctggtcatatcgttaatattgcaagcatggctggcctcatagcaacaagtaaagctagcgtttatggggctagtaagtttgctgtcgttggatttttgaatgctcttcgtttagaattagcagaaaaaaatgtttatgtgacaagtgtaaaccctggaccaatcaaaacaggattttttgctcaggctgatccaagtggtgattatttagcaagtataggtcgttttgttctaacaccagaaaaagtagctaaaaaagtagtttctattcttggaaaaaataagagagaattaaatcttccttttatattagcttttgcgcataaatattatagtttatttccaaaaacagctgattattttgccagaaaggtattcaattataaa

SEQ ID NO: 15736 - protein, 253 aa, Streptococcus agalactiae
MARTILITGASGGLAQAIINQLPQDDHLIVTGRSREKLEKLYGKRPNTLCLSLDITNDNAVTNMIEKIYVEFGQIDILINNAGFGSFKEFWDYSDEEVKDMFAVNTFATMSIARQIGHKMSLVKSGHIVNIASMAGLIATSKASVYGASKFAVVGFLNALRLELAEKNVYVTSVNPGPIKTGFFAQADPSGDYLASIGRFVLTPEKVAKKVVSILGKNKRELNLPFILAFAHKYYSLFPKTADYFARKVFNYK

SEQ ID NO: 15737 - DNA, 927 bp, Streptococcus agalactiae
atggaaattcaatttttaggaactggagctggtcaaccagcgaaagctcgtaatgtttcaagtttagtcttgaaattattagatgaaattaacgaggtttggatgtttgattgtggagagggtacacagcgtcaaattttagaaaccacgattaaacctcgtaaagtcaaaaaaatttttatcacgcacatgcacggagaccatgtttttggtcttccaggttttttatccagtcgggcttttcaagccaatgaagaacagacagatttagatatttatggaccggtcggtataaaaagttttgttatgactggcttaaggacatcaggttcacgtttaccttatcgaattcattttcacgagtttgatgaatcatcactcggaaaaattatggaaacagataaatttaccgtttatgcagaaaagctagatcatactatcttttgtatgggatatcgtgttgtgcaaaaagaccttgagggcactttagatgctgaagcattgaaactagcaggtgttccatttggtcccctttttgggaaagtcaaaaatggtgagaatgttaccttagaagatggtagagaaattattgctaaagattatatttctgaaccgaaaaagggtaaagtaatcactattttgggagatactagaaaaacagatgcaagtattaggttagctttgggcgctgacgttttagtgcacgaatctacttatggtaagggtgatgagcgaattgctaaatcgcatgggcattcaaccaatatgcaagcagctgatatcgctaaacaagcaaatgctaaacgactattattaaatcatgttagtgctcgttttatggggcgagattgttggcaaatggaagaagatgcaaagacgattttttcaaatacccatcttgttagagatttggaagaagtaggtata

SEQ ID NO: 15738 - protein, 309 aa, Streptococcus agalactiae; identical to SEQ ID NO: 2262

SEQ ID NO: 15739 - DNA, 645 bp, Streptococcus agalactiae
atgattgattatattgatttggctttgacttatggtggttttacgagcttagataaagtttatctagagaaaaaactagatggcctctctaagcaacaacgacttgattttatcactccacctcctagtgtgattaatgcttattttgctgaaatatatcaaaagcaagggccagaagcggcaactgattactattttgatctttccaaagccttgggcttgtttccaaaacatttatcgtttgatgaagaaaaaccttttattcgtttgaatttatcaggaaaatcatttggttttgcttacctaaatgatcaagaagaagcgagtgttttttctgaagttaaagaagtcattacaccgcagttactcttagaaattgcacagatttttcctcaatataaagtctatcaagatcggtctggtatcagaatggcaaaaatagattttgacgaaacagaatctcaaaatattacaccagaaacaagtttactagggaatgtcttacaacttaaaaaagatattattaaaataactagtttcaatcaagaagagctattagagttggttaaaacaaagtcaggtgaatactattattctagtcaaggacgtgagtcagttatttatattgatactaaatctactaat

SEQ ID NO: 15740 - protein, 215 aa, Streptococcus agalactiae
MIDYIDLALTYGGFTSLDKVYLEKKLDGLSKQQRLDFITPPPSVINAYFAEIYQKQGPEAATDYYFDLSKALGLFPKHLSFDEEKPFIRLNLSGKSFGFAYLNDQEEASVFSEVKEVITPQLLLEIAQIFPQYKVYQDRSGIRMAKIDFDETESQNITPETSLLGNVLQLKKDIIKITSFNQEELLELVKTKSGEYYYSSQGRESVIYIDTKSTN

SEQ ID NO: 15741 - protein, 1236 aa, Streptococcus agalactiae
GTGATAGAAACTAAAGAAGAGCAAGAACGTGTTATTTTAGTTGGGGTAGAACTTCAAGATACTGAGAATTTTGAAATGTCCATGGAAGAACTTGCTAGCTTAGCTAAGACAGCAGGAGCAAATGTTGTTAATCATTATTATCAAAAAAGAGATAAATATGATAGTAAATCATTTATCGGATCTGGTAAATTAGAGGAGATAAAAGCTATTGTAGAAGCAGATGAGATTGATACCGTTGTGGTTAATAATCGTTTGACTCCGCGACAAAACTCTAATTTGGAAGCTGAACTTGGTGTTAAAGTTATTGACCGTATGCAACTTATTTTAGATATCTTTGCTATGCGTGCTAGAAGTCATGAAGGAAAATTACAGGTTCATCTAGCGCAATTGAAATATATGTTACCACGCTTAGTTGGACAAGGTATTATGCTTAGTCGTCAAGCAGGAGGAATCGGAAGCCGAGGTCCAGGAGAATCTCAGTTAGAGTTGAATCGTCGTTCCATTCGTCATCAAATTTCTGATATCGAAAGACAATTGAAGATTGTAGAAAAAAATCGCGAGACAGTTCGAGAAAGACGTGTTGATTCGACAACCTTTAAAATTGGATTAATTGGATATACAAATGCTGGCAAGTCAACTATTATGAATGTTTTGACCGATGATAAGCAATATGAAGCCAATGAATTATTTGCAACGTTAGACGCTACAACCAAGCAGATCTATTTACAAAATCAATTTCAAGTCACTTTAACAGATACTGTTGGTTTTATTCAAGATTTACCTACAGAGTTAGTTGCGGCTTTCAAGTCTACCTTAGAAGAAAGTCGACATGTTGATTTATTACTTCATGTTATTGATGCTAGTGACCCTAATCATGAAGAACACGAAAAAGTTGTTATGGAGATTCTTAAAGACTTAGATATGATAGATATTCCTCGTTTAGCGATATACAACAAGATGGATGTCACTGAGCAGCTGAATGCAACAACTTTTCCTAATGTGAGAATTGCAGCCAAAAAACAAGGGAGTAGGGATTTATTACGCCGTCTTATTGTGGATGAAATACGACATATCTTTGACGAATTTTCGATTAGAGTGCATCAAAATCAAGCATATAAGCTCTATGATCTCAATAAAATAGCATTGCTTGACACCTACACCTTTGAAGAAGAATACGAGAATATTACAGGCTATATTTCTCCTAAACAAAAATGGAAGCTGGAAGAATTTTATGAT

SEQ ID NO: 15742 - protein, 412 aa, Streptococcus agalactiae; identical to SEQ ID NO: 11188

SEQ ID NO: 15743 - protein, 888 aa, Streptococcus agalactiae
ATGAGAAAAATCAAGCTTATAGCAGTTGTTGGTCCAACTGCGGTTGGGAAGACAGCATTAGGAATTGAATTAGCTAAAACTTTCAATGGCGAAATCATTAGTGGCGATAGTCAGCAAGTTTATCAGAAGTTAGATATCGGAACGGCTAAAGCTAGTAAAGAAGAGCAAGAACAAGCTTATCATCACTTGATTGATGTTCGTGAAGTAAATGAGAATTATTCGGTTTATGATTTTGTCAAAGAGGCAAAAGTAGCTATTGATACGATTATTTCTAAGGGGAAAATCCCTATTATTGTTGGAGGTACTGGCCTATATTTACAGAGTTTGTTTGAGGGCTATCATTTAGGAGGCGAAGTCAATCAAGAAACTCTTAAGGCCTATCGTGAAAAATTAGAGTCTCTAAGTGATGAAGATTTATTTGAAAAGTTGACAGAACAATCCATTGTTATACCGCAAGTTAATCGTCGACGTGCCATCCGTGCATTAGAATTGGCGAAGTTTGGGAATGATTTGCAAAATAGTGAAAGTCCGTATGATGTTTTATTAATTGGATTGAATGATGATCGTCAGGTGCTCTATGATCGTATCAATAGACGAGTTGATTTGATGATAGACAATGGTCTCTTAGATGAAGCTAAATGGCTATACGATAACTACCCTAGTGTTCAAGCAAGTAGAGGAATTGGCTATAAAGAATTATTTCCTTACTTTTCAAAGCAAATACCATTAGAAGAAGCTGTTGATAAACTAAAACAAAATACCAGACGTTTTGCAAAACGCCAATTAACATGGTTTAGAAACCGTATGAATGTCGAATTTATTATGGTTGGTGAGGAAAATTATCAACAAAAAATCAAGCGAAAAGTCAGTGATTTTTTATCATCAAAG

SEQ ID NO: 15744 - protein, 296 aa, Streptococcus agalactiae; identical to SEQ ID NO: 2268

SEQ ID NO: 15745 - protein, 174 aa, Streptococcus agalactiae; identical to SEQ ID NO: 6917

SEQ ID NO: 15746 - protein, 58 aa, Streptococcus agalactiae; identical to SEQ ID NO: 2270

SEQ ID NO: 15747 - protein, 327 aa, Streptococcus agalactiae
TTGCGCTCCAATGTCGCTAATCACAGCGGGGTTAATAGTTTTGTGTCACCAAATAGAGGTTTATTATTGCTATTAATCGTAATGGCACAATTTCTTTATTTTTTCATTCTTTTTCAGGTGCCTAAATTACTGATTGGTGATTTTACACCAGGTTTCTCAGCCTTTACTTTCCCCCTTGTTATCTCAGCTACCTCACTTAAATTAAGTATTCAGCATCTATCATTACCAGTTGATATACAGGGGCTAGTCCACTTTGAAATTGGGACAACAACTCTTATTGTTATGATAGTAATGGTACGTTATATTTTCTTTTTAAGGCGAACAATT

SEQ ID NO: 15748 - protein, 109 aa, Streptococcus agalactiae
MRSNVANHSGVNSFVSPNRGLLLLLIVMAQFLYFFILFQVPKLLIGDFTPGFSAFTFPLVISATSLKLSIQHLSLPVDIQGLVHFEIGTTTLIVMIVMVRYIFFLRRTI

SEQ ID NO: 15749 - protein, 657 aa, Streptococcus agalactiae
ATGAAAAATTGGGAAAAACCACCATTAGTGATGGCGGGATTAGTATTGGGGCTATTAGCTTTGGGGAACCTTCTAGAGGGATATGGCACCTATTTTCGCTATTGTTTAGGGCTAGTAGCACTTGTTTTTTGGATTTTTTTAATCAAAGGAATATTAAAAAATAAAAAAGAAAGCAGGAAGGAGTTAAGCAATCCTTTGATTGCTTCTGTCTTTACTACTTTTTTTATGGCAGGTATGATTTTATCGACCTATATCTTATTATTTAGAAGTTTAGGAATATGGGTAGCAGTTCTGTCAAAAGGTGTATGGTGGTTGTCATTTATTGCGTTAATCATTCATATGGCTATTTTTTCATGGAAATATTTGAGACACTTTTCGATGGCTAATCTTTTTCCTTCTTGGTCTGTCCTCTATGTTGGTATAGGGGTAGCTAGCCTGACAGCACCAATTAGTGGACAATTCACTATTGGGAAAATAGTTTTTTGGTATGGTTTTATTGCAACTTTAGTATTATTACCATTTCTATTCATTAAAGCATATAAAATCGGGCTACCTTCGGCAGTTAAGCCTAATATAACTACTATTTGCGCTCCAATGTCGCTAATCACAGCGGGGTTAATAGTTTTGTGTCACCAAATAGAGGTTTATTATTGCTAT

SEQ ID NO: 15750 - protein, 219 aa, Streptococcus agalactiae
MKNWEKPPLVMAGLVLGLLALGNLLEGYGTYFRYCLGLVALVFWIFLIKGILKNKKESRKELSNPLIASVFTTFFMAGMILSTYILLFRSLGIWVAVLSKGVWWLSFIALIIHMAIFSWKYLRHFSMANLFPSWSVLYVGIGVASLTAPISGQFTIGKIVFWYGFIATLVLLPFLFIKAYKIGLPSAVKPNITTICAPMSLITAGLIVLCHQIEVYYCY

SEQ ID NO: 15751 - DNA, 3756 bp, Streptococcus agalactiae
atgaaaagaaaagacttatttggtgataaacaaactcaatacacgattagaaagttaagtgttggagtagcttcagttgcaacaggggtatgtatttttcttcatagtccacaggtatttgctgaagaagtaagtgtttctcctgcaactacagcgattgcaaagtcgaatattaatcaggttgacaaccgacaatctactaatttaaaagatgacataaactcaaactctgagacggttgtgacaccctcagatatgccggataccaagcaattagtatcagatgaaactgacactcaaaaaggagtgacagagccggataaggcgacaagcctgcttgaagaaaataaaggtcctgtttcagataaaaataccttagatttaaaagtggcaccatctacattgcaaaatactcccgacaaaacttctcaagctataggtgctccaagtccgaccttgaaagttgctaatcaagctccacagattgaaaatggttactttaggttacatcttaaagaattgcctcaaggtcatcctgtagaaagcactgggctttggatatggggagatgttgatcaaccgtctagtaattggccaaatggtgctatccctatgactaatgctaagaaagatgattacggttattatgttgattttaaattatctgaaaaacaacgaaaacaaatatcttttttaattaataacaaagcaggaacaaatttaagcggcgatcatcatattccattattacgacctgagatgaaccaagtttggattgatgaaaagtacggtatacatacttatcagcccctcaaagaagggtatgtccgtattaactatttgagttcatctggtaactatgaccacttatcagcatggctctttaaagatgttgcaaccccctcaacaacttggccagatggtagtaattttgtgaatcaaggactatatggaaggtatattgatgtaccactgaaaactaatgccaaagagattggttttctaatcttagatgaaagtaagacaggagatgcagtgaaagttcaacccaacgactatgtttttagagatttagctaaccataaccaaatttttgtaaaagataaggatccaaaggtttataataatccttattacattgatcaagtgcagctaaaggatgctcaacaaactgatttaacaagtattcaagcaagttttacaactctagatggggtagataaaactgaaattttaaaagaattgaaagtgacagataaaaatcaaaatgctatacaaatttctgatatcactctcgatactagtaaatctcttttaataatcaaaggcgactttaatcctaaacaaggtcatttcaatatatcttataatggtaacaatgtcacgacaaggcaatcttgggaatttaaagaccaactttatgcttatagtggaaatttaggtgcagttctcaatcaagatggttcaaaagttgaagccagcctctggtcaccgagtgctgatagtgtcactatgattatttatgacaaagataatcaaaacagggttgtagcgactaccccccttgtgaaaaataataaaggtgtttggcagacgatacttgatactaaattaggtattaaaaactatactggttactattatctttacgaaataaaaagaggtaaggataaggttaagattttagatccttatgcaaagtcattagcagagtgggatagtaatactgttaatgacgatataaaaacggctaaagcagcttttgtaaatccaagtcaacttggacctcaaaatttaagttttgctaaaattgctaattttaaaggaagacaagatgctgttatatacgaagcacatgtaagagacttcacttctgatcaatctttggacggaaaattaaaaaatcaacttggtacctttgcagccttttcagagaaactagattatttacagaaattaggagttacacacattcagcttttaccggtattgagttatttttatgttaatgaaatggataagtcacgctcaacagcttacacttcctcagacaataattacaattggggctatgacccacagagctattttgctctttctggaatgtattcagagaaaccaaaagatccatcagcacgtatcgccgaattaaaacaattaatacatgatattcataaacgtggcatgggggttatacttgatgtcgtctataatcacactgcaaaaacttatctctttgaggatatagaacctaattattatcactttatgaatgaagatggttcaccaagagaaagttttggagggggacgtttaggaaccactcatgcaatgagtcgtcgtgttttggttgattccattaaatatcttacaagtgaatttaaagttgatggtttccgttttgatatgatgggagatcatgatgcggctgcgattgaattagcttataaagaagctaaagctattaatcctaatatgattatgattggtgagggctggagaacattccaaggcgatcaaggtaagccggttaaaccagctgaccaagattggatgaagtcaaccgatacagttggcgtcttttcagatgatattcgtaatagcttgaaatctggttttccaaatgaaggtactccagctttcatcacaggtggcccacaatctttacaaggtatttttaaaaatatcaaagcacaacctgggaattttgaagcagattcgccaggagatgtggtgcagtatattgctgcacatgataaccttaccttgcatgatgtgattgcaaaatcaattaataaagaccctaaggtagctgaagaagatattcatagacgtctgcgtttaggaaatgtaatgattttaacatctcaagggacagcattcattcattctggtcaagagtatggtcgtacgaagcgtttacttaaccctgattacatgacaaaagtttcagatgacaaattgcctaataaagcaacacttattgaagctgttaaagaatacccatattttattcatgattcatatgattcttcagatgccattaatcattttgattgggcagcagccacagataataacaaacacccaatttcaacgaaaacacaggcctatacagcaggtttaatcacattaaggcgttcaacagatgctttccggaaattgagcaaagcagaaattgatcgtgaggttagcttgattacagaggtaggtcaaggtgatattaaagaaaaagatttggttattgcttaccaaacaatagattctaaaggcgatatttacgcagtatttgttaatgctgatagtaaagctagaaacgttttactaggtgaaaaatataaacaccttttaaaagggcaagtaattgttgatgctgatcaagcggggattaaaccaatctcaactcctagaggtgttcattttgaaaaagatagtttgctgattgatccattaacagcaattgtgattaaagttggcaaagttgctcctagccctaaggaggaattgcaagcagattatcccaaaacacaatctttcaagggatctaaaacggtagaaaaagtaaatagaatagctaataagacctcaataactcctgtagtttctaataagaccgattcatatctgacaaatgaagctaatttgccaaaaactggagataagtcatcaaaaatactaagtgtagtaggaataagcattctagcaagtctacttgctctactaggtctctctttaaagaggaatcgtcacttaaaa

SEQ ID NO: 15752 - protein, 1252 aa, Streptococcus agalactiae
MKRKDLFGDKQTQYTIRKLSVGVASVATGVCIFLHSPQVFAEEVSVSPATTAIAKSNINQVDNRQSTNLKDDINSNSETVVTPSDMPDTKQLVSDETDTQKGVTEPDKATSLLEENKGPVSDKNTLDLKVAPSTLQNTPDKTSQAIGAPSPTLKVANQAPQIENGYFRLHLKELPQGHPVESTGLWIWGDVDQPSSNWPNGAIPMTNAKKDDYGYYVDFKLSEKQRKQISFLINNKAGTNLSGDHHIPLLRPEMNQVWIDEKYGIHTYQPLKEGYVRINYLSSSGNYDHLSAWLFKDVATPSTTWPDGSNFVNQGLYGRYIDVPLKTNAKEIGFLILDESKTGDAVKVQPNDYVFRDLANHNQIFVKDKDPKVYNNPYYIDQVQLKDAQQTDLTSIQASFTTLDGVDKTEILKELKVTDKNQNAIQISDITLDTSKSLLIIKGDFNPKQGHFNISYNGNNVTTRQSWEFKDQLYAYSGNLGAVLNQDGSKVEASLWSPSADSVTMIIYDKDNQNRVVATTPLVKNNKGVWQTILDTKLGIKNYTGYYYLYEIKRGKDKVKILDPYAKSLAEWDSNTVNDDIKTAKAAFVNPSQLGPQNLSFAKIANFKGRQDAVIYEAHVRDFTSDQSLDGKLKNQLGTFAAFSEKLDYLQKLGVTHIQLLPVLSYFYVNEMDKSRSTAYTSSDNNYNWGYDPQSYFALSGMYSEKPKDPSARIAELKQLIHDIHKRGMGVILDVVYNHTAKTYLFEDIEPNYYHFMNEDGSPRESFGGGRLGTTHAMSRRVLVDSIKYLTSEFKVDGFRFDMMGDHDAAAIELAYKEAKAINPNMIMIGEGWRTFQGDQGKPVKPADQDWMKSTDTVGVFSDDIRNSLKSGFPNEGTPAFITGGPQSLQGIFKNIKAQPGNFEADSPGDVVQYIAAHDNLTLHDVIAKSINKDPKVAEEDIHRRLRLGNVMILTSQGTAFIHSGQEYGRTKRLLNPDYMTKVSDDKLPNKATLIEAVKEYPYFIHDSYDSSDAINHFDWAAATDNNKHPISTKTQAYTAGLITLRRSTDAFRKLSKAEIDREVSLITEVGQGDIKEKDLVIAYQTIDSKGDIYAVFVNADSKARNVLLGEKYKHLLKGQVIVDADQAGIKPISTPRGVHFEKDSLLIDPLTAIVIKVGKVAPSPKEELQADYPKTQSFKGSKTVEKVNRIANKTSITPVVSNKTDSYLTNEANLPKTGDKSSKILSVVGISILASLLALLGLSLKRNRHLK

SEQ ID NO: 15753 - DNA, 732 bp, Streptococcus agalactiae
atgagagataatcatctacacacgcatttttcctatgattgtcaaacggcatttgaggactatattaatggttttacaggtgaatttatcacaacagaacattttgatttatcaaatccttacaccggtcaagacgatgttcctgattatagtgcttattgtcaaaaaatagattatcttaatcagaaatatggaaatcgatttaaaaaaggaattgaaatcggttattttaaagatagggaatcagatattttagattatttaaaaaataaagaatttgatttaaaactattgtcaatccatcataatggtaggtatgattatctgcaagaagaagctctgaaagtaccaacaaaggagcttttagcagattactttaatcgtatggaatttgccataggccgtgtggaagcgcacgttttagatcactttgattatggttttcgtaagttaaacttagatgtagaagatttaaaaccgtttgaaacgcaattgaagcgcattttcagaaagatgttatctaaggggttagcttttgaactaaataccaaatccctttatctatatgggaatgaaaaactttatcgctatgctttagagatactaaaacagcttggttgtaaacaatactctataggctctgacggtcatattcctgaacatttttgttatgaatttgatagacttcaatgtctgctaaaggactatcaaattgatgaaaatcatttgata

SEQ ID NO: 15754 - protein, 244 aa, Streptococcus agalactiae; identical to SEQ ID NO: 2284

SEQ ID NO: 15755 - DNA, 582 bp, Streptococcus agalactiae
atgactgacttggaaaaaattattaaagcaataaaaagtgattcacagaatcaaaattatacagaaaatggtattgatcctttgtttgctgctcctaaaacagctaggatcaatattgttggacaagcacctggtttaaaaactcaagaagcaatactctattggaaagataaatctggagatcgtctacgccagtggcttggagttgatgaagagacattttaccattctggaaaatttgctgttttgcctttagatttttattacccaggcaaaggaaaatcaggagatttaccccctagaaaaggttttgcggagaaatggcaccctcttattttaaaagaaatgcctaatgttcaattgaccttgctagttggtcaatatgctcagaaatattatcttggaagctccgcacataaaaatctaacagaaacagttaaatcttacaaagactatctacccgattatttacccctggttcacccatcaccgcgaaatcaaatttggctaaagaagaatccatggtttgaaaaagatctaatcgttgatttacaaaagatagtagcagatattttaaaagat

SEQ ID NO: 15756 - protein, 194 aa, Streptococcus agalactiae
MTDLEKIIKAIKSDSQNQNYTENGIDPLFAAPKTARINIVGQAPGLKTQEAILYWKDKSGDRLRQWLGVDEETFYHSGKFAVLPLDFYYPGKGKSGDLPPRKGFAEKWHPLILKEMPNVQLTLLVGQYAQKYYLGSSAHKNLTETVKSYKDYLPDYLPLVHPSPRNQIWLKKNPWFEKDLIVDLQKIVADILKD

SEQ ID NO: 15757 - DNA, 1404 bp, Streptococcus agalactiae
atgacaattgattttagagcagaagtagacaaacgcaaagacgctttgatggacgatttaataaatcttcttcgtattaactcggagcgtgatgattcacaagctgatgcagagcatccatttggtcctggacctgtaaaagccttggaatttttccttgagatggctgagcgagatggctacgaaacaaaaaacgtagataattatgcgggacactttacatttggtcaaggcgaagaagaactaggtatttttgggcatttagatgttgttcctgcaggcagcggttgggatacagacccttatgaaccagttatcaaggataaccgtttatatgctcgagggtcatcagacgataagggaccaacaatggcatgttattatgctctaaaaattattaaagagcttgggctaccaacatctaagaaagttcgttttgttgtaggaactgatgaagaatctggatggggagatatggattactacttcgaacatgttggtcttccaaaacctgattttggtttctctccagatgcagaatttccaattataaatggtgaaaaaggtaatatcactgaatatttacatttttcaggagaaaataagggagctgttagactgcatagcttttctggcggacttcgcgaaaacatggttccagaatcagccacagcacgtttcacaagtcatttagatcagacaacacttggagctagtctagctgattttgcaggtaaacataatttgaaagcagaattatctgtagaagatgggcagtatatagctacagtttatggtaaatctgctcatggttcaataccacaagaaggtgttaatggggcgacttatttagctctttatctaagtcaatttgattttgaaggtcctgctcgtgctttcttagatgtcacagccaacattattcacgaagacttctcaggtgaaaaacttggagtagcttatgaagatgactgtatgggatcgttgagcatgaatgcaggtgtcttccagtttgatgaaactaatgatgataatactatcgctcttaatttccgttacccacaagggacagatgctaaaactatccaaactaagcttgagaaacttaacggagttgaaaaagtgactctttctgaccatgaacacacaccacactatgtacctatggacgatgaattagtatcaaccttactagctgtctatgaaaagcaaactggtcttaaaggacatgaacaggttattggtggggggacatttggtcgcttacttgaacggggtgttgcatacggtgccatgttcccaggagatgaaaacactatgcatcaagctaatgagtacatgcctttagaaaatattttccgttcggctgctatctacgcagaagctatctatgaattaatcaaa

SEQ ID NO: 15758 - protein, 468 aa, Streptococcus agalactiae
MTIDFRAEVDKRKDALMDDLINLLRINSERDDSQADAEHPFGPGPVKALEFFLEMAERDGYETKNVDNYAGHFTFGQGEEELGIFGHLDVVPAGSGWDTDPYEPVIKDNRLYARGSSDDKGPTMACYYALKIIKELGLPTSKKVRFVVGTDEESGWGDMDYYFEHVGLPKPDFGFSPDAEFPIINGEKGNITEYLHFSGENKGAVRLHSFSGGLRENMVPESATARFTSHLDQTTLGASLADFAGKHNLKAELSVEDGQYIATVYGKSAHGSIPQEGVNGATYLALYLSQFDFEGPARAFLDVTANIIHEDFSGEKLGVAYEDDCMGSLSMNAGVFQFDETNDDNTIALNFRYPQGTDAKTIQTKLEKLNGVEKVTLSDHEHTPHYVPMDDELVSTLLAVYEKQTGLKGHEQVIGGGTFGRLLERGVAYGAMFPGDENTMHQANEYMPLENIFRSAAIYAEAIYELIK

SEQ ID NO: 15759 - DNA, 600 bp, Streptococcus agalactiae
atgaaatttctagaattaaataagaagcgccatgctgtgaaacattttaatgataagccagtcgactttaaagatgttagaactgctattgaaattgcgacattagcgccatctgctaataatattcagccttggaagtttgttgttgtccaagaaaaaaaatctgctctagcagaaggtttaccggaaagtaattgtaaccaaattaatcaagcgcagtatgttattgctttatttacagatacagatttaggacagagatcacggaaaatagctcgtattggtcgtagatctcttcctgatgatttaattggttattatatggaaactctaccaccacgctatgctttatatagtgaaaaacaaactggagagtatctctctttaaatgcaggtatcgttgctatgaatttagtacttgccttgacagatcaaggtattagttctaatatgattttagggttcgataaagcgattaccaatgatgtcttagagatagataaacgttttagaccagaaatattaattactgttggttatagtgatgaaaaggttgagcctagttatcgtttgccagttgatcatattattgaaaaacgt

SEQ ID NO: 15760 - protein, 200 aa, Streptococcus agalactiae; identical to SEQ ID NO: 2292

SEQ ID NO: 15761 - protein, 1779 aa, Streptococcus agalactiae
ATGCTACGAGCATTAAAAGAAGATTTTTTTCTAACCTTAACCTCTTTAAAAAATCAATTTTGGGTTTACATTGGAACTGGTATCTTAATCCAAACTTTAGTTGCTTATTTAGTAAAAGGAATTCTGAGTTTTATCTTTCGTCGGATATTGATATTATCAAATACTCCCGCAGTGACTAAAGACAATTGGACTTTGCTTTTTAATCATCCCTTAGCTTTATTACTCTTTATACTTTATATCGTAATCCTAATTGGGTTCATCTATACTGAGTTCGCTATCTATACTATTGCCATACTGAAAACTGAATTTTCTCTCAGTATCAAAAAATGGCTAACAATCTTTCCTAAAAAAATAAAATCACTTTTAGGACCACAGCTAATTTGGGTATCAATCTACTTACTTTTGACAATTCCTCTAGCTAACCTTGGTCTAAGGTCAAGTATATTAGAGCATCTTAAAATTCCTGACTTTATTTCTGGCGAGTTAACAAAGACAGTCTTTGGAAAGATAGGTTACTCTACCCTTTTACTGCTTATTTGTTACTTAAACCTTCGATTAATTTATTTTCTCCCGCTGACCATTTTAACTGACTACAATGCTAAAGAAGCACTTTTAGAGAGTTGGAAACTTAGCCGCGGAAAGCGTCAGTGGCGTCTTCTAAGTAAAATTATTTTAACCAGTTTATTTATATCTGTAATCGGAACAGTTGCACTAGCTGTTGTTGCTGGTACATTTTCATTCATTGATCATTCTGGAAACAATTTTCCTCTTCAAGCCACTTTCTATAACCTTTTAAAATCAATACTTTTTGCCGTAACACTTCTTATTAAATGTTTAATCATAAGTCACCTATTAGCAGATATTAAACAAAATAAAAGTATTGTTCAACAATGGAGAGCTTGGAAAGGCGTCCACCATAAGCAAAAATTTAAACACATTGCTTGTGTTATTCTAGCTCTAGCTATTGGTACCACTGCCTTAAAAAATGCTATAGCTCTGGCTCTCTTACAAGATAACATTTCAATTAAAAAAGAATTAATAGCCCATCGTAGTGATACATCACATGGCGTTGAAAATTCTATTGAAGCATTAAAAGCAGCCCATAAAGCAAAAGCAGATTATTCAGAGATGGATGTTATCATGACAAAAGATCATAAATTAGTAGTCATTCATGATGATAATCTCAAACGACTCTCTGGTATGAACAAAGATGTTTCTAAACTAACTTTAGATCAAGTTACAAAAATCCCAATTCACCAAGGGCATTTTGCTAGTTACATTCCATCATTGGCAGAATTTATGAAGACCGCTCAGTCACTAGATCAAAAAATCATGATTGAATTGAAACCGTATAATCAAAACCTCGATATCTATGCGGATGAATTTATCAAAGAATTTAAAGAGCTTCGTCTATCAACCAAGCATAAAGTAATGTCTCTCAACTTGACACTCATTGAAAAGGTTGAGAAAAAATTGCCACAACTTGATACAGGTTACCTAATCCCACTACATTGGGGAACGCTTCAAAATCATAACGTTGACTTTTATGGGATTGAGGAATTTTCATACAATGATTGGATTGCATATCTCGCCCAAGAATATAATAAACAGCTCTATGTTTGGACTATTAACCGTGATAACCTTATGATACGTTATTTACAAAGCCCAGTTAATGGAATCATCACAGATAAACTCAATCTTTTCAAGGTCATTAATAAAGATATCAAAAATAGCCCTAATTATTATCAAAGAGCTCTCCAACTTATTGATAGCGAGGGT

SEQ ID NO: 15762 - protein, 593 aa, Streptococcus agalactiae
MLRALKEDFFLTLTSLKNQFWVYIGTGILIQTLVAYLVKGILSFIFRRILILSNTPAVTKDNWTLLFNHPLALLLFILYIVILIGFIYTEFAIYTIAILKTEFSLSIKKWLTIFPKKIKSLLGPQLIWVSIYLLLTIPLANLGLRSSILEHLKIPDFISGELTKTVFGKIGYSTLLLLICYLNLRLIYFLPLTILTDYNAKEALLESWKLSRGKRQWRLLSKIILTSLFISVIGTVALAVVAGTFSFIDHSGNNFPLQATFYNLLKSILFAVTLLIKCLIISHLLADIKQNKSIVQQWRAWKGVHHKQKFKHIACVILALAIGTTALKNAIALALLQDNISIKKELIAHRSDTSHGVENSIEALKAAHKAKADYSEMDVIMTKDHKLVVIHDDNLKRLSGMNKDVSKLTLDQVTKIPIHQGHFASYIPSLAEFMKTAQSLDQKIMIELKPYNQNLDIYADEFIKEFKELRLSTKHKVMSLNLTLIEKVEKKLPQLDTGYLIPLHWGTLQNHNVDFYGIEEFSYNDWIAYLAQEYNKQLYVWTINRDNLMIRYLQSPVNGIITDKLNLFKVINKDIKNSPNYYQRALQLIDSEG

SEQ ID NO: 15763 - protein, 831 aa, Streptococcus agalactiae; identical to SEQ ID NO: 14349

SEQ ID NO: 15764 - protein, 277 aa, Streptococcus agalactiae; identical to SEQ ID NO: 14132

SEQ ID NO: 15765 - protein, 534 aa, Streptococcus agalactiae; identical to SEQ ID NO: 14133

SEQ ID NO: 15766 - protein, 178 aa, Streptococcus agalactiae; identical to SEQ ID NO: 2808

SEQ ID NO: 15767 - protein, 1749 aa, Streptococcus agalactiae
TTGTTACCAGACAGTCCTGGTTGTTACCTTCATAAAGATAAGAATGGGACAATTATTTATGTAGGTAAGGCTAAAAATCTTAAGAATCGTGTGAAAAGTTATTTTCATGGGAGTCATAATACTAAGACAGAACTTTTGGTCTCTGAGATTGAAGACTTTGAATACATTGTGACAACATCTAATACCGAAGCTCTATTATTGGAAATTAATTTAATCCAAGAAAATATGCCGAAGTATAATATTCGATTGAAAGATGATAAGTCTTACCCATATATCAAAATAACAAATGAACGTTATCCTCGTCTTATGATTACACGTCAAGTAAAAAAATCAGATGGCACTTATTTTGGACCTTATCCGGATTCTGGGGCAGCAACTGAGATTAAGCGGTTACTAGATAGGCTCTTTCCTTTTAAGAAATGTACTAATCCAGCAAATAAAGTATGCTTTTATTATCATTTAGGGCAATGCAATGCACATACAGTTTGTCAAACTAATAAAGCTTATTGGGATAGTCTGAGAGAAGATGTAAAACAGTTTCTTAATGGTAAAGATAATAAAATTGTTAACGGATTAACTGAAAAAATGAAGAGCGCTGCTATGACTATGGAATTTGAGCGTGCGGCTGAATATCGAGATTTGATCGAAGCAATTAGTTTGTTGCGTACTAAGCAGCGTGTTATTCATCAAGATATGAAGGATAGAGATGTTTTTGGTTATTTCGTTGATAAGGGTTGGATGTGTGTACAGGTCTTTTTTGTTCGAAATGGAAAATTGATTCAGCGTGACGTGAATATGTTTCCTTATTATAATGAACCAGAGGAAGATTTTCTAACTTACATAGGGCAATTTTATCAAGATACAAAACATTTTCTACCCAAAGAAGTCTTTATTCCACAGGATATTGATGCTAAGTCGGTTGAAACAATTGTAGGCTGTAAGATTGTTAAACCACAACGTGGTGAAAAGAAACAGTTAGTAAATCTGGCAATAAAAAATGCTCGTGTCAGTTTACAACAGAAGTTTGACTTACTGGAAAAAGATATTCGTAAAACTCATGGGGCAATTGAAAATTTAGGTAATCTTCTTAATATCCCTAAACCAGTACGCATAGAAGCATTTGATAATTCCAATATTCAAGGGACAAGTCCAGTAGCTGCTATGGTGGTATTTGTGAATGGAAATCCAAGTAAAAAAGACTATCGAAAGTTTAAAATTAAGACTGTTATCGGACCAGATGATTATGCTAGTATGAGAGAAGTCATTCATCGGCGTTATAGTAGGGTTTTAAAAGATGGCTTGACACCTCCGGACTTGATTGTAATTGATGGTGGTCAGGGGCAAGTAAATATAGCGCGTGATGTTATTGAGAACCAATTAGGTTTAGCCATACCTATTGCAGGTTTGCAAAAGAATGATAAACACCAAACACATGAATTACTTTTTGGAGATCCTTTAGAAGTAGTAGAATTACCGCGTAATTCAGAAGAATTTTTCTTACTTCACCGTATTCAAGATGAGGTACATCGTTTTGCTATTACTTTTCATCGTCAATTACGCTCCAAAAATTCCTTTTCTTCAAAATTAGATGGTATCACTGGGTTGGGACCAAAACGTAAACAATTGCTAATGAAACATTTTAAAAGCTTACCTAATATCCAAAAAGCTGATATTGAGGACATTATTATGTGTGGTATTCCTAGGACAGTTGCAGAAAGTCTCCGAGATTCTCTTAATGATCCTCCTAAA

SEQ ID NO: 15768 - protein, 583 aa, Streptococcus agalactiae
MLPDSPGCYLHKDKNGTIIYVGKAKNLKNRVKSYFHGSHNTKTELLVSEIEDFEYIVTTSNTEALLLEINLIQENMPKYNIRLKDDKSYPYIKITNERYPRLMITRQVKKSDGTYFGPYPDSGAATEIKRLLDRLFPFKKCTNPANKVCFYYHLGQCNAHTVCQTNKAYWDSLREDVKQFLNGKDNKIVNGLTEKMKSAAMTMEFERAAEYRDLIEAISLLRTKQRVIHQDMKDRDVFGYFVDKGWMCVQVFFVRNGKLIQRDVNMFPYYNEPEEDFLTYIGQFYQDTKHFLPKEVFIPQDIDAKSVETIVGCKIVKPQRGEKKQLVNLAIKNARVSLQQKFDLLEKDIRKTHGAIENLGNLLNIPKPVRIEAFDNSNIQGTSPVAAMVVFVNGNPSKKDYRKFKIKTVIGPDDYASMREVIHRRYSRVLKDGLTPPDLIVIDGGQGQVNIARDVIENQLGLAIPIAGLQKNDKHQTHELLFGDPLEVVELPRNSEEFFLLHRIQDEVHRFAITFHRQLRSKNSFSSKLDGITGLGPKRKQLLMKHFKSLPNIQKADIEDIIMCGIPRTVAESLRDSLNDPPK

SEQ ID NO: 15769 - protein, 765 aa, Streptococcus agalactiae; identical to SEQ ID NO: 6937

SEQ ID NO: 15770 - protein, 255 aa, Streptococcus agalactiae; identical to SEQ ID NO: 6938

SEQ ID NO: 15771 - DNA, 1275 bp, Streptococcus agalactiae
ttgatttatcaatttgctaatttttcagctacttttattgattcggttatgactggacagtatagtcagctacatttggcaggtgtgtcaactgctagtaatttatggactccgtttttcgctttattagtaggtatgatttcagcattagtaccagtagttggtcaacatttgggtagaggaaataaagaacaaattcgcacagaatttcatcaatttctatatttaggtttgatactgtccttaatattatttttaatcatgcaatttattgctcaacctgtcttggggagtttgggtttagaagatgaagttctagcagttggtcgtggttatttaaattatatgttgattggaatcatgccgctggtgttgtttagcatttgccgttcattctttgatgcattggggttaacaaggttatctatgtatctgatgcttttaattctaccctttaattcattttttaattatatgcttatctacggtaaatttggtatgcctagactaggaggtgcgggggcaggtcttggaacttctttaacttattgggctatttttattgttattattattgtgatgtcacttcatcctcaaattaaaacatatcatatatggactctggaaagaataaaagctcctttgattattgaagatattcgattgggattaccgattggtttacaaatttttgcagaagttgcaatttttgcagtagtaggcttattcatggcaaaattttcttcaatcattattgcagcacatcaggctgctatgaatttttcatcattaatgtatgcatttcctttaagtatttccactgctctagctattacaatatcgtttgaagtaggggcagagcgctttcaggacgcaaacacttatagtaggataggacgcttaacagcggtagggattacatcaggaaccttactatttttatttctatttcgtgagaatgtagcagcaatgtataatagtgaccctcactttgtcgctattacagctcaattcctaacttatagtctctttttccagtttgcagatgcttatgcagctcctgtacaggggattttacgaggctataaggatacmacaaaaccatttatgatcggtgcgggctcttattggttatgtgctttgccattagcggttatcttagaaaaaaatagccagttaggtccgtttgcctattggattggtttaatcacaggtatttttgtttgtggtctatttctaaaccaacgtctgcaaaagattaagaagttgtattat

SEQ ID NO: 15772 - protein, 425 aa, Streptococcus agalactiae
MIYQFANFSATFIDSVMTGQYSQLHLAGVSTASNLWTPFFALLVGMISALVPVVGQHLGRGNKEQIRTEFHQFLYLGLILSLILFLIMQFIAQPVLGSLGLEDEVLAVGRGYLNYMLIGIMPLVLFSICRSFFDALGLTRLSMYLMLLILPFNSFFNYMLIYGKFGMPRLGGAGAGLGTSLTYWAIFIVIIIVMSLHPQIKTYHIWTLERIKAPLIIEDIRLGLPIGLQIFAEVAIFAVVGLFMAKFSSIIIAAHQAAMNFSSLMYAFPLSISTALAITISFEVGAERFQDANTYSRIGRLTAVGITSGTLLFLFLFRENVAAMYNSDPHFVAITAQFLTYSLFFQFADAYAAPVQGILRGYKDTTKPFMIGAGSYWLCALPLAVILEKNSQLGPFAYWIGLITGIFVCGLFLNQRLQKIKKLYY

SEQ ID NO: 15773 - DNA, 243 bp, Streptococcus agalactiae
ttgcatataatcagccagcaatttaccagagagaatgtatgtggtacgttggatgggatttggacgccggaattatttcatggtgcgggggtaaaagggttccatgtccactttatttcagacgatttaacttttggtgggcatgttatggattactcgctcacacaaggaaaagttgaatttggaaaggttgaccatctgggtcaatgtttcccaactcaagatcaagaatttttgataagc

SEQ ID NO: 15774 - protein, 81 aa, Streptococcus agalactiae
MHIISQQFTRENVCGTLDGIWTPELFHGAGVKGFHVHFISDDLTFGGHVMDYSLTQGKVEFGKVDHLGQCFPTQDQEFLIS

SEQ ID NO: 15775 - DNA, 93 bp, Streptococcus agalactiae
  misc_feature 88, 89, 90, 91, 92: n = A,T,C or G
atgtttggtgtttggggagtattcttcagtattccgatttatgcatctatcaaagttgttgttaaagaattgtttgattgctccaaannnnnt

SEQ ID NO: 15776 - protein, 31 aa, Streptococcus agalactiae
  VARIANT 30, 31: Xaa = Any Amino Acid
MFGVWGVFFSIPIYASIKVVVKELFDCSKXX

SEQ ID NO: 15777 - DNA, 408 bp, Streptococcus agalactiae
atgtctaaagatagtatcattgaaaaattaaaaaaggattctaagaaatatcgtcaagaagacatcaactttgtgattaataacctcaaggttgattacaaaaaaaatgccttgatttctgccaaaatttattcaaagaccatgaatttatctaaacaatctatctttgaacagctctattcggagtctccagataaggcaacccactctgataaatttacaaaagaagaatcccaatatgctatagaccatctcaaagtagatttcaaagaaaatgctcttgagactgctaaaagttatcaaagtagttcttctttatccaaagaagaaatctataaacaattgacatctacgctgggcgataaattcacaaatgatgaagcccaatatgctgtagatcatttgaaa

SEQ ID NO: 15778 - protein, 136 aa, Streptococcus agalactiae; identical to SEQ ID NO: 6950

SEQ ID NO: 15779 - DNA, 288 bp, Streptococcus agalactiae
atgtctagaaaagtacgtcgtcacttcaccgatgattttaagcaacaaattgttgacctttacaatgttggtagaaagcgtagcagtctcatcaaggtatatgagctaaccccttccaccttcgataagtgggttagacaagccaaaacaactggttcattcaagtctgttgataatctgacagatgaacagcgggagctaattgaactcagaaaacacaataaagaactcgaaatgcaattagatatcctaaagcaagcagcggtgattatggcacaaaaagggaaa

SEQ ID NO: 15780 - protein, 96 aa, Streptococcus agalactiae; identical to SEQ ID NO: 6952

SEQ ID NO: 15781 - protein, 570 aa, Streptococcus agalactiae
TTGGTTTCTGTTTATCAGAAAGCCACCTTCAAACCACATTCTAGAGGCAAGAATGAAGCCCCTATTCCCAACCACTTAGACAGGCAATTTAAGCAAGAAAGACCACTACAGGCCTTAGTCACTGACTTAACCTATGTTCGTGTAGGCAATCGTTGGGCTTATGTTTGCCTCATCATTGACCTATACAACCGTGAAATCATCGGCCTGTCTCTTGGTTGGCACAAGACCGCTGAACTCGTTAAGCAAGCCATACAAAGCATCCCTTACGCCCTGACCAAAGTCAAGATGTTCCATTCAGATCGTGGCAAAGAGTTTGATAATCAGTTAATTGATGAAATATTGGAAGCCTTTGGAATCACACGTTCGCTTAGTCAGGCTGGTTGTCCTTATGACAATGCCGTAGCTGAAAGTACGTATCGTGCTTTCAAAATTGAATTTGTTTATCAAGAAACCTTTCAATTGCTGGAAGAACTAGCTCTTAAGACTAAAGACTATGTTCATTGGTGGAATTACCACCGCATTCATGGTAGTCTCAACTACCAAACACCAATGACTAAAAGATTAATTGCC

SEQ ID NO: 15782 - protein, 190 aa, Streptococcus agalactiae
MVSVYQKATFKPHSRGKNEAPIPNHLDRQFKQERPLQALVTDLTYVRVGNRWAYVCLIIDLYNREIIGLSLGWHKTAELVKQAIQSIPYALTKVKMFHSDRGKEFDNQLIDEILEAFGITRSLSQAGCPYDNAVAESTYRAFKIEFVYQETFQLLEELALKTKDYVHWWNYHRIHGSLNYQTPMTKRLIA

SEQ ID NO: 15783 - protein, 288 aa, Streptococcus agalactiae; identical to SEQ ID NO: 6955

SEQ ID NO: 15784 - protein, 96 aa, Streptococcus agalactiae; identical to SEQ ID NO: 2304

SEQ ID NO: 15785 - protein, 378 aa, Streptococcus agalactiae; identical to SEQ ID NO: 11227

SEQ ID NO: 15786 - protein, 126 aa, Streptococcus agalactiae; identical to SEQ ID NO: 11228

SEQ ID NO: 15787 - protein, 231 aa, Streptococcus agalactiae
ATGCATTCTTTTTCTAATCCTGGATATCCTTATGATAATGCCGTAACTGAAGCATTTTTCAAGTATTTAAAGCATAGACAAATCAACCGAAAACATTATCAAAATATCAAACAGGTTCAATTAGACTGCTTTGAATACATTGAGAATTTTTATAACAATTACAACCCACATACGGCTAATCTAGGACTAACCCCTAATCAGAAAGAAGAAAATTATTTTAACTCAATAAAA

SEQ ID NO: 15788 - protein, 77 aa, Streptococcus agalactiae
MHSFSNPGYPYDNAVTEAFFKYLKHRQINRKHYQNIKQVQLDCFEYIENFYNNYNPHTANLGLTPNQKEENYFNSIK

SEQ ID NO: 15789 - protein, 2458 aa, Streptococcus agalactiae
GTGAAGAAAACATATGGTTATATCGGCTCAGTTGCTGCTATTTTACTAGCTACTCATATTGGAAGTTACCAGCTTGGTAAGCATCATATGGGTCTAGCAACAAAGGACAATCAGATTGCCTATATTGATGATAGCAAAGGTAAGGTAAAAGCCCCTAAAACAAACAAAACGATGGATCAAATCAGTGCTGAAGAAGGCATCTCTGCTGAACAGATCGTAGTCAAAATTACTGACCAAGGTATGTTACCTCACACGGTGACCATTATCATTTTTACAATGGGAAAGTTCCTTATGATGCGATTATTATGAAGAGTTGTTGATGACGGATCCTAATTACCATTTTAAACAATCAGACGTTATCAATGAAATCTTAGACGGTTACGTTATTAAAGTCAATGGCAACTATTATGTTTACCTCAAGCCAGGTAGTAAGCGCAAAAACATTCGAACCAAACAACAAATTGCTGAGCAAGTAGCCAAAGGAACTAAAGAGCTAAGAAAAAGGTTAGCTCAGTGGCCCATCTCAGTAAAGAAGAAGTTGCGGCAGTCAATGAAGCAAAAAGACAAGGACGCTATACTACAGACGATGGCTATATTTTAGTCCGACAGATATCATTGATGATTTAGGAGATGCTTATTTAGTACCTCATGGTAATCACTATCATTATATTCCTAAAAAAGATTTGTCTCCAAGTGAGCTAGCTGCTGCACAAGCCTACTGGAGTCAAAAACAAGGTCGAGGTGCTAGACCGTCTGATTACCGCCCGACACCAGCCCCAGGTCGTAGGAAAGCCCCAATTCCTGATGTGACGCCTAACCCTGGACAAGGTCATCAGCCAGATAACGGTGGTTATCATCCAGCGCCTCCTAGGCCAAATGATGCGTCACAAAACAAACACCAAAGAGATGAGTTTAAAGGAAAAACCTTTAAGGAACTTTTAGATCAACTACACCGTCTTGATTTGAAATACCGTCATGTGGAAGAAGATGGGTTGATTTTTGAACCGACTCAAGTGATCAAATCAAACGCTTTTGGGTATGTGGTGCCTCATGGAGATCATTATCATATTATCCCAAGAAGTCAGTTATCACCTCTTGAAATGGAATTAGCAGATCGATACTTAGCCGGCCAAACTGATGACAACGACTCAGGTTCAGATCACTCAAAACCATCAGATAAAGAAGTGACACATACCTTTCTTGGTCATCGCATCAAAGCTTACGGAAAAGGCTTAGATGGTAAACCATATGATACGAGTGATGCTTATGTTTTTAGTAAAGAATCCATTCATCAGTGGATAAATCAGGAGTTACAGCTAAACACGGAGATCATTTCCACTATATAGGATTTGGAGAACTTGAACAATATGAGTTGGATGAGGTCGCTAACTGGGTGAAAGCAAAAGGTCAAGCTGATGAGCTTGTTGCTGCTTTGGATCAGGAACAAGGCAAAGAAAAACCACTCTTTGACACTAAAAAAGTGAGTCGCAAAGTAACAAAAGATGGTAAAGTGGGCTATATTATGCCAAAAGATGGCAAGGACTATTTCTATGCTCGTTATCAACTTGATTTGACTCAGATTGCCTTTGCCGAACAAGAACTAATGCTTAAAGATAAGAAGCATTACCGTTATGACATTGTTGATACAGGCATTGAGCCACGACTTGCTGTAGATGTGTCAAGTCTGCCGATGCATGCTGGTAATGCTACTTACGATACTGGAAGTTCGTTTGTTATCCCACATATTGATCATATCCATGTCGTTCCGTATTCATGGTTGACGCGCAATCAGATTGCAACAATCAAGTATGTGATGCAACACCCCGAAGTTCGTCCGGATGTATGGTCTAAGCCAGGGCATGAAGAGTCAGGTTCGGTCATTCCAAATGTTACGCCTCTTGATAAACGTGCTGGTATGCCAAACTGGCAAATTATCCATTCTGCTGAAGAAGTTCAAAAAGCCCTAGCAGAAGGTCGTTTTGCAGCACCAGACGGCTATATTTTCGATCCACGAGATGTTTTGGCAAAAGAAACTTTTGTATGGAAAGATGGCTCCTTTAGCATCCCAAGAGCAGATGGCAGTTCATTGAGAACCATTAATAAATCCGATCTATCCCAAGCTGAGTGGCAACAAGCTCAAGAGTTATTGGCAAAGAAAAATGCTGGTGATGCTACTGATACGGATAAACCTGAAGAAAAGCAACAGGCAGATAAGAGCAATGAAAACCAACAGCCAAGTGAAGCCAGTAAAGAAGAAAAAGAATCAGATGACTTTATAGACAGTTTACCAGACTATGGTCTAGATAGAGCAACCCTAGAAGATCATATCAATCAATTAGCACAAAAAGCTAATATCGATCCTAAGTATCTCATTTTCCAACCAGAAGGTGTCCAATTTTATAATAAAAATGGTGAATTGGTAACTTATGATATCAAGACACTTCAACAAATAAACCCT

SEQ ID NO: 15790 - protein, 822 aa, Streptococcus agalactiae
  VARIANT 103: Xaa = Any Amino Acid
MKKTYGYIGSVAAILLATHIGSYQLGKHHMGLATKDNQIAYIDDSKGKVKAPKTNKTMDQISAEEGISAEQIVVKITDQGYVTSHGDHYHFYNGKVPYDAIIXEELLMTDPNYHFKQSDVINEILDGYVIKVNGNYYVYLKPGSKRKNIRTKQQIAEQVAKGTKEAKEKGLAQVAHLSKEEVAAVNEAKRQGRYTTDDGYIFSPTDIIDDLGDAYLVPHGNHYHYIPKKDLSPSELAAAQAYWSQKQGRGARPSDYRPTPAPGRRKAPIPDVTPNPGQGHQPDNGGYHPAPPRPNDASQNKHQRDEFKGKTFKELLDQLHRLDLKYRHVEEDGLIFEPTQVIKSNAFGYVVPHGDHYHIIPRSQLSPLEMELADRYLAGQTDDNDSGSDHSKPSDKEVTHTFLGHRIKAYGKGLDGKPYDTSDAYVFSKESIHSVDKSGVTAKHGDHFHYIGFGELEQYELDEVANWVKAKGQADELVAALDQEQGKEKPLFDTKKVSRKVTKDGKVGYIMPKDGKDYFYARYQLDLTQIAFAEQELMLKDKKHYRYDIVDTGIEPRLAVDVSSLPMHAGNATYDTGSSFVIPHIDHIHVVPYSWLTRNQIATIKYVMQHPEVRPDVWSKPGHEESGSVIPNVTPLDKRAGMPNWQIIHSAEEVQKALAEGRFAAPDGYIFDPRDVLAKETFVWKDGSFSIPRADGSSLRTINKSDLSQAEWQQAQELLAKKNAGDATDTDKPEEKQQADKSNENQQPSEASKEEKESDDFIDSLPDYGLDRATLEDHINQLAQKANIDPKYLIFQPEGVQFYNKNGELVTYDIKTLQQINP

SEQ ID NO: 15791 - DNA, 873 bp, Streptococcus agalactiae
atgatagcagggtgtgataagtcagcaaaccccaaacagcctacgcaaggcatgtcagttgtaaccagcttttacccaatgtatgcgatgacaaaagaagtatctggagayctaaatgatgtgaggatgatccaatcaggtgcaggcattcattcctttgaaccgtctgtaaatgatgtggcagctatttatgacgcggatttgtttgtttaccattcacataccttagaagcttgggcaagggatctagaccctaatttaaaaaaatcaaaggttaatgtgtttgaagcgtcaaaacctctgacactagatagagtcaaagggctagaagatatggaagtcacacaaggcattgaccctgcgacactttatgacccacatacctggacggatcccgttttagctggtgaggaagctgttaatatcgctaaagagctaggacatttggatcctaaacacaaagacagttacactaaaaaggctaaggctttcaaaaaagaagcagagcaactaactgaagaatacactcaaaaatttaaaaaggtgcgctcaaaaacatttgtgacgcaacacacggcattttcttatctggctaaacgattcggcttgaaacaacttggtatctcgggtatttctccagagcaagagccctctcctcgccaattgaaagaaattcaagactttgttaaagaatacaacgtcaagactatttttgcagaagacaacgtcaaccccaaaattgctcatgctattgcgaaatcaacaggagctaaagtaaagacattaagtccacttgaagctgctccaagcggaaacaagacatatctagaaaatcttagagcaaatttggaagtgctctatcaacagttgaag

SEQ ID NO: 15792 - protein, 291 aa, Streptococcus agalactiae; identical to SEQ ID NO: 2308

SEQ ID NO: 15793 - DNA, 1275 bp, Streptococcus agalactiae
atgtcagaattgctagataagatatcatctcggaacaatatgctcgaagcttacaagcaagtgaaatcaaacaaaggttctgctggtatcgatggggtcactatcgagcagatggatgactatcttcaccaaaattggcgagaaaccaagaaactcatcaaagagaggagctataaacctcaaccggttctcagggttgaaatcccaaaaccaaacggaggagttcgtaacctaggtatcccgacggctatggatagaatgattcagcaggccatcgttcaagttttgagtccactctgcgaaaaacatttttcagagtatagctatgggttcagacccaatcgctcctgcgaaacagccattgttcagctacttgagtatttaaacgatggctacgagtggattgtggacattgacttggaaaagttcttcgatactgttccgcaagacagattgatgtccctggttcataatatcattcaagatggcgatacggagtcactgattcgtaagtacttccattcgggagttgttattaacggacagcgacataagactttagtcgggacacctcaaggcgggaatctatcacccctcctatctaatattatgcttaatgagttagacaaagggttggaaaagcgaggtcttcgctttgtccgttacgccgatgactgtgtcatcactgtcggaagcgaagcagctgctaagcgggtcatgcattcggtcagtagctatattgagaagcgattagggttgaaagtcaacatgactaagaccaagattgtcagaccgaacaaactcaaatacctcggatttggtttctggaaatctccaaaaggttggaagtgtcgtcctcaccaagacagcgttcagagctttaagcgaaaactgaagcaactgacgatgaggaaatggagcattgacctgataactcgcattgaacgattgaactgggtcattcgaggatggataaactatttctcgcttggcaatatgaagagtatcatgacacaaatagatgagcgtctgcgaacccgtattcgagtgattatctggaagcaatggaagaagaaagcaaagcgcctatggggactcttaaaactaggagttgctagatggatagccgataaagtttctggatggggtgaccactatcagttggtagctcagaagtcggtactcaaacgtgctatatcaaaaccagccctcgcaaagcgaggactggtcagttgcttagattactatcttgaacgacatgcgttaaaagttagt

SEQ ID NO: 15794 - protein, 425 aa, Streptococcus agalactiae; identical to SEQ ID NO: 15054

SEQ ID NO: 15795 - DNA, 3450 bp, Streptococcus agalactiae
ttgcgtaaaaaacaaaaactaccatttgataaacttgccattgcgcttatatctacgagcatcttgctcaatgcacaatcagacattaaagcaaatactgtgacagaagacactcctgctaccgaacaagccgtagaacccccacaaccaatagcagtttctgaggaatcacgatcatcaaaggaaactaaaacctcacaaactcctagtgatgtaggagaaacagtagcagatgacgctaatgatctagcccctcaagctcctgctaaaactgctgatacaccagcaacctcaaaagcgactattagggatttgaacgacccttctcatgtcaaaaccctgcaggaaaaagcaggcaagggagctgggaccgttgttgcagtgattgatgctggttttgataaaaatcatgaagcgtggcgcttaacagacaaaactaaagcacgttaccaatcaaaagaaaatcttgaaaaagctaaaaaagagcacggtattacctatggcgagtgggtcaatgataaggttgcttattaccacgactatagtaaagatggtaaaaacgctgttgatcaagaacacggcacacacgtgtcagggatcttgtcaggaaatgctccatctgaaatgaaagaaccttaccgcctagaaggtgcgatgcctgaggctcaattgcttttgatgcgtgtcgaaattgtaaatggactagcagactatgctcgtaactacgctcaagctatcagagatgctgtcaacttgggagctaaggtgattaatatgagctttggtaatgctgcactagcttacgccaaccttccagacgaaaccaaaaaagcctttgactatgccaaatcaaaaggtgttagcattgtgacctcagctggtaatgatagtagctttgggggcaagccccgtctacctctagcagatcatcctgattatggggtggttgggacacctgcagcggcagattcaacattgacagttgcttcttacagcccagataaacagctcactgaaactgctacggtcaaaacagacgatcatcaagataaagaaatgcctgttatttcaacaaaccgttttgagccaaacaaggcttacgactatgcttatgctaatcgtggtacgaaagaggatgattttaaggatgtcgaaggtaagattgcccttattgaacgtggcgatattgatttcaaagataagattgcaaacgctaaaaaagctggtgctgtaggggtcttgatctatgacaatcaagacaagggcttcccgattgaattgccaaatgttgaccagatgcctgcggcctttatcagtcgaagagacggtctcttattaaaagacaatcccccaaaaaccattaccttcaatgcgacacctaaggtattgccaacagcaagtggcaccaaactaagccgcttctcaagctggggtctgacagctgacggcaatattaagccggatattgcagcacccggccaagatattttgtcatcagtggctaacaacaagtatgccaaactttctggaactagtatgtctgcaccattggtagcgggtatcatgggactgttgcaaaagcaatatgagacacagtatcctgatatgacaccatcagagcgtcttgatttagctaagaaagtattgatgagctcagcaactgccctatatgatgaagatgaaaaagcttatttttctcctcgccaacagggagcaggagcagtcgatgctaaaaaagcttcagcagcaacgatgtatgtaacagataaggacaatacctcaagcaaggttcacctgaacaatgtttctgataaatttgaagtaacagtaacagttcacaacaaatctgataaacctcaagagttgtattaccaagtaactgttcaaacagataaagtagatggaaaacactttgccttggctcctaaagcattgtatgagacatcatggcaaaaaatcacaattccagccaatagcagcaaacaagtcaccgttccaatcgatgctagtcgatttagcaaggacttgcttgcccaaatgaaaaatggctatttcttagaaggttttgttcgtttcaaacaagatcctacaaaagaagagcttatgagcattccatatattggtttccgaggtgattttggcaatctgtcagccttagaaaaaccaatctatgatagcaaagacggtagcagctactatcatgaagcaaatagtgatgccaaagaccaattagatggtgatggattacagttttacgctctgaaaaataactttacagcacttaccacagagtctaacccatggacgattattaaagctgtcaaagaaggggttgaaaacatagaggatatcgaatcttcagagatcacagaaaccatttttgcaggtacttttgcaaaacaagacgatgatagccactactatatccaccgtcacgctaatggcaaaccatatgctgcgatctctccaaatggggacggtaacagagattatgtccaattccaaggtactttcttgcgtaatgctaaaaaccttgtggctgaagtcttggacaaagaaggaaatgttgtttggacaagtgaggtaaccgagcaagttgttaaaaactacaacaatgacttggcaagcacacttggttcaacccgttttgaaaaaacgcgttgggacggtaaagataaagacggcaaagttgttgctaacggaacctacacctatcgtgttcgctacacgccgattagctcaggtgcaaaagaacaacacactgattttgatgtgattgtagacaatacgacacctgaagtcgcaacatcggcaacattctcaacagaagatagtcgtttgacacttgcatctaaaccaaaaaccagccaaccggtttaccgtgagcgtattgcttacacttatatggatgaggatctgccaacaacagagtatatttctccaaatgaagatggtacctttactcttcctgaagaggctgaaacaatggaaggcgctactgttccattgaaaatgtcagactttacttatgttgttgaagatatggctggtaacatcacttatacaccagtgactaagctattggagggccactctaataagccagaacaagacggttcagatcaagcaccagacaaaaaaccagaagctaaaccagaacaagacggttcaggtcaaacaccagataaaaaaaaagaaactaaaccagaaaaagatagttcaggtcaaacaccaggtaaaactcctcaaaaaggtcaatcttctcgtactctagagaaacgatcttctaagcgtgctttagctacaaaagcatcaacaagagatcagttaccaacgactaatgacaaggatacaaatcgtttacatctccttaagttagttatgaccactttcttcttgggattagcagctcatatatttaaaacaaaacgccaaaaagaaactaaaaaa

SEQ ID NO: 15796 - protein, 1150 aa, Streptococcus agalactiae
MRKKQKLPFDKLAIALISTSILLNAQSDIKANTVTEDTPATEQAVEPPQPIAVSEESRSSKETKTSQTPSDVGETVADDANDLAPQAPAKTADTPATSKATIRDLNDPSHVKTLQEKAGKGAGTVVAVIDAGFDKNHEAWRLTDKTKARYQSKENLEKAKKEHGITYGEWVNDKVAYYHDYSKDGKNAVDQEHGTHVSGILSGNAPSEMKEPYRLEGAMPEAQLLLMRVEIVNGLADYARNYAQAIRDAVNLGAKVINMSFGNAALAYANLPDETKKAFDYAKSKGVSIVTSAGNDSSFGGKPRLPLADHPDYGVVGTPAAADSTLTVASYSPDKQLTETATVKTDDHQDKEMPVISTNRFEPNKAYDYAYANRGTKEDDFKDVEGKIALIERGDIDFKDKIANAKKAGAVGVLIYDNQDKGFPIELPNVDQMPAAFISRRDGLLLKDNPPKTITFNATPKVLPTASGTKLSRFSSWGLTADGNIKPDIAAPGQDILSSVANNKYAKLSGTSMSAPLVAGIMGLLQKQYETQYPDMTPSERLDLAKKVLMSSATALYDEDEKAYFSPRQQGAGAVDAKKASAATMYVTDKDNTSSKVHLNNVSDKFEVTVTVHNKSDKPQELYYQVTVQTDKVDGKHFALAPKALYETSWQKITIPANSSKQVTVPIDASRFSKDLLAQMKNGYFLEGFVRFKQDPTKEELMSIPYIGFRGDFGNLSALEKPIYDSKDGSSYYHEANSDAKDQLDGDGLQFYALKNNFTALTTESNPWTIIKAVKEGVENIEDIESSEITETIFAGTFAKQDDDSHYYIHRHANGKPYAAISPNGDGNRDYVQFQGTFLRNAKNLVAEVLDKEGNVVWTSEVTEQVVKNYNNDLASTLGSTRFEKTRWDGKDKDGKVVANGTYTYRVRYTPISSGAKEQHTDFDVIVDNTTPEVATSATFSTEDSRLTLASKPKTSQPVYRERIAYTYMDEDLPTTEYISPNEDGTFTLPEEAETMEGATVPLKMSDFTYVVEDMAGNITYTPVTKLLEGHSNKPEQDGSDQAPDKKPEAKPEQDGSGQTPDKKKETKPEKDSSGQTPGKTPQKGQSSRTLEKRSSKRALATKASTRDQLPTTNDKDTNRLHLLKLVMTTFFLGLAAHIFKTKRQKETKK

SEQ ID NO: 15797 - DNA, 933 bp, Streptococcus agalactiae
  misc_feature 920, 921, 922, 923, 924: n = A,T,C or G
atgagaacgaaaggctataagaggatcaatcagtctgaacgtacggttgttttctcttttggagaaataacatttagtaggagtcgctggacaaatggctttgaaactagaataccagtagatgagtggttaggtcttgaaaaatataagagatattcaatagaattcttatatcatgttgcaaaattggctacaatgatgccttatcgtcaagtttgcaaagtaatagatagcactttgcaaacaatcataacaaaagactgtgttttaaaagcagtaaaatttgtagaaaaattgttaaaagaaaaagaacgctatcgtttttatttggaagagccacccgaacgtaaaaaagtgaaaaaactgtatgttgagggtgatggagtcatgattaaaagcacagattctagagaggaaagaaggtatttagatttaacacattttgttattcatacaggctcaaaaaaagtttctactaaaagatatgaattgcgggacaagcacgaaatattacagcttaattatgataaagctaaatataatcttttagattatatttataataactatgaagtagatgacgatactattttwatcactaactctgatatgggkwaaggctatactagtagagtttttaaggaattaggaaaagcacttaaggtaaagaaacatgagcatttttgggatatctatcatgttaaagaaaagttaagttcataccttagaaaatatccaattgaattaaccgattttgctttagatgcggtaaaaaaatataattctgataagcttgaattagtttttgatactgttgaatcactgatttgtgatgaacttgaagatcaagaatttcagaagtttaagaaaaaagtattaaataatttcaaatatataaaaccagctcatcttagaaatcnnnnnttaattaat

SEQ ID NO: 15798 - protein, 311 aa, Streptococcus agalactiae
  VARIANT 198, 206, 307, 308: Xaa = Any Amino Acid
MRTKGYKRINQSERTVVFSFGEITFSRSRWTNGFETRIPVDEWLGLEKYKRYSIEFLYHVAKLATMMPYRQVCKVIDSTLQTIITKDCVLKAVKFVEKLLKEKERYRFYLEEPPERKKVKKLYVEGDGVMIKSTDSREERRYLDLTHFVIHTGSKKVSTKRYELRDKHEILQLNYDKAKYNLLDYIYNNYEVDDDTIXITNSDMGXGYTSRVFKELGKALKVKKHEHFWDIYHVKEKLSSYLRKYPIELTDFALDAVKKYNSDKLELVFDTVESLICDELEDQEFQKFKKKVLNNFKYIKPAHLRNXXLIN

SEQ ID NO: 15799 - DNA, 261 bp, Streptococcus agalactiae
  misc_feature 252, 253, 254, 255, 256: n = A,T,C or G
gtgataattattgttagtagtgttataaatttatttacaggttctgaaagcagtaatacttctaaaaagaataagacaaatcctagtggtgcgacaagtgcaaaagtcgttaaacacaaaaaaactgatgaagaacgagcagaagattatataaaaacgttaggattaaacccgagtgattatataaaagaaaatggattattcaaagggttgattttaggggggatttatcatcagtatcaggtaattatnnnnnttaat

SEQ ID NO: 15800 - protein, 87 aa, Streptococcus agalactiae
  VARIANT 84, 85, 86: Xaa = Any Amino Acid
MIIIVSSVINLFTGSESSNTSKKNKTNPSGATSAKVVKHKKTDEERAEDYIKTLGLNPSDYIKENGLFKGLILGGIYHQYQVIXXXN

SEQ ID NO: 15801 - protein, 258 aa, Streptococcus agalactiae
ATGACTATGTTTATAAGAAAGAGGATGAATATGGCATTTGAACCAAAAAATTCGGAACTAACAAAAGTTCTAAAAGAAAGTTTAGATGAAGAAAAGAAAGAAATTTTCTCATCTGAAATGAATATTAGGGACTTTGAACGTACAAAACAATATCAATTTACACTTCAACCTTCAGTCCGAAAAAAAATTGATAGGCTATCAAAAGAAAAAGGCTATCGTTCAGCATCATCTTTTATAAATGACTTTTTTAAAAATTTG

SEQ ID NO: 15802 - protein, 86 aa, Streptococcus agalactiae; identical to SEQ ID NO: 2320

SEQ ID NO: 15803 - protein, 336 aa, Streptococcus agalactiae
TTGTCTACTTTTATAGTATACATCCATCTTTCTGAAAGACTTGAAGAATTTAAAACAGAGGCATTTGACTTTAAAACTCGAGCAAGTTATGTCACAGCAAAATTATTCTTTTTAGGTAATATGATAAAGCATAATACCAACTCTTCAAAAGAATTAATAAGATCACTAAAGAATGATAAATCAGTTCTTGCAATGATTCCTCATAAAGAGTTATTTAACCGCTCAACATTGACAAAAAGTCTCTATCTTATATGATGTCTGATAAGAATTATATTCAGAGATAGTAAATTCTTCAAAGAAATTGATTTTACATTTAGGAAAATTACTGATAAACTA

SEQ ID NO: 15804 - protein, 113 aa, Streptococcus agalactiae
  VARIANT 89, 94: Xaa = Any Amino Acid
MSTFIVYIHLSERLEEFKTEAFDFKTRASYVTAKLFFLGNMIKHNTNSSKELIRSLKNDKSVLAMIPHKELFNRSTLDKKSLSYMMSDXELYSXDSKFFKEIDFTFRKITDKL

SEQ ID NO: 15805 - protein, 150 aa, Streptococcus agalactiae
GTGTTACAATCTGTTTTAAAAGACACGAAAACGAAAGGACAACCTATATCAACATTTAAACGCTATGATGAAGAATTCAAACAATCTCTTGTTAACCTTTATCAAACTGGAAAAACTCAGTCTGAACTCTGTAAAGACTANNNNNTTAAT

SEQ ID NO: 15806 - protein, 50 aa, Streptococcus agalactiae
  VARIANT 47, 48, 49: Xaa = Any Amino Acid
MLQSVLKDTKTKGQPISTFKRYDEEFKQSLVNLYQTGKTQSELCKDXXXN

SEQ ID NO: 15807 - protein, 111 aa, Streptococcus agalactiae
TTGCTGGAAGAACTAGCTCTTAAGACTAAAGACTATGTTCATTGGTGGAATTACCACCGCATTCATGGTAGTCTCAACTACCAAACACCAATGACTAAAAGATTAATTGCC

SEQ ID NO: 15808 - protein, 37 aa, Streptococcus agalactiae
MLEELALKTKDYVHWWNYHRIHGSLNYQTPMTKRLIA

SEQ ID NO: 15809 - protein, 1231 aa, Streptococcus agalactiae
ATGGTAAACCAATTAATAATTTTAGGAAATGGATTTGATAGAGCTTCGGATTTAAAGTCAGGATATATGGATTTTTTCAATTTTAGATTTAAAGATTCAGACAGTACTAGTAGTTTTTGGTATTATATTTTGAGATCATGTTATAATAAAAAATTGTCTAGCGATTTATGGAGTGATATTGAGAAATTAATTTCAGTACATCTAAAAAACATTATAACACTATATAATAACGAAACAATTTTAAGTGGCAAAGATATTGAGAGTATATATATCGAAACATTAAGCACTGATTACTCAAGAAATGATTACTCTACCAGTGAGGAGCTAACGCAAAAAGCACTCCATAATTTTTTGTGGAATCATAATGGTATACCTATTTCCAGAACTAGATAATTTATTATTACTAATTCAAAAAGATTTAAAAATAGTCGAAGATGAGTTTTGTTCTTATTTAACTAATCAAATAGAGATCCAGGAACAATCAAAAGATGATTATTTTAAAGATATAACTAATTTGGGAAATAATTACTTATTAAAATCTCGAATTATTTTTGAACTCTTGTATAAAAGTAATATTTCTAGTGCATTCACATGTAATTCTTTTGTTGCACTACATGATTTTCATAACGAAAATTGTTTCAATTCCTATGAAGGATTTCTTAGCTACATTTATGACTTAGAAAGTAATAATGAATTTAATGTTGAAACATCAATATTGAATTTTAATTATACATTACCTAGAATAGATAAATTACAACGTAATATTCATGGAACCCTGAATGATAAAAATATTATTTTTGGAATAGATTATGATTCTTTAATTGATATACAAAAAGATAAAAATGTTACCCTGCCTGTTGAATTTACCAAATCATACAGGATATTACAGAACGGAAATATATTTCAATATCCAATTCCCTCTGAACTAACTTTTATAAAATTTTATGGTCATGGTCTGGGTGAAGCAGACTATTCTTATTTTCAATCAATTTTTGACTCAATTAATCTTTATTCCAGTGACACTGTACTAATTTTCTATTGGAGTTGTTATAACGAGAATATTAGGGAACAAATTAAATCTCAACAAGTTCATGCAGTACATAAATTAATTGAAAAATATGGAGATACTTTTAATAATAAGAATCATGGCAGAAATTTATTCACAAAACTTCAATTAGAAAATCGTTTAATTATTCAAGAAATACTTTATAATGATATTCTAAATCCATAT

SEQ ID NO: 15810 - protein, 411 aa, Streptococcus agalactiae
  VARIANT 126, 127: Xaa = Any Amino Acid
MVNQLIILGNGFDRASDLKSGYMDFFNFRFKDSDSTSSFWYYILRSCYNKKLSSDLWSDIEKLISVHLKNIITLYNNETILSGKDIESIYIETLSTDYSRNDYSTSEELTQKALHNFLWNHNGIPXXPELDNLLLLIQKDLKIVEDEFCSYLTNQIEIQEQSKDDYFKDITNLGNNYLLKSRIIFELLYKSNISSAFTCNSFVALHDFHNENCFNSYEGFLSYIYDLESNNEFNVETSILNFNYTLPRIDKLQRNIHGTLNDKNIIFGIDYDSLIDIQKDKNVTLPVEFTKSYRILQNGNIFQYPIPSELTFIKFYGHGLGEADYSYFQSIFDSINLYSSDTVLIFYWSCYNENIREQIKSQQVHAVHKLIEKYGDTFNNKNHGRNLFTKLQLENRLIIQEILYNDILNPY

SEQ ID NO: 15811 - protein, 1200 aa, Streptococcus agalactiae
ATGGCAAGTAAAAAATATAGCGGAGTATCCAGAGATAAGAAAAATAGAATTTACTTTCAAACAGAATTTGGGAAAGACCCTGTAACGGGAAAACGAAGACGTAAGAAGTCCTATAAGGATAAAAATGGAAATCCATTCCGTACTGAAAAACAGGCTTATGATGAACTTTGTCGAGTTAGAGCCGAAGTCAGGTCACAAGATGAACTTGCACAAAAACAGACAGTTCCAGTATTAACGTTAGAAGATTTTATTAACACGGTATTTTTACCGTATTATATCAAAACTGTTGAATCGTCTACCTATAAAACAGCATTGACACACTTTGATATTTTTAAAGAAGAACTAGGGCAGTACTTACTTTCAGATATATCTGTTCAGTTTTGTGAACGGTTCCGTCTTTCATTACAAGATAAGTATTCACCAAACTATGCAAAAAATGTTTGGCTTAGATTTAAAAAATGCTTAACTTACGCAGAGCGTTTGGAATATATTGAATTTAACCCTTGTACTAAACTAGACAATATCAAAGGTGAGAGAACAGTGACTTCATTTTGGACGGTAGAAGATTTTCAGAAAGCAGTCAATGCATTTGATAGAACAACATATCAAGGTGTTTATTACTATACAGTAATCTGGCTATATTTTATGACAGGATTACGAGTTTCTGAAGGATTGAGCCTAATTTGGTCTGATATTGATTTTGAATCTAAATTATTGCACGTGCAATCAACTTTAGAATATGATGAAAATGGGAATCCATTTCGTAAAAACAAGACTAAGACCGAAGCAGGTACGAGATATGTTGAATTAGATGATATGACACTTCAAACGCTAAAAGAGTGGAAAGAAGTACAGATTCATAATAGTTTAGGTGATTTTGTTTTAGCTCGTGAAGAAGTTCCTATGCATAAAACTACCCTAACTCGTCTTTTGAAACGTGTAGCAAAAGAGCAAGATTTACCAGTTATGGCTGGTAAAGGTCTTAGACATTCGCATGATAGCTTTTTGATTAATGTTCTTCACAAAGATGTTTTATATGTATCAGCCCGTTCTGGAAGAACAGATAAAGCTACAACACTCAATACATATGCCCATATTTACGCTAAGAAAAAAGCTGAAGGTGGTAGAGAAATAACGAAGGCTTTAGAATCGTTTGGATTTGATAACCCCACCAAGCAAAGAAGAGATAGCGGAAACACT

SEQ ID NO: 15812 - protein, 400 aa, Streptococcus agalactiae
MASKKYSGVSRDKKNRIYFQTEFGKDPVTGKRRRKKSYKDKNGNPFRTEKQAYDELCRVRAEVRSQDELAQKQTVPVLTLEDFINTVFLPYYIKTVESSTYKTALTHFDIFKEELGQYLLSDISVQFCERFRLSLQDKYSPNYAKNVWLRFKKCLTYAERLEYIEFNPCTKLDNIKGERTVTSFWTVEDFQKAVNAFDRTTYQGVYYYTVIWLYFMTGLRVSEGLSLIWSDIDFESKLLHVQSTLEYDENGNPFRKNKTKTEAGTRYVELDDMTLQTLKEWKEVQIHNSLGDFVLAREEVPMHKTTLTRLLKRVAKEQDLPVMAGKGLRHSHDSFLINVLHKDVLYVSARSGRTDKATTLNTYAHIYAKKKAEGGREITKALESFGFDNPTKQRRDSGNT

SEQ ID NO: 15813 - protein, 297 aa, Streptococcus agalactiae
ATGTTTCAGATGAGAATGAATAAGAAAATTAGGATTATTAATATGACAAATACAAAAGTAACAGTAAAACATATTGACTTAATGAAAATCGGATTCCCAGAGAATACAGCTAGAGAAATTATAAAGCAAGCAAAAGCGATTGCAGTACAGAGATTTGAAAATAATATACAGGAAACAGGAAAAGTGATACAATTAGGACAATCACCATTTGATAATGTGAGATTAAACCTAGCCCCAGCTAGTATAGTTGAGGAATTGCTTGGCTTTGAGTTGCCTTTACTAGAAAAGGAAGGTGCT

SEQ ID NO: 15814 - protein, 99 aa, Streptococcus agalactiae
MFQMRMNKKIRIINMTNTKVTVKHIDLMKIGFPENTAREIIKQAKAIAVQRFENNIQETGKVIQLGQSPFDNVRLNLAPASIVEELLGFELPLLEKEGA

SEQ ID NO: 15815 - protein, 144 aa, Streptococcus agalactiae
TTGCTATCAATTTTTGATACGGTACTGAAACCATCTTTCCAAGTTTCAGCATTATATATTTGCAAACCATTCTTTTTTATCAATTTATCCGTTTTTGGGTTCCTTGCTTCTATTAATGGTGGTGAGAATCCAAAAGTTATTCCG

SEQ ID NO: 15816 - protein, 48 aa, Streptococcus agalactiae
MLSIFDTVLKPSFQVSALYICKPFFFINLSVFGFLASINGGENPKVIP

SEQ ID NO: 15817 - protein, 865 aa, Streptococcus agalactiae
GTGACTAGTGAATACAATTTAAAAGTTATAAATTTTGGAGACCATGTTGAGGTAATAAAATATGGTTATCTAAAACAAAGAGTATCAGGTAATAATAGACCTACCAACCATGAAAGACAAATACGTACAGAAGAGGAACAAGAGATATATAATTTTCAGCAAGCTCAAAAAATTCAACGAAGAATTAGATATTACTGTGAGTGTAACGATTTTGATTTATTCTGGACATTAACTTTTGATGATGAAAAAGTTAATGCAAAAGATTATGAATATGCGAAAAAGAAATTAAGAGCTTGGTTGAAATATCAGCGTGAAAAATATGGAAAATTTGACTATATTTTTATACCAGAATTACATAAGAATGGTAGAATCCATTTTCACGGAATAACTTTTGGATTCTCACCACCATTAATAGAAGCAAGGAACCCAAAAACGGATAAATTGATAAAAAAGAATGGTTTGCAAATATATAATGCTGAAACTTGGAAAGATGGTTTCAGTACCGTATCAAAAATTGATAGCAAGGCAAAAACAGCAAATTATATATCGAAGTATATTACAAAAGATTTGATTGCTATTCCTTCGGCGTATAGACAGCCAAAATTTTGTTAGTCGTGGTTTGAAAAAACCTGAAATAGAATTTCAGCAGATTGATGAAAATGAACTTCAAGAGTTTACCCCTAATTTCATAGTAGGTAACTTATATATTGAAGAACAAAAATTTGAAAAAGATGTCTCAATTTACCTGTTAGAATTAGATGATGAGAATAAATTTTTTCAAAAGAAAAAACCTGAAACAGTCGTAAGAAGTAGATTGAAAAGTAAGAATGATGAGAATATTGAGAATGTTTCAGATGAGAATGAA

SEQ ID NO: 15818 - protein, 289 aa, Streptococcus agalactiae
MTSEYNLKVINFGDHVEVIKYGYLKQRVSGNNRPTNHERQIRTEEEQEIYNFQQAQKIQRRIRYYCECNDFDLFWTLTFDDEKVNAKDYEYAKKKLRAWLKYQREKYGKFDYIFIPELHKNGRIHFHGITFGFSPPLIEARNPKTDKLIKKNGLQIYNAETWKDGFSTVSKIDSKAKTANYISKYITKDLIAIPSAYRQPKYFVSRGLKKPEIEFQQIDENELQEFTPNFIVGNLYIEEQKFEKDVSIYLLELDDENKFFQKKKPETVVRSRLKSKNDENIENVSDENE

SEQ ID NO: 15819 - protein, 1443 aa, Streptococcus agalactiae
ATGCTACATGGGTATATATTTTTAACAAGGAAAAAATTAATGATGAAAACAATATTTAAAGAAATAATAAGTACTTACTCACTAAAAAATAAGAAAGTAGCAACTATCATAGTGAGCAGGACACGAAAACAACGCTGTCAGCTATTGACTAATATTTTGTTGTCTATCTTATCAGTTGAGATGATGTTTGGCTTACTATACCTGCTCTTTGATTTTGTGAACTCTAACCAAATTTCAATATCAATCATATTTAGCTTAGTAGGCTTAGTTTGCTTGGAAAGTATTATGGTTCTGAACTGGTTATTCTTAAACTCTAAGTTTTCTCCTATTGAAAAATGGAAGGTGTCAGCCTTATTAAAGCTCTTTCCTGAAGAAAATGATATTTTGAGAAAACATAAATCAGAAATTGATACAACACAAAGCGTTAGATGGGAATATTGGATAGATAATGGCTTGATATTTTTGAAATTATATCACGGTGGTCATGTTCCAAAAGGCAAATTGGAGGAAATCCCAACTAATATTCTATCATTTTTCATTAAAGAAACACGTGATGAATGGTTTTTAGAAGATAAGAACCTAGCAGATGGATATGTGAAGGTTGTCTTGTCTCACAAACCAGATAAATCACTTTATATAAAAGGGCGTGAAGATTTTATAGAATCAAAGACATTAAAGATTCGATTGACTGAAAGACTGAATTGGACATTATCACAAACTAATGCTCTTATTGTTGGACCGTCAAACTCTGGTAAAACAACCTTACTGAAATATCTAATTCTAGCATTCTTGATAAATAATAAGAAAAATGAAGTTTATACGATTGATGGTAAATCAGCCTATCTAAGTAATGCGATGCGACACATTGGTGAAGTAGCAACTACAGGGCAACAGGCGTTTGATATGATTTCTAAAGTTGAAGCTATTATGGAAGAACGTTATGCTGAAATCAATCAAAATTCTGATGATGAAGCAGATGTGACACATAATGAAAAATTTGGGCAAGGAAATATTTTGCTAGTTATTGATGAGTATTTAGCTCTAGCTACAGAAATGCAAGCAGAGGATAAATTAAAGAAACCTGCTGATAGACTGTTTCCACAATTTAATGCCAAACTTTTGAAATTAATTGTTAAATGTAGACAAGCTTCTATTATGGTTGTTGTTTCGGGTCAGCTGTTGCCTACGTCTATTTTGAGCTCTGAGAGTAGAGATTCACTTGGTTTACGTATTGCTTTGGGTCGTATTAGTCAATCTCAATCAACAGAAATTTTTAATATAGGAAAATCAGAATTGCCCAGTGTGGACTCAAGTAAACGAGAAGGTGTTATCTACTTAGATGGTATTGGATTAGAGCACCCAATTACTTTCAAGACACCATTTTATGATGATTCTAGGCTACCATTCAAGGGGGCGTTACGTGTTCTGAAATCAGAGCGGAGC

SEQ ID NO: 15820 - protein, 481 aa, Streptococcus agalactiae
MLHGYIFLTRKKLMMKTIFKEIISTYSLKNKKVATIIVSRTRKQRCQLLTNILLSILSVEMMFGLLYLLFDFVNSNQISISIIFSLVGLVCLESIMVLNWLFLNSKFSPIEKWKVSALLKLFPEENDILRKHKSEIDTTQSVRWEYWIDNGLIFLKLYHGGHVPKGKLEEIPTNILSFFIKETRDEWFLEDKNLADGYVKVVLSHKPDKSLYIKGREDFIESKTLKIRLTERLNWTLSQTNALIVGPSNSGKTTLLKYLILAFLINNKKNEVYTIDGKSAYLSNAMRHIGEVATTGQQAFDMISKVEAIMEERYAEINQNSDDEADVTHNEKFGQGNILLVIDEYLALATEMQAEDKLKKPADRLFPQFNAKLLKLIVKCRQASIMVVVSGQLLPTSILSSESRDSLGLRIALGRISQSQSTEIFNIGKSELPSVDSSKREGVIYLDGIGLEHPITFKTPFYDDSRLPFKGALRVLKSERS

SEQ ID NO: 15821 - protein, 423 aa, Streptococcus agalactiae
TTGAAAAAAATCAATTTAAATAGTACAAAACTTGGAGAACTTCGTTTTTCAGTAAATGAAATTGAAGCTCCTCAAGTAGCAATAGTCACCAATGCTAGAAGAGTAGCAAAAAGAGACGGCAATGGTGAAGTTATTGATGGAACAATCGCAAAGCTTACGATTTTAGTTTTAGATATTAAGCTATATCAACTTATGAATCAACAAGGATTAGATGTTTCAAGTGTTGTACCTATTACAGTAGAAGTCGTAGGTGATGAAAATTATCTAAAACAGATTATTGTTGAAGATATAATTGGAAAAGTTATTGATTTACGTTCAGCCTATGTAGGTTTGAAATGGGTTTCTAGAGGCAATTCAGGAAACTGGGGTGGATTAAAATTAATTTTAGAAGAATTGAAATTTGTTAATTTAAATAAAGATAAC

SEQ ID NO: 15822 - protein, 141 aa, Streptococcus agalactiae
MKKINLNSTKLGELRFSVNEIEAPQVAIVTNARRVAKRDGNGEVIDGTIAKLTILVLDIKLYQLMNQQGLDVSSVVPITVEVVGDENYLKQIIVEDIIGKVIDLRSAYVGLKWVSRGNSGNWGGLKLILEELKFVNLNKDN

SEQ ID NO: 15823 - protein, 739 aa, Streptococcus agalactiae
ATGATTAAATTTACATATAGTGCCAATTTCTTTTATTACAATTGTTCAAAGAGAATAAAGGAAAAAATGGACTCAATTAACCAATTAATTGATGAATATGGTTATACTTCTAGTCGTCTAGCTGCTAATAGAAATACAGCTAGAAAACCAAAAATTAGTAGAAATGCTATTACACTTGACTATACAAAAGAGTTCTCTCGAGCTTTAAATAATAAAATCACCCAAAGGAATCCTAATTTTATCACACCAGCACTTACAGAAGATATATTAAATTTCTGTAAACCTGAAGAGGATTTTATTAGACAACTAAATATAGATGGTATTGACTCTTGTAAATATGAATTTGAATCTGTTTCAGAAATTTATTGGGGAACAGATGAAGAACTCTATAAGAATGAAGAATTATTTTTCTATGCAATCATCAAGGATATGCTAAATTCCATTGACGATAAAAACTTTATTGAAAGTATACTGATTGACTATGTTCCTTATGCTTACTTAACAGCACTAAATGAAATCGATTCAAGTTTGCCCCCAAATGCGTTTCAATTTTTGATTATTATCCTGATTTGCCTAATTTAAAAGAGACGCAAAACTCTCCGAAGCAATTTCAAGACTATATCAACAGTTTAAAAATCAATACTCACTTACAGATATGTTTTTTGATTTTCTTTCTAAAAATAAAAAAGAAGTTGAGTTTAAAAATATGCAGACAGAATTTAAAAATTTCGTAAATATG

SEQ ID NO: 15824 - protein, 248 aa, Streptococcus agalactiae
  VARIANT 200, 201: Xaa = Any Amino Acid
MIKFTYSANFFYYNCSKRIKEKMDSINQLIDEYGYTSSRLAANRNTARKPKISRNAITLDYTKEFSRALNNKITQRNPNFITPALTEDILNFCKPEEDFIRQLNIDGIDSCKYEFESVSEIYWGTDEELYKNEELFFYAIIKDMLNSIDDKNFIESILIDYVPYAYLTALNEIDSSLPPNAVSIFDYYPDLPNLKETQKXXSEAISRLYQQFKNQYSLTDMFFDFLSKNKKEVEFKNMQTEFKNFVNM

SEQ ID NO: 15825 - protein, 1194 aa, Streptococcus agalactiae
TTGATTTCTGTAAATAACAATGCAAAACTATTGAATGGCATAGTGAGTATTGAAAGAGATTATACTAGTTACTTTGGAAAAGAGTTTGCTATTGATTATGAACATCTTTACAAAGAAAGTTTTGATGATAGGTTGAGTCAGCTATGTTCTAGTTTACACCATCAGTTAGTGGAAACATTAAGAATATTGAATGATAGTATAAATGGAGGGAGACATTTTTGGGCTGACCCAAGTAGAGATTTGATAAAAGCCATTTCACTATCTAACAGATTTGTGAATAATCTTAAGAATTGTGGGGAGAATGTCATTATTGCTGAATACTATGATAAAGTATTTAAAATTTGTAATGATTTTCTATCATCATCTGGTGGAAGTTCAGTGCCAGATGATATGGTTGAAATTGAAATATATTATGAGCTCCCAATTTTTGAAGTATCTGATATAATCCAGTTACCTAATAATTCATTACAGAATTTTCAATTGAAGCCAGTTGGTAAAGGTTCTTATGCTACTGTCTTTTGTTATTTTGATGAGAATTACAACAAAACTTTTGCATTAAAACGTGCGAGTAAAATAATTTCATCGAAAGATTTAGAGAGATTTTATTTAGAATTTGACACGATGAAAAAGCTACACTCTCCATATATACTGGAAGTTTATTCTATTGATAAAACAAAAAATGAGTATATTATGGAGTATGCGAACACGACCCTTTTGAAATACATCACAACTCATAATCAAAAATTGACATTTGATGAGAGGAAGTCTATATGCCATCAGATTATAAAAGGATTTGAATATTTATCTGAGAAAGGAATACTTCATAGAGATATCTCTCCAAATAATATTTTGATAAAAGAATATGAGGATGTAAAGATAATTAAAATTGCAGATTTAGGGAATGTAAAGTTGAGTGATAGTATATTAACGTCTTTAGATACAGAAATAAGAGGTGCGTTTAATGATTATTCCGGACTTCAACGAGTAGGATATAGTAACTATAATTTTTATTTTGAAGGTTTTGCTTTGTCAAAATTATTGTATTTTGTTTTAACAGGACGGTATAGGAATTTTACAAAATTTGAATTTAGTAATTTAGAGGAATTTGTTAATAAAGGCACAAATCCAGACTTGTATCAGCGATTTAATAATATTCATGAACTAAAAAATGCATTTTCTCAGATTAAACCGAAA

SEQ ID NO: 15826 - protein, 398 aa, Streptococcus agalactiae
MISVNNNAKLLNGIVSIERDYTSYFGKEFAIDYEHLYKESFDDRLSQLCSSLHHQLVETLRILNDSINGGRHFWADPSRDLIKAISLSNRFVNNLKNCGENVIIAEYYDKVFKICNDFLSSSGGSSVPDDMVEIEIYYELPIFEVSDIIQLPNNSLQNFQLKPVGKGSYATVFCYFDENYNKTFALKRASKIISSKDLERFYLEFDTMKKLHSPYILEVYSIDKTKNEYIMEYANTTLLKYITTHNQKLTFDERKSICHQIIKGFEYLSEKGILHRDISPNNILIKEYEDVKIIKIADLGNVKLSDSILTSLDTEIRGAFNDYSGLQRVGYSNYNFYFEGFALSKLLYFVLTGRYRNFTKFEFSNLEEFVNKGTNPDLYQRFNNIHELKNAFSQIKPK

SEQ ID NO: 15827 - protein, 806 aa, Streptococcus agalactiae
ATGTGGGGCTTATCATTTATTAGTGAAGAAGATTTTTATAATCATGTTCAATTGACTATAGACAAGTATGGCAAAAAATTACAATCCTTTGATTTGAAACGATTTAATAAAAATATTGTTGATCCAATAAAATTGATTTTTGATAAATCTGTTTATAGAAGTTCGTGGGACAAATTATAAGTAACGAGATTTTTAGACAACGTGATAAATCAAACAATAATGATATTGGATATTTTCATCAAACTATTTTCCAATACATAGAGCACTGTCGAGTTCCGAATAATGGAGAAGAGGGTGGTTGGGATGTCATTTTTGAAAATCCAAATGGTATAACAATGCCAGATGGTTCTCAAGTCAGTCGTGTCTATGTGGAAATGAAAAATAAGCATAACACAATGAATTCTGCTTCTTCTGGTAAAACTTTTATGAAAATGCAAAATCAGCTATTACAAGATGATGATTGTGCGTGTTTTTTAGTTGAGGCAATTGCAAAAAATTCTCAAAATATCCAATGGGAGCCAAAAGTTGATGGTCGAAAAATGGGACATAAATATATAAGACGTGTTAGTTTAGACCAATTCTATTCACTTGTGACGGGACAGGAAGATGCCTTCTATAATATGTGCATGGTTTTGCCAGAAGTCATTAATAAGGCTGTATCAGAATTAGATTCTTCAATTATTCCAAATGATACAGTATTTGATGAAATTAGAGACATTAGTGCTCAACAAAACTATGATTCTGAAGATTTATCTATTGCAATGTCATTCTATTTACTAGGTTTTTCTAGTTATTTAGGTTTTGAA

SEQ ID NO: 15828 - protein, 269 aa, Streptococcus agalactiae
MWGLSFISEEDFYNHVQLTIDKYGKKLQSFDLKRFNKNIVDPIKLIFDKSVYRSSWEQIISNEIFRQRDKSNNNDIGYFHQTIFQYIEHCRVPNNGEEGGWDVIFENPNGITMPDGSQVSRVYVEMKNKHNTMNSASSGKTFMKMQNQLLQDDDCACFLVEAIAKNSQNIQWEPKVDGRKMGHKYIRRVSLDQFYSLVTGQEDAFYNMCMVLPEVINKAVSELDSSIIPNDTVFDEIRDISAQQNYDSEDLSIAMSFYLLGFSSYLGFE

SEQ ID NO: 15829 - protein, 998 aa, Streptococcus agalactiae
TTGAAGTCAATTGAATTATTTGCAGGTGCTGGAGGTCTGGCACTAGGTATTGAAAAAGCGGGTTTTGATACAATTGGATTAGTCGAATTTGATAGCGCTGCTTCTGAAACGTTGAAATATAATCGACCAAATTGGAATGTGATTCATGATGATGTTGCTAATATTTCAAAACTTGATTTGGAAGAATATTTTTTAATTAAAAAAGGAGAATTAGACTTACTTAGTGGAGGAGCTCCTTGTCAGTCTTTTTCTTATGCAGGGAAACGGTTAGGCTTGGAAGATACTCGTGGTACTTTGTTTATCACTATGCTGTTTTCTTGGAAAAGTTGCAACCTAAAATGTTTCTTTTTGAAAACGTAAAAGGTTTGACCAGCCACGATAAGGGTAAGACCTACAAGACTATTTTGAATGTCTTTGAGGAAGAAGGCTATACAGTGCAATCAAAAGTTCTGAATGCATGGGATTATGGTGTTGCTCAGAAGAGAGAACGGATGATTATGGTTGGAATCCGTAATGATTTAGTAAATATGACGTCTTTTGAATATCCAAAACCTCATGATTATAAGCCAGTATTAAGGGATATTTTACTTGATTGTCCACCAAGTCAAGGAATGCAATATTCAGAACAGAAGAGAAAAATATTTGAACTAGTACCTCCAGGAGGATACTGGAAAGACATTCCAGAGAGCATTGCAAAAGAATATATGAAATCAACTTGGTATATGGGTGGTGGTCGTACGGGTATTTTAAGAAGATTGAGTTTAGATGAACCCTCTTTGACTGTCCTCACCTCTCCAACTCAAAAGCAGACAGAGCGCTGTCACCCACTGGAAGTACGTCCGTTCACTATTCGTGAAAATGCACGCATACAAAGTTTTCCAGATGATTGGGAATTTCAAGGAAGTGTAGGAAATCAATATAAACAAGTTGGAAATGCTGTTCCTGTAAATCTAGCTTATGAAGTAGGATTGAAGATAAAAGAAAGTTTGGAGGTATTA

SEQ ID NO: 15830 - protein, 333 aa, Streptococcus agalactiae
  VARIANT 100: Xaa = Any Amino Acid
MKSIELFAGAGGLALGIEKAGFDTIGLVEFDSAASETLKYNRPNWNVIHDDVANISKLDLEEYFLIKKGELDLLSGGAPCQSFSYAGKRLGLEDTRGTLXYHYAVFLEKLQPKMFLFENVKGLTSHDKGKTYKTILNVFEEEGYTVQSKVLNAWDYGVAQKRERMIMVGIRNDLVNMTSFEYPKPHDYKPVLRDILLDCPPSQGMQYSEQKRKIFELVPPGGYWKDIPESIAKEYMKSTWYMGGGRTGILRRLSLDEPSLTVLTSPTQKQTERCHPLEVRPFTIRENARIQSFPDDWEFQGSVGNQYKQVGNAVPVNLAYEVGLKIKESLEVL

SEQ ID NO: 15831 - protein, 362 aa, Streptococcus agalactiae
ATGGCATTAAACATTGAAAATATTATTGCTGAAATTAAAGAAGCTACAATTCTTGAACTTAACGATCTTGTAAAAGCTATCGAAGAAGAATTTGGTGTAACTGCTGCTGCTCCTGTAGCTGCTGCCGCTGCTGGTGGTGAAGCTGCTGCTGCTAAAGACTCATTTGACGTTGAATTAACAGCTGCTGGAGACAAAAAGTTGGCGTTATCAAAGTTGTTCGTGAAATCACAGGCGAAGGTCTTAAAGAAGCTAAAGCTATCGTTGATAACGCACCATCAGTTATCAAAGAAGGTGCTTCAGAAGCAGAAGCTAACGAAATCAAAGAAAAACTTGAAGCTGCAGGTGCTTCAGTTACTCTTAAA

SEQ ID NO: 15832 - protein, 121 aa, Streptococcus agalactiae; identical to SEQ ID NO: 2428

SEQ ID NO: 15833 - protein, 449 aa, Streptococcus agalactiae
ATGAAATCGAGTTTAAACCGTAATTTACTAGGCTTCCACAATCAAATTGCGGTACTCTTTTATTTAAGAGTAACTGAAGCACCTGCAGCTTCAAGTTTTTCTTTGATTTCGTTAGCTTCTGCTTCTGAAGCACCTTCTTTGATAACTGATGGTGCGTTATCAACGATAGCTTTAGCTTCTTTAAGACCTTCGCCTGTGATTTCACGAACAACTTTGATAACGCCAACTTTTTGTCTCCAGCAGCTGTTAATTCAACGTCAAATGAGTCTTTAGCAGCAGCAGCTTCACCACCAGCAGCGGCAGCAGCTACAGGAGCAGCAGCAGTTACACCAAATTCTTCTTCGATAGCTTTTACAAGATCGTTAAGTTCAAGAATTGTAGCTTCTTTAATTTCAGCAATAATATTTTCAATGTTTAATGCCATTGTTATTTCCTCCAAAAATATGTTT

SEQ ID NO: 15834 - protein, 150 aa, Streptococcus agalactiae
MKSSLNRNLLGFHNQIAVLFYLRVTEAPAASSFSLISLASASEAPSLITDGALSTIALASLRPSPVISRTTLITPTFLSPAAVNSTSNESLAAAASPPAAAAATGAAAVTPNSSSIAFTRSLSSRIVASLISAIIFSMFNAIVISSKNMF

SEQ ID NO: 15835 - protein, 498 aa, Streptococcus agalactiae
ATGAGTGAAGCAATTATTGCAAAAAAAGCTGAACAAGTTGAACTTATTGCTGAGAAAATGAAAGCAGCAGCAAGTATCGTTGTTGTTGATTCACGTGGTCTTACTGTTGAGCAAGATACTAACTTACGTCGTTCACTTCGTGAAAGCGATGTTGAGTTTAAAGTTATCAAAAACTCAATTTTAACTCGTGCAGCTGAAAAAGCAGGTCTTGAAGACCTTAAAGAACTTTTTGTTGGTCCATCAGCAGTTGCGTTTTCTAACGAAGATGTTATTGCACCAGCTAAAGTTATTAGCGATTTCGCTAAAGATGCAGAAGCTCTTGAAATCAAAGGTGGTTCAGTAGACGGTAAATTCACTTCAGTTGAAGAAATTAACGCTCTTGCTAAATTACCAAACAAAGAAGGTATGCTTTCAATGCTCCTTTCAGTACTTCAAGCGCCAGTACGCAACATTGCATATGCTGTCAAAGCAGTTGCAGAAAAAGACGAAGAAGTGGCA

SEQ ID NO: 15836 - protein, 166 aa, Streptococcus agalactiae
MSEAIIAKKAEQVELIAEKMKAAASIVVVDSRGLTVEQDTNLRRSLRESDVEFKVIKNSILTRAAEKAGLEDLKELFVGPSAVAFSNEDVIAPAKVISDFAKDAEALEIKGGSVDGKFTSVEEINALAKLPNKEGMLSMLLSVLQAPVRNIAYAVKAVAEKDEEVA

SEQ ID NO: 15837 - protein, 917 aa, Streptococcus agalactiae
ATGGCAAATAATAATTTTTATAATCGTGACCCTTTTGGAAATATGGATGATATTTTTAATTCTCTAATGGGAAATATGGGGGGCTATAACAGTGAGAATAAGCGATACTTAATCAATGGACGGGAAGTTACTCCTGAAGAATTCAGTCAATATCGTCAAACTGGAAAACTCCCCGGTCAAGAGCTAAATAACCAAAACACTCCTACAAACCAAGTCTCTGCAGATAGTGTTTTGACTAAATTAGGAACTAATTTAACCGATCAAGCACGTCAGCATTTGCTAGATCCAGTTATTGGACGAAACAAAGAAATTCAGGAAACTGCAGAAATTCTAGCTCGTCGTACTAAAAATAATCCTGTTCTGGTTGGTGATGCAGGTGTTGGTAAAACAGCTGTTATTGAAGGTTTGGCACAAGCAATTATAAATGGTGATGTCCCTGCTGCTATCAAAATAAAGAAATCATTTCGATAGATATTTCTAGCCTTGAAGCTGGCACCCAATATAGGGGTAGTTTTGAAGAAAATATTCAAAATATCATAAAAGAAGTTAAGGAAACAGGAAATATTATTCTCTTCTTTGATGAAATACACCAAATATTAGGAGCCGGTTCAACTGGTGGTGATAGTGGCTCTAAGGGGCTCGCAGATATACTTAAGCCTGCACTTTCACGTGGTGAGTTAACGGTTATAGGTGCAACTACTCAAGATGAATATCGTAACACCATTCTCAAGAATGCTGCCTTAGCACGTCGCTTTAACGAAGTTAAAGTCAATGCACCTTCTGCACAAGATACTTTCAATATCCTTATGGGGATAAGAAACCTCTATGAGCAACATCATAATGGTGGTTTACCTGACTCTGTTTTGAAAGCAGCTGTAGATTTATCTATTTCATACATCCCACAAAGAAGTCTCCCC

SEQ ID NO: 15838 - protein, 306 aa, Streptococcus agalactiae
MANNNFYNRDPFGNMDDIFNSLMGNMGGYNSENKRYLINGREVTPEEFSQYRQTGKLPGQELNNQNTPTNQVSADSVLTKLGTNLTDQARQHLLDPVIGRNKEIQETAEILARRTKNNPVLVGDAGVGKTAVIEGLAQAIINGDVPAAIKNKEIISIDISSLEAGTQYRGSFEENIQNIIKEVKETGNIILFFDEIHQILGAGSTGGDSGSKGLADILKPALSRGELTVIGATTQDEYRNTILKNAALARRFNEVKVNAPSAQDTFNILMGIRNLYEQHHNGGLPDSVLKAAVDLSISYIPQRSLP

SEQ ID NO: 15839 - protein, 909 aa, Streptococcus agalactiae
ATGGGTGCTAGTGATATTGAACGCTTAAAAGAACTTGGCAATCGTCTAAAAGGTAAAGTCATTGGTCAAAATGATGCTGTTGAGGCAGTTGCGAGAGCTATTCGCCGAAATCGTGCTGGTTTCGATGATGGTAATCGTCCGATTGGTAGCTTTCTATTTGTTGGACCAACTGGAGTTGGTAAAACCGAGCTAGCAAAGCAATTAGCTTTTGATATGTTCGGATCAAAGGATGCTATCGTTAGACTTGATATGTCTGAATATAATGATCGTACAGCAGTTTCTAAGCTAATTGGAGCGACTGCTGGTTACGTTGGTTATGACGACAATAGTAATACACTAACAGAACGTATCCGTCGAAATCCTTATTCTATTGTTCTTCTTGATGAAATCGAAAAAGCTGACCCGCAAGTTATCACGCTTCTCCTTCAAGTTCTAGATGATGGCCGTTTAACTGATGGTCAAGGAAACACTATTAACTTTAAAAATACTGTTATCATTGCAACCTCAAATGCAGGTTTTGGAAACGAAGCATTTACAGGTGACAGCGATAAAGACTTGAAAATTATGGAACGAATTTCTCCATATTTCCGTCCAGAATTTCTAAATCGTTTCAATGGTGTTATTGAATTCTCTCACCTAAGCAAAGATGACTTAAGCGAAATTGTAGATTTGATGCTTGATGAAGTTAACCAAACAATTGGCAAAAAAGGAATTGACCTTGTGGTAGATGAAAATGTTAAATCACACTTAATTGAACTGGGTTATGACGAAGCAATGGGAGTACGTCCATTGCGCCGTGTCATCGAGCAAGAAATTCGAGATCGCATCACAGACTACTATCTCGATCATACAGACGTTAAACACCTAAAAGCTAATTTGCAAGATGGCCAAATCGTCATTTCTGAAAGA

SEQ ID NO: 15840 - protein, 303 aa, Streptococcus agalactiae
MGASDIERLKELGNRLKGKVIGQNDAVEAVARAIRRNRAGFDDGNRPIGSFLFVGPTGVGKTELAKQLAFDMFGSKDAIVRLDMSEYNDRTAVSKLIGATAGYVGYDDNSNTLTERIRRNPYSIVLLDEIEKADPQVITLLLQVLDDGRLTDGQGNTINFKNTVIIATSNAGFGNEAFTGDSDKDLKIMERISPYFRPEFLNRFNGVIEFSHLSKDDLSEIVDLMLDEVNQTIGKKGIDLVVDENVKSHLIELGYDEAMGVRPLRRVIEQEIRDRITDYYLDHTDVKHLKANLQDGQIVISER

SEQ ID NO: 15841 - protein, 1044 aa, Streptococcus agalactiae
TTGCTTGGGATAGCTCACAACGTGCTGGGCTTTACTTCGGTGTTCCATTTATTATTTTCTGCTATATTTATCACAAACTACGTTACAAGAAATGGTGATCTTATGGGAAGATTTAAAGAACTTTTAGAGAGTAAAAAAACTCTCATCCTACATGGTGCCTTGGGGACCGAGCTTGAGAGTAGAGGTTGTGATGTTTCTGGGAAACTTTGGTCAGCCAAATATCTGATTGAGGATCCAGCAGCTATTCAGACCATTCATGAAGATTATATTCGTGCTGGCGCTGATATTGTGACGACATCAACTTATCAGGCGACTTTACAAGGACTAGCTCAAGTTGGTGTCTCTGAAAGTCAGGCAGAAGATTTGATTCGCTTGACTGTTCAGTTGGCAAAAGCTGCGCGTGAGCAAGTTTGGAAAAGTTTGACAAAAGAAGAAAAATCAGAGAGAATCTATCCTTTGATTTCTGGGGATGTTGGTCCCTACGCTGCCTTTTTAGCGGATGGCTCTGAGTACACTGGACTCTACGATATTGATAAGCAAGGTCTTAAAAACTTCCATCGCCATCGTATTGAGCTTCTTTTAGATGAGGGTGTTGACATTCTGGCACTTGAAACCATTCCAAACGCTCAGGAGGCTGAGGCTCTTATTGAGCTACTTGCCGAGGATTTCCCTCAGGTTGAGGCTTATATGTCATTCACCTCTCAAGATGGTAAGACCATCTCAGATGGTAGTGCTGTTGCAGACTTGGCGAAAGCTATTGATGTTAGCCCACAGGTCGTGGCGCTGGGCATTAACTGTTCAAGTCCATCGTTAGTTGCTGATTTCTTGCAAGCAATAGCAGAGCAGACTAACAAGCCTCTTGTGACCTATCCAAACTCTGGAGAGGTTTATGATGGGGCAAGCCAATCTTGGCAATCTAGCCCTGATCATTCACACACCCTACTTGAAAATACAAGTGACTGGCAAAAACTTGGCGCCCAAGTTGTCGGAGGTTGTTGCCGAACTAGACCAGCTGATATTGCTGACCTCTCTGCACATTTAAAA

SEQ ID NO: 15842 - protein, 348 aa, Streptococcus agalactiae; identical to SEQ ID NO: 2436

SEQ ID NO: 15843 - protein, 1308 aa, Streptococcus agalactiae
ATGTTATCGCTAGGTGGTGTTATCGGGACTGGGCTTTTCTTGAGTTCAGGTTATACCATTGCACAGGCTGGTCCGCTTGGAGCTGTGCTGTCTTATTTGATTGGTGCCGTTGTGGTTTATTTGGTCATGCTATCACTTGGGGAATTGGCGGTTGCCATGCCGGTGACGGGGTCATTCCACACTTATGCCACTAAGTTTATCAGTCCTGGAACAGGTTTTACTGTTGCTTGGCTATATTGGATTTGTTGGACGGTCGCCTTGGGGACTGAATTTTTAGGTGCTGCCATGCTGATGCAGCGCTGGTTCCCAAATGTGCCGGCTTGGGCATTTGCTTCCTTTTTTGCCCTTGTGATTTTTGGTTTAAATGCTCTTAGCGTACGCTTTTTTGCAGAAGCAGAGTCTTTCTTCTCAAGTATTAAGGTTATTGCTATCATTATCTTTATTATCTTGGGCTTAGGTGCTATGTTTGGTCTAGTTTCCTTTGAAGGTCAGCACAAGGCTATTCTCTTCACTCATCTGACTGCCAATGGTGCCTTTCCAAATGGTATCGTTGCAGTTGTCTCAGTCATGTTGGCTGTTAACTATGCCTTCTCTGGTACTGAGTTAATTGGTATTGCGGCTGGTGAAACGGATAATCCCAAAGAAGCTGTACCAAGGGCTATTAAAACGACAATCGGTCGCTTGGTTGTTTTCTTTGTACTGACAATTGTTGTCCTAGCTTCGCTATTGCCAATGAAAGAGGCAGGCGTATCCACAGCACCATTCGTTGATGTCTTTGACAAGATGGGAATCCCTTTTACGGCGGATATCATGAACTTCGTTATCTTGACAGCCATCCTGTCTGCTGGTAACTCAGGTCTCTACGCATCAAGCCGTATGCTCTGGTCCCTTGCCAATGAAGGTATGTTGTCAAAATCTGTTGTGAAAATCAATAAACACGGTGTCCCAATGCGTGCTCTTCTCTTGTCAATGGCAGGAGCAGTGCTGTCGCTCTTTTCAAGTATTTACGCTGCAGACACAGTTTATCTAGCCTTGGTTTCAATCGCGGGCTTTGCTGTTGTTGTCGTATGGCTAGCCATTCCAGTCGCACAAATCAATTTCCGCAAGGAATTCTTGAAAGAGAATCAACTAGAAGATTTGTCTTACAAAACACCTTTTACACCAGTTCTCCCTTATATCACAATCATTTTGCTCTTGATTTCGATTGTAGGGATTGCTTGGGATAGCTCACAACGTGCTGGGCTTTACTTCGGTGTTCCATTTATTATTTTCTGCTATATTTATCACAAACTACGTTACAAGAAATGG

SEQ ID NO: 15844 - protein, 436 aa, Streptococcus agalactiae
MLSLGGVIGTGLFLSSGYTIAQAGPLGAVLSYLIGAVVVYLVMLSLGELAVAMPVTGSFHTYATKFISPGTGFTVAWLYWICWTVALGTEFLGAAMLMQRWFPNVPAWAFASFFALVIFGLNALSVRFFAEAESFFSSIKVIAIIIFIILGLGAMFGLVSFEGQHKAILFTHLTANGAFPNGIVAVVSVMLAVNYAFSGTELIGIAAGETDNPKEAVPRAIKTTIGRLVVFFVLTIVVLASLLPMKEAGVSTAPFVDVFDKMGIPFTADIMNFVILTAILSAGNSGLYASSRMLWSLANEGMLSKSVVKINKHGVPMRALLLSMAGAVLSLFSSIYAADTVYLALVSIAGFAVVVVWLAIPVAQINFRKEFLKENQLEDLSYKTPFTPVLPYITIILLLISIVGIAWDSSQRAGLYFGVPFIIFCYIYHKLRYKKW

SEQ ID NO: 15845 - protein, 144 aa, Streptococcus agalactiae
ATGAAGTTAACCAAACAATTGGGCAAAAAAGGAATTGACCTTGTGGTAGATGAAAATGTTAAATCACACTTAATTGAACTGGGGGTTATGACGGAAGCAATGGGGAGTACGTCCATTGCGCGTGTCTCGAGCAGAAATNNNNNT

SEQ ID NO: 15846 - protein, 48 aa, Streptococcus agalactiae
  VARIANT 47, 48: Xaa = Any Amino Acid
MKLTKQLGKKGIDLVVDENVKSHLIELGVMTEAMGSTSIARVSSRNXX

SEQ ID NO: 15847 - protein, 646 aa, Streptococcus agalactiae
ATGTCATATTTTAGAAATTACTGGTATCGTTTTGGAGCAATTTTATTTATTATTTTAGCAGTAATATTGCTTGTTTTTAGACCTGACTGGTCAATGCTTCACTATCTATTGTATTTTTACTTTATGGCACTTCTAGCGCATCAATTTGAAGATATCAGTTTCCCGGTGGGGCATCACCTATCATTAACTATGTTGTTTATGATGAAGAAGAGCTGATGGATTGTTTTCCAGGCAATACTCAGTCTATTATGTTGGTTAATACTATTGCTTGGTTGCTTTACATTGCTAGTATTGCTTTTCCTCAAGCTTATTGGCTTGGATTAGGAGTCATGTTCTTTAGTCTAACGCAGCTCTTGGGTCATGGTTTTCAGATGAATATTAAACTTAAAACTTGGTATAATCCTGGTCTAGCAACGACAGTATTTCTCCTAGTACCAATAGCTTGCGCATACATCTATCAAGCTAGTGCAGAAGGAATGCTCACTTGGGGAGATTGGCTAGGTGGTTTATCATGTTGATTGTCTGTGTACTAACTAGCATTATTGCACCTGTACAGCTATTGAAGGATAAGGAGACCAATTATATTATTAGTCCTTGGCAAATGGACCGTTTTCATAAGGTCGTTAATTTTGTAAGGATAAAAAAA

SEQ ID NO: 15848 - protein, 216 aa, Streptococcus agalactiae
MSYFRNYWYRFGAILFIILAVILLVFRPDWSMLHYLLYFYFMALLAHQFEEYQFPGGASPIINYVVYDEEELMDCFPGNTQSIMLVNTIAWLLYIASIAFPQAYWLGLGVMFFSLTQLLGHGFQMNIKLKTWYNPGLATTVFLLVPIACAYIYQASAEGMLTWGDWLGGFIMLIVCVLTSIIAPVQLLKDKETNYIISPWQMDRFHKVVNFVRIKK

SEQ ID NO: 15849 - protein, 408 aa, Streptococcus agalactiae
GTGCAGTCACTACTTATTTCGGGACTTTTTATTCAATTACACTTTTTCGAAGAATTTGGTTTCCCTGGAGGTTTTCCGCTTATCACTATGCTAGTTGAACTTAAATCGGTTGAAACTGATACTAGTAAGTGGGACTTAAACCATCTATCAGCCTTTTTCGGGAATCAGTGGTTTGCAGTGATTGTTTATCTTTTGCCGATTTTTTGTCCCAATATACCATTTTTAACACTTGCAGTCATGATTTTTGCATTTGCAGAACTTGCCATGCATCTTTTCTTTTTTAATCTTTCCTTGAAGAAGTGGTATAATCCAGGACTTCTTACGACCTTAGTAGGTCTTGTCCCTGTTTCTGTCTATTATTTAGCTCATGATTGGAAGTTGTATTCTGGACTTGATTGGTTTTTAGGC

SEQ ID NO: 15850 - protein, 136 aa, Streptococcus agalactiae
MQSLLISGLFIQLHFFEEFGFPGGFPLITMLVELKSVETDTSKWDLNHLSAFFGNQWFAVIVYLLPIFCPNIPFLTLAVMIFAFAELAMHLFFFNLSLKKWYNPGLLTTLVGLVPVSVYYLAHDWKLYSGLDWFLG

SEQ ID NO: 15851 - protein, 117 aa, Streptococcus agalactiae
ATGGTATCAAATGTCACAAATCTTGGAGGTCATCTTATGAAAGCATTGATAACAAAATGGTACCTCTTTTGTCCCTATCTTGCTTCTCTTTTTGCCTTAGCATTATTTTTTGGAAAT

SEQ ID NO: 15852 - protein, 39 aa, Streptococcus agalactiae
MVSNVTNLGGHLMKALITKWYLFCPYLASLFALALFFGN

SEQ ID NO: 15853 - protein, 90 aa, Streptococcus agalactiae; identical to SEQ ID NO: 11261

SEQ ID NO: 15854 - protein, 30 aa, Streptococcus agalactiae; identical to SEQ ID NO: 11262

SEQ ID NO: 15855 - protein, 375 aa, Streptococcus agalactiae
ATGACTGAAAGTGTGACAGTTAATAAAAAGAGAATAAAACAAATCACTCAAACACAAGAGGATATCTTAACAGCTTTTGGCCAACTTTTGGAAGAGTATCCCTATGAGAAAATTCAGATTAGCCAAATTGCCAAGAAATCTGGCTATGCTAGAAGGACCTTTTACCGACACTTTGACAGTCGAGATGACCTACTTACCCTTTTCATCGAAAGACTAACATTAAATCTCTTTAAGCAACTTGGTCAATTGGAGCAACCTACTTTTAGCCAAGTTTTCCAAAATTTTTTTAGTTATTGGTCTGATTATAAATCCCTTCTTCTCATTCTTAGAAAGATGACCTACTCCCTCATTTCAACAATCCTGGGTCCGACATAT

SEQ ID NO: 15856 - protein, 125 aa, Streptococcus agalactiae
MTESVTVNKKRIKQITQTQEDILTAFGQLLEEYPYEKIQISQIAKKSGYARRTFYRHFDSRDDLLTLFIERLTLNLFKQLGQLEQPTFSQVFQNFFSYWSDYKSLLLILRKMTYSLISTILGPTY

SEQ ID NO: 15857 - protein, 408 aa, Streptococcus agalactiae
GTGCAGTCACTACTTATTTCGGGACTTTTATTCAATTACACTTTTTCGAAGAAATTTGTTTTCCCTGGAGGTTTTCCGCTTATCACTATGCTAGTTGAACTTAAATCGGTTGAAACTGATACTAGTAAGTGGGACTTAAACCATCTATCAGCCTTTTCGGGGAATCAGTGGTTTGCAGTGATTGTTTATCTTTTGCCGATTTTTTGTCCCAATATACCATTTTTAACACTTGCAGTCATGATTTTTGCATTTGCAGAACTTGCCATGCATCTTTTCTTTTTTAATCTTTCCTTGAAGAAGTGGTATAATCCAGGACTTCTTACGACCTTAGTAGGTCTTGTCCCTGTTTCTGTCTATTATTTAGCTCATGATTGGAAGTTGTATTCTGGACTTGATTGGTTTTTAGGC

SEQ ID NO: 15858 - protein, 136 aa, Streptococcus agalactiae
MQSLLISGLLFNYTFSKKFVFPGGFPLITMLVELKSVETDTSKWDLNHLSAFSGNQWFAVIVYLLPIFCPNIPFLTLAVMIFAFAELAMHLFFFNLSLKKWYNPGLLTTLVGLVPVSVYYLAHDWKLYSGLDWFLG

SEQ ID NO: 15859 - protein, 171 aa, Streptococcus agalactiae
ATGATTTGGATAGAGTTAGGTCGTGGTGATTTATCTTCCAATACCTATGCTCAGCGATTTGCGATTGGTGGTATTTTCAGTGTTCTAATTGAGTGGATTCATCAGGACTGCCAAACAAGTATCGAAGAATTAACTCAAGTTTCCTTCGATATTATCAATCATTTAAAAAAT

SEQ ID NO: 15860 - protein, 57 aa, Streptococcus agalactiae
MIWIELGRGDLSSNTYAQRFAIGGIFSVLIEWIHQDCQTSIEELTQVSFDIINHLKN

SEQ ID NO: 15861 - protein, 594 aa, Streptococcus agalactiae
ATGGCAGAAGAATTTTTAAATACTCATAATGCGTCTATTTTATTGAGTGCAGCTAACAAGTCACATTATCCTCAGGATGATCTCCCAGAAGTTGCTCTCGCTGGTCGTTCAAATGTTGGTAAATCAAGCTTTATCAACACGCTTCTTGGTCGTAAAAACCTAGCGCGTACGTCGAGTAAGCCAGGTAAGACACAACTGCTCAACTTTTATAACATTGATGACAAACTGCGTTTTGTCGATGTCCCTGGATATGGCTACGCTAAGGTGTCTAAAACTGAGCGTGCTAAGTGGGGCAAGATGATTGAAGAGTACCTTGTAACACGTGATAACCTTCGTGTTGTTGTTAGTTTAGTTGATTTTCGTCATGATCCAAGTGCGGACGATATTCAAATGTATGAATTTCTTAAGTACTATGAGATTCCAGTAATTATTGTAGCGACAAAGGCAGATAAAATACCTCGTGGCAAGTGGAATAAACATGAGTCGTCTATTAAGAAGAAATTAAACTTTGATAAAAAGGACCATTTCATCGTCTTTTCATCTGTTGACCGCACAGGTCTTGATGAATCATGGGATACTATTTTATCTGAGTTA

SEQ ID NO: 15862 - protein, 198 aa, Streptococcus agalactiae; identical to SEQ ID NO: 2448

SEQ ID NO: 15863 - protein, 1224 aa, Streptococcus agalactiae
ATGGCTGGGAATCGTAATAACGATATGAATGTCTATTGTTCATTTTGTGGCAAAAGCCAAGATGAAGTAAAAAAAATTATTGCAGGTAATGGTGTTTTCATTTGTAATGAATGTGTGGCCTTATCACAAGAAATTATTAAGGAAGAATTAGCTGAGGAAGTACTGGCTGATTTAGCAGAAGTACCAAAACCTAAGGAACTATTAGAAATATTAAATCAATATGTTGTAGGGCAAGATCGTGCTAAACGTGCTTTAGCAGTTGCTGTCTACAATCATTACAAGCGTGTTAGTTATACCGAGAGTAGTGACGATGATGTAGATTTGCAAAAATCCAACATTTTGATGATTGGTCCAACTGGCTCAGGAAAAACCTTCTTAGCACAAACACTGGCTAAAAGCCTTAATGTACCGTTTGCTATTGCAGATGCGACTTCATTGACCGAAGCAGGATACGTTGGAGAAGATGTTGAGAATATTCTTCTTAAATTGATTCAAGCTGCTGATTATAATGTCGAACGTGCTGAGCGTGGTATTATCTACGTTGATGAAATAGATAAAATTGCTAAGAAAGGCGAAAATGTTTCTATCACACGTGATGTGTCTGGTGAAGGTGTACAGCAAGCCCTTCTTAAAATTATTGAGGGTACGGTAGCAAGTGTTCCCCCACAGGGTGGGCGTAAACATCCTAACCAAGAAATGATTCAAATTAATACCAAGAACATCCTTTTTATTGTCGGTGGTGCTTTTGATGGTATTGAAGACCTTGTGAAGCAACGTTTAGGCGAAAAAGTTATTGGTTTTGGACAGACAAGCCGTAAAATTGATGACAACGCTTCTTATATGCAAGAGATAATTTCTGAGGATATTCAAAAGTTTGGACTGATTCCAGAGTTTATTGGCCGTTTACCAGTAGTTGCAGCGTTAGAACTTCTTACTGCAGAAGATCTGGTTCGTATTCTGACAGAACCACGCAATGCTTTGGTTAAACAATACCAAACCTTATTATCTTATGATGGTGTAGAATTGGAATTTGACCAGGATGCTCTATTGGCTATCGCTGATAAGGCTATCGAGCGCAAGACTGGTGCACGTGGTTTACGTTCTATTATTGAAGAAACGATGCTTGATATCATGTTTGAAATTCCAAGCCAAGAAGATGTAACAAAAGTTCGTATCACAAAGGCTGCTGTTGAGGGTACTGACAAGCCTGTTTTAGAGACGGCT

SEQ ID NO: 15864 - protein, 408 aa, Streptococcus agalactiae; identical to SEQ ID NO: 2450

SEQ ID NO: 15865 - protein, 168 aa, Streptococcus agalactiae
ATGCAACGTAGCCTTTTTGGGGTCTTTACCGCATTTTTAGCTGTGATTTGTGTTTTATGTGCAATTCCTGCTATAAAGAAAAAAAGATATGGATTAGGAACAGTTTTTTTGATGAATGCTTTCACTAACCTTGTCAACACAATCCATGCCTTTTATGGAACATTATTT

SEQ ID NO: 15866 - protein, 56 aa, Streptococcus agalactiae; identical to SEQ ID NO: 7012

SEQ ID NO: 15867 - protein, 492 aa, Streptococcus agalactiae
ATGACAAAGCAAATAATTGCCATTTGGGCTGAAGATGAAGACCATTTGATTGGAGTTAATGGCGGTTTACCATGGAGGCTTCCTAAAGAGTTACATCACTTCAAAGAAACGACCATGGGGCAGGCTTTGCTTATGGGACGAAAGACCTTTGATGGAATGAACCGTCGTGTTTTACCTGGTAGAGAGACAATCATCTTAACAAAAGATGAACAATTCCAAGCAGATGGAGTGACAGTCCTAAATAGTGTTGAACAAGTTATAAAATGGTTTCAGGAACATAATAAGACCTTATTTATTGTAGGTGGTGCAAGTATTTATAAAGCATTTCTGCCTTATTGTGAAGCAATCATAAAAACTAAAGTTCATGGAAAATTCAAAGGTGATACCTATTTTCCTGATGTTAATCTATCTGAGTTTAAAGTTATCTCTAGAGATTATTTTGAAAAGGATGAGCAGAATGCTCATGCTTTTACTGTGACATATTTTGAAAAA

SEQ ID NO: 15868 - protein, 164 aa, Streptococcus agalactiae; identical to SEQ ID NO: 2452

SEQ ID NO: 15869 - protein, 837 aa, Streptococcus agalactiae
ATGACAAAAGCCGATTTATTATTTAAAGACAATATCACGAAAATTATGTCTGAAGGTGTATTTAGCGAGCAAGCCAGACCTAGATATAAAAATGGGGAAATGGCTAATTCTAAGTATATTACAGGTGCCTTTGCAGAGTATGATTTATCAAAGGGTGAATTTCCTATTACAACTCTACGTCCAATTCCAATAAAATCTGCTATTAAAGAAATTTTCTGGATTTATCAAGATCAGACAAATGATTTAGCAGTTTTGAATGATAAATATGGTGTGACATACTGGAATGATTGGGAAGTTGGCCATACTGGCACGATAGGTCAGCGCTACGGTGCAGTTGTTAAAAAACATAATATTATATCAAAACTCTTAAAACAGCTTGAAGATAACCCTTGGAATCGTCGTAATGTTATTTCATTATGGGACTATGAAGCATTTGAAGAAACAGAAGGCCTACTACCTTGTGCTTTTCAAACGATGTTTGATGTGAGACGCGTTAATGGTGAGCTTTATTTGGATGCCACATTAACACAACGTTCTAATGACATGTTAGTTGCACATCATATTAATGCTATGCAGTATGTAGCACTTCAGATGATGATTGCAAAGCATTTTGGTTGGAGAGTTGGGAAGTTTTTCTATTTTATCAATAATCTTCATATTTATGATAACCAGTTTGAACAAGCTCAGGAACTCTTAAAACGCCAACCGTCTGAGTGTAACCCCAAACTAGTATTGAATGTTCCAGATGGAACAGACTTTTTTGATATTAAACCAGATGATTTTGCGTTAGTTGATTATGACCCAATTAAACCTCAATTACGTTTTGATTTAGCAATC

SEQ ID NO: 15870 - protein, 279 aa, Streptococcus agalactiae; identical to SEQ ID NO: 2454

SEQ ID NO: 15871 - protein, 1270 aa, Streptococcus agalactiae
GTGAGAAACAAGACTTTGAAGGTTAAAGCTTTTTTTCATATTTTTAGCTTCTTTATGGTAAAATGGAATTTAGCAAAAATGACTTTTATTCAGAAAGGTTTACCAATGAAAATAGGAATTGATAAGATTGGTTTTGCAACCAGTCAATATGTCCTTGAAATGACTGATTTGGCTATTGCTCGCCAAGTTGACCCTGAAAAATTCAGCAAGGGATTATTGTTAGATTCACTTAGTATTACGCCAGTTACAGAAGATATCGTTACACTTGCAGCTTCTGCAGCTAATGATATTTTATCTGATGAGGACAAAGAAACTATTGATATGGTGATTGTCGCTACAGAATCAAGTATCGATCAGAGTAAGGCGGCTTCTGTCTATGTACATCAACTTTTAGAGATTCAACCTTTCGCAAGGTCATTCGAGATGAAAGAAGCATGCTATAGCGCAACTGCTGCTCTTGATTACGCTAAATTACATGTAGAAAAACATCCAGATTCTAAAGTATTAGTGATAGCTTCAGATATTGCTAAATATGGCATTAAATCTACTGGAGAATCCACTCAAGGTGCAGGCAGTATCGCTATGCTTATTAGTCAAAATCCATCCATTCTAGAGCTAAAAGAGGACCATCTAGCGCAAACCCGTGATATTATGGACTTTTGGCGACCAAATTATTCTGATGTTCCTTATGTTAATGGCATGTTTTCAACAAAACAATATCTAGATATGCTAAAAACTACTTGGAAAGTATATCAAAAACGTTTTAATACTAGTCTAAGTGACTATGCTGCTTTTTGTTTCCATATTCCTTTTCCAAAATTAGCTTTAAAGGGCTTTAATAAAATTCTAGATAATAACTTAGATGAACAAAAGAAAGCTGAACTACAAGAAAATTTTGAGCACTCTATTACCTATAGTAAGAAAATTGGAAATTGCTATACTGGCTCATTGTATCTAGGACTTCTATCGTTACTAGAAAATAGTCAAAATTTAAAAGCAGGTGATCAAATTGCCTTCTTTTCATACGGTAGCGGAGCTGTTGCTGAAATTTTTACCGGTCAGTTAGTAGACGGCTACCAAAATAAACTTCAGAGCGATCGTATGGATCAACTCAATAAACGTCAAAAAATTACAGTAACTGAGTATGAGAAACTCTTCTTTGAAAAAACAATCCTAGACGAAAATGGAAATGCTAACTTCAACACCTACCGGACTGGCACTTTTTCTCTAGACTCTATTTGCGACATCACGTATCTACAGAAAATTATAT

SEQ ID NO: 15872 - protein, 425 aa, Streptococcus agalactiae
  VARIANT 421, 424, 425: Xaa = Any Amino Acid
MRNKTLKVKAFFHIFSFFMVKWNLAKMTFIQKGLPMKIGIDKIGFATSQYVLEMTDLAIARQVDPEKFSKGLLLDSLSITPVTEDIVTLAASAANDILSDEDKETIDMVIVATESSIDQSKAASVYVHQLLEIQPFARSFEMKEACYSATAALDYAKLHVEKHPDSKVLVIASDIAKYGIKSTGESTQGAGSIAMLISQNPSILELKEDHLAQTRDIMDFWRPNYSDVPYVNGMFSTKQYLDMLKTTWKVYQKRFNTSLSDYAAFCFHIPFPKLALKGFNKILDNNLDEQKKAELQENFEHSITYSKKIGNCYTGSLYLGLLSLLENSQNLKAGDQIAFFSYGSGAVAEIFTGQLVDGYQNKLQSDRMDQLNKRQKITVTEYEKLFFEKTILDENGNANFNTYRTGTFSLDSICEHQRIYXKIXX

SEQ ID NO: 15873 - protein, 1275 aa, Streptococcus agalactiae
ATGACAAAATTTCCTGGACAGGTTTCAAAAAATCCCCTGAAGAACGTATTCATTACCTTGAAGAACAGATTTTTTAGCTGATTCTTCCCTAGAAATAGTGACGAATCAGGACTTACCTCTTTATCACTAGCCAATCAAATGGCTGAAAATGTCATCGGTCGAATAGCCTTACCATTTTCACTTGTCCCAGATGTTTTGGTTAACGGTAAAGTCTATCAAGTCCCATATGTCACTGAAGAACCGTCAGTTGTTGCTGCTGCAAGTTTTGCTGCTAAAATTATAAAACGATCTGGTGGTTTTCTGACAACCGTCCATAATCGTAAAATGATTGGACAAGTAGCCCTTTATGATGTACAAGATAGTCAACACACTAAAGAATCTATATTAAATCAAAAACAGCAATTATTAGAAATAGCCAACGCTGCTCATCCATCAATAGTCAAGCGTGGAGGCGGTGCTTGCGACCTAACTATTGAGATTAAAGAAGACTTTTTGATTGTTTACCTTATGGTTGATACAAAAGAAGCCATGGGTGCTAATATGGTTAACACCATGATGGAAGCATTATCTTCGCCATTAGAAGACATTTCAAAAGGCAAAAGCTTAATGTCAATTTTATCTAACTATGCTACCGAATCTTTAGTGACTGCTACATGCCGAGTTGATTTAAGATTTCTAAGTCGCCAAAAAGAGGAGGCCATCAAGTTAGCTCAAAAAATGACGATGGCAAGTCAATTAGCTCAAGTAGACCCTTATCGTGCTAGCACACATAATAAAGGTATTTTTAATGGCATTGATGCTATCGTCTTAGCTACTGGAAATGATTGGCGAGCTATTGAAGCTGGAGCGCATACCTATGCTGTCAAAGATGGGCAATATCGAGGATTATCTAGATGGTCTTATAAGGTTGATGATAATTGCCTAGAAGGTACTCTGACGCTACCGATGCCTGTTGCAACAAAAGGTGGATCCATTGGTATTAACCCTAGTGTCCACCTAGCTCACGATCTACTAGGTCGTCCTAATGCTAAAGAGTTGGCAAGTATTATTCTTTCGATTGGACTAGCTCAAAATTTTGCGGCTCTTAAGGCATTGGTTAGCACAGGAATTCAAGCTGGTCACATGAAACTTCAAGCAAAGTCGTTGGCACTACTTGCTGGAGCTAAAGAAGAACAAATTTCAGAAGTCGTTAAACAGCTTCTAGACTCTAAACACATGAATCTAGAGACAGCACAAAAAATTGTCAATAAACTTACTAAAAGTAAAAAAAGAATT

SEQ ID NO: 15874 - protein, 427 aa, Streptococcus agalactiae
  VARIANT 9: Xaa = Any Amino Acid
MTKISWTGXSKKSPEERIHYLEEQDFLADSSLEIVTNQDLLSLSLANQMAENVIGRIALPFSLVPDVLVNGKVYQVPYVTEEPSVVAAASFAAKIIKRSGGFLTTVHNRKMIGQVALYDVQDSQHTKESILNQKQQLLEIANAAHPSIVKRGGGACDLTIEIKEDFLIVYLMVDTKEAMGANMVNTMMEALSSPLEDISKGKSLMSILSNYATESLVTATCRVDLRFLSRQKEEAIKLAQKMTMASQLAQVDPYRASTHNKGIFNGIDAIVLATGNDWRAIEAGAHTYAVKDGQYRGLSRWSYKVDDNCLEGTLTLPMPVATKGGSIGINPSVHLAHDLLGRPNAKELASIILSIGLAQNFAALKALVSTGIQAGHMKLQAKSLALLAGAKEEQISEVVKQLLDSKHMNLETAQKIVNKLTKSKKRI

SEQ ID NO: 15875 - protein, 447 aa, Streptococcus agalactiae
ATGAATAAAAATCAATACCCAAAATGGGAAGAATTACCTGAACTAGATTTGTATCTTGACCAAGTACTTCTCTATGTGAATCAATTAATTAATCCTAAAACAATAACTAACGATAAACTACTCACCGCTTCGATGATCAACAATTATGTCAAACATAATTATATATCCAAACCTATAAAAAAAAAATACAATCGCCGTCAAGTAGCACGATTGATTGTTATTACAGCTTTTAAACAAATTTTTGCTATTCAAGAAATCAGTCAAACATTAGAACTTCTGACAGCTGACAATCATTCTGAAGAAGCATATAACGGATTTGCTGCTTGTATGAACAAAGAAGAGGTTCACGATTTACCACCAGTTGTCATTAGTGCCTGTCAGACGTTGAACCTTTATCAAGAAACACAAAAATTAGTTTTAGAACTAGGAGGAAAAAATAAAAATGCT

SEQ ID NO: 15876 - protein, 149 aa, Streptococcus agalactiae
MNKNQYPKWEELPELDLYLDQVLLYVNQLINPKTITNDKLLTASMINNYVKHNYISKPIKKKYNRRQVARLIVITAFKQIFAIQEISQTLELLTADNHSEEAYNGFAACMNKEEVHDLPPVVISACQTLNLYQETQKLVLELGGKNKNA

SEQ ID NO: 15877 - protein, 561 aa, Streptococcus agalactiae
ATGCTAATCCTATTACCAATCACCGCTGTCTATAGTCACAACCACTTCGGATTACAAGCAGCACTTGGTACCTCAATATTCGTCACTTCTTTATTTTTGATGTTTTTATCATCAAGTATTTACCACTCCATGACTTATAACAGTCTTCAAAAATATGTTCTACGCATGATTGATCACTCTATGATTTATATTGCTATTGCAGGTAGTTATACTCCTGTCGCATTGTCACTTATTGGCGGCTGGTTAGGATATCTCATCATTTTTTTACAATGGGGGATTACATTATTTGGTATCCTTTATAAAATCTTCGCTCCCAAAATCAATGATAAATTTAGCCTTGTACTTTACCTCATTATGGGATGGCTGGTTATCTTTATTTTCCCTGCTATTATCACAAAAACTGGACCAGCTTTTTGGGGATTACTCTTGGCTGGTGGTATTTGCTATACTATCGGTGCACTCTTTTATGCTCGCAAACGTCCTTATGATCACATGATTTGGCACCTTTTTATTCTATTAGCTTCTATTTTACAATACATTGGAATTGTCTACTTCATGCTA

SEQ ID NO: 15878 - protein, 187 aa, Streptococcus agalactiae; identical to SEQ ID NO: 2462

SEQ ID NO: 15879 - protein, 912 aa, Streptococcus agalactiae
ATGAAAAGTGCTTATATCTTTTTTAATCCAAAATCTGGTAAAGATGAACAAGCATTGGCAAAAGAAGTAAAATCTTATTTAATAGAACATGATTTTCAAGACGATTATGTTCGTATTATTACACCTTCATCTGTTGAGGAAGCTGTCGCCTTAGCAAAAAAAGCATCTGAAGACCATATCGACTTGGTTATTCCTTTAGGGGGAGATGGCACTATTAATAAAATCTGTGGTGGTGTCTACGCTGGTGGTGCTTATCCTACTATCGGACTAGTACCTGCCGGGACCGTCAATAACTTTTCAAAAGCTTTGAACATCCCGCAAGAGAGGAATCTCGCTCTTGAAAACCTTCTAAACGGTCATGTAAAGTCCGTAGATATCTGTAAAGTTAATGACGATTACATGATTAGCAGTTTAACACTTGGTCTCCTTGCTGATATTGCTGCTAATGTCACTTCTGAAATGAAGCGTAAATTAGGCCCTTTTGCTTTCTTAGGTGATGCCTACCGTATATTAAAGCGTAATCGATCATATTCTATCACTCTTGCTTACGATAATAATGTACGGTCTTTACGCACGCGGTTACTCCTTATTACCATGACCAATTCGATTGCCGGTATGCCAGCCTTCTCTCCAGAAGCAACAATTGATGATGGACTTTTTAGAGTCTACACTATGGAACATATTCACTTCTTCAAATTATTGTTGCATCTAAGACAATTTCGTAAGGGAGATTTTAGTCAAGCAAAGGAGATAAAACATTTTCATACCAATAATCTGACTATTTCAACTTTTAAACGTAAAAAATCAGCTATCCCTAAAGTTCGTATTGATGGCGATCCAGGTGACCAATTACCTGTAAAAGTTGAAGTCATCCCTAAAGCCTTAAAGTTTATCATTCCTAACTCATTACCA

SEQ ID NO: 15880 - protein, 304 aa, Streptococcus agalactiae
MKSAYIFFNPKSGKDEQALAKEVKSYLIEHDFQDDYVRIITPSSVEEAVALAKKASEDHIDLVIPLGGDGTINKICGGVYAGGAYPTIGLVPAGTVNNFSKALNIPQERNLALENLLNGHVKSVDICKVNDDYMISSLTLGLLADIAANVTSEMKRKLGPFAFLGDAYRILKRNRSYSITLAYDNNVRSLRTRLLLITMTNSIAGMPAFSPEATIDDGLFRVYTMEHIHFFKLLLHLRQFRKGDFSQAKEIKHFHTNNLTISTFKRKKSAIPKVRIDGDPGDQLPVKVEVIPKALKFIIPNSLP

SEQ ID NO: 15881 - protein, 852 aa, Streptococcus agalactiae
ATGACAACATTTACTGCTAAATTTATTGACCAAGAGTGGGAAGTCCCAGTAGAATCAGGTCGCTACCATATGATTGTTGGGGAATTTTGTCCTTATGCACAACGTCCGCAGATTGCGCGCCAACTGCTTGGTTTGGATAAACATATTTCTATCAGTTTTGTGGATGATGTTCCAAGTGATATAGGACTTATTTTTAGCCAACCAGAACAGGTCACTGGTGCTAAGTCGCTTCGTGATATTTATCATTTGACTGACCCGACCTACCAAGGTCCTTATACTATCCCAATTTTAATTGACAAGACCGATAATCGTATTGTCTGTAAGGAATCTGCAGATTTGCTTCGACTTTTTACTACAGATTTCTCTGATTTGCATCAAGAGGATGCTCCTGTCCTTTTCAGCCAAGAAACTGCTTCACTTATTGATAATGACATTAAAGACATTAATAAGAACTTCCAAAGCTTAATGTATAAGTTAGCTTTTCTTGATAAACAAGCAGATTATGATACTTATAGTAAGGAATTCTTCACTTTTCTAGATCAAAAAGAACACTTACTAGGACAACGTCCTTTCTTGCTCGGAGATAATCTAAGTGAGGTTGATATTCATTTCTTTACACCATTAGTCCGATGGGATATTGCTGGGCGTGATCTTCTACTACTTAATCAGAAAGCGCTAGAAGACTACCCAAATATTTTTTCTTGGGCTAAAACTTTATACAATGACTTTAATTTAAAAACATTAACCAATCCACAATCCATAAAAAATAACTATTACTTAGGCAAATTTGGAAGAGCTGTTCGTCATCATACCATCGTCCCAACAGGTCCAAATATGGCAAAATGGGAAAAA

SEQ ID NO: 15882 - protein, 284 aa, Streptococcus agalactiae; identical to SEQ ID NO: 2466

SEQ ID NO: 15883 - protein, 216 aa, Streptococcus agalactiae
ATGATTAAACTGTATTATAAAGATGCTTACGACACTGAACGATGCCAAGTTTTTGAAAATCCAAATGATTTTATTCGAGTTTTAATGGGATGTGTTACTGTTCCTGACAATTATCCTATTACGAAAATGACTTATAAAGATAAAGATATTGCTTACAGTGGTACTTATGGAGATCTCTTCAAGACTTTTATTGAATTTGATTGGTCCACTTTGGAC

SEQ ID NO: 15884 - protein, 72 aa, Streptococcus agalactiae; identical to SEQ ID NO: 2468

SEQ ID NO: 15885 - protein, 993 aa, Streptococcus agalactiae
ATGACAAATCGAAAAGATGATCACATAAAATATGCTCTTAAATATCAGTCGCATTATAATAGTTTTGACGATATTGAGTTAATACATTCATCCTTACCAAAATATAATGTCAACGATATCGATTTATCAACACATTTTGCTGGTCAAAGCTTTGAATTTCCTTTTTATATCAATGCTATGACAGGCGGTAGTGAAAAAGGGAAAGCAGTCAATCATAAATTGGCACAGGTTGCTCAAGCTACAGGGATTGTTATGGTGACAGGTTCATATTCGGCAGCTCTCAAAAACGATGAAGATGATTCCTACCCAACAACAGACTTGTATCCTGATTTAAAACTGGCGACAAATATAGGGTTAGACAAGCCTGTACCAGCAGCAGAGTCAACCGTTAAGGCTATGAACCCCATTTTTTTACAAGTTCATGTTAATGTGATGCAAGAACTTTTGATGCCTGAAGGAGAGCGTGAATTTCACATGTGGCGTTCTCACTTAAAAGAATACGTCGACAATATCCAATGCCCACTTATTTTAAAAGAGGTTGGTTTTGGGATGGATTTACAATCAATAAAGGATGCTTACGATATAGGTATCACAACTGTAGATATTTCGGGGCGTGGGGGGACTAGTTTTGCTTACATCGAAAATCAACGTGGACGCGACCGTTCGTATCTCAATACCTGGGGGCAAACAACAGCTCAATCCTTAATAAACGCTCAATCTATGATGGACAAAATGGATATCCTAGCATCTGGTGGCATTCGTCATCCTTTAGATATGGTAAAATGTTTAGTGTTGGGTGCTAAAGCTGTTGGACTTTCTAGAACAGTTTTAGAATTAGTTGAGCGTTATCCTGTAGATGATGTTATTGCAATTCTCAATTCTTGGAAAGAAGATTTAAGAATGATAATGTGTGCACTGAATTGTAAAAAAATAACTGATTTACGACAAGTCAATTATATATTGTATGGTCAATTGAAGGAAGCCAATGCTAAA

SEQ ID NO: 15886 - protein, 331 aa, Streptococcus agalactiae
MTNRKDDHIKYALKYQSHYNSFDDIELIHSSLPKYNVNDIDLSTHFAGQSFEFPFYINAMTGGSEKGKAVNHKLAQVAQATGIVMVTGSYSAALKNDEDDSYPTTDLYPDLKLATNIGLDKPVPAAESTVKAMNPIFLQVHVNVMQELLMPEGEREFHMWRSHLKEYVDNIQCPLILKEVGFGMDLQSIKDAYDIGITTVDISGRGGTSFAYIENQRGRDRSYLNTWGQTTAQSLINAQSMMDKMDILASGGIRHPLDMVKCLVLGAKAVGLSRTVLELVERYPVDDVIAILNSWKEDLRMIMCALNCKKITDLRQVNYILYGQLKEANAK

SEQ ID NO: 15887 - protein, 990 aa, Streptococcus agalactiae
ATGGTTAAGGTGCAAACAGGTGGCAAATTATATATTGCAGGTGAATACGCGATACTGTATCCTGGGCAAGTAGCTATTTTAAAGAACGTTCCTATTTATATGACTGCATTAGCTACTTTTGCAGATAACTACAGCCTTTATTCTGATATGTTTAACTATACGGCAAGCTTACAGCCAGATAAGCAATATAGTCTCATTCAGGAAACGATATTGCTTATGGAAGAATGGTTGATTAATTTTGGCAAAAATATAAAACCGATTCACCTCGAAATTACGGGAAAATTAGAGCGCTATGGACTTAAATTTGGTATAGGCTCTAGCGGAAGTGTTGTCGTTTTGACTATTAAAGCTATGGCTGCGCTTTATGAGATAGAGATGCCAAGCGACTTGCTTTTTAAATTATCTGCCTATGTTCTCTTAAAAAGAGGTGATAATGGCTCAATGGGAGATATTGCTTGTATTGCTTATGAGCATTTAATTTCTTATTCAGCTTTTGATCGTAGGGCTGTTTCAAAAATGATTGAAACAAAACCTTTGGAACAAGTATTGGAAGCTGAATGGGGTTATCGTATTACCAAAATACAAGCTTTATTGGAGATGGATTTTTTAGTGGGATGGACAATGCAACCGTCCATTTCAAAAGAAATGATAAATATAGTTAAATCAACTATTACGCAGCGTTTTTTAGATGATACAAAGTATCAAGTTGTCCAGTTACTTTCAGCCTTTAAAGAAGGAGATAAAGAAGCGATTAAGAGATGTTTAGAAGAAATTAGCTTGCTATTATTTAATCTTCATCCATCTATTTACACCGATAAACTTCAAAAGCTTAAAGAGGCAAGCAAAGGCCTAGATATAGTCACAAAATCTTCAGGATCTGGAGGAGGCGATTGTGGTATAGCCATATCCTTTAATAAAAATGATAATCAAACTCTAATCAAGCGTTGGGAGAGTGCTGGTATTGAACTACTTAGTAAGGAGACACTGTCA

SEQ ID NO: 15888 - protein, 330 aa, Streptococcus agalactiae
MVKVQTGGKLYIAGEYAILYPGQVAILKNVPIYMTALATFADNYSLYSDMFNYTASLQPDKQYSLIQETILLMEEWLINFGKNIKPIHLEITGKLERYGLKFGIGSSGSVVVLTIKAMAALYEIEMPSDLLFKLSAYVLLKRGDNGSMGDIACIAYEHLISYSAFDRRAVSKMIETKPLEQVLEAEWGYRITKIQALLEMDFLVGWTMQPSISKEMINIVKSTITQRFLDDTKYQVVQLLSAFKEGDKEAIKRCLEEISLLLFNLHPSIYTDKLQKLKEASKGLDIVTKSSGSGGGDCGIAISFNKNDNQTLIKRWESAGIELLSKETLS

SEQ ID NO: 15889 - protein, 942 aa, Streptococcus agalactiae
ATGGACGGAAAAAGTATAAGTGTTAAGTCTTATGCTAACATTGCTATTATCAAATATTGGGGAAAAGCAGATGCTGAAAAAATGATTCCAGCTACCAGTAGTATTTCTCTAACACTTGAAAACATGTACACTGAAACACGTTTGACTGCCCTTGGGAAGGATGCTAAGAAAGATGAATTTTACATCTCTGGTGTTCTTCAAAATGATCATGAACATGACAAAATGTCAGCTATCTTGGATCGCTTTCGACAAAATAGGTCCGGCTTTGTAAAGATTGAAACAACTAATAATATGCCAACAGCTGCAGGCTTATCATCGTCATCAAGTGGTTTATCAGCCTTAGTAAAGGCCTGCAATGATTTTTTTGGTACTAACCTTAGCCAATCACAGCTAGCTCAAGAAGCCAAGTTTGCTTCAGGCTCCTCTTCACGCTCTTTTTTTGGACCTGTTGCTGCTTGGGATAAAGATAGTGGTGATATCTATAAAGTTCACACTAATTTAGATTTAGCTATGATTATGCTGGTCTTAAATGACAAAAGAAAGCCGATTTCAAGCCGTGAAGGTATGAAAATCTGCACCGAAACTTCAACTACTTTTAATGAATGGGTAAGGCAATCTGAACAAGATTATCAAGATATGTTAGTATACCTAAAAAATAATGATTTTCAAAAGGTAGGTCAACTGACAGAGCGTAATGCACTTGCAATGCACTCAACAACTAAAACAGCAACTCCAGCCTTTTCATATTTGACAGAAGAGACATATAAAGCTATGGATGTTGTGAAGAAACTTCGCGAAAAAGGTCATGAATGTTATTATACGATGGATGCGGGTCCAAATGTTAAAGTACTTTGCTTACGTCAAGACCTTGAGGCATTAGCTGCTATCTTGGAGAAAGATTATCGTATTATTGTTTCAACGACAAAGGAATTAGCAGATGGT

SEQ ID NO: 15890 - protein, 314 aa, Streptococcus agalactiae
MDGKSISVKSYANIAIIKYWGKADAEKMIPATSSISLTLENMYTETRLTALGKDAKKDEFYISGVLQNDHEHDKMSAILDRFRQNRSGFVKIETTNNMPTAAGLSSSSSGLSALVKACNDFFGTNLSQSQLAQEAKFASGSSSRSFFGPVAAWDKDSGDIYKVHTNLDLAMIMLVLNDKRKPISSREGMKICTETSTTFNEWVRQSEQDYQDMLVYLKNNDFQKVGQLTERNALAMHSTTKTATPAFSYLTEETYKAMDVVKKLREKGHECYYTMDAGPNVKVLCLRQDLEALAAILEKDYRIIVSTTKELADG

SEQ ID NO: 15891 - protein, 876 aa, Streptococcus agalactiae
ATGAAAGAAAAGTTTGGTATAGGAAAGGCTCATAGCAAGATTATCTTGATGGGTGAGCACTCAGTAGTATATGGTTATCCAGCCATTGCTATTCCTTTAAAAAATATTGAAGTAACTTGCCTTATTGAAGAGGCTCCTCAATTAATAGCATTAGATATGACTGATCCTTTGTCGACAGCCATTTTTGCTGCCTTGGACTATTTAGGTAAAACTTCTTCTAAAATTGCATATCATATTGAGTCACAAGTCCCAGAAAGACGTGGTATGGGATCATCAGCTGCAGTTGCTATTGCAGCTATTCGTGCAGTTTTTGATTATTTTGATGAAGATTTGGAGGCAGATTTGTTAGAATGCCTTGTTAATCGAGCAGAAATGATAGCACATTCAAATCCGAGTGGATTAGATGCAAAAACTTGTCTTAGTGAAAATACTATTAAATTTATCCGCAATATTGGTTTTTCAACAGTACCCATGCATTTGAATGCTTATTTAGTTATTGCTGATACAGGAATTCATGGGCATACTAAAGAAGCAGTGGATAAGGTGAAATCATCTGGCGAGGCAGTACTACCCTTTTTAAAAGAATTAGGTTATTTAGCAGAGGCATCAGAGGATGCTATTCATAAAAGTGATTCCAAACAACTTGGTAGCTTGATGACTAAAGCACATCAAAGTTTAAAACAATTGGGTGTCTCAAGTTTAGAAGCTGATCATCTGGTAGAGGTAGCTATTAGTTGTGGTGCTCTAGGCGCTAAAATGAGTGGCGGCGGATTAGGTGGTTGTATTATCGCACTTGTAAAAGAAAAAAGAGAAGCTGAGCGCTTAAGTCAGCAATTAGAAAGAGAAGGAGCTGTCAACACATGGACGGAAAAAGTA

SEQ ID NO: 15892 - protein, 292 aa, Streptococcus agalactiae; identical to SEQ ID NO: 7038

SEQ ID NO: 15893 - protein, 1227 aa, Streptococcus agalactiae
ATGTTTAGAAATTTACGACTTCGTTTTATCGGAATAGCTGCGCTAGCTATTCTTGTTGTCTTATTTTCAGTAGTCGGTGTCCTCAACTCTGCTAATCACTATCAAACGAAGAATGAAATTTATCGTGTGTTAACTATCCTTGCAGACAACAATGGACGTATACCGAATAAACTTGAATTTAGTAAAGAATTAGGTGATGACCTATCAACGGACGCTATTTTCCAATTCCGTTATTTCAGTGCGCGAACAGATGCAAAAGGTAACGTGACTAGTTTTGATTCTAGAAATATCTTTGAAGTAAGCGATAGGCAAATAAAAAATTATGCCAAGCGTATCGTATCACAAAATAGTCATTCAGGTCATATCACCTATAATTTTAGTACTTATTCTTATCTACTAAAAAAGGTTGGTAAAAATGATTATTTAGTGGTATTTTTAGATACAACCAACCAATATCTTGATAATCAAAGATTATTGCAACTTTCAATATGGATGTCCTTGGTAAGTTTTATCGTCTTCATGGTAATTGTTTCAGTTTTATCAGGGAGAGTTATCTTACCATTTGTTGCTAACTATGAAAAGCAAAGGCGTTTTATTACCAATGCAGGACATGAACTAAAAACTCCACTTGCTATCATCTCCGCTAATAATGAATTGGTGGAAATGATGAGTGGTGAATCAGAGTGGACTAAATCTACAAATGATCAAATCCAACGTTTAACGGGTCTAATTAATGGCATGGTCAGTCTTGCCCGCTTTGAAGAACAGCCTGATATAAGTATGGTTGACTTAGACTTTTCACATATTACAAAAGATGCTGCAGAAGATTTTAAAGGTCCAATCATTAAAGATGGTAAAGACTTTATAATGAGTATCCAACCAGGTATTCATGTCAAAGCTGAAGAAAAATCATTATTTGAATTGGTTACATTATTGGTTGATAATGCTAATAAGTATTGTGATCCTATGGGGACTGTGACAGTTAAGTTATCACGTTCAAGTCGTTTGAGACGAGCTAAGCTTGAAGTTTCAAATACTTATAAGAATGGTAAAGACATAGACTATAGCAAGTTTTTTGAACGATTTTATCGAGAGGATGAGTCACATAATAACAAAAAATCGGGATATGGTATTGGTCTTTCTATCGTAACTAGTTTGGTGCATCTATTTAAAGGAAGTATCGATGTGAATTATAAACATGATACCATTACCTTTGTCATTTACATT

SEQ ID NO: 15894 - protein, 409 aa, Streptococcus agalactiae; identical to SEQ ID NO: 2478

SEQ ID NO: 15895 - protein, 684 aa, Streptococcus agalactiae
ATGAGAGTATTAATTGCAGAAGATGAAGAACAGATGTCACGTGTCCTTAGTACGGCAATTAGTCATCAAGGTTATGTTGTTGATGTCGCCTACGATGGTCAGACTGCTATTGATTTAGCTAATCAAAATGCATATGATGTCATGGTTATGGATGTCATGATGCCTGTTAAAACAGGTGTTGAGGCTGTCAAAGAAATTAGACAATCAGGAAATAAATCTCACATTATTATGCTAACAGCCATGGCAGAAATTGATGATAGAGTAACAGGTCTAGATGCTGGTGCAGATGATTATTTAACAAAACCCTTCTCTCTAAAAGAATTATTAGCAAGGCTTCGCTCTATGTCCCGAAGATTGGAAGATTTCACACCTAATGTATTGTCATTGGGAAGAGTAACCTTATCAGTCGGTGAACAAGAGTTGCAATGTGAAAACACTATTCGTCTAGCGGGTAAAGAAGCTAAAATGTTAGCATTTTTCATGTTGAACCATGATAAAGAATTATCTACACAACAACTTTTCGAACATGTCTGGGGAGCAGATAAGGACCAAGAAGATGTAGATGAGGGATACATCTTTATCTATGTTTCTTATTTGAGACAAAAATTGCAGGCAATTGGTGCTAACTTGGAGATTATTGGTCAAGAAGGTAGTAGCTATAAATTAAGTGAAATAAATGGTGGC

SEQ ID NO: 15896 - protein, 228 aa, Streptococcus agalactiae
MRVLIAEDEEQMSRVLSTAISHQGYVVDVAYDGQTAIDLANQNAYDVMVMDVMMPVKTGVEAVKEIRQSGNKSHIIMLTAMAEIDDRVTGLDAGADDYLTKPFSLKELLARLRSMSRRLEDFTPNVLSLGRVTLSVGEQELQCENTIRLAGKEAKMLAFFMLNHDKELSTQQLFEHVWGADKDQEDVDEGYIFIYVSYLRQKLQAIGANLEIIGQEGSSYKLSEINGG

SEQ ID NO: 15897 - protein, 192 aa, Streptococcus agalactiae
ATGGAGATTCAGTTGCGTACAATTGCGCAAGATTCTTGGGCTAGTTTAGAACATCAGATGAAATACAAGCATGATATTGAAAATCCCGAACGAATTGTAAGAGAATTAAAACGTTGTGCTGATGAAATAGCATCTGTTGATTTAACGATGCAAACGATTCGTCAATTGATAGAGAGTGGAACAAAGAAGGAA

SEQ ID NO: 15898 - protein, 64 aa, Streptococcus agalactiae
MEIQLRTIAQDSWASLEHQMKYKHDIENPERIVRELKRCADEIASVDLTMQTIRQLIESGTKKE

SEQ ID NO: 15899 - protein, 117 aa, Streptococcus agalactiae
ATGATGGACTTTTGGAGACCAAATTATTCTGATGTGCCTTATGATAATGGCATGTTTTCGACAAGACAATATCTAGATATGCTAAAAACTACTTGGAAAAGTATATCAAAAACGTTT

SEQ ID NO: 15900 - protein, 39 aa, Streptococcus agalactiae
MMDFWRPNYSDVPYDNGMFSTRQYLDMLKTTWKSISKTF

SEQ ID NO: 15901 - protein, 237 aa, Streptococcus agalactiae
ATGGAAACAAATATTTATGGAGATTATGGTCGATATCTACCATTAATTTTAGAAGATTTCAGTCAGCGTATCCAATTAGAAAATGATAAAGCTAAGGTTGAAACAGGCTATAAATTGTACGAACATATCATTGGTCGTATTAAGACATCAGATAGTATGATAGAGAAATGTCGTCGTAAACAGTTACCTGTAACAGTAGATTCTGCACTAAAAGTTATTAGAGATAGTATCNNNNNT

SEQ ID NO: 15902 - protein, 79 aa, Streptococcus agalactiae
  VARIANT 78, 79: Xaa = Any Amino Acid
METNIYGDYGRYLPLILEDFSQRIQLENDKAKVETGYKLYEHIIGRIKTSDSMIEKCRRKQLPVTVDSALKVIRDSIXX

SEQ ID NO: 15903 - protein, 1752 aa, Streptococcus agalactiae
ATGAAAACTAAATCACAAAAAACGTCTTTTTTCTCTAATTTATCTCCGTACCTCAAAGGTTACAAACTTCTTTTTGCGTTAGCAATTGTGTTAGCAACTTTATCAAGCTTGACAACAGTTATAGGACCAGACCGTCTTAAAGAGATGACGGATCTTATGGTAAAAGGCTTGGCTGGTAATATTGACTTAGCCAAAATCGGTCATATTGCAGGGCAATTGGCAGTATTATATGTTTTAGGTGCATTAGTATCCTATCTAGCAAGTTTTATTGTGACGACTATTATTCAAAAATTTGCTCAAGGTATGCGCAATGCTATTGCTGATAAAATCAATAAAATACCTTTGAGTTATTTTGATAGCCATACTCAAGGTGATACTTTATCTCGTGTTACAAATGATGTGGATTTGATGACACAGTCTTTTAACCAAAGTTTAGTTACTATGGTTGCATCTACAGTGTTATTGGTTGGTTCATTAATTATGATGTTCAAAACAGATTGGCATTTAGCAACAACGGCGATTATATCGGTATTTTCAGGATTCGCTCTTTCTTCAATCATTATGGTGAAGAGTCAGCCTTTATTTAAAAAGCAACAGGTGAATTTGGCTAATATATCTGGATATGTAGAAGAAATTTACTCAGGACACAACATTGTTACTAGTCATAATGCAAGACAGCAGGCTAAGTCAGATTTTCAACTATTAAATGATAAACTTCACAGTTCCATGTGGAAATCACAATTTTTCTCTGGAATTATGATGCCTCTGATGCAGTTTATTGGTAATTTTGGTTATGTGATGGTGTGTGTGGTTGGTGCCATGTTAGCTATCAAAGGAACAATTACTATGGGTACAATTGTTGCTTTTATGACCTATGTTCGTATTTTTACACAGCCTATTGGTCAGATTGCTCAAGGAATTACACAATTACAGTCTGCTAGTGCAGCCATGGGACGTGTTTTTGAATTTTTAAATGAAACAAATATGCAAGAGGATAAACACAAAGTGTTAAATCTTCCTAAGTTTAAGGGGCATGTGTCCTTTGAACATGTCAAGTTTGGTTATAGTGATAACAAGACTATTATTCATGACTTTACTTCGGAGGCACAGCCTGGTCAGAAAGTTGCTATTGTAGGACCAACTGGCGCAGGTAAAACGACAATTGTTAATTTATTGATGCGTTTTTATGATGTTAATTCAGGTAGTATTTCCATAGATGACATCAATATCCAAGACATGAAACGTAGTCAAGTTCATGATGCTTTCTCGATGGTTCTTCAAGATACATGGTTGTTTGAGGGAACTATTAAAGAAAATTTGATTTTTAACCAGACGACAATCAGTGATGATGAGGTTCAAGAAGCTGCTAAGGCAGTCGGTATACATCATTTTATAATGACACTACCTAAAGGGTATGATACTGTCCTTGATGACGCTGTGACATTGTCAGTTGGACAAAAGCAATTATTAACCATTGCTCGAGCTCTTTTGAAAAATTCTCCCTTACTTATCTTAGATGAAGCAACTTCATCTGTTGATACACGTACAGAAGAGTTAATTCAAAAAGCTATGGACAAACTTATGGAAGGAAGAACATCATTTGTTATCGCACATCGTTTATCAACGATTAAAAACGCAGACTTGATTTTGGTCATGAAAGATGGGAATATCATTGAGCAAGGCAATCATGATGTTTTGATGTCTCAAAGTGGTTTTTATGCTGATCTGTATAATTCTCAATTCGAATCAGCT

SEQ ID NO: 15904 - protein, 584 aa, Streptococcus agalactiae
MKTKSQKTSFFSNLSPYLKGYKLLFALAIVLATLSSLTTVIGPDRLKEMTDLMVKGLAGNIDLAKIGHIAGQLAVLYVLGALVSYLASFIVTTIIQKFAQGMRNAIADKINKIPLSYFDSHTQGDTLSRVTNDVDLMTQSFNQSLVTMVASTVLLVGSLIMMFKTDWHLATTAIISVFSGFALSSIIMVKSQPLFKKQQVNLANISGYVEEIYSGHNIVTSHNARQQAKSDFQLLNDKLHSSMWKSQFFSGIMMPLMQFIGNFGYVMVCVVGAMLAIKGTITMGTIVAFMTYVRIFTQPIGQIAQGITQLQSASAAMGRVFEFLNETNMQEDKHKVLNLPKFKGHVSFEHVKFGYSDNKTIIHDFTSEAQPGQKVAIVGPTGAGKTTIVNLLMRFYDVNSGSISIDDINIQDMKRSQVHDAFSMVLQDTWLFEGTIKENLIFNQTTISDDEVQEAAKAVGIHHFIMTLPKGYDTVLDDAVTLSVGQKQLLTIARALLKNSPLLILDEATSSVDTRTEELIQKAMDKLMEGRTSFVIAHRLSTIKNADLILVMKDGNIIEQGNHDVLMSQSGFYADLYNSQFESA

SEQ ID NO: 15905 - protein, 1815 aa, Streptococcus agalactiae
ATGTTTAATATTTTCAAGCGACTCAATGGTAAAGAATGGTTGATGATTGTGGCGAGTACTATATTAGTGTGTCTAGCGGTTTGGATGGACCTAAAGACTCCAGAATATATGTCTGATATCACACGTATGTTGCAAACTAAAGGTACAAAGTTAGAGGCTCTTTGGGATCCTGGACTAAAAATGCTTGCTTTTTCATTTGGTAGTTTTTTAGTAGCAGTAATGGTAGGTTTTTTAGGTGCTAGGACAGCAGCTAGTTTTACTAGTCGATTACGTTCAGATATTTTTAACCATGTGATGGATTATTCTGATGCAGAAATTAAGCGATTTTCTATCCCCTCTCTATTAACGCGCACAACTAACGACTTGACTCAGCTACAGATCCTTATTGTAATGGGAATGCAGGTTGTTACCCGTGGACCAATTATGGCAATATGGGCCTTGACTAAAATTGGGGGTAAAAGCGATCAATGGACTGGGGCAGTTGGAGTAGCGGTTATTATCGTTATGATATTACTTAGCGTTCTACTCTTACTTGCTTTTCCGAGACAACGTCAAATCCAAGGTTTTACAGATGCGCTTAATGCAACTACTAGAGAGGCACTCTCTGGTGTTAGAGTTATTCGTGCCTACAATGCTGAAAAGTATCAAACAGATAAGTTCAAACGTGAAAATGACGATTTAACAAAATTGAACCTTTTTGTTTATAGATTGATGTCGCTTATGAATCCTGTGATGACAGTGGTTTCATCTGGATTGACTTTAGCTATTTATTGGATTGGCTCTTATTTGATTAATGATATTTCTGTGCCTAAAGTTACAGGAACAAGTGTATCTGTATTGGCTGCTAAATCAGCTATCACTGATCGAGTGGATCTTTTTTCAAACATGGTTGTTTTTTCATCTTATGCTATGCAAGTTGTTATGGGATTTATGATGATGGTAGCTATTTTTATCATCATGCCTCGTGCTTTAGTATCGGCTAGACGTATTAATGAGGTACTAACTTTAGCCCCAACAGTAACTTTTAAAGAAAATAGTCATATCCAAAGTGCACCAAAAGGTCAAATTGAGTTTCAAGATGTGTCATTTCATTATAGTAAAGATTCTGAAGCGGTTATTGAACATGTATCTTTCAAAGCAGATACTGGTCAGACAGTGGCATTTATTGGGTCTACAGGTTCTGGAAAATCCACTTTAGTCAATTTAGTTCCACGTTTTTATGACGCCACAGAGGGGTCAATTAAACTTGATGGCATTGATATAAAGGAATACTCTCACAATGATTTGAATAATAAAATTGGCTATATTCCACAGAAAGCTGTTCTCTTTAGTGGGACAGTACGTTCTAATATGATTTTTGGAGAGAGTGGCAGGGAGGAACTTAGTGATGAACAAATTTGGCAAGCACTCGAATTAGCGCAAGCTAAAGAATTTATAGAAGCTAAAGAAAAAGGATTAGATACAGAAGTCGCTCAAGGTGGTAGTAACTTTTCAGGAGGACAAAAACAACGCTTGGCAATCGCACGTGCTTTAGCACGTCACCCTGAAATTCTCATTTTTGATGACTCATTTTCAGCGTTAGATTATAAAACAGATCATATTTTACGCCATGTGCTGAAAGAAAAAACAGCTGCTATGACGAAATTAATTGTCGCTCAACGCATTTCAACTATCATGGATGCTGATCTCATTTTAGTGCTAGATCAAGGTAAAGTTGTTGGGCAAGGAACACATAAGGAATTGTTATCAAATAATGAAGTATATCAAGAGATAGCCTATTCTCAATTGTCTAAGGAGGAATTGGAAAATGAAAAC

SEQ ID NO: 15906 - protein, 605 aa, Streptococcus agalactiae
MFNIFKRLNGKEWLMIVASTILVCLAVWMDLKTPEYMSDITRMLQTKGTKLEALWDPGLKMLAFSFGSFLVAVMVGFLGARTAASFTSRLRSDIFNHVMDYSDAEIKRFSIPSLLTRTTNDLTQLQILIVMGMQVVTRGPIMAIWALTKIGGKSDQWTGAVGVAVIIVMILLSVLLLLAFPRQRQIQGFTDALNATTREALSGVRVIRAYNAEKYQTDKFKRENDDLTKLNLFVYRLMSLMNPVMTVVSSGLTLAIYWIGSYLINDISVPKVTGTSVSVLAAKSAITDRVDLFSNMVVFSSYAMQVVMGFMMMVAIFIIMPRALVSARRINEVLTLAPTVTFKENSHIQSAPKGQIEFQDVSFHYSKDSEAVIEHVSFKADTGQTVAFIGSTGSGKSTLVNLVPRFYDATEGSIKLDGIDIKEYSHNDLNNKIGYIPQKAVLFSGTVRSNMIFGESGREELSDEQIWQALELAQAKEFIEAKEKGLDTEVAQGGSNFSGGQKQRLAIARALARHPEILIFDDSFSALDYKTDHILRHVLKEKTAAMTKLIVAQRISTIMDADLILVLDQGKVVGQGTHKELLSNNEVYQEIAYSQLSKEELENEN

SEQ ID NO: 15907 - protein, 438 aa, Streptococcus agalactiae
ATGGAGAATCCTCTTCAAAAAGCACGAATACTTGTTAATCAACTTGAAAAGTATTTAGATCGTTATGCAAAAGAGTATGATGTTGAACATTTAGCGGGTCCACAAGGACACTTAGTGATGCATCTCTATAAACATCCTGACAAGGATATGTCTATAAAAGATGCTGAAGAAATTTTACACATTTCTAAGTCTGTAGCGTCTAATTTGGTAAAACGGATGGAAAAAAATGGATTTATTGCGATTGTTCCATCTAAGACAGATAAGCGTGTGAAATACCTTTATTTGACTCATCTAGGTAAACAAAAGGCTACACAATTTGAAATTTTCTTAGAAAAATTGCACAGTACCATGTTAGCAGGTATTACTAAAGAAGAGATACGTACTACCAAAAAGGTTATTAGAACATTAGCTAAAAATATGGCGATGGAAGATTTTGAT

SEQ ID NO: 15908 - protein, 146 aa, Streptococcus agalactiae; identical to SEQ ID NO: 8656

SEQ ID NO: 15909 - protein, 2070 aa, Streptococcus agalactiae
ATGAAAAAGAAAATTATTTTGAAAAGTAGTGTCCTTGGTTTAGTCGCTGGGACTTCTATTATGTTCTCAAGCGTATTCGCTGACCAAGTCGGCGTCCAAGTTATAGGCGTCAATGACTTTCATGGTGCACTTGACAATACTGGAACAGCAAATATGCCTGACGGAAAAGTTACTAATGCTGGCACTGCTGCTCAATTAGATGCTTATATGGATGATGCTCAAAAAGATTTCAAACAAACTAACCCTAATGGTGAAAGCATTAGAGTTCAAGCTGGTGATATGGTTGGAGCAAGTCCAGCTAACTCAGGGCTTCTTCAAGATGAACCAACCGTTAAAACATTTAATGCAATGAATGTTGAGTATGGCACATTAGGTAACCATGAATTTGATGAAGGTTTGGCAGAATACAATCGTATCGTTACTGGAAAGGCCCCTGCTCCAGATTCTAATATAAATAATATTACGAAATCATACCCACACGAAGCTGCAAAACAAGAAATTGTAGTGGCAAACGTTATTGATAAAGTTAACAAACAAATCCCTTACAATTGGAAACCTTACACTATTAAAAATATTCCTGTAAATAACAAAAGTGTGAACGTTGGCTTTATCGGAATCGTTACCAAAGACATCCCAAACCTTGTCTTACGTAAAAATTATGAACAATATGAATTTTTAGATGAAGCTGAAACAATCGTTAAATACGCCAAAGAATTACAAGCTAAAAATGTCAAGGCTATTGTAGTCCTTGCTCATGTACCTGCAACAAGCAAGGATGATATTGCTGAAGGTGAAGCAGCAGAAATGATGAAAAAAGTCAATCAACTCTTCCCTGAAAATAGCGTAGATATTGTCTTTGCTGGACACAATCATCAATATACAAATGGTCTTGTTGGTAAAACTCGTATTGTACAAGCGCTCTCTCAAGGAAAAGCCTATGCTGATGTACGTGGTGTCCTAGATACTGATACACAAGATTTCATTGAAACCCCTTCAGCTAAAGTAATTGCAGTTGCTCCTGGTAAAAAAACAGGTAGTGCCGATATTCAAGCCATTGTTGACCAAGCTAATACTATCGTTAAACAAGTAACAGAAGCTAAAATTGGTACTGCCGAGGTAAGTGGCATGATTACGCGTTCTGTTGATCAAGATAATGTTAGTCCGGTAGGCAGCCTCATCACAGAGGCTCAACTAGCAATTGCTCGAAAAAGCTGGCCAGATATCGATTTTGCCATGACAAATAATGGTGGCATTCGTGCTGACTTACTCATCAAACCAGATGGAACAATCACCTGGGGAGCTGCACAAGCAGTTCAACCTTTTGGTAATATCTTACAAGTCGTCGAAATTACTGGTAGAGATCTTTATAAAGCACTCAACGAACAATACGACCAAAAACAAAATTTCTTCCTTCAAATAGCTGGTCTGCGATACACTTACACAGATAATAAAGAGGGCGGGGAAGAAACACCATTTAAAGTTGTAAAAGCTTATAAATCAAATGGTGAGGAAATCAATCCTGATGCAAAATACAAATTAGTTATCAATGACTTTTTATTCGGTGGTGGTGATGGCTTTGCAAGCTTCAGAAATGCCAAACTTCTAGGAGCCATTAATCCCGATACAGAGGTATTTATGGCCTATATCACTGATTTAGAAAAAGCTGGTAAAAAAGTGAGCATTCCAAATAATAAACCTAAAATCTATGTCACTATGAAGATGGTTAATGAAACTATTACACAAAATGATGGTACATATAGCATTATTAAGAAACTTTATTTAGATCGACAAGGAAATATTGTAGCACAAGAGATTGTATCAGACACTTTAAACCAAACAAAATCAAAATCTACAAAAATCAACCCTGTAACTACAATTCACAAAAAACAATTACACCAATTTACAGCTATTAACCCTATGAGAAATTATGGCAAACCATCAAACTCCACTACTGTAAAATCAAAACAATTACCAAAAACAAACTCTGAATATGGACAATCATTCCTTATGTCTGTCTTTGGTGTTGGACTTATAGGAATTGCTTTAAATACAAAGAAAAAACATATGAAA

SEQ ID NO: 15910 - protein, 690 aa, Streptococcus agalactiae
MKKKIILKSSVLGLVAGTSIMFSSVFADQVGVQVIGVNDFHGALDNTGTANMPDGKVTNAGTAAQLDAYMDDAQKDFKQTNPNGESIRVQAGDMVGASPANSGLLQDEPTVKTFNAMNVEYGTLGNHEFDEGLAEYNRIVTGKAPAPDSNINNITKSYPHEAAKQEIVVANVIDKVNKQIPYNWKPYTIKNIPVNNKSVNVGFIGIVTKDIPNLVLRKNYEQYEFLDEAETIVKYAKELQAKNVKAIVVLAHVPATSKDDIAEGEAAEMMKKVNQLFPENSVDIVFAGHNHQYTNGLVGKTRIVQALSQGKAYADVRGVLDTDTQDFIETPSAKVIAVAPGKKTGSADIQAIVDQANTIVKQVTEAKIGTAEVSGMITRSVDQDNVSPVGSLITEAQLAIARKSWPDIDFAMTNNGGIRADLLIKPDGTITWGAAQAVQPFGNILQVVEITGRDLYKALNEQYDQKQNFFLQIAGLRYTYTDNKEGGEETPFKVVKAYKSNGEEINPDAKYKLVINDFLFGGGDGFASFRNAKLLGAINPDTEVFMAYITDLEKAGKKVSIPNNKPKIYVTMKMVNETITQNDGTYSIIKKLYLDRQGNIVAQEIVSDTLNQTKSKSTKINPVTTIHKKQLHQFTAINPMRNYGKPSNSTTVKSKQLPKTNSEYGQSFLMSVFGVGLIGIALNTKKKHMK

SEQ ID NO: 15911 - DNA, 96 bp, Streptococcus agalactiae
  misc_feature 13: n = A,T,C or G
gtgatatcaattnggaaagaacagcaaatcaagttgacagattttccagctcaaatttgtcaacacgagttagatcatttggaaggcatattgata

SEQ ID NO: 15912 - protein, 32 aa, Streptococcus agalactiae
  VARIANT 5: Xaa = Any Amino Acid
MISIXKEQQIKLTDFPAQICQHELDHLEGILI

SEQ ID NO: 15913 - DNA, 420 bp, Streptococcus agalactiae
  misc_feature 257: n = A,T,C or G
gtgagcttagcaaaagatttacaggatactttgcatgctaatcaaaattattgtgtaggtatggcagccaatatgattggtagtctgaagcgtgtcattatcatcaatgtgggtattacaaatttagtaatgtttaaccctgtattagttgcaaaatcggatccatatgagacagaagaatcttgcctttctctcgtaggttgcagaagtacacaacgatatcatcacattacgatttcttatcgtgatatcaattnggaaagaacagcaaatcaagttgacagattttccagctcaaatttgtcaacacgagttagatcatttggaaggcatattgatataaaaataggtttggatattttatccaaacctatttttattatttcatatgttttttctttgtatttaaagcaattccta

SEQ ID NO: 15914 - protein, 140 aa, Streptococcus agalactiae
  VARIANT 86: Xaa = Any Amino Acid
MSLAKDLQDTLHANQNYCVGMAANMIGSLKRVIIINVGITNLVMFNPVLVAKSDPYETEESCLSLVGCRSTQRYHHITISYRDINXERTANQVDRFSSSNLSTRVRSFGRHIDIKIGLDILSKPIFIISYVFSLYLKQFL

SEQ ID NO: 15915 - DNA, 1167 bp, Streptococcus agalactiae
gtgatttcttttagagttccatgggtagatgataaaggccmagttcaagttaaccgaggatatcgtgtacaattttcatcagctattggtccttataaaggtggtttacgttttcaccctacagtaacacaatctattgtcaaawttttaggatttgaacaaatttttaagaattcactgrcaggtctaccaattggtggtggcaaaggagggtcgaactttgatccaaaagggaaatcagataatgaagtgatgcgtttcacacaaagttttatgaccgaacttcaaaaatacattggaccagatttagatgtgccagctggcgatattggagtaggtggacgtgaaattggttatctttatggtcaatataagcgtttaaatggttatcaaaatggggttttaaccggaaaaggactgacttatggtggctctttggctcgtacagaagcaactggttatggggcagtctattttgctaaagaaatgctggcagcgcgtggtcaagatttaactggcaaagttgcactggtttcgggatctggtaacgtggctatttatgctactgaaaaattacaagagttgggtgcaactgttgtagctgtgtcagattcttcaggttatgtttatgatccagacggtattgaccttgaaacattgaaacagataaaagaggttgaaagagcacgtattgttaaatatacggagaaacatccaaaagctaatttcacaccagcagatcaaggtagtatctggtctattaaagcagatttagctttcccgtgtgctactcaaaacgaattagacgaagaagacgctaagttattagttgaaaatggtgtcttggcagtaacagaaggagcaaatatgccatctaccttgggtgctattaaagttttccaaaaggcaggggttgcttttggtcctgctaaagctgccaatgcaggaggagtagctgtttcagcgcttgaaatggcacaaaattctagtcgtagggcatggacttttgaagaagttgatcaagaattgcaacgtattatgaaaactatttttgtgaatgcttccaaagcggctgatgaatttggcgatagtggtaacctggttctaggtgctaacattgcaggctttttaaaagttgctcaagctatgtctgcacaaggtattgtt

SEQ ID NO: 15916 - protein, 389 aa, Streptococcus agalactiae
  VARIANT 14, 49, 61: Xaa = Any Amino Acid
MISFRVPWVDDKGXVQVNRGYRVQFSSAIGPYKGGLRFHPTVTQSIVKXLGFEQIFKNSLXGLPIGGGKGGSNFDPKGKSDNEVMRFTQSFMTELQKYIGPDLDVPAGDIGVGGREIGYLYGQYKRLNGYQNGVLTGKGLTYGGSLARTEATGYGAVYFAKEMLAARGQDLTGKVALVSGSGNVAIYATEKLQELGATVVAVSDSSGYVYDPDGIDLETLKQIKEVERARIVKYTEKHPKANFTPADQGSIWSIKADLAFPCATQNELDEEDAKLLVENGVLAVTEGANMPSTLGAIKVFQKAGVAFGPAKAANAGGVAVSALEMAQNSSRRAWTFEEVDQELQRIMKTIFVNASKAADEFGDSGNLVLGANIAGFLKVAQAMSAQGIV

SEQ ID NO: 15917 - DNA, 564 bp, Streptococcus agalactiae
ttgacttttactgactttcgttctataatgagacaaatatttgattggagtatctatatgaaatggttcccacttgttggaggtataattgccttattagctggcttctatctctttataaatcctgtaacggttgttgcaactctgggttggttcattgctttatttatctttatttatggcatttcaaatttagtacgctacttgcaagctgattcttatcaccgtagcccttggtatctggttcagagtatccttgctattatttttggtatcattttactatccagctcagcaatgtcactttcaaatactgtcatgactattttagcatactggctactggtatctggtattttacgacttttgggtggtttccaaatgcaaaaaattaatttcccaggtgccaaatcctataaacgttcggcttatattgcactcattttaggtattattttactggttcaacctaccttatcagcagccatcattggaagatttgtagcctttatattaatagcaattggagcttcggctatttacacttttactcgtattaattat

SEQ ID NO: 15918 - protein, 188 aa, Streptococcus agalactiae; identical to SEQ ID NO: 2492

SEQ ID NO: 15919 - DNA, 1767 bp, Streptococcus agalactiae
atgagaaaaaaatctatttttttgagattatggtcttacctaactcgctacaaagctactcttttcttagcgatttttttgaaagttttatctagttttatgagtattctggagccttttattttagggttagcgataacagagttgactgctaaccttgttgatatggctaagggagtttctggggcagaattgaacgttccttatattgctggtattctgattatttattttttcagaggtgttttctatgaattaggttcttatggctcaaattattttatgactactgtcgttcaaaaaagtatccgtgatatccgtcatgatttgaatcgtaaaatcaataaagttcctgtatcgtattttgataagcaccaatttggagatatgttgggacgttttacaagtgatgttgaaacggtctcaaatgctttacaacagagctttttacagattatcaatgcttttttaagtattattctagtagtcgttatggtactttatctaaatgtaccattagccatgattatcattgcttgtattcctgtaacttattttagtgcacaagcgatactaaaaagatcccaaccttactttaaagaacaggcaaagattctgggagaactgaatggttttgtacaagagaaattaactggtttcaatatcataaaattatatggtagagaagaggcgtctagtcaagaatttcgtgatataacggataatctacgtcatgtaggtttcaaagctagcttcatttcaggaattatgatgccagtattgaatagtatctctgattttatttatcttatcattgcatttgttggcggtttacaagttattgctggtaccttaacaattggtaacatgcaggcatttgtgcagtatgtttggcaaattagtcaacccgttcaaaccattacacaattagcaggtgttttgcaaagtgcaaaatcttccttagaacgtatttttgaagtcttagatgaagaagaggaagccaatcaagtcactgaaaaattgagccatgacttaaccggtcaagtcagctttcatggtgtcgattttcactattctccggataagccacttatccgcgactttaacttagatgtagaaccagggcaaatgattgcaattgtagggccaacaggtgcaggtaagacaacacttataaacttactcatgagattctacgatgttagtgaaggtgctatcaccgtagatggtcacgatattagacacctatcacgccaagatttccggcaacaatttggcatggtgttgcaagatgcttggttatatgaaggtacaataaaagaaaatcttagattcggtaatcttgaagccagtgatgaggatatagttgctgctgccaaagctgcgaatgttgaccactttattcgaacgttacctggtggctacaatatggtgatgaatcaagaatcaagcaatatctccttaggacaaaagcaactgttgactattgcacgtgctttattagcagatcctaaaattttaattttagatgaagcgacttcatctgttgatacaaggttggaattgcttattcaaaaagctatgaaaaaattgatggaaggaagaactagttttgtcattgcacaccgtctatcaacgattcaagaggcagacaacattttagttctaaaggatggtcaaatcatcgaacaaggtaatcaccagaaactcctagcagataaaggattttattacgaattatataatagccaattttcaaatagtaaa

SEQ ID NO: 15920 - protein, 589 aa, Streptococcus agalactiae
MRKKSIFLRLWSYLTRYKATLFLAIFLKVLSSFMSILEPFILGLAITELTANLVDMAKGVSGAELNVPYIAGILIIYFFRGVFYELGSYGSNYFMTTVVQKSIRDIRHDLNRKINKVPVSYFDKHQFGDMLGRFTSDVETVSNALQQSFLQIINAFLSIILVVVMVLYLNVPLAMIIIACIPVTYFSAQAILKRSQPYFKEQAKILGELNGFVQEKLTGFNIIKLYGREEASSQEFRDITDNLRHVGFKASFISGIMMPVLNSISDFIYLIIAFVGGLQVIAGTLTIGNMQAFVQYVWQISQPVQTITQLAGVLQSAKSSLERIFEVLDEEEEANQVTEKLSHDLTGQVSFHGVDFHYSPDKPLIRDFNLDVEPGQMIAIVGPTGAGKTTLINLLMRFYDVSEGAITVDGHDIRHLSRQDFRQQFGMVLQDAWLYEGTIKENLRFGNLEASDEDIVAAAKAANVDHFIRTLPGGYNMVMNQESSNISLGQKQLLTIARALLADPKILILDEATSSVDTRLELLIQKAMKKLMEGRTSFVIAHRLSTIQEADNILVLKDGQIIEQGNHQKLLADKGFYYELYNSQFSNSK

SEQ ID NO: 15921 - protein, 1737 aa, Streptococcus agalactiae
ATGGCATATATTTGGTCTTATTTGAAAAGGTACCCAAATTGGTTATGGCTTGATTTACTAGGAGCTATGCTTTTTGTGACGGTTATCCTAGGAATGCCCACAGCCTTAGCGGGTATGATTGATAATGGCGTTACAAAAGGTGATCGGACTGGAGTTTATCTGTGGACGTTCATCATGTTTATATTTGTTGTACTAGGTATTATTGGGCGTATTACGATGACTTACGCATCTAGTCGCTTAACGACAACAATGATTAGAGATATGCGTAATGATATGTATGCTAAGCTTCAAGAATACTCCCATCATGAATATGAACAGATAGGTGTATCTTCACTAGTGACACGTATGACAAGCGATACTTTTGTTTTGATGCAATTTGCTGAAATGTCTTTACGTTTAGGCCTAGTAACTCCTATGGTAATGATTTTTAGCGTGGTTATGATACTAATTACGAGTCCATCTTTGGCTTGGCTTGTAGCGGTTGCGATGCCTCTTTTGGTAGGAGTCATTTTATATGTAGCTATAAAAACAAAACCTTTATCTGAAAGACAACAGACTATGCTTGATAAAATCAATCAATATGTTCGTGAAAATTTAACAGGGTTACGCGTTGTTAGGGCCTTTGCAAGAGAGAATTTTCAATCACAAAAATTTCAAGTCGCTAACCAACGTTACACAGATACTTCAACTGGTCTTTTTAAATTAACAGGGCTAACAGAACCACTTTTCGTTCAAATTATTATTGCAATGATTGTGGCTATCGTTTGGTTTGCTTTGGATCCCTTACAAAGAGGTGCTATTAAAATAGGGGATTTAGTTGCTTTTATCGAATATAGCTTCCATGCTCTCTTTTCATTTTTGCTATTTGCCAATCTTTTTACTATGTATCCTCGTATGGTGGTATCTAGCCATCGTATTAGAGAGGTAATGGATATGCCGATTTCTATTAATCCTAATACCGAAGGTGTTACGGATACGAAACTTAAAGGGCATTTAGAATTTGATAATGTAACATTCGCTTATCCAGGAGAAACAGAGAGTCCCGTTTTGCATGATATTTCTTTTAAAGCTAAGCCTGGAGAAACAATTGCTTTTATTGGTTCAACAGGTTCAGGAAAATCTTCTCTTGTTAATTTGATTCCACGTTTTTATGATGTGACACTTGGAAAAATCTTAGTAGATGGAGTTGATGTAAGAGATTATAACCTTAAATCACTTCGCCAAAAGATTGGATTTATCCCCCAAAAAGCTCTTTTATTTACAGGGACAATAGGAGAGAATTTAAAATATGGAAAAGCTGATGCTACTATTGATGATCTTAGACAAGCGGTTGATATTTCTCAAGCTAAAGAGTTTATTGAGAGTCACCAAGAAGCCTTTGAAACGCATTTAGCTGAAGGTGGGAGCAATCTTTCTGGGGGTCAAAAACAACGGTTATCCATTGCTAGGGCTGTTGTTAAAGATCCAGATTTATATATTTTTGATGATTCATTTTCTGCTCTCGATTATAAGACAGACGCTACTTTAAGAGCGCGTCTAAAAGAAGTAACCGGTGATTCTACGGTTTTGATAGTTGCTCAAAGGGTGGGTACGATTATGGATGCTGATCAGATTATTGTCCTTGATGAAGGCGAAATTGTCGGTCGTGGTACCCACGCTCAATTAATAGAAAATAATGCTATTTATCGTGAAATCGCTGAGTCACAACTGAAGAACCAAAACTTATCAGAAGGAGAG

SEQ ID NO: 15922 - protein, 579 aa, Streptococcus agalactiae
MAYIWSYLKRYPNWLWLDLLGAMLFVTVILGMPTALAGMIDNGVTKGDRTGVYLWTFIMFIFVVLGIIGRITMTYASSRLTTTMIRDMRNDMYAKLQEYSHHEYEQIGVSSLVTRMTSDTFVLMQFAEMSLRLGLVTPMVMIFSVVMILITSPSLAWLVAVAMPLLVGVILYVAIKTKPLSERQQTMLDKINQYVRENLTGLRVVRAFARENFQSQKFQVANQRYTDTSTGLFKLTGLTEPLFVQIIIAMIVAIVWFALDPLQRGAIKIGDLVAFIEYSFHALFSFLLFANLFTMYPRMVVSSHRIREVMDMPISINPNTEGVTDTKLKGHLEFDNVTFAYPGETESPVLHDISFKAKPGETIAFIGSTGSGKSSLVNLIPRFYDVTLGKILVDGVDVRDYNLKSLRQKIGFIPQKALLFTGTIGENLKYGKADATIDDLRQAVDISQAKEFIESHQEAFETHLAEGGSNLSGGQKQRLSIARAVVKDPDLYIFDDSFSALDYKTDATLRARLKEVTGDSTVLIVAQRVGTIMDADQIIVLDEGEIVGRGTHAQLIENNAIYREIAESQLKNQNLSEGE

SEQ ID NO: 15923 - protein, 237 aa, Streptococcus agalactiae
ATGCAGAAGGTGTACATTGCAGAACGTTTCCGTGGTAAGGGGCTTGCTACTGATTTAGTGAAAATGATTGAAGTAGAAGCTCGAAAAATTGGGTATAGACAACTTTATTTAGAGACAGCCAGTATTTTGAGTAGGGCAACTGCGGTTTATAAGCATATGGGATATTGTGCCTTATCGCAACCAATAGCAAATGATCAAGGTCATACAGCTATGGATATTTGGATGATTAAAGATTTA

SEQ ID NO: 15924 - protein, 79 aa, Streptococcus agalactiae
MQKVYIAERFRGKGLATDLVKMIEVEARKIGYRQLYLETASILSRATAVYKHMGYCALSQPIANDQGHTAMDIWMIKDL

SEQ ID NO: 15925 - protein, 195 aa, Streptococcus agalactiae
ATGATTATCCGTCCGATTATTAAAAATGATGACCAAGCAGTTACACAATTAATTCGACAGAGTTTACGCGCCTATGATTTAGATAAACCTGGTACAGCATATTCAGACCCTCACTTAGATCACTTGACCTCATACTACGAAAAAATAGAGAAGTCAGGATTCTTTGTCATTGAGGAGAGAGATGAGATTATTGGC

SEQ ID NO: 15926 - protein, 65 aa, Streptococcus agalactiae
MIIRPIIKNDDQAVTQLIRQSLRAYDLDKPGTAYSDPHLDHLTSYYEKIEKSGFFVIEERDEIIG

SEQ ID NO: 15927 - protein, 1865 aa, Streptococcus agalactiae
ATGAGCGATTTTTTAGTAGATGGATTGACTAAGTCGGTTGGTGATAAGACGGTCTTTAGTAATGTTTCATTTATCATCCATAGTTTAGACCGTATTGGGATTATTGGTGTCAATGGAACTGGAAAGACAACACTATTAGATGTTATTTCGGGTGAATTAGGTTTTGATGGTGATCGTTCCCCTTTTTCATCAGCTAATGATTATAAGATTGCTTATTTAAAACAAGAACCAGACTTTGATGATTCTCAGACAATTTTGGACACCGTACTTTCTTCTGACTTAAGAGAGATGGCTTTAATTAAAGAATATGAATTATTGCTTAATCACTACGAAGAAAGTAAGCAATCACGTCTAGAGAAAGTAATGGCAGAAATGGATTCTTTAGATGCTTGGTCTATTGAGAGCGAAGTCAAAACAGTATTATCCAAATTAGGTATTACTGATTTGCAGTTGTCGGTTGGTGAATTATCAGGAGGATTACGAAGACGTGTTCAATTAGCGCAAGTATTATTAAATGATGCAGATTTATTGCTCTTAGACGACCTACTAACCACTTAGATATTGACACTATTGCATGGTTAACGAATTTTTTGAAAAATAGTAAAAAGACAGTGCTTTTTATAACTCATGATCGTTATTTTCTAGACAATGTTGCAACACGTATTTTTGAATTAGATAAGGCACAGATTACAGAATATCAAGGCAATTATCAGGATTATGTCCGACTTCGTGCAGAACAAGACGAGCGTGATGCTGCTAGTTTACATAAAAAGAAACAGCTTTATAAACAGGAACTAGCTTGGATGCGTACTCAGCCACAAGCTCGTGCAACGAAACAACAGGCTCGTATTAATCGTTTTCAAAATCTAAAAAACGATTTACACCAAACAAGCGATACAAGCGATTTGGAAATGACATTTGAAACAAGTCGAATTGGGAAAAAGGTTATTAATTTTGAAAATGTCTCTTTTTCTTACCCAGATAAATCTATCTTGAAAGACTTTAATTTGTTAATTCAAAATAAAGACCGTATTGGCATCGTTGGAGATAATGGTGTTGGAAAGTCAACCTTACTTAATTTAATTGTTCAAGATTTACAGCCGGATTCGGGTAATGTCTCTATTGGTGAAACGATACGTGTAGGTTACTTTTCACAACAACTTCATAATATGGATGGCTCAAAACGTGTTATTAATTATTTGCAAGAGGTTGCAGATGAGGTTAAAACTAGTGTCGGTACAACAAGTGTGACAGAACTATTGGAACAATTTCTCTTTCCACGTTCGACACATGGAACACAAATTGCAAAATTATCAGGTGGTGAGAAAAAACGACTTTACCTTTTAAAAATCCTGATTGAAAAGCCTAACGTGTTACTACTTGATGAGCCGACAAATGACTTAGATATTGCTACATTAACTGTTCTTGAAAATTTTTTACAAGGCTTTGGTGGTCCTGTGATTACAGTTAGTCACGATCGTTACTTTTTAGATAAAGTGGCTAATAAAATTATTGCATTTGAAGATAACGATATCCGTGAATTTTTTGGTAATTATACTGATTATTTAGATGAAAAAGCATTTAATGAGCAAAATAATGAAGTTATCAGTAAAAAAGAGAGTACCAAGACAAGTCGTGAAAAGCAAAGTCGTAAAAGAATGTCTTACTTTGAAAAACAAGAATGGGCGACAATTGAAGACGATATGATGATATTGGAAAATACTATCACTCGTATAGAAGATGATATGCAAACATGTGGTAGTGATTTTACAAGGTTATCTGATTTACAAAAGGAATTAGATGCAAAAAATGAAGCACTTCTAGAAAAGTATGACCGTTATGAGTACCTTAGTGGGTTAGACACA

SEQ ID NO: 15928 - protein, 622 aa, Streptococcus agalactiae
  VARIANT 181: Xaa = Any Amino Acid
MSDFLVDGLTKSVGDKTVFSNVSFIIHSLDRIGIIGVNGTGKTTLLDVISGELGFDGDRSPFSSANDYKIAYLKQEPDFDDSQTILDTVLSSDLREMALIKEYELLLNHYEESKQSRLEKVMAEMDSLDAWSIESEVKTVLSKLGITDLQLSVGELSGGLRRRVQLAQVLLNDADLLLLDXPTNHLDIDTIAWLTNFLKNSKKTVLFITHDRYFLDNVATRIFELDKAQITEYQGNYQDYVRLRAEQDERDAASLHKKKQLYKQELAWMRTQPQARATKQQARINRFQNLKNDLHQTSDTSDLEMTFETSRIGKKVINFENVSFSYPDKSILKDFNLLIQNKDRIGIVGDNGVGKSTLLNLIVQDLQPDSGNVSIGETIRVGYFSQQLHNMDGSKRVINYLQEVADEVKTSVGTTSVTELLEQFLFPRSTHGTQIAKLSGGEKKRLYLLKILIEKPNVLLLDEPTNDLDIATLTVLENFLQGFGGPVITVSHDRYFLDKVANKIIAFEDNDIREFFGNYTDYLDEKAFNEQNNEVISKKESTKTSREKQSRKRMSYFEKQEWATIEDDMMILENTITRIEDDMQTCGSDFTRLSDLQKELDAKNEALLEKYDRYEYLSGLDT

SEQ ID NO: 15929 - protein, 1206 aa, Streptococcus agalactiae
ATGAGATTAAATTATTTGCCTTCTGAGTTTCAGAAGGCTTTACCAATATTAAAAAAGATAAAAAAAGCCGGTTATGAAGCATACTTTGTAGGTGGTAGTGTTCGGGATGTTTTACTTGACCGTCCAATTCATGATGTTGATATAGCAACGTCATCTTATCCAGAAGAAACAAAGCAGATTTTTAAAAGGACAGTTGATGTTGGTATTGAACATGGAACAGTCTTAGTATTGGAAAAAGGTGGTGAATATGAGATTACCACTTTTAGGACTGAGGAGGTTTATGTTGATTATAGGCGTCCGAGTCAGGTCAATTTTGTTAGGTCGCTAGAAGAAGATCTAAAACGTCGAGATTTCACAGTTAATGCCTTTGCTTTAAATGAAGATGGAGAAGTTATTGATCTCTTTCATGGATTGGATGATTTAGATAATCACCTTCTTAGAGCAGTAGGACTCGCCAGTGAGCGTTTTAATGAAGATGCTCTTCGAATTATGCGAGGTTTGCGTTTTTCTGCTAGTCTAAATTTTGATATCGAAACAACAACTTTTGAGGCAATGAAAAAGCACGCGCCATTATTGGAGAAAATATCTGTTGAGCGTTCTTTTATTGAATTTGATAAACTTCTATTAGCACCTTATTGGCGTAAAGGAATGCTGGCACTAATAGATAGTCATGCTTTTAATTATCTACCATGCTTAAAAAATAGGGAATTACAATTAAGCGCCTTTTTGTCCCAGTTAGATAAAGATTTTTTATTTGAGACATCAGAACAAGCTTGGGCATCACTCATCTTGAGTATGGAAGTTGAACACACAAAGACTTTTTTAAAAAAATGGAAGACATCAACTCACTTTCAAAAAGATGTTGAGCATATAGTGGATGTTTATCGTATTCGTGAACAAATGGGATTGACTAAAGAACATCTTTATCGTTATGGAAAAACTATAATAAAACAAGCGGAAGGTATTCGCAAAGCAAGAGGCTTGATGGTTGATTTCGAAAAAATAGAACAACTAGATAGTGAGTTAGCTATCCATGATAGGCATGAGATAGTTGTCAATGGTGGCACCTTAATCAAGAAATTAGGAATAAAACCTGGTCCACAGATGGGAGATATTATCTCTCAAATTGAATTAGCCATTGTTTTAGGACAACTGATTAATGAAGAAGAGGCTATTTTACATTTTGTTAAGCAGTACTTGATGGAT

SEQ ID NO: 15930 - protein, 402 aa, Streptococcus agalactiae
MRLNYLPSEFQKALPILKKIKKAGYEAYFVGGSVRDVLLDRPIHDVDIATSSYPEETKQIFKRTVDVGIEHGTVLVLEKGGEYEITTFRTEEVYVDYRRPSQVNFVRSLEEDLKRRDFTVNAFALNEDGEVIDLFHGLDDLDNHLLRAVGLASERFNEDALRIMRGLRFSASLNFDIETTTFEAMKKHAPLLEKISVERSFIEFDKLLLAPYWRKGMLALIDSHAFNYLPCLKNRELQLSAFLSQLDKDFLFETSEQAWASLILSMEVEHTKTFLKKWKTSTHFQKDVEHIVDVYRIREQMGLTKEHLYRYGKTIIKQAEGIRKARGLMVDFEKIEQLDSELAIHDRHEIVVNGGTLIKKLGIKPGPQMGDIISQIELAIVLGQLINEEEAILHFVKQYLMD

SEQ ID NO: 15931 - DNA, 852 bp, Streptococcus agalactiae
atgaaattagcacttattacggatacctcagcttacttgcctgaggctatcgaaaatcatgaagatgtctatgttttagatattccaattatcattgatggtaaaacttatattgagggacaaaatctgacattagaccaatattatgataagctagcggcatcaaaagaattacstaaaacaagtcagcctagcttagctgaactagatgatctcttatgtcaattggagaaagaagggtatacacacgtccttggtttattcattgcagcggggatatcaggtttctggcagaatattcagtttcttattgaagaacatccaaatttgacaattgcttttccggatactaaaataacttcagcaccacagggcaatttagttagaaatgctttgatgtgttcacgtgaagggatggattttgatgtcatagttaacaagatacaatcacaaattgaaaaaattgaaggatttattgttgttaatgatttgaatcatctagtaaaaggtggtagattgtcaaacggttcagctatcattggtaaccttttaagtatcaagccggtcttacattttaatgaagaaggtawaatcgttgtctatgagaaagtgcgtacagagaaaaaagccttaaaacgcttggctgagattgtcaaagaaatgacagcagatggtgaatatgatattgmyatkattcactctagagcacaagataaggcagaacaattatataatttgttagctaaagctggtcttaaagacgatttagaaattgtatcatttggtggcgttatgcaactcatcttggtgaaggtgcggtkscctttggtattaccccaaaaaattgatgtg

SEQ ID NO: 15932 - protein, 284 aa, Streptococcus agalactiae
  VARIANT 59, 197, 230, 231, 274: Xaa = Any Amino Acid
MKLALITDTSAYLPEAIENHEDVYVLDIPIIIDGKTYIEGQNLTLDQYYDKLAASKELXKTSQPSLAELDDLLCQLEKEGYTHVLGLFIAAGISGFWQNIQFLIEEHPNLTIAFPDTKITSAPQGNLVRNALMCSREGMDFDVIVNKIQSQIEKIEGFIVVNDLNHLVKGGRLSNGSAIIGNLLSIKPVLHFNEEGXIVVYEKVRTEKKALKRLAEIVKEMTADGEYDIXXIHSRAQDKAEQLYNLLAKAGLKDDLEIVSFGGVMQLILVKVRXPLVLPQKIDV

SEQ ID NO: 15933 - DNA, 219 bp, Streptococcus agalactiae
gtgttacaatttgttattgtacgtgatgagkttgttatttctggtgtcatttcacaaatagctcatatccaagggcgccttatcaatgagcctagtgagtttagtcaagatgaagttgagaatctagcagctcctcttttagaaatcgttaaacgtctgacttatgaagttacagaaattgctttagatagaccaggagtaacattggagtttaatagt

SEQ ID NO: 15934 - protein, 73 aa, Streptococcus agalactiae
  VARIANT 11: Xaa = Any Amino Acid
MLQFVIVRDEXVISGVISQIAHIQGRLINEPSEFSQDEVENLAAPLLEIVKRLTYEVTEIALDRPGVTLEFNS

SEQ ID NO: 15935 - DNA, 456 bp, Streptococcus agalactiae
atgaaattagcacttattacggatacctcagcttacttgcctgaggctatcgaaaatcatgaagatgtctatgttttagatattccaattatcattgatggtaaaacttatattgagggacaaaatctgacattagaccaatattatgataagctagcggcatcaaaagaattacctaaaacaagtcagcctagcttagctgaactagatgatctcttatgtcaattggagaaagaagggtatacacacgtccttggtttattcattgcagcggggatatcaggtttctggcagaatattcagtttcttattgaagaacatccaaatttgacaattgcttttccggatactaaaataacttcagcaccacagggcaatttagttagaaatgctttgatgtgttcacgtgaagggatggattttgatgtcatagttaacaagataccatcacaaatt

SEQ ID NO: 15936 - protein, 152 aa, Streptococcus agalactiae
MKLALITDTSAYLPEAIENHEDVYVLDIPIIIDGKTYIEGQNLTLDQYYDKLAASKELPKTSQPSLAELDDLLCQLEKEGYTHVLGLFIAAGISGFWQNIQFLIEEHPNLTIAFPDTKITSAPQGNLVRNALMCSREGMDFDVIVNKIPSQI

SEQ ID NO: 15937 - DNA, 378 bp, Streptococcus agalactiae
atggaagtcattcgtgaacaagaatttgtcaatcaataccactatgatgcgcgcaatttagaatgggaagaggaaaatggtaccccaaaaacaaattttgaagttactttccaattagctaatagagatgaagcagcaaaagtaacgagcattgtagcagtgttacaatttgttattgtacgtgatgagtttgttatttctggtgtcatttcacaaatagctcatatccaagggcgccttatcaatgagcctagtgagtttagtcaagatgaagttgagaatctagcagctcctcttttagaaatcgttaaacgtctgacttatgaagttacagaaattgctttagatagaccaggagtaacattggagtttaatagt

SEQ ID NO: 15938 - protein, 126 aa, Streptococcus agalactiae
MEVIREQEFVNQYHYDARNLEWEEENGTPKTNFEVTFQLANRDEAAKVTSIVAVLQFVIVRDEFVISGVISQIAHIQGRLINEPSEFSQDEVENLAAPLLEIVKRLTYEVTEIALDRPGVTLEFNS

SEQ ID NO: 15939 - DNA, 531 bp, Streptococcus agalactiae
atgactatgaaaactattgaagaaatttacaaaaattatcttaatatcccctatatctcacctgaaagagacttggctgaaattaattttagtaaagttgttcctaggaaaaatatggaagaaactagtgaaggactcttgcctggagatattatcttattatggcgtatacagtttggaactttcacaactgaaacaagtttttcaaaatattttgaatacatttatggtataaatggaaaagaacacctagaatttttaataaaaaatggatttgtaagaatggagtcaccgcttgattctttagatcacttatctgctccacttttaaaactattcttaaaagaaaaaaacgtaaaaggcttgtcaaagatgaaacgctctgatttagatcaggcaatagctattgcttttacagaagaggaattagggaagttgtttgttgtcagagggttggcacttacagaaaaaggtttagcagccttgagtaacaatcaagaagtgattgatagacatcctaagaagaagttc

SEQ ID NO: 15940 - protein, 177 aa, Streptococcus agalactiae
MTMKTIEEIYKNYLNIPYISPERDLAEINFSKVVPRKNMEETSEGLLPGDIILLWRIQFGTFTTETSFSKYFEYIYGINGKEHLEFLIKNGFVRMESPLDSLDHLSAPLLKLFLKEKNVKGLSKMKRSDLDQAIAIAFTEEELGKLFVVRGLALTEKGLAALSNNQEVIDRHPKKKF

SEQ ID NO: 15941 - protein, 492 aa, Streptococcus agalactiae; identical to SEQ ID NO: 7071

SEQ ID NO: 15942 - protein, 164 aa, Streptococcus agalactiae; identical to SEQ ID NO: 2512

SEQ ID NO: 15943 - protein, 550 aa, Streptococcus agalactiae
ATGGCAGCTATCAACACAGCTCTTCACTTCTACAAGGTTTATCTGGTAGTTCAGCAGTCTTGATGGGCTTACTAGTTGGTGGTATGATGGCTGTAGATATGGGTGGGCCTGTTAATAAAGCAGCTTATGTTTTTGGTACAGGTACTCTTGCAGCAACTGTTGCAAATGGCGGCTCTGTTGTTATGGCAGCTGTAATGGCTGGAGGAATGGTTCCACCGTTAGCAGTATTTGTGGCAACTTTATTATTAAAGATAAATTTAATAATGAAGAACGTCAATCTGGTCTAACAAATATCGTTATGGGGTTATCTTTTATCACTGAAGGTGCTATTCCGTTTGGTGCTGCTGACCCAGCTCGTGCAATCCCTAGCTTTATTGTAGGTTCAGCCTTAACTGGAGCACTTGTTGGTTTAGCTGGTATCAAGTTGATGGCTCCTCATGGAGGGATTTTTGTCATCGCATTAACAAGTAATCCTTTACTTTATATTCTATTTATTCTAATTGGAGCGATAGTCTCAGGTGTACTCTTTGGCTTGTTCCGTAAAACAAAA

SEQ ID NO: 15944 - protein, 185 aa, Streptococcus agalactiae
MAAINTALTLSYKVLSGSSAVLMGLLVGGMMAVDMGGPVNKAAYVFGTGTLAATVANGGSVVMAAVMAGGMVPPLAVFVATLLFKDKFNNEERQSGLTNIVMGLSFITEGAIPFGAADPARAIPSFIVGSALTGALVGLAGIKLMAPHGGIFVIALTSNPLLYILFILIGAIVSGVLFGLFRKTK

SEQ ID NO: 15945 - protein, 1201 aa, Streptococcus agalactiae
ATGGATTTAAAAGCAACCAGTAAAGAGGCTGCAATTGATGAAATGATTACAAAATTAGTTGACACAGGTGTTGTGACAAACTTTGCTATTTTTAAAGATGGTATCATGAAGCGTGAGGCACAAACATCAACTGGATTAGGTGATGGTATCGCTATGCCACATAGTAAAAATGCTGCCGTTAAAGAAGCTACTGTCCTTTTTGCAAAATCTGCATCAGGTGTTGATTACGAAGCACTTGATGGACAGCCAACTGATTTATTCTTTATGATTGCTGCGCCAGATGGTGCTAATGATACGCATTTAGCTGCCTTGGCAGAACTATCTAAATATCTTTTAAAAGAAGGGTTCGCTGATCAATTACGTCAAGCAAAAACGCCAGATGACATTATTGCTACTTTTGATAGTAATAGCATTTCTCAAGAAACAGTAGCTCCACAAACAGTACAATCAACAAGTAAAGGTTCAGATTATATTGTTGCAGTAACAGCTTGCACTACGGGAATTGCCCACACGTATATGGCAGAAGAAGCTTTAAAGAAAAAAGCAGCTGAAATGGGTGTAGGTATTAAAGTTGAAACAAATGGCGCTTCTGGTGTAGGAAATAAGTTGACTTCAAGTGATATTGCAAGGGCTAAGGGTGTTATTATTGCAGCAGATAAGGCTGTAGAGATGGATCGTTTTGATGGCAAACCTTTGGTATCACGTCCGGTAGCTGATGGTATTAAAAAAAGTGAAGACTTAATTAACATTATTCTCGATAATAAGGCACAAACCTATCATGCAAAAAATCAAAATGATAAACAATCAGGTGAATCTGATGGAAAATCAGGCTTAGGCTCTGCTTTTTATAAACACCTTATGGGTGGTGTATCACAAATGTTACCATTCGTTATTGGTGGTGGTATTATGATTGCGATTGCTTTCCTTTTTGATAACATACTTGGTGTACCAAAAGACCAATTAAGTAATTTAGGTTCATACCATGAAATTGCAGCCTTATTCAAAAATATCGGTGGCGCAGCATTTGCATTTATGTTACCAGTATTGGCAGGTTATATCGCTTATTCAATAGCTGAAAAACAGGACTAGTAGCTGGCTTCGTAGCTGGTTCAATTGCATCAAGTGGACTGGCATTCGGTAAAGTACCTTTTGCAGAAGGTGGGAAAGCAACCTTAGCATTAGCAGGTGTGCCATCAGGTCT

SEQ ID NO: 15946 - protein, 401 aa, Streptococcus agalactiae
MDLKATSKEAAIDEMITKLVDTGVVTNFAIFKDGIMKREAQTSTGLGDGIAMPHSKNAAVKEATVLFAKSASGVDYEALDGQPTDLFFMIAAPDGANDTHLAALAELSKYLLKEGFADQLRQAKTPDDIIATFDSNSISQETVAPQTVQSTSKGSDYIVAVTACTTGIAHTYMAEEALKKKAAEMGVGIKVETNGASGVGNKLTSSDIARAKGVIIAADKAVEMDRFDGKPLVSRPVADGIKKSEDLINIILDNKAQTYHAKNQNDKQSGESDGKSGLGSAFYKHLMGGVSQMLPFVIGGGIMIAIAFLFDNILGVPKDQLSNLGSYHEIAALFKNIGGAAFAFMLPVLAGYIAYSIAEKPGLVAGFVAGSIASSGLAFGKVPFAEGGKATLALAGVPSGS

SEQ ID NO: 15947 - protein, 909 aa, Streptococcus agalactiae; identical to SEQ ID NO: 7077

SEQ ID NO: 15948 - protein, 303 aa, Streptococcus agalactiae; identical to SEQ ID NO: 7078

SEQ ID NO: 15949 - protein, 741 aa, Streptococcus agalactiae
ATGCTAAAGTCAAAGAGAAAAGAAATTATCTTATCACGACTTGAGCAAAATAAGAGTGTTACTTTAGATGAATTAACGTCTATCTTAGAGACTTCTGAATCTACAGTTCGCAGGGATTTAGATGAACTTGAATCTGAAGGTTTTTTAAAAAGGGTGCATGGTGGTGCTGAATTACCATACTCACTTGGCCAGGAATTAAGTAATCAAGAAAAATCTATCAAAAACGTTCAAAAAAAATTGGATATTGCTAGACAAACTGCAAAGCTGATAGCAAAGCAAGATGTTATATTTATTGATGCCGGAACTACGACAGAATTATTAATTGATTTTCTCCCTCACGAGCAATTAACGGTGGTGACGAATTCTATTCATCATGCTGCAAAGTTAGTTGATAGAGGGATAAAAACAATCATTATCGGAGGAGCGGTTAAACATTCAACAGATGCTAGTATTGGCCAGGTAGCCATTAATCAGATTAGGCAGATAACGGTTGACAAAGCTTTTCTGGGGATGAATGGTATAGATGAAGTTTATTTAACTACACCAGATTTAGAAGAAGCTGCTATTAAAGAAGCTATTATTAATAATAGTCAACAAACCTTTATTCTAATGGATTCATCTAAAATTGGACAAGTTACATTTGCTAAAGTGAAAGAGATAAATGACATTAATTTAGTAACTAATAAGACTGATTCAGAACTTATGACAATAATAAAAGAGAAAATGAAGGTGATTCAAGTA

SEQ ID NO: 15950 - protein, 247 aa, Streptococcus agalactiae
MLKSKRKEIILSRLEQNKSVTLDELTSILETSESTVRRDLDELESEGFLKRVHGGAELPYSLGQELSNQEKSIKNVQKKLDIARQTAKLIAKQDVIFIDAGTTTELLIDFLPHEQLTVVTNSIHHAAKLVDRGIKTIIIGGAVKHSTDASIGQVAINQIRQITVDKAFLGMNGIDEVYLTTPDLEEAAIKEAIINNSQQTFILMDSSKIGQVTFAKVKEINDINLVTNKTDSELMTIIKEKMKVIQV

SEQ ID NO: 15951 - DNA, 1083 bp, Streptococcus agalactiae
atgacgcttcgagaattaacaatagaagaatttaaagaacattcaggaaattatgattcacaatcatttttacaaacacctgagatggctaaacttttagaaaaacgcggctatgatgttaggtatttgggatatcaagtagaaaataaactagagataatcagtttatcttatattatgccagtcactggtggttttcaaatgaaaattgattcaggaccagttcattcaaattctaagtatctaaaacaattttataaagcattgcaaggctatgccaaatccaacggtgttctagaattaatagttgagccttttgatgattaccaattattcactagttcgggagttcctagtaatcagggaaatgataatctgattgaagattttaccagttcaggttatcaccatgatggtttaacaactggttttactggtaaatatttatcttggcactatgttaaaaatttagaaggtgtcacttctgaaacgttactatcttcattctctaagacaggacgagctttggttaagaaagcaatgtcttttggaatcaaggttcgcgttcttaaacgtgatgagctacatttatttaaagagataacaacttctacgtcaaatagacgtgattatatggataagtccttagattattatcaagatttttacgatagctttgaaggcaaggctgaatttgtgattgccactttaaattttagagaatacgaccataacttgcaaataaaagctgaagcattggaaaataagcttaaattgcttgatgaacgttttagggaaaatgcagactctcctaagtatcataggcaacgctctgaaataattaatcaactggctagttttgaaacacgacgacaagaagttcagtcatttattcaaaagtatgataaccaagacgttgttttagctggtagtctatttgtttatagtcttaaggagacagtttatttcttttcaggatcctacacagaatttaataaattttatgcaccagcagttcttcaggaatatgttatgcaagaggctctcaaaagaggttctactttctataacctcctaggtatt

SEQ ID NO: 15952 - protein, 361 aa, Streptococcus agalactiae
MTLRELTIEEFKEHSGNYDSQSFLQTPEMAKLLEKRGYDVRYLGYQVENKLEIISLSYIMPVTGGFQMKIDSGPVHSNSKYLKQFYKALQGYAKSNGVLELIVEPFDDYQLFTSSGVPSNQGNDNLIEDFTSSGYHHDGLTTGFTGKYLSWHYVKNLEGVTSETLLSSFSKTGRALVKKAMSFGIKVRVLKRDELHLFKEITTSTSNRRDYMDKSLDYYQDFYDSFEGKAEFVIATLNFREYDHNLQIKAEALENKLKLLDERFRENADSPKYHRQRSEIINQLASFETRRQEVQSFIQKYDNQDVVLAGSLFVYSLKETVYFFSGSYTEFNKFYAPAVLQEYVMQEALKRGSTFYNLLGI

SEQ ID NO: 15953 - DNA, 1632 bp, Streptococcus agalactiae
atgatgaaaaaaggacaagtaaatgatactaagcaatcttactctctacgtaaatataaatttggtttagcatcagtaattttagggtcattcataatggtcacaagtcctgtttttgcggatcaaactacatcggttcaagttaataatcagacaggcactagtgtggatgctaataattcttccaatgagacaagtgcgtcaagtgtgattacttccaataatgatagtgttcaagcgtctgataaagttgtaaatagtcaaaatacggcaacaaaggacattactactcctttagtagagacaaagccaatggtggaaaaaacattacctgaacaagggaattatgtttatagcaaagaaaccgaggtgaaaaatacaccttcaaaatcagccccagtagctttctatgcaaagaaaggtgataaagttttctatgaccaagtatttaataaagataatgttaaatggatttcatataagtcttttggtggcgtacgtcgatacgcagctattgagtcactagatccatcaggaggttcagagactaaagcacctactcctgtaacaaattcaggaagcaataatcaagagaaaatagcaacgcaaggaaattatacattttcacataaagtagaagtaaaaaatgaagctaaggtagcgagtccaactcaatttacattggacaaaggagacagaattttttacgaccaaatactaactattgaaggaaatcagtggttatcttataaatcattcaatggtgttcgtcgttttgttttgctaggtaaagcatcttcagtagaaaaaactgaagataaagaaaaagtgtctcctcaaccacaagcccgtattactaaaactggtagactgactatttctaacgaaacaactacaggttttgatattttaattacgaatattaaagatgataacggtatcgctgctgttaaggtaccggtttggactgaacaaggagggcaagatgatattaaatggtatacagctgtaactactggggatggcaactacaaagtagctgtatcatttgctgaccataagaatgagaagggtctttataatattcatttatactaccaagaagctagtgggacacttgtaggtgtaacaggaactaaagtgacagtagctggaactaattcttctcaagaacctattgaaaatggtttaccaaagactggtgtttataatattatcggaagtactgaagtaaaaaatgaagctaaaatatcaagtcagacccaatttactttagaaaaaggtgacaaaataaattatgatcaagtattgacagcagatggttaccagtggatttcttacaaatcttatagtggtgttcgtcgctatattcctgtgaaaaagctaactacaagtagtgaaaaagcgaaagatgaggcgactaaaccgactagttatcccaacttacctaaaacaggtacctatacatttactaaaactgtagatgtgaaaagtcaacctaaagtatcaagtccagtggaatttaattttcaaaagggtgaaaaaatacattatgatcaagtgttagtagtagatggtcatcagtggatttcatacaagagttattccggtattcgtcgctatattgaaatt

SEQ ID NO: 15954 - protein, 544 aa, Streptococcus agalactiae
MMKKGQVNDTKQSYSLRKYKFGLASVILGSFIMVTSPVFADQTTSVQVNNQTGTSVDANNSSNETSASSVITSNNDSVQASDKVVNSQNTATKDITTPLVETKPMVEKTLPEQGNYVYSKETEVKNTPSKSAPVAFYAKKGDKVFYDQVFNKDNVKWISYKSFGGVRRYAAIESLDPSGGSETKAPTPVTNSGSNNQEKIATQGNYTFSHKVEVKNEAKVASPTQFTLDKGDRIFYDQILTIEGNQWLSYKSFNGVRRFVLLGKASSVEKTEDKEKVSPQPQARITKTGRLTISNETTTGFDILITNIKDDNGIAAVKVPVWTEQGGQDDIKWYTAVTTGDGNYKVAVSFADHKNEKGLYNIHLYYQEASGTLVGVTGTKVTVAGTNSSQEPIENGLPKTGVYNIIGSTEVKNEAKISSQTQFTLEKGDKINYDQVLTADGYQWISYKSYSGVRRYIPVKKLTTSSEKAKDEATKPTSYPNLPKTGTYTFTKTVDVKSQPKVSSPVEFNFQKGEKIHYDQVLVVDGHQWISYKSYSGIRRYIEI

SEQ ID NO: 15955 - DNA, 921 bp, Streptococcus agalactiae
atgttagtttatattgctggttcaggcgctatgggatgtcgttttggatatcaaatttctaaaacaaatcatgatgttattttacttgataattgggcagaccatattatggctattaaagaaaatggcttgaaggtaacaggtgatacagaggaccttgttaaacttcctatcatgaagccaactgatgcgacagaagaagcagatttaattattttgtttactaaagcaatgcagttgccaaatatgcttcaagatattaaaaaaattattggtaagaaaacaaaggtcttatgtcttttaaatggattaggacatgaagatgtcattcgtcaatatatccctgaacacaatattttgatgggagtaacagtttggactgcagggttgaaaggaccagggcatgctcatctggaaggagttggttctgtaaatcttcaaagtatcgatcctaacaatcaagaagcaggtcatcgcgttactgaattgcttaatgaagcaaaattacaggctacttatgacgaaaatgttttgccaaatatttggagaaaagcttgtgttaacggaacgatgaattcaacttgcgccttgctagattgtacaattggtcaactctttgctagtgaagacggcgtaaatatggtacatgaaattatccatgaatttgttactgttggaaaagcagaaggtgtagagcttgatgaagaagaaataacaaagtacgttatggatacatctgttaaagcagcccatcattacccttcaatgcatcaagacttagttcaaaatcagcgcttaactgaaattgatttcttaaatggcgcagtgaataaaaaaggtgaaaacctaggcattgatacaccttactgtcgattaatcacacaattaattcacactaaagaaaatgtacttagcataaaa

SEQ ID NO: 15956 - protein, 307 aa, Streptococcus agalactiae; identical to SEQ ID NO: 2520

SEQ ID NO: 15957 - DNA, 1050 bp, Streptococcus agalactiae
atgacaaatacggtaacaccaaaagagacggctggctcttttatcaataaagtgttaggtgggacagcaactgcaatcgttgtagcactcatcccaaatgctatcctagccacttttttgaaaccatttttatcttacggacttgctgcagagttcttacacatcgtgcaggtattccaatttttcacaccaattatggcaggatttttgattggtcaacagtttaaattcaccccaatgcaacagcttgctgttggaggtgctgcatatattggttctggtgcgtgggcttacacagaagttattcaaaaaggagttgctactggtagtttccaattgcgtgggattggtgatctcatcaatatgatgctaacagcagctttagcagttttagcagttaagtggtttggtaataaatttggttccctaaccattatcttgttacctattatcataggtacaggcgtaggctatttaggatggaaattactcccttacgtttcatatgtgacaacacttattggtcaaggaattaattcttttactactttacaaccaattgcgatggctttttcaatgcttattgtaagtcctatttcaacagtagcgattggtctagcgattggtcttaatggtatgtcagcaagtgcagcttcaatgggagttgcttcaacaacagcagtgctagtttgggcaacgatgaaggctaataagtctggagttccaattgctattgctttaggtgcaatgaagatgatgatgccaaatttcctaaagcatccagtaatggcgattccaatgcttatgactgctacagtaagttctctaacagtcccattgtttaaattggtggggacaccagcttcgtctggttttgggcttgttggtgcagtaggtccgattgcttcatttgaagcaggagcaagtatgttgattgttatcttatcttggctcgttattccttttgcagtaggttttgtatcacacaaaatttgtaaagacattctgaaactttataaagacgatattttcgtttttgaaggtcaaaat

SEQ ID NO: 15958 - protein, 350 aa, Streptococcus agalactiae
MTNTVTPKETAGSFINKVLGGTATAIVVALIPNAILATFLKPFLSYGLAAEFLHIVQVFQFFTPIMAGFLIGQQFKFTPMQQLAVGGAAYIGSGAWAYTEVIQKGVATGSFQLRGIGDLINMMLTAALAVLAVKWFGNKFGSLTIILLPIIIGTGVGYLGWKLLPYVSYVTTLIGQGINSFTTLQPIAMAFSMLIVSPISTVAIGLAIGLNGMSASAASMGVASTTAVLVWATMKANKSGVPIAIALGAMKMMMPNFLKHPVMAIPMLMTATVSSLTVPLFKLVGTPASSGFGLVGAVGPIASFEAGASMLIVILSWLVIPFAVGFVSHKICKDILKLYKDDIFVFEGQN

SEQ ID NO: 15959 - DNA, 990 bp, Streptococcus agalactiae
atgaacaaaacaatttatgatatcactattgtaggaggcggaccagtaggtctctttgctgctttttatgctggactacgcggagtatccgttaaaattattgaaagcctttcggaattaggaggccagccagctatcctttatcctgagaaaaaaatctatgatattcctggttatccggtgattactggacgtgaattaattgataaacatattgaacaattagagagatttaaagactctattgaaatctgtttaaaagaagaagttttatcatttgaaaaagtagatgatgttttcacaattcaaacagataaagatcaacatttgtcacgtgctattgtttttgcttgtggcaacggtgcttttgctccgcgtttactaggtttggaaaatgaagaaaattatgcagataataatttattctataacgttacaaagttagaacagtttgcaggtaaacatgttgttatttgtggtggaggcgactcagctgttgattgggccaatgaattagataagattgcagctagtgtagcgattgttcatcgtagagatgcttttagagcgcatgagcatagtgtggatatactaaaggcatcaggtgttagaattttaaccccttatgtcccaattggtttaaatggagatagtcagagagttagcagcttggtcgttcaaaaagttaaaggtgatgaagtaattgaattacctttagacaacttgattgttagttttggcttttctacttctaataaaaatttacgttattggaatttggattataaacggtctagtatcaatgtttcttcactttttgagacgactcaagaaggcgtgtatgctattggagatgctgctaattatccaggaaaggtagaattgattgcaacaggatatggggaagcaccagtcgctataaaccaagctatcaattatatttatcctgatcgagataaccgtgtagtccattcaacatcattgataaaa

SEQ ID NO: 15960 - protein, 330 aa, Streptococcus agalactiae; identical to SEQ ID NO: 2524

SEQ ID NO: 15961 - protein, 751 aa, Streptococcus agalactiae
ATGATGAAGATTGATATTTTAACTTTATTTCCTGAAATGTTGCCCCTCTGGAACATTCTATAGTTGGTAAGGCAAAAGAAAGAGGACTTCTTGAAATTATTATCACAATTTCAGAGAAAATGCTGAGAAGTCTCGACATGTTGATGATGAGCCTTACGGTGGGGGGCAAGGGATGCTTTTACGTGCTCAACCTATTTTTGATACAATTGATAAAATAGATGCTCAAAAAGCACGTGTTATTTTGCTAGACCCAGCGGGCAGAACATTTGATCAGGATTTTGCAGAAGAACTATCCAAAGAAGATGAATTAATTTTTATTTGTGGTCACTATGAAGGTTATGATGAACGTATAAAATCATTAGTAACAGACGAAGTATCTTTGGGAGATTTTGTTCTTACGGGAGGAGAATTGGCGGCTATGACAATGGTCGATGCTACCGTTCGTCTGATTCCAGAAGTTATAGGTAAAGAAACAAGTCATCAGGATGATTCATTTTCATCGGGCCTATTAGAATATCCTCAGTATACGCGCCCATATGATTATTTAGGCATGACAGTTCCTGATGTTCTCATGAGTGGTCATCATGAAAATATCCGAAAATGGCGTTTAGAACAAAGTTTGCGAAAAACACTAGAACGTCGACCAGACTTGTTAGAAAATTATGCAATGACGGATGAAGAGAGACTTATCTTAGAGAAAATTAAAACAGAAATAGAAAGAACAGATACAGTAAATGAACAAAACAATTTA

SEQ ID NO: 15962 - protein, 251 aa, Streptococcus agalactiae
  VARIANT 34: Xaa = Any Amino Acid
MMKIDILTLFPEMFAPLEHSIVGKAKERGLLEIXYHNFRENAEKSRHVDDEPYGGGQGMLLRAQPIFDTIDKIDAQKARVILLDPAGRTFDQDFAEELSKEDELIFICGHYEGYDERIKSLVTDEVSLGDFVLTGGELAAMTMVDATVRLIPEVIGKETSHQDDSFSSGLLEYPQYTRPYDYLGMTVPDVLMSGHHENIRKWRLEQSLRKTLERRPDLLENYAMTDEERLILEKIKTEIERTDTVNEQNNL

SEQ ID NO: 15963 - protein, 576 aa, Streptococcus agalactiae
GTGGCCAGTTGCATTTTAGCGGCTGGTTTTTCTTTTATTTTCAAAAATATCGGAGTTACTATGGAATACTTTAACGTTGGAAAAATTGTCAATACACAAGGATTACAAGGCGAAATGCGTGTATTAAGCGTGACTGACTTTGTAGAAGAACGCTTTAAAAAAGGTCAAGTGTTAGCTTTATTCGATGAAAAGAATCAGTTTGTTATGGATATTGAAATTGCTAGTCATCGTAAGCAGAAGAATTTTGACATTATAAAATTCAAAGGAATGTATCATATTAATGATATTGAAAAATATAAAGGTTTCACACTGAAGGTGGCAGAGGATCAACTGAGCGACCTTAAAGATGGTGAATTTTATTATCATGAAATTATTGGCTTAGATGTCTATGAAGGGGAAGAGCTGATTGGAAAAATCAAAGAAATTTTACAACCAGGAGCAAATGACGTTTGGGTTGTGGAACGTCATGGAAAACGTGATCTTTTATTACCCTATATCCCGCCAGTAGTATTAGAAGTGGACCTTTCTAATCAGCGTGTTCAAGTTGAATTGATGGAAGGTTTAGATGATGAAGAT

SEQ ID NO: 15964 - protein, 192 aa, Streptococcus agalactiae
MASCILAAGFSFIFKNIGVTMEYFNVGKIVNTQGLQGEMRVLSVTDFVEERFKKGQVLALFDEKNQFVMDIEIASHRKQKNFDIIKFKGMYHINDIEKYKGFTLKVAEDQLSDLKDGEFYYHEIIGLDVYEGEELIGKIKEILQPGANDVWVVERHGKRDLLLPYIPPVVLEVDLSNQRVQVELMEGLDDED

SEQ ID NO: 15965 - protein, 123 aa, Streptococcus agalactiae
GTGTATGCTATTGCAGATGCTGCTAATTATCCAGGAAAGGTAGAATTGATTGCATCAGGATATGGGGAAGCACCAGTCGCTATAAGCCAAGCTATCAATTATATTTATCCTGATCGANNNNNT

SEQ ID NO: 15966 - protein, 41 aa, Streptococcus agalactiae
  VARIANT 40, 41: Xaa = Any Amino Acid
MYAIADAANYPGKVELIASGYGEAPVAISQAINYIYPDRXX

SEQ ID NO: 15967 - protein, 570 aa, Streptococcus agalactiae
ATGACCGCCTTACTTGATGATGGAGAAATTAACCTTGATCACTTTAAAACAGAATATGCTTTGAGTGAAAAGATTTTACAAGGTCTTATTTCGGAACTACAAATACTTTATTCTGATTTCTACCTTGTTGTCAAAAGTAGAACAATGGTATTGTTCCATTACGAAACACTTTCTAAGCTAGAGACTTTGCATACCATTTATCGAGAGTCTAATACGTTACAGTTTTTGGCATATTTTATTGCTCCTCAAAATGTCAGTTTTTCTGAATTCACGGCTAAGAAATTCATATCCGTCGCAAGTGCCTACCGAATAAAGAAAAACTGTAAACTTTATTTGGAGAGTGTTAAGTTATCAATACAAAAAAATAAAGTGACAGGTCCAGAATATCAGATTAGGCTGCTGATTGCTTTGTTACAGTATCATTTTGGTTTTATTATTTATCCTTTTGATGCTACAAGTGAGGTAATGATAAGGGATTTTATTGAATACTCGAATTTTAAAGGGTGTGACTACGACCTTAAAGACTTATCTGAAGAATATTACTATTTTTATATTTTGGTNNNNNTTAAT

SEQ ID NO: 15968 - protein, 190 aa, Streptococcus agalactiae
  VARIANT 188, 189: Xaa = Any Amino Acid
MTALLDDGEINLDHFKTEYALSEKILQGLISELQILYSDFYLVVKSRTMVLFHYETLSKLETLHTIYRESNTLQFLAYFIAPQNVSFSEFTAKKFISVASAYRIKKNCKLYLESVKLSIQKNKVTGPEYQIRLLIALLQYHFGFIIYPFDATSEVMIRDFIEYSNFKGCDYDLKDLSEEYYYFYILVXXN

SEQ ID NO: 15969 - protein, 1004 aa, Streptococcus agalactiae
ATGCAAGGTAGTGATACCAACCGTAAGGAACCAATTATTCAGAATCATGTAAAAAAGATTGCTAAGGAAGTAGATGGTGTTAGTGGCTACTATGTAACCAATCAAACAAATGCTCCAGTAGCTTACCTGAAAAAAAGGCAAAGACGGTTAATATAACAGGAATTAACCGCACTTACCTTGGTATCAAAAAGTTCAAAATTAAAAGTGGTCGTCAATTCCAAGAGGAGGATTATAACCAATTCTCGAGAGTTATTTTACTAGAAGAAAAATTAGCTCAGAGATTATTTCAGACAAATGAAGCAGCGTTAAATAAAGTGGTGACTGTAAAAAATAAATCTTACTTAGTAGTGGGGGTTTATTCGGATCCAGAAGCTGGCTCAGGTTTATATGGAAGTAATTCTGATGGGAATGCTATTTTAACCAATACACAGTTAGCTTCGGAGTTTGGTGCTAAAGAAGCAGAAAACATATATTTTCATCTTAATGATGTGTCGCAATCCAATCGCATTGGTAAAGAAATAGGCAAACGTTTAACAGACATTAGCCATGCTAAGGATGGGTACTATGATAATTTTGATATGACATCTATAGTTAAATCTATCAATACCCAAGTTGGTATTATGACAGGTGTTATTGGAGCGATTGCAGCAATTTCTCTCCTAGTTGGTGGTATCGGAGTGATGAATATTATGTTAGTCTCTGTAACTGAGCGCACGAGAGAAATTGGCCTTCGTAAAGCCCTTGGGGCAACTCGACGTAAAATTTTAGCTCAATTTTTAATTGAATCAATGGTCTTAACGATTTTGGGTGGGTTAATTGGGTTATTACTAGCCTATGGAGGTACGATGTTAATTGCTAATGCGCAAGATAAGATTACTCCTTCTGTGTCACTTAACGTGGCTATAGGCAGTTTAATTTTCTCAGCATTTATTGGAATTATATATGGTTTATTACCTGCTAATAAAGCTAGCAAATTAAACCCAATTGATGCTTTACGATATGAA

SEQ ID NO: 15970 - protein, 336 aa, Streptococcus agalactiae
  VARIANT 14: Xaa = Any Amino Acid
MQGSDTNRKEPIIXESWLKKIAKEVDGVSGYYVTNQTNAPVAYLEKKAKTVNITGINRTYLGIKKFKIKSGRQFQEEDYNQFSRVILLEEKLAQRLFQTNEAALNKVVTVKNKSYLVVGVYSDPEAGSGLYGSNSDGNAILTNTQLASEFGAKEAENIYFHLNDVSQSNRIGKEIGKRLTDISHAKDGYYDNFDMTSIVKSINTQVGIMTGVIGAIAAISLLVGGIGVMNIMLVSVTERTREIGLRKALGATRRKILAQFLIESMVLTILGGLIGLLLAYGGTMLIANAQDKITPSVSLNVAIGSLIFSAFIGIIYGLLPANKASKLNPIDALRYE

SEQ ID NO: 15971 - DNA, 168 bp, Streptococcus agalactiae
atgcgtgcttttctgaccatgttagggattatcattggggttgcatcagttgtgttaattatggccttaggtaagggcatgaaagattcggttacaaatgagattacaaagtctcagaagaatcttcaaatttattataaaacaaaagaagaccaaaaaaatgaagga

SEQ ID NO: 15972 - protein, 56 aa, Streptococcus agalactiae
MRAFLTMLGIIIGVASVVLIMALGKGMKDSVTNEITKSQKNLQIYYKTKEDQKNEG

SEQ ID NO: 15973 - DNA, 708 bp, Streptococcus agalactiae
gtgacaactaatcgaaaagaactgattagattgcatcagattgttaaaagttatcaaaatggggatcaaaaacttcaagtcttaaagaacattgatttgacggtttatgaaggtgaatttcttgcaatcatggggccatctggctcagggaaatccacactaatgaatattattggcttgttggattccccaacttcaggagattatagtttaaatggtaaacgtgtcgaagaactaagtcaaacaaaattagctcaagttcgaaataaggaaatcggttttgtctttcaacaatttttcttgttatctaaactaacggctttgcaaaatgttgaattacccttaatttatgcgggtgtagctcctaaaaagcgtaaaaatttagcaaaacaatttttagataaagttgaattgagagagcgtatgaaccatctgccaacagaattatctgggggacagaagcaacgtgtagcaatcgcgcgtgctttggtgaatagcccatctattattctagcagatgagccgactggtgccttggatacaaagacgggtgagcaaattatgcagttcctaacggaattaaatcaagaaggtaaaaccattatcatggtaactcatgaaccagaaatcgccgattatgcgacacgtaaaattgttattcgtgatggcgaaattacagcagatactactgatagtattagaattgat

SEQ ID NO: 15974 - protein, 236 aa, Streptococcus agalactiae; identical to SEQ ID NO: 11370

SEQ ID NO: 15975 - DNA, 1242 bp, Streptococcus agalactiae
atgagtaaacgacaaaatttagggattagtaaaaaaggagcaattatatcagggctctcagtggcactaattgtagcagtaggtggctttttatgggtacaatctcaacctaataagagtgcagtaaaaactaattacaaagtttttaatgttagagaaggaagtgtttcgtcctcaactcttttgacaggaaaagctaaggctaatcaagaacagtatgtgtattttgatgctaataaaggtaatcgagcaactgttacagttaaagtgggtgataaaatcacagctggtcagcagttagttcaatatgatacaacaactgcacaagcagcctacgacactgctaatcgtcaattaaataaagtagcgcgtcagattaataatctaaagacaacagggagttttccagctatggaatcaagtgatcaatcttcatcatcatcacaaggacaagggactcaatcgactagtggtgcgacgaatcgtctacagcaaaattatcaaagtcaagctaatgcttcatacaaccaacaacttcaagatttgaatgatgcttatgcagatgcacaggcagaagtaaataaagcacaaaaagcattgaatgatactgttattacaagtgacgtatcagggacagttgttgaagttaatagtgatattgatccagcttcaaaaactagtcaagtacttgtccatgtagcaactgaaggtaaactccaagtacaaggaacgatgagtgagtatgatttggctaatgttaaaaaagatcaggctgttaaaataaaatctaaggtctatcctgacaaggaatgggaaggtaaaatttcatatatctcaaattatccagaagcagaagcaaacaacaatgactctaataacggctctagtgctgtaaattataaatataaagtagatattactagccctctcgatgcattaaaacaaggttttaccgtatcagttgaagtagttaatggagataagcaccttattgtccctacaagttctgtgataaacaaagataataaacactttgtttgggtatacaatgattctaatcgtaaaatttccaaagttgaagtcaaaattggtaaagctgatgctaagacacaagaaattttatcaggtttgaaagcaggacaaatcgtggttactaatccaagcaaaactttcaaggatgggcaaaaaattgataatattgaatcaatcgatcttaagtctaataagaaatcagaggtgaaa

SEQ ID NO: 15976 - protein, 414 aa, Streptococcus agalactiae
MSKRQNLGISKKGAIISGLSVALIVAVGGFLWVQSQPNKSAVKTNYKVFNVREGSVSSSTLLTGKAKANQEQYVYFDANKGNRATVTVKVGDKITAGQQLVQYDTTTAQAAYDTANRQLNKVARQINNLKTTGSFPAMESSDQSSSSSQGQGTQSTSGATNRLQQNYQSQANASYNQQLQDLNDAYADAQAEVNKAQKALNDTVITSDVSGTVVEVNSDIDPASKTSQVLVHVATEGKLQVQGTMSEYDLANVKKDQAVKIKSKVYPDKEWEGKISYISNYPEAEANNNDSNNGSSAVNYKYKVDITSPLDALKQGFTVSVEVVNGDKHLIVPTSSVINKDNKHFVWVYNDSNRKISKVEVKIGKADAKTQEILSGLKAGQIVVTNPSKTFKDGQKIDNIESIDLKSNKKSEVK

SEQ ID NO: 15977 - DNA, 1596 bp, Streptococcus agalactiae
atgctaaatacaaaggataaacagcctattttgcttattattttcggacagaaaatgaaagaatatgacgatttaattagatcaactgttgagaggttatctaaaaggaatagacctgttagtattcttatctcgaaggagctaaaccatgtgattcaccattatgatgcacaatttgaaaatcttgagacgcttgtggggtatataaatacacatgaagatagtttgatttatcccctttgcttagataaaaatcatgagctatttcaagagtttttagcgtggcagagtcattattcaaggcagtatatcagtgataatttatcagaaaaaagtgttcaggcaatagacaataatcaagactttgtgcaagtagattgtttagtaatgagagactctttgaataattgtttatatgtctctgatttagaatatattgaatctaataaaacaactggtaagtctctagcgattgtaccaagtcaaactttatccgatgctgctaggcaaacaattcgagatgttgcatttgatgtgtgtcgaaaggcaaacattattggagtatgttactttagtttcttaatagatttgaacagtttggattatcatataattagcttatcatctggtttgtcttatcaaagcattttatttgagactattacgacctatcctgttttagagatagcaactaaattgacagtgggatatacttttagtcaactgaagcattcttattacccaaatacctctgcctttttagagccgcaattagactatgtagctaccgtatcttttagttttgaaaaagttgactatatcttttttgctcgtaatatagagcaattatttttaaatttactcgaggctagcagtcatgatcattttccatttctgagtgatattagcgaggaagatttgatgtttgctttgattcagaaaaaagaaaatcgtctagcttatcttttagaggcttttagacgtggctttgatttgtatgatttatcctcagttactaaaatcaaccctttttacttagataaatgtttacatattgtagagttgtatgaaaacctgaataaaagccaatataatgtagatatttacaaggatgctaaaaggtatggtttttcggatgactatattgctagtagttggcaaatatctttgatagacatgttagaatatcgaaaaaaacatagtgtcgcacctgttctgaagcaagtcgaacaaagttctggtgttctaactggccatcaaattcagtattttcgaagctatgattggcattcagactacagttctagcggttgtcaaaaggctttgataatggtagacaagggttattccctagtaaaattaaatgagttaattaagcaaatcaaacaaactcatttagaattattaattgttaccaatcaacctctcctcatagaacaattaaatgatacatctataatttttgacactataggtattgagaccatattaacaattatgggtatagaagaggtggaagaagtgtatttattgggagaaagtcaagcagacatgttttcaaaaatgaaaaatttttctatctcttgtcagtctatt

SEQ ID NO: 15978 - protein, 532 aa, Streptococcus agalactiae
MLNTKDKQPILLIIFGQKMKEYDDLIRSTVERLSKRNRPVSILISKELNHVIHHYDAQFENLETLVGYINTHEDSLIYPLCLDKNHELFQEFLAWQSHYSRQYISDNLSEKSVQAIDNNQDFVQVDCLVMRDSLNNCLYVSDLEYIESNKTTGKSLAIVPSQTLSDAARQTIRDVAFDVCRKANIIGVCYFSFLIDLNSLDYHIISLSSGLSYQSILFETITTYPVLEIATKLTVGYTFSQLKHSYYPNTSAFLEPQLDYVATVSFSFEKVDYIFFARNIEQLFLNLLEASSHDHFPFLSDISEEDLMFALIQKKENRLAYLLEAFRRGFDLYDLSSVTKINPFYLDKCLHIVELYENLNKSQYNVDIYKDAKRYGFSDDYIASSWQISLIDMLEYRKKHSVAPVLKQVEQSSGVLTGHQIQYFRSYDWHSDYSSSGCQKALIMVDKGYSLVKLNELIKQIKQTHLELLIVTNQPLLIEQLNDTSIIFDTIGIETILTIMGIEEVEEVYLLGESQADMFSKMKNFSISCQSI

SEQ ID NO: 15979 - DNA, 1068 bp, Streptococcus agalactiae
atggcaaaaaaattgttaattctagaggatggtacggtttttgaaggactatcctttggttcatctcttgatgtaactggcgaattagttttttgtacggggaataccggctatcaggaaataataacgaatccttcacataatggaaaaattttagtttttacctcaccgctaataggaaattatggtattcatcgtagttactctgaagccattattcccacttgtttaggagttgttgttgcagagtattccagatgtgtaagtagcgatactagcaagatgaatctagatgaatttttgaaaatgaaaaaggttcctgcaatgtcgggggtcgatacaaggtatttgatgcaagttattaaagaaaaaggatttgtaaaagctactttagcagaagcaggtgatgttttatcacatttacaagatcaattaatagcgacagtattaccgacaaataatgtggaacaagtttcgacaaaaacagcttatccgtcgcctgctagcggtcgaaatattgttgtacttgattttggccttaaacattctgttttgagagaattgtctaaacgtcagtgtgacgtgactgtcattccctacaatacgtctttagaaggtatcaaaaatctatacccagaaggtatcatattatctaatggtccgggaaatccagaaaagcttcaggaagtcttaaacactattaaagaattacaaaaatctgttcctatgttaggtattggtttggggcatcaattaattgccatggcaaatggtgcagaaattatgagactcccagttgctaagaaggggccaaattatcccatgagagatattgctacggggcgtttagaaacagttattcagtttaatcattttaccgttaaccggctaaatcttccgcatgatttactggtaacacacgaaggtttgaatgatcaagagattgttgctctaaggcaccgctcatttccagtgatgtccgtgcaattttacccagaggctgctccaggccctcatgatgtgacctatttttttgatgaatttttagaaatgattggatcacgcgct

SEQ ID NO: 15980 - protein, 356 aa, Streptococcus agalactiae
MAKKLLILEDGTVFEGLSFGSSLDVTGELVFCTGNTGYQEIITNPSHNGKILVFTSPLIGNYGIHRSYSEAIIPTCLGVVVAEYSRCVSSDTSKMNLDEFLKMKKVPAMSGVDTRYLMQVIKEKGFVKATLAEAGDVLSHLQDQLIATVLPTNNVEQVSTKTAYPSPASGRNIVVLDFGLKHSVLRELSKRQCDVTVIPYNTSLEGIKNLYPEGIILSNGPGNPEKLQEVLNTIKELQKSVPMLGIGLGHQLIAMANGAEIMRLPVAKKGPNYPMRDIATGRLETVIQFNHFTVNRLNLPHDLLVTHEGLNDQEIVALRHRSFPVMSVQFYPEAAPGPHDVTYFFDEFLEMIGSRA

SEQ ID NO: 15981 - protein, 519 aa, Streptococcus agalactiae
ATGAAAAGAAAAGAAATTATTGATGATGTGACCATGAAACGTGCTATTACACGTATTACCTACGAAATTATAGAACGTAACAAAAATTTAGATAATATTGTTTTAGCAGGCATTAAAACAAGAGGTGTTTTTTTAGCCAAACGCATTCAAGAACGTTTGAAGCAATTAGAAAATTTAGATATTCCCGTTGGAGAATTGGATACTAAACCTTTCCGTGATGATATGAAAGTTGAAGTTGACACCACAACTATGCCAGTTGACATCACTGATAAAGATATTATATTAATTGATGATGTTCTCTATACAGGTCGCACTATTCGAGCTGCTATTGATAATCTTGTTAGTTTGGGGCGTCCGAGTCGTGTCAGTTTAGCTGTATTAATTGACCGTGGGCATCGTGAACTACCCATTCGTGCAGATTATGTGGGGAAAAATATTCCAACAAGTCAATTTGAAGAAATTCTAGTTGAAGTGATGGAACATGATGGTTACGATCGTGTGAGTATTATTGATCCGAGT

SEQ ID NO: 15982 - protein, 173 aa, Streptococcus agalactiae; identical to SEQ ID NO: 2546

SEQ ID NO: 15983 - protein, 888 aa, Streptococcus agalactiae
ATGGAAATCACAATTAAAATAGCAGGAGTTAGGCTAGATAAAGCTTTAGCTGATAATTCTGAACTGTCGCGTAGTCAAGCTAATGAAGAAATTAAAAAAGGGATTGTGTTAGTAAATGGACAAGTAAAAAAAGCGAAATATACTGTTCAAGAAGGAGATCGGATTACTTTTGATATTCCTAAAGAGGAAGTACTAGATTATCAAGCTGAAAATATCCCTTTAGATATTATCTATCAAGATGATGACGTTGCTGTGGTTAATAAGCCGCAAGGGATGGTTGTTCACCCTTCTGCAGGCCACAGTTCGGGCACCTTAGTTAACGCCTTGATGTATCATATTAAGGATTTATCATCAATTAATGGCGTTGTTCGCCCAGGGATCGTTCATCGTATTGATAAAGATACTTCTGGTTTATTGATGGTTGCAAAAAATGATAGAGCTCACCAAGTGTTGGCTGAAGAGTTGAAAGATAAAAAATCGCTTCGTAAATATTTAGCAATTGTGCATGGTAATTTACCAAATGATCGAGGCGTGATTGAGGCTCCGATTGGTAGAAGTGATAAAGATCGTAAGAAGCAAGCCGTGACTGCTAAAGGTAAGCCAGCAATAACTCGTTTTCATGTTTTAGAACGTTTTGGTGATTATACCTTAGTTGAATTGTCATTGGAGACAGGTCGAACGCACCAAATTCGGGTTCATATGGCTTATATTGGCCATCCTCTAGCCGGTGATCCTGTCTACGGTCCCCGCAAGACTTTAGGGGGTAAAGGACAGTTTTTGCATGCACAAACACTAGGTTTTACGCACCCTAGTAACGGAGAGAATTTGATTTTTTCAGTAGAGGTTCCGGAAATTTTTCAGACAACTTTAGACAAGTTGAGAAAAAAT

SEQ ID NO: 15984 - protein, 296 aa, Streptococcus agalactiae; identical to SEQ ID NO: 11382

SEQ ID NO: 15985 - protein, 462 aa, Streptococcus agalactiae
ATGAGAAAGATTATTATACCAATAATAACTATTTTGTTGATTGCTTTAGATCAACTATCTAAGTTATGGATTGTTAAACATATTGAACTAAACCAAATTAAGGAATTCATTCCAAATATCGTTAGTCTAACTTATCTGAGAAATTATGGTGCTGCATTTTCTATTTTGCAAAATCAACAATGGCTTTTTACCTTAATTACAATCTTTGTTGTTTGTGTTGCTATTATTTATTTGATGAAACATATTAATGGAAGTTATTGGTTATTAATTTCTCTAACCTTAATCATCTCTGGTGGATTAGGAAACTTTATAGATCGCTTAAGATTAGGTTATGTCGTTGATATGGTGCATTTAGATTTTATTAATTTTGCTATCTTTAATGTAGCAGACTCATATCTGACAATCGGTATTATTTGCTTAATGATTGCACTTTGGAAAGAGGAAAGTAATGGAAATCACAAT

SEQ ID NO: 15986 - protein, 154 aa, Streptococcus agalactiae; identical to SEQ ID NO: 11384

SEQ ID NO: 15987 - protein, 902 aa, Streptococcus agalactiae
ATGAATATTCAACAACTGCGTTATGTTGTTGCTATCGCAAATAGTGGTACTTTTCGTGAAGCAGCTGCAAAACTATTTGTTAGTCAGCCAAGTTTATCTGTTGCCGTTCGTGATTTGGAAACAGAATTAGGGTTTCAGATTTTTACGCGTACAACTACTGGTGCAGTGTTGACCAATCAAGGCATGACTTTTTATGAGAATGCTTTAGAAGTTGTGAAAAGCTTTGATTCATTCGAAAAACAGTTTTCGCAATCTGAAGCTACAGAGCAAGAATTCTCAATAGCAAGTCAACATTATGATTTTCTACCTCCTTTAATCACAGCGTTTTCAAAATGTAATGATAATTTTAGCTATTTCCGTATTTTCGAATCAACAACAATACGTATCTTAGATGAAGTTGCTCAAGGGAATAGCGAAATAGGTATCATTTATATCAATAGTCAAAATAAAAAAGGTCTACTTCAGCGGTTGGACAAATTGGGGTTAGAGTTTGTAGAGCTTATTCCTTTTAAAACTCATATTTATCTTGGGAAAGACCATCCCTTGGCTAGTAAAACATCTCTGATAATGACAGATTTAGAAGGATTACCAACCGTACGTTTTACACAGGATAGAGATGATTATCGGTATTACTCGGAGAATTTGTGGAAGTACTTGATAGTTCTGTTACCTATAATGTTACTGATAGAGCAACATTAAATGGTATTTTAGAAAGAACCCAAGCTTATGCGACGGGCTCAGGATTCTTGGATAGCCGCAGTGTGAATGGTATCACTGTTATTCCATTAGAAGATCATCTAGATAACCAAATGATTTATATCAAACGAAAAGATCGTAATTTATCTCAGATGGCTTTAAAATTTGTTGCTGTTATGGAAGAGTATTTTAAGGGATTTAATTCA

SEQ ID NO: 15988 - protein, 301 aa, Streptococcus agalactiae; identical to SEQ ID NO: 2552

SEQ ID NO: 15989 - protein, 291 aa, Streptococcus agalactiae; identical to SEQ ID NO: 7127

SEQ ID NO: 15990 - protein, 97 aa, Streptococcus agalactiae; identical to SEQ ID NO: 2554

SEQ ID NO: 15991 - DNA, 336 bp, Streptococcus agalactiae
atgattaaagcaacttttactcgtaatcaatcaggctatctttatagtgctgaaatcagcggtcatgctggtagtggcgagtacggctttgatgtgatttgtgcagctgttagtactttatcaattaattttattaattcattagaggctttaacaacctgccaagcgcaattgattatcaatgacgttgaaggtggttatatgaagatagatttatcttctataccacaacataaagaggataaggttcaattattatttgagtcttaccttcttggaatgactaatctgtctaaagattcttctgaatttgttagtacagtagtcatgacacac

SEQ ID NO: 15992 - protein, 112 aa, Streptococcus agalactiae; identical to SEQ ID NO: 2556

SEQ ID NO: 15993 - DNA, 312 bp, Streptococcus agalactiae; identical to SEQ ID NO: 7131

SEQ ID NO: 15994 - protein, 104 aa, Streptococcus agalactiae; identical to SEQ ID NO: 2558

SEQ ID NO: 15995 - DNA, 1176 bp, Streptococcus agalactiae
atggcaagaatcccttatcaaaaaacacttattttttgtgtagccgttattattgctatttttattttggggttatctaaggatttagcacaatctaaagggcaaaaggttgcaaataataatactgtaaaaacagcacgtgtggttgcaaacggagatattttgctgcacgatgtactatatgccagtgcgcgccaacccgacggcacttataattttactccttattttaaagaggtaaaatcttggattgagagcgctgatttagcgattggtgattatgaagggacgattagttcagaatatcctttagcgggctatcctttatttaatgctcctaatgagattgcaactactatgaaagaaactggatatgatgtcgttgacttagcacataatcatattctggattcacaactggcaggtgctatcaatactgtcaagacttttaatcgtctgggattggatactattggggtttatttaaaggatagaaataaagaagatatcttaattaagcgtgtaaatggtattaaaattgctattttaggttattcgtatggctacaatggtatggaagctaatgtttcaaagagtgactatgaaaaacatatgtctgatttagatactaaaaagattaagcaagatattaaaaaggctgaaaaagaagcagatatcaccattgtcatgccacagatggggatagaatatcaaaaaaaacctactacagaacaagtaatactttatcatagtatgattaaatggggggcagatattatattcggaggacaccctcacgttgttgaaccgtctgaagtgataaaaaaagatggccagaaaaaatttattatttactctatgggaaattttatttcaaatcagcgtttagaaacggttgatgatatctggacagaaagaggattattaatggatgtaaccatagagaaaaaaggtcaaaaaacagtaattaaaaaagttaaggcgcatccaacactagtagaagcaaaagcaaatggccgttatgttgaagaaggctttccagcttatgattataggacgctagttttagaggattatattgaaggtggtaagaaacgttctacaattgatcagactatgaaagataaagttgataaagcatataaggaaatgaatgagttagttaatttgaagtgg

SEQ ID NO: 15996 - protein, 392 aa, Streptococcus agalactiae
MARIPYQKTLIFCVAVIIAIFILGLSKDLAQSKGQKVANNNTVKTARVVANGDILLHDVLYASARQPDGTYNFTPYFKEVKSWIESADLAIGDYEGTISSEYPLAGYPLFNAPNEIATTMKETGYDVVDLAHNHILDSQLAGAINTVKTFNRLGLDTIGVYLKDRNKEDILIKRVNGIKIAILGYSYGYNGMEANVSKSDYEKHMSDLDTKKIKQDIKKAEKEADITIVMPQMGIEYQKKPTTEQVILYHSMIKWGADIIFGGHPHVVEPSEVIKKDGQKKFIIYSMGNFISNQRLETVDDIWTERGLLMDVTIEKKGQKTVIKKVKAHPTLVEAKANGRYVEEGFPAYDYRTLVLEDYIEGGKKRSTIDQTMKDKVDKAYKEMNELVNLKW

SEQ ID NO: 15997 - DNA, 1152 bp, Streptococcus agalactiae
atgcgcttcatcaataagttaaaaaataatatggagcatgtactctccatttatccagatgtttcagtaaaaacagatcgtgatagaggacatgtatatctcaatggtacagattatcatgaagttgcagagtccttaaaagagatttttggtatccaagctttttctccatcttttaaagtagaaaaaaatgttgatacattggtaaaagctgtccaggaaattatgacttccgtttataaagatgggatgacttttaaaattaccgcaaaacgtagtgaccactcatttgaattggatagccgtgctctaaatcatactttaggagatgccgttttttcagtcttgccaaatattaaggctcagatgaagcaaccagatatcaatcttaaagtcgagatacgagatgaggctgcttatatttcatatgaggatattaggggtgcaggaggattaccggtaggaacatctgggaaagggatgctgatgttgtctggtgggattgattctccggtagcaggttacctagcgttaaaacgtggtgtagatatagaagcagtccattttgcaagtcctccttatactagcccaggtgcattgaaaaaagcacatgatttaacacgtaaattgacaaaatttggtggtaatattcaatttattgaagttccattcacagaaattcaagaggaaattaaggaaaaagctcctgaagcctacttgatgacgttaacacgtaggtttatgatgcgtattacagatcgtattcgtgaggaccgaaatggtcttgttattattaacggtgaaagtttagggcaggtggcaagccaaacgctagaaagtatgcaagctattaatgctgtcactgcaacaccgattattcgtcctgtggtcacgatggataagctagaaattattgatattgctcaaaaaatagatacttttgatatttcaattcaaccatttgaggattgctgtacaatttttgcaccagatcgcccaaaaactaaccctaaaattaagaatacagaacagtatgagaaacgtatggatgtagaaggtctggtagagagggcagttgcagggattatggtaactactattcaacctcaagcagatagtgatgatgttgatgacttgattgacgatttatta

SEQ ID NO: 15998 - protein, 384 aa, Streptococcus agalactiae
MRFINKLKNNMEHVLSIYPDVSVKTDRDRGHVYLNGTDYHEVAESLKEIFGIQAFSPSFKVEKNVDTLVKAVQEIMTSVYKDGMTFKITAKRSDHSFELDSRALNHTLGDAVFSVLPNIKAQMKQPDINLKVEIRDEAAYISYEDIRGAGGLPVGTSGKGMLMLSGGIDSPVAGYLALKRGVDIEAVHFASPPYTSPGALKKAHDLTRKLTKFGGNIQFIEVPFTEIQEEIKEKAPEAYLMTLTRRFMMRITDRIREDRNGLVIINGESLGQVASQTLESMQAINAVTATPIIRPVVTMDKLEIIDIAQKIDTFDISIQPFEDCCTIFAPDRPKTNPKIKNTEQYEKRMDVEGLVERAVAGIMVTTIQPQADSDDVDDLIDDLL

SEQ ID NO: 15999 - DNA, 1143 bp, Streptococcus agalactiae
atgatttattttgataattcggcaactactattccctatccagaagttttaaggacttatcaagaagtagctagtaaaatctatggaaacccctcaagtttacatgagctaggaacaacatcttctcggattttagaggctagccgtaaacaaattgctagtttacttgagcttaaagcaaatgaaattttctttacctctggtggtacagaggccgataattgggttattaagggtcttgcgtttgagaaacaacattttggaaatcatattattgtttctgatatcgaacacccagctgttaaagagtctgctaaatggcttggagagtatgggtttgagattgattatgcgccagtagatgataaaggatttgtagacgtagaagcactggtcaaattaattaaaccagaaacgattcttatttcaattatggcaataaacaatgaaattggttctattcagccaataaaagctatttcagacttgttgtcagataaacctactatatcgtttcatgttgatgctgttcaagcaataggtaagataccgactaaagattatttgactgagcgagttgattttgcatctttttctagtcataaatttcacggcgttcgtggggttggctttctatatattaaagaaggaaaacgtatttcaccattactaacaggtggtggacaagaatctgatttacgttcaactactgagaatgtcgcagggattgcagctactgctaaagctttacgaatggttatggacaaggaagtagtagctattcctaaaataagtaaaatgaaaaccattattcatgatgaattagccaaatatgaggatattacgttattttcgggtaaggaaggtttttcacctaacattatcacgtttggtatcaagggtgtccgaggagaagttcttgtccatgcctttgagggacatgatatttttatctcgacaactagcgcttgctcttctaaagcaggtaaaccagcaggaactcttatagcaatgggaatttcaactaagttagcccaaactgctgtacgtatcagcttagatgatgataatgatatgggacaagtagagcaatttttaactatttttaaacaagtttatgaaaaaactaagaaagttagagga

SEQ ID NO: 16000 - protein, 381 aa, Streptococcus agalactiae
MIYFDNSATTIPYPEVLRTYQEVASKIYGNPSSLHELGTTSSRILEASRKQIASLLELKANEIFFTSGGTEADNWVIKGLAFEKQHFGNHIIVSDIEHPAVKESAKWLGEYGFEIDYAPVDDKGFVDVEALVKLIKPETILISIMAINNEIGSIQPIKAISDLLSDKPTISFHVDAVQAIGKIPTKDYLTERVDFASFSSHKFHGVRGVGFLYIKEGKRISPLLTGGGQESDLRSTTENVAGIAATAKALRMVMDKEVVAIPKISKMKTIIHDELAKYEDITLFSGKEGFSPNIITFGIKGVRGEVLVHAFEGHDIFISTTSACSSKAGKPAGTLIAMGISTKLAQTAVRISLDDDNDMGQVEQFLTIFKQVYEKTKKVRG

SEQ ID NO: 16001 - protein, 450 aa, Streptococcus agalactiae
ATGTCAAAAGGATATTCAAGACAACAGAAAAAGTCTACTAAGACTAATACTGATTCAACTCAATCACCCGCTAAGCATATAAAAACAGGTTTTTCTGCACTTCAAAAAACAATTGCATTAGTCGGTAGTGTTTTAAGTATTATCGTTGCCTCTATTACTATTACTAATGCGATTAATAATCACAAAGACTCTAGTAAGACTGATTCTTCTACTTCAAAAACCGTCATTATAAGAGAAAGTGGACAAAATTCTAGTAACCAAGTTTCTACTGAAAAAGATGAGACAAGGGCATCATCCAGCCAAACACTAGAAAATTCCTCTGCTAGTAGTACTCCGAGTAGCAGTTCAAATTCTGCTGCCAATAACGATCAAACATCATCTAGTACTAACAATGATCAAACAAATAATACTACTACCGATACCTCAACTATTGAAAATACAACAACACCT

SEQ ID NO: 16002 - protein, 150 aa, Streptococcus agalactiae; identical to SEQ ID NO: 2568

SEQ ID NO: 16003 - protein, 1347 aa, Streptococcus agalactiae
ATGTCAAAACAATATGATTATATCGTTATTGGTGGAGGTAGTGCAGGCAGTGGTACCGCTAATAGGGCAGCCATGTATGGAGCAAAAGTCCTGTTAATTGAAGGTGGACAAGTAGGTGGAACTTGTGTTAACTTAGGTTGTGTACCTAAGAAAATCATGTGGTATGGTGCACAAGTTTCTGAGACACTCCATAAGTATAGTTCAGGTTATGGTTTTGAAGCCAATAATCTTAGTTTTGATTTTACTACTCTAAAAGCTAATCGCGATGCTTACGTGCAGCGGTCTAGACAGTCGTATGCCGCTAATTTTGAGCGTAATGGGGTCGAAAAGATTGATGGATTTGCTCGTTTTATTGATAACCATACTATTGAAGTGAATGGTCAGCAATATAAAGCTCCTCACATTACTATTGCAACAGGTGGACACCCTCTTTACCCTGATATTATTGGAAGTGAACTTGGTGAGACTTCTGATGATTTTTTTGGATGGGAGACCTTACCAAATTCTATATTGATTGTTGGGGCGGGCTATATCGCGGCAGAACTTGCTGGAGTGGTTAATGAATTAGGCGTTGAAACCCATCTTGCATTTAGAAAAGACCATATTCTACGCGGATTTGATGACATGGTAACAAGTGAGGTTATGGCTGAAATGGAGAAATCAGGTATCTCTTTACATGCTAACCATGTACCTAAATCTCTTAAACGCGATGAAGGTGGCAAGTTGATTTTTGAAGCTGAAAATGGGAAAACGCTTGTCGTTGATCGTGTAATATGGGCTATCGGCCGTGGACCAAATGTAGACATGGGACTTGAAAATACCGATATTGTTTTAAATGATAAAGATTATATCAAAACAGATGAATTTGAGAATACTTCTGTAGATGGCGTGTATGCTATTGGAGATGTTAATGGGAAAATTGCCTTGACACCGGTAGCAATTGCAGCAGGTCGTCGCTTATCAGAAAGACTTTTTAATCATAAAGATAACGAAAAATTAGATTACCATAATGTACCTTCAGTTATTTTTACTCACCCTGTAATTGGGACGGTAGGACTTTCAGAAGCAGCAGCTATCGAGCAATTTGGAAAAGATAATATCAAAGTCTATACATCAACTTTTACCTCTATGTATACGGCTGTTACCAGTAATCGCCAAGCAGTTAAGATGAAGCTCATAACCCTAGGAAAAGAGGAAAAAGTTATTGGGCTTCATGGTGTTGGTTATGGTATTGATGAAATGATTCAAGGTTTTTCAGTTGCTATCAAAATGGGGGCTACTAAAGCAGACTTTGATGATACTGTTGCTATTCACCCAACTGGATCTGAGGAATTTGTTACAATGCGC

SEQ ID NO: 16004 - protein, 449 aa, Streptococcus agalactiae
MSKQYDYIVIGGGSAGSGTANRAAMYGAKVLLIEGGQVGGTCVNLGCVPKKIMWYGAQVSETLHKYSSGYGFEANNLSFDFTTLKANRDAYVQRSRQSYAANFERNGVEKIDGFARFIDNHTIEVNGQQYKAPHITIATGGHPLYPDIIGSELGETSDDFFGWETLPNSILIVGAGYIAAELAGVVNELGVETHLAFRKDHILRGFDDMVTSEVMAEMEKSGISLHANHVPKSLKRDEGGKLIFEAENGKTLVVDRVIWAIGRGPNVDMGLENTDIVLNDKDYIKTDEFENTSVDGVYAIGDVNGKIALTPVAIAAGRRLSERLFNHKDNEKLDYHNVPSVIFTHPVIGTVGLSEAAAIEQFGKDNIKVYTSTFTSMYTAVTSNRQAVKMKLITLGKEEKVIGLHGVGYGIDEMIQGFSVAIKMGATKADFDDTVAIHPTGSEEFVTMR

SEQ ID NO: 16005 - protein, 1710 aa, Streptococcus agalactiae
ATGAAAGAACTAGAAGAAATCGTAGTTTTCCCTATAAACAAAAGTTTGGATTACATTTTGGAAAATCATTCGTCAGTTATTCGCTTTGGGGACGGTGAATTTGACATTATAATGGGAAAATCGATTCCTTATCAAGATTACAACCCAGAGTTAGCAGATAGGTTATTGCAACTTCTTCATAAGCAAAGTACGAATGATCTATTAGTATGTCTTCCAGATATGTTTCAAAATCGACAAAGATATAATCAATCGGCACAACTTTTTTGGAAAAATCATTTTCAAAAATTTGGCAATTTCTATAGGCAACATTGTTATCAAGATTGGTATGGTTCTTCTTTTATTTCAAGGCCATATATGGACTTACAAGATAAGGAGTCTGCTGTAGAATCATTTAAAAAATTAAAGTTACTTTGGGACAAACGCGATATTTTGGTAGTTGAAGGGGAAACTTCGCGGTCGGGTGTAGGTAATGATCTTTTTAATAATTGCAATAGTTTAAAAAGGATTATTTGTCCTTCTAAAAATGCTTATATAAAATATGATGAAATTCTTGAGGCTGTTGAAAGATATGCTCAAGGGAGGATAATCTTATTGATGCTAGGTCCGACTGCAAAAATTTTAGTAAGAGATTTATCTGATAGAGGATTTCAAGCCATTGATATCGGTCATATTGTTTCTGAATATGAATGGTATAAGATGGGAGCTACTCAAAAAATAAAATTTTCTCATAAACACACCGCTGAGTTTAACGATGATGAAAATATTAATTTAATTGACAGTCAGAATTATATTGATGAGATTGTTAAAACAATAACTATCGATGATACTGAATTCAGGGATACTGAATTAATATCAATCATACTTCCTGTCTATAATATGTCTGGTTCTTTATCAAGGTGTTTAGATTCTATCCTTAGGCAAGTTTACTCAACTTTTGAGGTGATCTTAGTCAACCATGGTTCTACAGATGGAAGTGGTAATATTTGCGAGAAATATGCGATGAAGGATGAGCGTATTCGTTTATTTCATGAAGAACATCAAGTTATTACATCTGTATGGAACTTCGCATTAGAGAAATCTAAAGGGAAGTATGTTACTTTTGTGAATCCAGATGATTTTCTTGATGAGTCTTACTTAAATTATCTTTACAATAAATTAAGAGCTAATAAATCTGATATCTCAGCAACCACCTATACTTTTTTTAATGAAGAGGAAAAATGCTTTGTTTATTTTGCAACAGATGATAATTATTTTGAGAAAACATTCTTTGCTCAAGAATGGTTAGAGCAAGAACATAGTTACCACGATAATTTAAAACAAATATTTCCTCTCCTTTCTATGAAGCTCTTTAGAAAATCACTTTTTAACAATATCACTTTTCCTTTAGAAGATTTAACAGGAGAATACACACTGTATAATGTTTATTTGCTATCAAGGCACATTACATTTTCTCATATTGGTTTATACATAACCTCTCAAGTTTTCTCTCATACTGAAATAAAAAGATTCACGGGACATGATATAGAGAAGATGCTATCTAGAAAGGAAGAGAGGTTAGCCCTGTTAACAATGGTAGGGTTTAATTCTGAGAAATACATCAAAAATTATAAGGAAACTTTATTAAATTATCAAAGTGAGTCGTTGAATATAGGTGATATTAATTTATATAATAAAATTAAGCAAAAGATTGCATTGATAGATTATTGTTAC

SEQ ID NO: 16006 - protein, 570 aa, Streptococcus agalactiae
MKELEEIVVFPINKSLDYILENHSSVIRFGDGEFDIIMGKSIPYQDYNPELADRLLQLLHKQSTNDLLVCLPDMFQNRQRYNQSAQLFWKNHFQKFGNFYRQHCYQDWYGSSFISRPYMDLQDKESAVESFKKLKLLWDKRDILVVEGETSRSGVGNDLFNNCNSLKRIICPSKNAYIKYDEILEAVERYAQGRIILLMLGPTAKILVRDLSDRGFQAIDIGHIVSEYEWYKMGATQKIKFSHKHTAEFNDDENINLIDSQNYIDEIVKTITIDDTEFRDTELISIILPVYNMSGSLSRCLDSILRQVYSTFEVILVNHGSTDGSGNICEKYAMKDERIRLFHEEHQVITSVWNFALEKSKGKYVTFVNPDDFLDESYLNYLYNKLRANKSDISATTYTFFNEEEKCFVYFATDDNYFEKTFFAQEWLEQEHSYHDNLKQIFPLLSMKLFRKSLFNNITFPLEDLTGEYTLYNVYLLSRHITFSHIGLYITSQVFSHTEIKRFTGHDIEKMLSRKEERLALLTMVGFNSEKYIKNYKETLLNYQSESLNIGDINLYNKIKQKIALIDYCY

SEQ ID NO: 16007 - protein, 993 aa, Streptococcus agalactiae
GTGAGGACATATATTACAAACTTGAATGGACATTCAATCACTAGTACAGCACAAATAGCTCAAAACATGGTAACAGATATAGCAGTAAGCTTAGGTTTTCGTGAGCTGGGAATACATTCTTATCCGATTGATACTGATTCTCCTGAGGAAATGAGTAAGCGTTTAGATGGAATCTGTTCCGGACTTAGAAAAAATGATATTGTCATATTTCAGACACCTACATGGAACACTACAACTTTTGATGAAAAATTATTTCACAAATTAAAAATATTTGGTGTAAAGATTGTTATTTTTATACATGATGTTGTACCGCTAATGTTTGATGGAAATTTTTATTTGATGGATAGAACTATAGCTTATTATAATGAAGCAGATGTTTTAATAGCCCCTAGTCAAGCAATGGTCGATAAGCTTCAAAGTTATGGCTTGACAGTAAAAAAAATCTTAGTTCAAGGAATGTGGGATCATCCCACCAATATTACTTTACAAGCAGTTAATCATAAGAAGCTTGTTCATTTTCCTGGGAACCCAGAGCGGTTTAACTTCATAAAGAATTGGAGAATTCCTACCGAGTTACATGTTTATACTGACCATAACATGCAATTACCCACCACTGTGGTTAAAGAGCCATATCAATCGGACGAACAATTAATTATGAAAATGAGCGAAGGGGGATATGGCTTAGTCTGGATGGATGACCGTGATAAACAATATCAATCTCTTTATTGCCCTTACAAACTGGGCGCTTATATAGCAGCAGGAATTCCAGTGATTATTCAAAAAGGTATTGCTAATCAAGATATAATAGAAAAAAATAATTTGGGATTTATTATTGAAAAAATTGATGATATTAGTAATATAGTTGAAAGTACTACTGAAGAGGAATATATGGAAATTGTTAGCGATGTCAGGCGGTTTAATCCTTTAGTTAGACAAGGATATTTTACGCGAAAACTATTAACCGATGCAGTATTTAGTGCATTAAATAGCATG

SEQ ID NO: 16008 - protein, 331 aa, Streptococcus agalactiae
MRTYITNLNGHSITSTAQIAQNMVTDIAVSLGFRELGIHSYPIDTDSPEEMSKRLDGICSGLRKNDIVIFQTPTWNTTTFDEKLFHKLKIFGVKIVIFIHDVVPLMFDGNFYLMDRTIAYYNEADVLIAPSQAMVDKLQSYGLTVKKILVQGMWDHPTNITLQAVNHKKLVHFPGNPERFNFIKNWRIPTELHVYTDHNMQLPTTVVKEPYQSDEQLIMKMSEGGYGLVWMDDRDKQYQSLYCPYKLGAYIAAGIPVIIQKGIANQDIIEKNNLGFIIEKIDDISNIVESTTEEEYMEIVSDVRRFNPLVRQGYFTRKLLTDAVFSALNSM

SEQ ID NO: 16009 - protein, 1326 aa, Streptococcus agalactiae
ATGATTATACTATTTGATTTCTTTGATAAGAAAAGCAAAGATCTATATTATTCTTTAATTACTTCAGGTTTACATGGAAATGCTGTGGTCATTAATGACGATGGTTTTCTTCCACAAAATATAAATTCTCCTTATTCATTTTTTTGTAATATGGAAGGGAAAAATGGGAATCCTCTTTATTTTAACCAAGTCCCACTCCCTGACCTTTGGGAGATAAAGGGAAATAATATAGAGGCTGAAATTTGGGATTTTAGTATTAAAAGAGCTAAAATTTTTTATCAAGAGCCGAAGTATAAACGTCAAGTAAAAAATATTGATTGGTTTGACAATAATAAAAAAGTGAGATACACAGATCATTATAATCGCTTCGGATGGTGTTTTGCACGTACACATTTTGATAAGAATCAAAATGTGACTACAAAATCTTATTTCGATAAGGATGGTAAAGAAGTTATTGTTGAAAATTTTAGAACAGGAGTTATAATCCTTAATTGGCTAAATAAAGATTATTTTTTTGATAATCGAGTTGCATTCTTAAATTTTTATTTTAGCCTTATGGGTTGGAACTTGTCTCGAATATGGTACAACTCCTTATCAACTCCATTTTTCGTTTCTTACCGGATGACTTATCCAGGAGAAGATATTTTATTTTGGCAAGAAGATATAGAGGATACTATTCCTGCTAATATGCGCGTGTTATTAGAAAGTACGAATACTAGAACTCAGAAAGTAATTGTTCAAAAGAAAAATACATATCATAAAATAAAGTCAATGTTACCTAAAGAACAACAAGAAAAAATTGGTTATTTAGGCTTTATATATCCTAATAAAAAGAACAATAAGGGTAGGAAAGATATTTTTATTTTGACAAACTCTGACCAAATTGAACATTTAGAAGTGTTGGTTCATCACTTGTCTGATTATCATTTTCATATTGCAGCGTACACAGAAATGTCTTTTAAGTTGATGTCATTTAGCCAAGAACAAAATGTAACGCTATATCCGAATATTTCAAGAACTGATTTAGACAACTTATTTGAAATCTGTGATATTTATTTTGACATTAATCATGGAAATGAAGTTGATGATGTTATTAGAAGGGCATTTGAATATAATCACCTTATCTTTGCTTTTGATAATACCTGTCATAACAGAGAGTTAGTATTAGATAGCAATATCATTTCTCACACAACCTGTGAACAATTGATAAATTTAATGAAAAATTTATCAGGCTCCATTATGTATTTGCTAGAGCAACAAAGAGAACAAACAAGTAATGAAACAAAAGAGCGTTATAAAGAAATATTAGGAGGGTATGGAAATGCC

SEQ ID NO: 16010 - protein, 442 aa, Streptococcus agalactiae
MIILFDFFDKKSKDLYYSLITSGLHGNAVVINDDGFLPQNINSPYSFFCNMEGKNGNPLYFNQVPLPDLWEIKGNNIEAEIWDFSIKRAKIFYQEPKYKRQVKNIDWFDNNKKVRYTDHYNRFGWCFARTHFDKNQNVTTKSYFDKDGKEVIVENFRTGVIILNWLNKDYFFDNRVAFLNFYFSLMGWNLSRIWYNSLSTPFFVSYRMTYPGEDILFWQEDIEDTIPANMRVLLESTNTRTQKVIVQKKNTYHKIKSMLPKEQQEKIGYLGFIYPNKKNNKGRKDIFILTNSDQIEHLEVLVHHLSDYHFHIAAYTEMSFKLMSFSQEQNVTLYPNISRTDLDNLFEICDIYFDINHGNEVDDVIRRAFEYNHLIFAFDNTCHNRELVLDSNIISHTTCEQLINLMKNLSGSIMYLLEQQREQTSNETKERYKEILGGYGNA

SEQ ID NO: 16011 - protein, 1518 aa, Streptococcus agalactiae
ATGGTAGTTTATAATTTGAATAGAGGGATAGGTTGGGCAAGTAGCGGTGTAGAGTATGCTCAAGCATATCGTTCAGAAGTTTTTAGAAAGTTAGGTGTTGAAGCTAAATTTATTTTTACTGATATGTTTCAGAATGAAAATATAGAGCACCTTACTCGAAATATCGGCTTTGAAGACAATGAGATTATATGGCTTTATACTTTTTTTACTGATTTAACAATTGCTGCAACTTCTTATTCACTGCAACAATTGAAAGAAAGTTTTTCACTACCGATTGATAGGACTGAGAAAAACGGTAAAATAATATCATTTTTTTTTAAAGGAAGTAGTATTGTAGTTACAGTTATGCTTAACGATGAATCTAGTAACATCGTCCAAAGGGTAGAGTATCTTATGGGGGGAAAGCTTGTTAGAAAAGACTACTACTCATATACTAAAATGTTTTCAGAATATTATGCTCCCGAAGATATAGGTCCATGCCTGTATCAGCGTACATTTTATAATGAAGATGGAAGTGTTGCATATGAAGAAAATGTAGATGGCGAGAATAGTATTTTTAAATTCAAAGAAACTATACTATATTCTAAAGAAGAATTAGTTGGATACATGTTAGAAAAATTACAATTAACGAATAGTGATCTAATCTTGTTAGACCGCTCTACAGGCATTGGGCAAGCTGTTCTAAGGAATAAAGGAAATGCTAAAGTAGCTGTTGTTGTTCATGCAGAGCATTATAATGTTAGCGCAACTGATGAAACTACGATTTTATGGAATAATTATTATGACTATCAATTTTCAAATGCTGATAGCATAGATGCTTTTATCACCTCAACAGAAACGCAAACTAAGACGTTGATTGATCAATTTAAAAAGTATTTAAATATTGAACCGGTCGTTTATACAATTCCTGTAGGAAGTTTATCAAAATTACAGAGAAAAGAGTGGCATGAAAGAAAAGCTTTTTCGTTGTTAACTTGCTCACGTCTAGCTTCGGAAAAACATATTGATTGGTTAATTAATGCTGTGGTAGAAGCTAATAAAGTAATTCCTGAATTAACCTTTGATATTTATGGTGAAGGTGGCGAACGGCAAAAGTTACAAGAAATAATTGCTAAAAATAAGGCAAATAATTATATACGATTAATGGGGCATAAAAACCTATCTTCTGTTTATAAAGATTATCAAGTTTATTTATCGGGTTCTACCAGTGAAGGTTTTGGTTTAACCTTGATGGAGGCAATCGGATCGGGGCTTCCGATAATTGGTTTAGATGTTCCGTATGGTAATCAGACCTTTATTGAAAATAATTTGAATGGCTACCTTATTCCAAGGGAAACACCAGATAATCCTCAACAAATATCAACTGCTTTTGCTCAGTATATTGTTGCTTTATTTAATTCTAAAGATATTTGTAAAAAACACGAGTATTCTTATAGAATAGCTAGTAGATTTTTAAATGATAAAATTATAGAAAATTGGAGTTTTTTTTTGAGGAGGTTATTAAATGATTATACTATT

SEQ ID NO: 16012 - protein, 506 aa, Streptococcus agalactiae
MVVYNLNRGIGWASSGVEYAQAYRSEVFRKLGVEAKFIFTDMFQNENIEHLTRNIGFEDNEIIWLYTFFTDLTIAATSYSLQQLKESFSLPIDRTEKNGKIISFFFKGSSIVVTVMLNDESSNIVQRVEYLMGGKLVRKDYYSYTKMFSEYYAPEDIGPCLYQRTFYNEDGSVAYEENVDGENSIFKFKETILYSKEELVGYMLEKLQLTNSDLILLDRSTGIGQAVLRNKGNAKVAVVVHAEHYNVSATDETTILWNNYYDYQFSNADSIDAFITSTETQTKTLIDQFKKYLNIEPVVYTIPVGSLSKLQRKEWHERKAFSLLTCSRLASEKHIDWLINAVVEANKVIPELTFDIYGEGGERQKLQEIIAKNKANNYIRLMGHKNLSSVYKDYQVYLSGSTSEGFGLTLMEAIGSGLPIIGLDVPYGNQTFIENNLNGYLIPRETPDNPQQISTAFAQYIVALFNSKDICKKHEYSYRIASRFLNDKIIENWSFFLRRLLNDYTI

SEQ ID NO: 16013 - protein, 2394 aa, Streptococcus agalactiae
ATGAAAAAAGTTGTTGTTAAACCCAAAATCTCTATTCTAAATAAATTGAGATTGCAAAGAATTCAAAAAATTGTAAACGAGATAAATAATAAAAAAGTGTACTACGCTCAATTATCAGATAAGGAGTTAAGCCATCAAACTTTAATATTAAAAAATAGACTTTCAAGTGGAGAAAGTCTAGATGATATTCTTGTTGATGCTTTTGCTGTGATAAGAGAGGCTAATAAAAGAATTTTAGGTTTGTTTCCATATGATGCTCAGGTTATGGGTGCTATTGCTCTTCATCAAGGAACGATAGCTGAAATGAAAACGGGAGAAGGAAAAACATTAACTGCAACTATGCCCTTGTATCTGAATGCTTTAACTAGCAAGGGAGCAATCTTAGTGACGACCAATGATTATTTGGCAAAACGAGATGCATTAGAGATGGGAAAAGTATATCAATTTCTAGGTATGACAGTTGGTATTAATGTTTTTGATAAAAAAGAAGAAGCAGATGCGACTATTAAGAGAGAAGTATATGAATCTGATATTACTTATACTACTGCAGGTGCCTTAGGTTTCGACTATCTCGTTCACAATCTGGCTAGTAATAAACTAGAACAATTTCTAAGACCTTTTCATTTTGTTATCGTTGATGAAGCAGACTCTGTTTTGTTAGATATTGCTCAAACACCCTTAATTATAGCGGGAGATCCTCGTGTACAATCTAATCTCTATGGTATCACTAATAATTTTGTACTCACTCTTAAGGAAAATGATGAATATATCCATAAAGCTAAGGATAAAATTGTCTATCTTACTGAGAAGGGTGTAAGTTACGCAAAACAGTACTTCAATATTTCAGAATTATATAATGATGAGTATTGGGAATTAAATAGACATATAAACCTAGCATTGCGTGCTCATTGTTTGTATAAAAGAGATTATGATTATGTAGTTAAAAATAATGAAGTAAAATTGTTAGATAACGCAACAGGTCGTGTTATGGAAGGCACAAAACTTCAATCAGGGATTCACCAAGCTATTGAAGCAAAAGAAGATGTTGCTTTGACAAATGAATCTAGGGCAATTGCTTCAATAACGTATCAAAGTCTCTTTAATATGTTCCCAAGGTTGTCTGGGATGACAGGAACTGGAAAATCTTCTGAAGATGAACTTATAAAAACTTACCACCTGCCTGTTATTGTTATACCAACAAATTTTCCGATCAAACGAGTAGATCTTGCCGATAAAATATATGTTAGCTTACCAGAAAAGTTGCAAGCTACTATAGATGATGTTAAACAAAGACATAGTAAAGGTCAGCCAGTATTGTTAATTTCTGGAACAGTTGAAATTGCTAACATTTATTCAAAGTTATTGCTGCGAGAAGGCATTGCCCATAATACCTTAACAGCTGATAATGTTGTTAAAGAGGCACAAATTATAAAAGAAGCGGGACAAAAAGGTTCAGTAACATGTGCAACAGTTCTTGCTGGTCGTGGAACAGATATTAAACTAGGTGAAGGGGTTAGAGAATTAGGAGGACTTGCAGTTATAGGAACGGAAAGGATGCCTAATTTACGTATGGACTGGCAGCTTAGGGGCCGTTCGGGGCGTCAAGGAGACCCAGGGATTAGCCAATTTTATGTGTCGCTAGAGGATGAATTAATTGTTTCTCATTCTCCGGAATGGGTGATAAAGTATTTAAAAAAATATTCTCGTAAAGAAACTTCAAATTACTATATGGTACCTAGAAAGAAACGCTTTTTTTATCAAATAGTTAAAAATGCTCAACTCAGAAGTGAAGATAAAGGTGTATCTTCTAGGGAGCAAACTATTAAGTTCGGAGAGAGCTTGCGTATACAGCGTGAAAATATTTATCAATTACGAAATGAATTAATAGCTGATAGTTCCATTGTGGTTGATGGTGTGATAAAAATTATTCAGGATAATTTTAACGATATTGCTAATGATAAGGATTTAACGGAACATTCTTTACGAAGATATATATTAGAAAATCTTACCTATAAATTTAAATATTTCCCTGATGAATTTGACGTTCATAATTCTGACGATGTATTTAAATTATTGATTGACATATTTGATAGAGAATTTACTGCAAAGAAAACTAAACTTCAAAGTGATAATGAATTTGATAATTTCGTCAGAATATCGATATTAAAGGCTATTGACAAATCGTGGATAGAAGAAGTGGATAGCCTACAGCAATTAAAGGGAGTTGTAACCAATAGAGGTATCGGTCAACGAGATATTATTCAAGAATATTATAAAGAATCGCTTAATTCTTACTATAAGATGGGAAAAGAAATAAGATATTCTATCGTTAAGAATATTATGTTAAGTACAATTTCAAAAGCAAGTGATGGAAGTTACTCAATATATTATGTA

SEQ ID NO: 16014 - protein, 798 aa, Streptococcus agalactiae
MKKVVVKPKISILNKLRLQRIQKIVNEINNKKVYYAQLSDKELSHQTLILKNRLSSGESLDDILVDAFAVIREANKRILGLFPYDAQVMGAIALHQGTIAEMKTGEGKTLTATMPLYLNALTSKGAILVTTNDYLAKRDALEMGKVYQFLGMTVGINVFDKKEEADATIKREVYESDITYTTAGALGFDYLVHNLASNKLEQFLRPFHFVIVDEADSVLLDIAQTPLIIAGDPRVQSNLYGITNNFVLTLKENDEYIHKAKDKIVYLTEKGVSYAKQYFNISELYNDEYWELNRHINLALRAHCLYKRDYDYVVKNNEVKLLDNATGRVMEGTKLQSGIHQAIEAKEDVALTNESRAIASITYQSLFNMFPRLSGMTGTGKSSEDELIKTYHLPVIVIPTNFPIKRVDLADKIYVSLPEKLQATIDDVKQRHSKGQPVLLISGTVEIANIYSKLLLREGIAHNTLTADNVVKEAQIIKEAGQKGSVTCATVLAGRGTDIKLGEGVRELGGLAVIGTERMPNLRMDWQLRGRSGRQGDPGISQFYVSLEDELIVSHSPEWVIKYLKKYSRKETSNYYMVPRKKRFFYQIVKNAQLRSEDKGVSSREQTIKFGESLRIQRENIYQLRNELIADSSIVVDGVIKIIQDNFNDIANDKDLTEHSLRRYILENLTYKFKYFPDEFDVHNSDDVFKLLIDIFDREFTAKKTKLQSDNEFDNFVRISILKAIDKSWIEEVDSLQQLKGVVTNRGIGQRDIIQEYYKESLNSYYKMGKEIRYSIVKNIMLSTISKASDGSYSIYYV

SEQ ID NO: 16015 - protein, 543 aa, Streptococcus agalactiae
GTGATTAAAAAAAGAATACAGAAGGTGCTTTGGACTGATAGTAGCAATGTTTATCTTTATGGTTCGACTATAAAGTATTTGGAGCATAATCGTGTTTTTTTTGAGAATCTAAGATTCTCTACAGGAAAAACAATCAAAAAATGGCTTTCTAAAACGAATTTTCAAGCTAATAGAACGTTGCCAGAGCTTACCTTACTAAAACCTAATCATACCTATGAGTTGGTATCAAAATTAACTACTGTGCCTGAGGGATGCGTGATTATTCAGATAAATTTTTATAATCGTCAAAAAGAAAAAATAGGTTTTTCTATTATTCGAGATCACTCCTCAGATTTTATAGTTCCTGATGACACATATTTTTATGATATTTCTCTTATTGGTGCGGGTTGTATAAGTGTAGAATTTTGTTACCTAGAATTATTTGAAGTAATTGAGACTCAAGAAGAAAAAGATGGTATTGAACTAAACAGTTATGTTGAAAGCAGCTTACCATCAGAGCTTGAACTTATTAGAACGTTGATAGCATTTTCTAAGGATAAAAAA

SEQ ID NO: 16016 - protein, 181 aa, Streptococcus agalactiae
MIKKRIQKVLWTDSSNVYLYGSTIKYLEHNRVFFENLRFSTGKTIKKWLSKTNFQANRTLPELTLLKPNHTYELVSKLTTVPEGCVIIQINFYNRQKEKIGFSIIRDHSSDFIVPDDTYFYDISLIGAGCISVEFCYLELFEVIETQEEKDGIELNSYVESSLPSELELIRTLIAFSKDKK

SEQ ID NO: 16017 - protein, 1587 aa, Streptococcus agalactiae
ATGGAAAAATTAAAAATTTTGCAGATTGGTGAGGAACCATGGGATGCTGATTTAATAACTCCAGACAATATTGAATGGTTATACTGTAATGGAAATGCTATTCAAATTTTCTTAGAGAAATTAAAAAGTAAAGAGTTAGAAAAAAATAATGTTGAATATATTGGTAAAACTTCAACTAATGAAGTTAAATTATGGTTTAATGCGGTCATTTTAACTAGTGAGGTTAGCGAATTGCAATTGAACCTACTTTCAGATTGCTTAGAAGCGCATACACTCTTTTACGACGAGGATTTTCAACTCGATTTTTGCTCAGAAAACGGTATATTTAAACGTAAGGTTTTGAGACCACTACCATTTAATGGATCAAGGAAAGAAAAAATTATTTTCCTAAGCCGTACTCTTTTTTCGGAACAATATGGTGCAAAATTGAAGGTTTCTGACATAGATCTAAATCCTGATTTTAAGGGAGAGATAATATATGAAGGCAATAGCTCTATTTGTTTTTCAGGGAATTTTGGAGAAGATTTTCAACCTCTATTCTCATTTCGCTATAATTTATCCTCTACTGATAAAGCGATAGAAATATGGCAAGAATATCAAAAATTGCAAGGTGATAATAGTATTATGATAGAAGTCATTCAATACCAAAAAGGATCACTTGATTTGATATTAAATACAAAATACCTTTCAGAAAATGATTTGGCTGATCCATATATTTTAGAATATGATGAATCAGTTGGTTTTTCATCAATTTCTATCTTTGCTAGAGGTGACGGAGTGGTGAGATTTGGTGCACTACATTGGCGATATTCGCGTAAAGGTTTGGGTCAATTTTTAATCGGTGGAGAAAGGTACAGTGATTCCAAAAGGCAAGAGTTTATCTACTATTTTAACCCTGGAGATATGAAACCTCCATTGAATGTTTATTTTTCAGGTTTTCGAGGAGCCGAAGGTTTTGAGGGTTTTTACATGATGAAACGTTTGGGAGCTCCGTTTCTCTTAATTGGTGATCCAAGGATTGAAGGTGGAAGCTTCTACCTAGGTACTTCAGAATACGAAAGTGAATTAGAAAATGTTTTACAAAAATATTTAGATTACCTACAATTTGATCATTGTCAACTTATTTTATCAGGTTTATCTATGGGAAGTTTTGGTGCCCTTTATTATGGTTCTACTTTTTCCCCCCATGCTATAGTTGTGGGGAAACCCTTTACAAATTTAGGCGATATGGTAGTAAATTTAAAATTAAGAAGACCAGATGATTTTGAAACGAGTATGGATATTCTCCAAAATATTATTGGTTCTCAAAACGATGAAGCTATTAATCAATTTAATCAAAAATTTTGGAATAAGTTTAAGCGTTCTAATTTTGAAAAAACGCAGTTTGCTATATCTTATATGAAACATGATGATTATGATAGAAATGCAACTCCAAGGCTGATTGATTATTTTTCTAAAACTAACACCCTGTTGTATGCAAGTGGATATGCTGGGCGACATAATGATAATAGTCAATCAATAAATAATTGGTTTACTTCTCAGTATAAAACAATTCTCAGTGATGATTTTGGGAGAGTGTTTAGTGAT

SEQ ID NO: 16018 - protein, 529 aa, Streptococcus agalactiae
MEKLKILQIGEEPWDADLITPDNIEWLYCNGNAIQIFLEKLKSKELEKNNVEYIGKTSTNEVKLWFNAVILTSEVSELQLNLLSDCLEAHTLFYDEDFQLDFCSENGIFKRKVLRPLPFNGSRKEKIIFLSRTLFSEQYGAKLKVSDIDLNPDFKGEIIYEGNSSICFSGNFGEDFQPLFSFRYNLSSTDKAIEIWQEYQKLQGDNSIMIEVIQYQKGSLDLILNTKYLSENDLADPYILEYDESVGFSSISIFARGDGVVRFGALHWRYSRKGLGQFLIGGERYSDSKRQEFIYYFNPGDMKPPLNVYFSGFRGAEGFEGFYMMKRLGAPFLLIGDPRIEGGSFYLGTSEYESELENVLQKYLDYLQFDHCQLILSGLSMGSFGALYYGSTFSPHAIVVGKPFTNLGDMVVNLKLRRPDDFETSMDILQNIIGSQNDEAINQFNQKFWNKFKRSNFEKTQFAISYMKHDDYDRNATPRLIDYFSKTNTLLYASGYAGRHNDNSQSINNWFTSQYKTILSDDFGRVFSD

SEQ ID NO: 16019 - protein, 1575 aa, Streptococcus agalactiae
ATGTTTTATTTTATTCCTTCGTGGTACAATTCTGATCAAAAGTGGCATAATGAAGCTCCTATCTGGTATCGTGTATTGGAGAACATGACTTTTGATGATACTGTTAGTCAGGTTAGAATGTTTCAGAATGCAGATGAGGAAGTGCGTTTACTTCTATTTAGTTATAATCCTCAGTTGAGATACATGCTTCATGAAGAGAGTATGTTGGCTGTCTCTTATTGGTCTTTTTTTGACGATATTCAAAATATTCAACAAAAAGAGATTAAGTTAATTAATTTTAAAGAACTGAATTGGCCTAAAGGGACTTATTTTGTTTATACACCTTTTTTAGTATTAGCTAAACATGGTGGCGAGATTATTGCACGTATCCAATTTGCGGAAAATGGGAATTTACTACTGATTGAACTTTTAATAGATGGTGTGCTTGATAAGATTATGATATTTGACGATCGTGGTTTTGTATCCAGTATCAAATATTTCAAACAAAATAGATTAATTTATCAAGATTATTTAAATCAAAATGGTGTTTGGCAAATTCGAGAGTATGCTTCAAAATTTCCGAGAATAGTAGTTAATCCAATGTCTGATAAGGTGTTTAATTTTACTGAGTATGATGATTGGGATACTCTTATTCGAGAGAGAATATTGGTTTTAAAAAAACTAGAAGTGACTCCAGATGATTATATTATAGTAGCAGTAAACGATATTCATAACAATTTAGTCAGAAAATCATTTCCAGATCAAAAGAAAATTTTCTCATTTTTTGGTGAACGCTATTCATTTGATAATCGACTCGACTTTAATGAACTTCTTGATGAAGGTGAATTGTTTATTGCTGAAAGCGAAAAAATAGAACGGTTATTGATTACTTCATTACAAGAGAAAAATTATTCGTCAAACTATGTTGAGAATCACATTAGCCGTATTCCCCCTTTTGATACTCGTTTGAGACTCGGACAGAGCCAAAATATTGAAGAGCTTATTGCATATTTACTTGTAGATGATCTTTCTCAAACTTATTTAAGTGAAGTTTTAGACCAATTATTAGCAAAAATGGAAGTTAATCCGTCATTAGAGTTGAAAATAGTCAGCTATAAAAATGATTATGATATGACTTCTCTAAAAGAACAAGTTAAGGACAAAATATTGTCTTCTAAAAATCCAGATTATTTTTTTACCTCTCTTTCTTTGGAAGATGAGAATCATTTTAAGGAAGAACAAAAAACTAAAATTCGTGGCATTAGTTTTGATATATATACAAATGAAAATCAAATTATAGATGCTCTAGATACTGCTAGGTTAGTTATTGATTTAAGAGATGATCCAGACCTATATACTCAAATTGCTGCTCTGAGTTCTGGAATTCCTCAAATCAATAAAGTTCACACTAATTATGTAGAACACCAGAAGAATGGCTGGATTATTAGTGACTCTACAGAACTCAATAATGCAATTGACTATTATTTTGATGGACTAATGAATTGGAATAAATCGTTAGTTTACAGCGTAAAAAAAATGGGTGATTATACAAGCGGTAAGATATTACAGCGCTGGCGAAAATTATTAGAAAAAGAA

SEQ ID NO: 16020 - protein, 525 aa, Streptococcus agalactiae
MFYFIPSWYNSDQKWHNEAPIWYRVLENMTFDDTVSQVRMFQNADEEVRLLLFSYNPQLRYMLHEESMLAVSYWSFFDDIQNIQQKEIKLINFKELNWPKGTYFVYTPFLVLAKHGGEIIARIQFAENGNLLLIELLIDGVLDKIMIFDDRGFVSSIKYFKQNRLIYQDYLNQNGVWQIREYASKFPRIVVNPMSDKVFNFTEYDDWDTLIRERILVLKKLEVTPDDYIIVAVNDIHNNLVRKSFPDQKKIFSFFGERYSFDNRLDFNELLDEGELFIAESEKIERLLITSLQEKNYSSNYVENHISRIPPFDTRLRLGQSQNIEELIAYLLVDDLSQTYLSEVLDQLLAKMEVNPSLELKIVSYKNDYDMTSLKEQVKDKILSSKNPDYFFTSLSLEDENHFKEEQKTKIRGISFDIYTNENQIIDALDTARLVIDLRDDPDLYTQIAALSSGIPQINKVHTNYVEHQKNGWIISDSTELNNAIDYYFDGLMNWNKSLVYSVKKMGDYTSGKILQRWRKLLEKE

SEQ ID NO: 16021 - protein, 1251 aa, Streptococcus agalactiae
ATGATTGGAAAATTATATTATAGCTATAGAAAGTCAACGCTATTAAGAAGTATTTTATGGACTATTTTAATTGTTGGTGTATATATGTTAGGACAACGTGTTTTATTATCCACTGTTCCTTTATCACATCAAGAGATAAAACTAGCAGTAGATCAACATTTACTCAATAACTTTTCAGCAGTAAGTGGTGGGAGTTTTAATAAATTAAATGTTTTCACACTGGGGTTGAGTCCATGGATGTCAAGTATGATTATTTGGAGATTCGTTTCCTTATTTTCGTGGGCAAAAAATGCAACGAAGCGAAAAGCAGAAGTAGCTCAATATACTTTAATGCTTACTATCTCAGTTATACAAGCATATGGTGTTTCAGGAAATCAATTTATAAAAAGCTCTTTATTAGGTTCTTATAGTGATATTGTTTTTAAAGCATTGACAATGGTCTTGTTAATAAGTGGCTCATTTGTGTTAATGTGGCTTGCTAATCTCAATGCTTCTAAAGGGCTAGGAGGAAGTATTGTTATCATATTAGTGAGCATGCTCCAAGCAACGACTACTGGAATAATAACTTATTTTGAACAGTCACATTTTAGTATTATGGATCTGCTGGGAACTATTATAGCTATAAGTATAATACTTAGTGTTTTATTATTAATCTCAACGGTGGTTTATAGGGCAGAATATCGTATACCTATTAGGCGTATTGATATCGTTAGTAAATTTGCCCAAGATACCTATATTCCTATTCGCATAAATCCAGCAGGGTCCTACCCTTTCATGTATGGGATGACATTAATGATGCTTCCAACGTTTATAATTCAAGCATTGTTACTTGCTTTTCCAAACGAGCGATTATTGATTCAGATCTCGTCAATGATTGCAATTAATAAGCCTTTAGGTATTGGACTTTTTGTTATATTATTATTTATTTTGAGCATTGGATTTGCATATTTTAATTACGACCCGTATAATATTGCAAAAAATATGCGTCAACGGGGGGAATATTTTCAAAATGTAACTCCAGGAGCTGCTACTCAACGTTTTTTACAAGAAAAAATTAGTATCATGGCAGTAGTTGGAGCAATTTTTACGGTTATTATGGGAGGTCTCCCAATGTTGGCTGTGGTGGGGAAGACAAACCAAGTTAGTATTGCAATGATCGTCATTAATATTTATATTATTTCAACTTTTATGCTCAGTATTATTGAGCAAGTTAATACCTTGAAGTTGTGGGGCAGTCACCGAAATATTATT

SEQ ID NO: 16022 - protein, 417 aa, Streptococcus agalactiae
MIGKLYYSYRKSTLLRSILWTILIVGVYMLGQRVLLSTVPLSHQEIKLAVDQHLLNNFSAVSGGSFNKLNVFTLGLSPWMSSMIIWRFVSLFSWAKNATKRKAEVAQYTLMLTISVIQAYGVSGNQFIKSSLLGSYSDIVFKALTMVLLISGSFVLMWLANLNASKGLGGSIVIILVSMLQATTTGIITYFEQSHFSIMDLLGTIIAISIILSVLLLISTVVYRAEYRIPIRRIDIVSKFAQDTYIPIRINPAGSYPFMYGMTLMMLPTFIIQALLLAFPNERLLIQISSMIAINKPLGIGLFVILLFILSIGFAYFNYDPYNIAKNMRQRGEYFQNVTPGAATQRFLQEKISIMAVVGAIFTVIMGGLPMLAVVGKTNQVSIAMIVINIYIISTFMLSIIEQVNTLKLWGSHRNII

SEQ ID NO: 16023 - protein, 729 aa, Streptococcus agalactiae
ATGGATTCGGAGTTAGATACCGATTCGGAACTTGAAATAGACTCTGAATTTGATACTGACTCGGAGCTAGATACCGACTCGGAGTTTGAAATAGACTCGGAGTTTGATACCGATTCGGAACTTGAAATAGATTCTGAGCTTGATACCGATTCAGAACTTGAAATAGATTCCGAGGTAGATACTGACTCGGAAGTTGAAATGGATTCGGAGTTAGATACCGATTCGGAACTTGAAATAGACTCTGAAGTTGATACTGACTCGGAGCTAGATACCGATTCAGAACTTGAAATGGATTCGGAGTTAGATACCGATTCGGAGCTTGAAATAGACTCTGAAGTTGATACTGACTCGGAGCTTGAAATAGACTCTGAATTCGAAATAGATTCTGAGCTTGATACCGATTCAGAACTTGAAATGGATTCGGAGTTAGATACCGATTCGGAGCTTGAAATAGACTCGGAGTTAGATACCGATTCGGAACTTGAAATAGATTCTGAGCTTGATACCGATTCTGAACTTGATACTGACTCGGAGCTTGAAATAGACTCTGAAGTTGATACCGATTCAGAAGTTGAAATAGATTCTGAGCTTGATACCGATTCGGAACTTGAAATAGACTCGGAGTTAGATACCGATTCAGAAGTTGAAATAGATTCGGAATTAGATACCGATTCTGAACTTGATACTGATTCTGAGCTACTTACTAATTCGGATAAAATTTTTCTTTCT

SEQ ID NO: 16024 - protein, 243 aa, Streptococcus agalactiae
MDSELDTDSELEIDSEFDTDSELDTDSEFEIDSEFDTDSELEIDSELDTDSELEIDSEVDTDSEVEMDSELDTDSELEIDSEVDTDSELDTDSELEMDSELDTDSELEIDSEVDTDSELEIDSEFEIDSELDTDSELEMDSELDTDSELEIDSELDTDSELEIDSELDTDSELDTDSELEIDSEVDTDSEVEIDSELDTDSELEIDSELDTDSEVEIDSELDTDSELDTDSELLTNSDKIFLS

SEQ ID NO: 16025 - protein, 3255 aa, Streptococcus agalactiae
ATGTTAAAAAAGCAGTTTGGAAACTTTGGTGAAAAATCACGCAAAGTTCGAGTTAAAATGAGGAAATCAGGTAAGCACTGGGTCAAAAGTGTTATGACACAAATTGGCTATGTTATCCTTTCGAGGTTTAGCGGTAAAGAGAAAAGCTCTAAGGTTCAAACTACTAGTGAAGATTTAAGCAGAACTAAAACGTCTGCTAGCATCCTAACAGCAGTCGCAGCTCTTGGAGCTGTAGTTGGAGGGACGACAGACACAACTTCTGTCTCAGCTGAAGAAACACCTACTGCAACAGAACTTACAGGAAATGAAAAAACATTAGCTACTGCTGAAACTGTAGTGGTTGCGCCAGAAGTAAAAACTGTAAACTCAGATTCTTCATCACATTCAACAAGTGAATCACAATCAATGTCAACTAGTACCTTGCAATCTACCAGCGCCTCATTATCTGCCAGTGAATCACTAATGGATTCTACCTCTGCTTCTTTATCTGAGTCTAGCTCGTTATCAGAATATAGTTCTTTATCTCTATCTAGTAGTGAGAGTGTCTCAGCATCAGAATCAGTTCAATCATCAGAAGCGGCAACGACCGCTAGAGTTCAACCGAGAGCGATGAGAGTTGTATCTAGTGCTTCAGATATGGAAACTTTACCAGCAGCATTAATCTCTGGTGAAGGAGATGTAACAACTGTTCAAGGACAAGATGTAACAGATAAGTTACAAAATTTAGATATAAAGCTCTCTGGAGGAGTGCAAGCAAAAGCAGGTGTTATAAATATGGATAAGTCAGAAAGTATGCACATGTCTTTAAAATTCACTATTGATTCTGTGAATAGAGGTGATACTTTTGAAATTAAGTTATCAGATAATATCGATACAAATGGAGCTTCTAACTATTCTATTGTAGAACCTATAAAATCACCTACGGGTGAGGTCTATGCGACTGGAATTTATGATTCTCAAAAAAAATCTATAGTCTATAGTTTTACAGATTTTGCGGCTTCAAAAAATAATATTAATGGAATATTAGATATTCCATTATGGCCAGATGATACGACAGTTCAAAACACAAAAGAAGATGTTCTTTTTTCGGTAAAAATAAAGGATCAAGAGGCTACAATTAAAGAAACAGTGAAATATGATCCACCGGTAAGAATTGATTTTGCAGGGGGAGTAAGTGTAGATTCTCGAATAACCAACATTGATGATGTGGGAAAAAAGATGACTTATATAAGTCAAATTAATGTAGATGGAAAATCACTCTATAATTACAACGGGTTATATACTAGGATATATAATTATAGCAAAGAGAGTACAGCAGATTTAAAGAATTCAACGATAAAAATCTATAAAACCACCTCGGATAATATTGTAGAGAGTATGGTACAGGATTATTCAAGCATGGAGGATGTAACTAGTAAGTTTGCAAATAGTTACCCAGAAAAAGGGTGGTATGATATTTATTGGGGGCAGTTTATTGCATCAAATGAAACGTATGTAATTGTTGTAGAAACACCATTTACTAATGCAGTAACTTTGAATACTACTTTATCAGATTATAATGAGAACAATGGTGTAGAACATAATCATACTTACTCATCTGAATCGGGATATTCAGATGTAAATGCTCAAGAAAGAAAAATTTTATCCGAATTAGTAAGTAGCTCAGAATCAGTATCAAGTTCAGAATCGGTATCTAATTCCGAATCTATTTCAACTTCTGAATCGGTATCTAACTCCGAGTCTATTTCAAGTTCCGAATCGGTATCAAGCTCAGAATCTATTTCAACTTCTGAATCGGTATCAACTTCAGAGTCTATTTCAAGCTCCGAGTCAGTATCAAGTTCAGAATCGGTATCAAGCTCAGAATCTATTTCAAGTTCCGAATCGGTATCTAACTCCGAGTCTATTTCAAGCTCCGAATCGGTATCTAACTCCGAATCCATTTCAAGTTCTGAATCGGTATCAAGCTCAGAATCTATTTCGAATTCAGAGTCTATTTCAAGCTCCGAGTCAGTATCAACTTCAGAGTCTATTTCAAGCTCCGAATCGGTATCTAACTCCGAATCCATTTCAAGTTCTGAATCGGTATCTAGCTCCGAGTCAGTATCAACTTCAGAGTCTATTTCAAGTTCCGAATCGGTATCTAACTCCGAATCCATTTCAACTTCCGAGTCAGTATCTACCTCGGAATCTATTTCAAGTTCTGAATCGGTATCAAGCTCAGAATCTATTTCAAGTTCCGAATCGGTATCAAACTCCGAGTCTATTTCAAACTCCGAGTCGGTATCTAGCTCCGAGTCAGTATCAAATTCAGAGTCTATTTCAAGTTCCGAATCGGTATCTAACTCCGAATCCATTTCAACTTCCGAGTCAGTATCTACCTCGGAATCTATTTCAAGTTCTGAATCGGTATCAAATTCAGAGTCTATTTCAAGTTCCGAATCGGTATCTAACTCCGAGTCTATTTCAAGTTCAGAATCGGTATCAAATTCAGAGTCTATTTCAAGTTCCGAATCGGTATCAAATTCAGAGTCTATTTCAAGTTCAGAGTCAGTATCAAGTTCAGAGTCAGTATCAAGCTCGGAATCTATTTCAACTTCCGAATCGGTATCTAACTCCGAGTCTATTTCAAGTTCCGAATCGGTATCTAATTCTGAATCTATTTCAAGTTCCGAATCGGTATCAAATTCAGAGTCTATTTCAAGTTCCGAATCGGTATCAAACTCCGAGTCTATTTCAAGTTCCGAGTCAGTATCAAGCTCAGAATCTATTTCAAGTTCCGAATCGGTATCTAGCTCCGAGTCAGTATCAAATTCAGAGTCTATTTCAAGTTCCGAATCGGTATCAAACTCCGAGTCTATTTCAAGTTCCGAGTCAGTATCAAGCTCAGAATCTATTTCAAGTTCAGAATCGGTATCAAACTCCGAGTCTATTTTAAGTTCCGAATCAGTATCAAGCTCAGAATCTATTTCAAGTTCAGAATCTATTTCAAGTTCCGAGTCAGTATCAATGAGTACTACAGAGTCTCTAAGTGAATCAGAAGTATCAGGGGATTCTGAAATTAGCTCAAGTACAGAATCATCAAGTCAATCTGAATCGATGAATCATACTGAAATTAAATCCGATTCCGAATCTCAACACGAAGTTAAGCATCAAGTATTACCAGAAACAGGTGATAACTCGGCTTCAGCATTAGGTCTGTTAGGTGCAGGATTGTTGTTAGGAGCTACTAAATCTCGCAAGAAGAAAAAAGAT

SEQ ID NO: 16026 - protein, 1085 aa, Streptococcus agalactiae
MLKKQFGNFGEKSRKVRVKMRKSGKHWVKSVMTQIGYVILSRFSGKEKSSKVQTTSEDLSRTKTSASILTAVAALGAVVGGTTDTTSVSAEETPTATELTGNEKTLATAETVVVAPEVKTVNSDSSSHSTSESQSMSTSTLQSTSASLSASESLMDSTSASLSESSSLSEYSSLSLSSSESVSASESVQSSEAATTARVQPRAMRVVSSASDMETLPAALISGEGDVTTVQGQDVTDKLQNLDIKLSGGVQAKAGVINMDKSESMHMSLKFTIDSVNRGDTFEIKLSDNIDTNGASNYSIVEPIKSPTGEVYATGIYDSQKKSIVYSFTDFAASKNNINGILDIPLWPDDTTVQNTKEDVLFSVKIKDQEATIKETVKYDPPVRIDFAGGVSVDSRITNIDDVGKKMTYISQINVDGKSLYNYNGLYTRIYNYSKESTADLKNSTIKIYKTTSDNIVESMVQDYSSMEDVTSKFANSYPEKGWYDIYWGQFIASNETYVIVVETPFTNAVTLNTTLSDYNENNGVEHNHTYSSESGYSDVNAQERKILSELVSSSESVSSSESVSNSESISTSESVSNSESISSSESVSSSESISTSESVSTSESISSSESVSSSESVSSSESISSSESVSNSESISSSESVSNSESISSSESVSSSESISNSESISSSESVSTSESISSSESVSNSESISSSESVSSSESVSTSESISSSESVSNSESISTSESVSTSESISSSESVSSSESISSSESVSNSESISNSESVSSSESVSNSESISSSESVSNSESISTSESVSTSESISSSESVSNSESISSSESVSNSESISSSESVSNSESISSSESVSNSESISSSESVSSSESVSSSESISTSESVSNSESISSSESVSNSESISSSESVSNSESISSSESVSNSESISSSESVSSSESISSSESVSSSESVSNSESISSSESVSNSESISSSESVSSSESISSSESVSNSESILSSESVSSSESISSSESISSSESVSMSTTESLSESEVSGDSEISSSTESSSQSESMNHTEIKSDSESQHEVKHQVLPETGDNSASALGLLGAGLLLGATKSRKKKKD

SEQ ID NO: 16027 - protein, 333 aa, Streptococcus agalactiae
ATGGCTAATGTATATGATTTAGCAAATGAATTAGAACGTGCTGTTCGTGCTTTACCAGAATACCAAGCAGTTTTAACTGCAAAAGCAGCTATTGAAAATGATGCGGATGCACAAGTGCTTTGGCAAGACTTTTTGGCTACCCAATCAAAAGTTCAAGAAATGATGCAATCTGGCCAAATGCCAAGTCAAGAAGAACAAGATGAAATGTCTAAACTTGGGGAAAAAATTGAATCCAATGACCTTTTAAAAGTTTATTTTGACCAACAACAACGGTTGTCTGTCTATATGTCTGATATCGAAAAAATTGTCTTTGCACCCATGCAGGACTTGATG

SEQ ID NO: 16028 - protein, 111 aa, Streptococcus agalactiae
MANVYDLANELERAVRALPEYQAVLTAKAAIENDADAQVLWQDFLATQSKVQEMMQSGQMPSQEEQDEMSKLGEKIESNDLLKVYFDQQQRLSVYMSDIEKIVFAPMQDLM

SEQ ID NO: 16029 - protein, 1164 aa, Streptococcus agalactiae
ATGAGATATTTAACTGCTGGTGAGTCACATGGACCTAGTTTAACAGCTATTATCGAAGGGATTCCTGCGGGACTGAAATTATCTGCTAAAGATATTAATGAAGATTTAAAACGCCGCCAAGGTGGTTATGGTCGTGGGAATCGAATGAAAATTGAAACTGATCAAGTGATCATTAGTTCTGGTGTGCGCCATGGAAAAACCTTGGGTTCACCTATTACACTGACAGTAACTAATAAGGATCATAGCAAATGGCTGGACATCATGTCAGTCGAAGACATTGAAGAGCGTCTAAAGCAAAAACGTCGTATTAAGCATCCTAGACCTGGGCACGCAGATTTAGTAGGTGGAATCAAATACCGATTTGATGATTTGAGAAATGCTTTAGAGCGTTCTTCGGCTCGTGAGACCACAATGCGAGTAGCTATTGGTGCGATTGCTAAACGTATCTTGAAAGAAATTGGTATCGAAATTGCTAACCATATTGTAGTTTTCGGTGGCAAGGAGATTACTGTCCCTGATAAGCTAACAGTTCAACAAATCAAAGTGTTATCTAGTCAATCGCAAGTAGCTATCGTCAATCCATCATTTGAACAAGAAATTAAGGATTATATTGACAGTGTGAAAAAGGCTGGAGATACTATCGGAGGAGTGATTGAAACTATCGTTGGAGGAGTTCCCGTTGGTTTAGGCTCTTATGTACACTGGGATAGAAAGTTAGATGCTAAGATAGCGCAAGCAGTTGTATCTATCAATGCTTTTAAAGGTGTTGAATTTGGTCTAGGTTTTAAGTCAGGGTTTTTAAAAGGAAGTCAAGTAATGGACTCCATATCATGGACAAAGGACCAAGGTTACATACGTCAGTCAAATAATTTAGGCGGTTTTGAAGGCGGTATGACTAATGGAGAGCCTATTGTCGTTAGGGGAGTAATGAAGCCAATTCCTACGCTTTACAAGCCACTAATGTCAGTTGATATTGATACTCACGAGCCTTATAGAGCTACAGTGGAACGTTCTGATCCCACGGCACTTCCGGCTGCAGGTGTCGTTATGGAAGCTGTAGTAGCCACCGTCCTGGTGACAGAAGTGCTAGAAAAATTTTCTTCAGACAACATGTATGAACTAAAAGAAGCTGTAAAACTATATCGCAATTATGTTAATCATTTT

SEQ ID NO: 16030 - protein, 388 aa, Streptococcus agalactiae; identical to SEQ ID NO: 11406

SEQ ID NO: 16031 - protein, 1065 aa, Streptococcus agalactiae
ATGCAGGTTGAAGTTGACTTACCGAATCACCCTTATCATATTAAAATTGAAGAAGGATGTTTTTCTGAGGCTGGTGACTGGGTATCACATTTATGGCAGAAACAAATGATAACTATTATTACAGATAGTAATGTAGAAATATTATACGGGGAGTCGCTTGTCAACCAGTTAAAAAAACAAGGTTTTACAGTACATGTTTTTAGTTTTGCTGCGGGTGAAGCTAGTAAAACTTTGGAAGTTGCTAATCGTATTTATGGTTTTTTAGCAAAGCATCATATGACCAGAAGTGATGGGATCATTGCACTTGGTGGAGGCGTCGTCGGAGATTTAGCAGCGTTTGTTGCTTCTACTTATATGCGGGGAATCCATTTTCTTCAAATTCCAACTAGTTTAACAGCACAGGTTGATTCTTCCATTGGCGGAAAAACAGGAGTCAACACTTCATTCGCTAAAAATATGGTAGGTACTTTTGCACAACCTGATGGTGTACTGATAGATCCTGTTACTCTAAAAACATTGGGCAATCGTGAATTAGTTGAAGGTATGGGAGAAGTCATCAAATATGGCTTGATTGATGATATAAAACTCTGGCATATCTTAGAAGAGATGGATGGGTCTATTGATAGTATCCTTGATAATGCATTAGCTATTATTTATCACTCTTGTCAAGTTAAACGAAAGCATGTTTTAGCTGATCAATATGATAAAGGGTTAAGGATGCATTTAAATTTTGGCCACACTATCGGTCATGCTATCGAAGTACATGCTGGCTATGGAGAAATAATGCATGGAGAAGCTGTTGCAATTGGAATGATCCAGCTTTCTCGTGTGGCTGAGCGTAAAAATCTTATGCCAAGAGGTATCAGTCAAGATATTTATAATATGTGTTTAAAATTTGGCCTTCCGGTCCACTATGCAGAATGGGATAAGGACGTCTTATTTAACATATTGAGTCATGATAAAAAAGCAAGTGGACAATTTATTAAAATTGTTATACTGCCTCAATTAGGTAGTGCAACAGTCCACCAAATACCTTTAGAAGAAATGAGAGATTATTTGGAGAAA

SEQ ID NO: 16032 - protein, 355 aa, Streptococcus agalactiae
MQVEVDLPNHPYHIKIEEGCFSEAGDWVSHLWQKQMITIITDSNVEILYGESLVNQLKKQGFTVHVFSFAAGEASKTLEVANRIYGFLAKHHMTRSDGIIALGGGVVGDLAAFVASTYMRGIHFLQIPTSLTAQVDSSIGGKTGVNTSFAKNMVGTFAQPDGVLIDPVTLKTLGNRELVEGMGEVIKYGLIDDIKLWHILEEMDGSIDSILDNALAIIYHSCQVKRKHVLADQYDKGLRMHLNFGHTIGHAIEVHAGYGEIMHGEAVAIGMIQLSRVAERKNLMPRGISQDIYNMCLKFGLPVHYAEWDKDVLFNILSHDKKASGQFIKIVILPQLGSATVHQIPLEEMRDYLEK

SEQ ID NO: 16033 - protein, 654 aa, Streptococcus agalactiae
ATGCCTCGCAGTCTTGAAGAGGCTCAAGAAATAGATTTATCAAAATTTGATAGTGTTGATATTATTGAATGGCGAGCTGATGCCTTACCAAAGGATGACATTATTAATGTAGCTCCAGCTATTTTTGAGAAATTCGCAGGTCATGAAATTATTTTTACTCTTCGTACAACGCGTGAAGGTGGTAATATTGTCTTATCTGATGCTGAGTATGTTGAGTTAATCCAGAAAATTAATTCTATCTACAATCCAGATTATATTGATTTTGAGTATTTTTCACATAAAGAAGTTTTTCAAGAAATGCTAGAATTTCCAAATTTAGTCCTGTCTTATCACAATTTTCAAGAGACACCGGAGAATATTATGGAGATATTTTCAGAATTAACAGCCCTAGCACCACGAGTTGTGAAAATCGCAGTAATGCCAAAGAATGAACAAGATGTCTTAGACGTTATGAATTACACTCGCGGTTTCAAGACTATTAATCCTGATCAAGTTTATGCGACGGTATCTATGAGTAAAATTGGACGTATTTCTCGTTTTGCTGGTGATGTAACTGGATCTAGTTGGACATTTGCATATTTAGATTCATCTATCGCACCCGGACAAATTACTATTTCAGAGATGAAGCGTGTCAAAGCATTGCTTGACGCTGAC

SEQ ID NO: 16034 - protein, 218 aa, Streptococcus agalactiae; identical to SEQ ID NO: 2578

SEQ ID NO: 16035 - protein, 1155 aa, Streptococcus agalactiae
ATGAATAAACTTAAAGTGAATTCTGTCGTTGAAAGAAAAATCAAATCAGGTGCTCAGTTACTGGAAAAAAAAGATTTTGATACCAGTTTAGTTAACCAGTTGGTTCAACTTTTTTCACAGTCAAATCAATTCTTAGGGATGGCCTATCTTTCACCACAAAATAAAGGGATTGGTTGGTTACTATCAAGACAAATTTTTGATTTTAACCATGATTACTTTGTATCGCTATTCGAAAAATCTAGAGAGAAGCGTCAAAAATTTGAAAAATCTAGCCAAACAACAGCCTACCGCTTGTTTAATCAGGATGGAGATAACTTTGGTGGCCTAACTATAGATTTTTATAGTGACTATGCTCTTTTTTCGTGGTACAATGAATTTGTTTATACTAATCGACAAATGATTGTTGCAGCCTTTAAGCAGGTCTATCCTAATATTAAAGGGGCATATGAAAAAATTCGTTTCAAAGGTTTAGACTTTGAAAGTGCTCATTTGTACGGTCAAGAGGCTCCTGAATCATTTTTGATTTTAGAAAATAATATCAAATATAGTGTCTTTTTGAATGATGGGTTAATGACAGGTATTTTCCTTGACCAACATGATGTCAGAAAAGCCTTAGCAACTAATCTATCAGAAGGTAAAAAAGTTCTAAATATGTTTTCATACACTGCGGCTTTTTCTGTAGCTGCAGCTGTTGGAGGAGCATTAGAGACAACTTCTGTTGATTTAGCAAAACGCTCGCGTGAACTTTCAAAAGCACACTTTGATGCTAATCAGATTGTCACAGATAACCATCGATTTATCGTTATGGATGTTTTTGAATATTATAAGTATGCCAAAAGAAAACATCTATCATATGATGTGATTGTTATTGATCCACCAAGTTTTGCTCGAAATAAAAAACAAACTTTTTCGGTTACTAAAGATTACTATAAATTAATTGAACAAGCTTTAGATATTTTAGCCCCTGGTGGAACTATCATTGCATCAACTAACGCAGCTAATCTAACCGTATCACAATTTAAGAAACAATTGGAAAAGGGGTTTGGTAAAGCTTCACATAATTACATTAGCTTACAGCAGTTGCCTGAAGATTTCACTGTAAATGATAAGGACCAACAAAGTAATTATTTAAAAGTATTTACAATAAAGGTAAAA

SEQ ID NO: 16036 - protein, 385 aa, Streptococcus agalactiae
MNKLKVNSVVERKIKSGAQLLEKKDFDTSLVNQLVQLFSQSNQFLGMAYLSPQNKGIGWLLSRQIFDFNHDYFVSLFEKSREKRQKFEKSSQTTAYRLFNQDGDNFGGLTIDFYSDYALFSWYNEFVYTNRQMIVAAFKQVYPNIKGAYEKIRFKGLDFESAHLYGQEAPESFLILENNIKYSVFLNDGLMTGIFLDQHDVRKALATNLSEGKKVLNMFSYTAAFSVAAAVGGALETTSVDLAKRSRELSKAHFDANQIVTDNHRFIVMDVFEYYKYAKRKHLSYDVIVIDPPSFARNKKQTFSVTKDYYKLIEQALDILAPGGTIIASTNAANLTVSQFKKQLEKGFGKASHNYISLQQLPEDFTVNDKDQQSNYLKVFTIKVK

SEQ ID NO: 16037 - protein, 2141 aa, Streptococcus agalactiae
GTGAAAAAAATTAAAGATTTTGCTAGCCGTGCGATCAATACACGACTCGGCTTTATTTTATTGTTAGTAGTTATATATTGGTTAAAGACAATTTGGGCTTACCATACTGATTTTAATTTAGGTTTAGAAAATTCCTATCAGTTGTTTTTGACCATTATAAACCCCATCCCCTTAGGACTCTTAATCATAGGTTTGGCCTTATATGTTAAGCGAACCAAAGCTTTTTATATTACCGCTTTTATCACCTATGCTATCGTAAATATCCTTCTAATTGCAAACGCAATCTACTATAGAGAGTTTTCCGATTTCATTACAGTTAGCGCTGTCTTGGCTAGTAGTAAAACTTCGGCTGGCCTTGGAGACTCTGCTCTTAATCTATTGAGAATTTGGGATCTTGTCTACGTTTTCGATTTCATTATCCTTATTTTCTTATTTGCAACCAAGAAAATCCACTTAGATAATCGTCCATTTAATAAACGTGCTAGTTTTTCTATCACAGCTTTGTCTGGTTTACTCTTTTCAATTAACTTATTCTTAGCTGAAATTGATCGTCCAGAACTACTAAGTCGTGGTTTTTCAAACACCTATATTGTTAAAGCTCTTGGCTTGCCATCATTTTCGATTTATAGTGGTAATCAAACTTATCAAGCACAGAAAGAAAGAAATGGTGCCACTGCACAAGAATTAGCGACTGCCAAAAAATATGTAGCAGAGCATTATGCCAAACCCAATCCAGAATATTATGGTATCGGAAAAGGGCGAAACGTTATCATGATTCATTTGGAGAGTTTTCAACAATTCTTGATTGACTATAAATTAAATGTTGATGGTAAAGAACATGTGGTTACTCCATTTATTAACAGCCTTTATCATTCGAAAGAGACTATCTCCTTCTCTAACTTCTTCCATCAAGTCAAAGCTGGTAAGACATCCGATGCTGAGACACTCATGGAAAACTCACTTTTTGGTCTAAGTAGTGGTTCATTCATGGTTAATTATGGTGGTGAAAATACACAATTTGCTGCTCCACATATCTTAGCTCAAAATGGAGGTTACAGTAGTGCGGTCTTCCACGGAAACGTCGGAACATTTTGGAATAGAAATAATGCTTACAAACAGTGGGGTTATGACTACTTCTTTGACTCTAGCTACTTCTCAAAACAAACCAAAGATAATTCATTCCAATACGGTTTGAATGATAAATATATGTTTGCTGACTCTATCAAATATCTAGAGCACATGCAACAACCGTTTTATACTAAATTTATTACAGTAAGTAACCATTACCCTTACACAAGTTTGAAGGGAGAGTCTGACGAAGAGGGATTCCCACTTGCAAAGACTAACGATGAAACGATTAACGGTTATTTCGCCACAGCAAACTACCTTGATACAGCTCTTAAATCATTTTTTGAATATCTAAAAGCTGCTGGTGTGTATGATAATTCTATTATTGTAATGTATGGGGATCACTACGGTATTTCTAATACACGCAATCCTAGCTTAGCTGAATTATTAGGTAAAGACCCTGAAACATGGTCTGAATACGACAACGCTATGTTACAACGTGTTCCATATATGATCCACATTCCTGGCTATTCAAAAGGTTTTATCAGTAATACATACGGTGGTGAGGTAGATAATTTACCAACCTTACTTCATATTCTAGGGATAGACACGTCTAAATATACTCAGTTAGGACAAGACTTGTTATCTAAAGATAATAAACAAATGGTCGCTATGAGAACAACTGGTCAGTATATTACTCCTAAATACACTAACTATAGTGGACATCTCTATTACACTGATTCAGGACAAGAAATCACAAATCCTGATGAAACAACTAAAGCTGAAATAAAAACTATTCGAGATGCTACTAATAAACAATTATCTACAAGTGATTCGATTCAAACTGGAGATTTACTACGATTTGATGAAAACAATGGTTTGAAAACTGTAGAAGTTGAAAAATTCAATTACACACATTCTCTTAAAGCACTCAAAGCTAAAGAACGTAAATTGAAAGATCGTTCAACAAGCATATACAGCAAACATAACAACAAATCAACAGTTGATCTCTTCCACGCTCCAAGTTACTTGGAATTGCAAGATCCTAAAAGACACATAAAACATCTAAAAAA

SEQ ID NO: 16038 - protein, 714 aa, Streptococcus agalactiae
MKKIKDFASRAINTRLGFILLLVVIYWLKTIWAYHTDFNLGLENSYQLFLTIINPIPLGLLIIGLALYVKRTKAFYITAFITYAIVNILLIANAIYYREFSDFITVSAVLASSKTSAGLGDSALNLLRIWDLVYVFDFIILIFLFATKKIHLDNRPFNKRASFSITALSGLLFSINLFLAEIDRPELLSRGFSNTYIVKALGLPSFSIYSGNQTYQAQKERNGATAQELATAKKYVAEHYAKPNPEYYGIGKGRNVIMIHLESFQQFLIDYKLNVDGKEHVVTPFINSLYHSKETISFSNFFHQVKAGKTSDAETLMENSLFGLSSGSFMVNYGGENTQFAAPHILAQNGGYSSAVFHGNVGTFWNRNNAYKQWGYDYFFDSSYFSKQTKDNSFQYGLNDKYMFADSIKYLEHMQQPFYTKFITVSNHYPYTSLKGESDEEGFPLAKTNDETINGYFATANYLDTALKSFFEYLKAAGVYDNSIIVMYGDHYGISNTRNPSLAELLGKDPETWSEYDNAMLQRVPYMIHIPGYSKGFISNTYGGEVDNLPTLLHILGIDTSKYTQLGQDLLSKDNKQMVAMRTTGQYITPKYTNYSGHLYYTDSGQEITNPDETTKAEIKTIRDATNKQLSTSDSIQTGDLLRFDENNGLKTVEVEKFNYTHSLKALKAKERKLKDRSTSIYSKHNNKSTVDLFHAPSYLELQDPNKTHKTSKK

SEQ ID NO: 16039 - protein, 357 aa, Streptococcus agalactiae; identical to SEQ ID NO: 11415

SEQ ID NO: 16040 - protein, 119 aa, Streptococcus agalactiae; identical to SEQ ID NO: 2584

SEQ ID NO: 16041 - protein, 196 aa, Streptococcus agalactiae
ATGCCAAAACAAAAAACACACCGCGCATCAGCTAAACGCTTTAAACGCACAGGTTCAGGTGGATTGAAACGCTTCCACGCGTTTACTTCACACCGTTTCCACGGTAAAACTAAAAAACAACGTCGTCATCTTCGTAAAGCTACTATGGTTTCATCAGGAGATTTAACGTATTAAAGCAATGCTTACTCGCCTTAAA

SEQ ID NO: 16042 - protein, 66 aa, Streptococcus agalactiae
MPKQKTHRASAKRFKRTGSGGLKRFHAFTSHRFHGKTKKQRRHLRKATMVSSGDFKRIKAMLTRLK

SEQ ID NO: 16043 - protein, 524 aa, Streptococcus agalactiae
GTGAAGATCATAGCTAAAAAAGATCTATTCATTAACGATGAAATTCGCGTTCGTGAAGTTCGTCTGGTTGGTCTCGAGGGTGAACAATTAGGTATTAAACCATTGTCTGAAGCTCAAGCAATTGCAGATGATGCTAATGTTGATTTGGTTTTAATTCAGCCACAAGCTACACCACCTGTTGCGAAAATTATGGACTATGGTAAGTTCAAATTTGAGTATCAAAAGAAACAAAAAGAACAACGTAAAAAACAAAGCGTTGTTACTGTTAAGGAAGTTCGTCTTAGCCCAGTTATTGATAAAGGGGATTTTGAAACAAAACTTCGTAACGGTCGTAAGTTCCTTGAAAAAGGTAACAAAGTTAAAGTTTCTATCCGATTCAAAGGACGTATGATTACTCATAAAGAAATTGGAGCAAAGGTATTGGCGGAATTTGCTGAAGCGACACAAGATATCGCTATTATTGAGCAAAGAGCTAAGATGGATGGTCGCCAAATGTTTATGCAGCTTGCCCATTCAGACAGAAA

SEQ ID NO: 16044 - protein, 176 aa, Streptococcus agalactiae; identical to SEQ ID NO: 2588

SEQ ID NO: 16045 - protein, 195 aa, Streptococcus agalactiae
ATGAAAGTTGCACTAATTCCAGAAAAATGTATTGCCTGCGGGCTTTGCCAAACATATTCAAATATTTTTGATTATCAAGATGATGGTATCGTTAAATTTTCCGATACAGATAACCTAGAAAAAGAAATTCCAAGTTCTGATCAAGATACTGTTTTAGCAGTTAAATCATGTCCCACCAAAGCTCTTACGATTTTG

SEQ ID NO: 16046 - protein, 65 aa, Streptococcus agalactiae
MKVALIPEKCIACGLCQTYSNIFDYQDDGIVKFSDTDNLEKEIPSSDQDTVLAVKSCPTKALTIL

SEQ ID NO: 16047 - protein, 489 aa, Streptococcus agalactiae
ATGATAAAATTATTTGGGAAGATACGTTATCACTGGCAACCTGAACTTTCTTGGGCTATTATTTATTGGTCAATAGCCATTGCACCAATTTTTATTGGTTTATCTCTGCTATATGAAAGAACTGAGATTCCGAGTCAGGTATTTGTTCTATTTGCCATCTTTATTGTTTTAGTAGGCATTGGATTTCATCGCTATTTTGTTATTGAAGAAGATGGATATCTTAGGATTGTATCTTTTAACTTTTTAAGACGATCTAAGTTTCCAATTGAAGATATTGCTAAAATTGAGGTCACTAAATCAAGTGTCACTATCAAATTTAATAATAACCATGAGCGTATTTTTTACATGCGAAAATGGCCTAAAAAATATTTTTTAGATGCACTAGCTATTGAACCTAAATTTAAGGGAGAAGTGGAGCTTCTCGATAATTTGATTAAAATGGATTATTTTGAATGTTATCGCTACGATAAAAAAGCTCTTACAAAATCG

SEQ ID NO: 16048 - protein, 163 aa, Streptococcus agalactiae; identical to SEQ ID NO: 7168

SEQ ID NO: 16049 - protein, 1218 aa, Streptococcus agalactiae
ATGTCTTACGAAAAGCTTTTAGAACGATTTTTAACATACGTCAAAATAAATACAAGAAGTAATCCTAATAGTACACAAACGCCAACAACTCAAAGTCAAGTTGACTTTGCTTTAACAGTTTTAAAACCAGAAATGGAAGCAATTGGTTTAAAAGATGTTCATTATTTACCTTCTAATGGGTATTTGGTTGGAACCTTACCTGCTACAAGCGACCGCTTACGCCATAAAATAGGTTTTATATCCCATATGGATACAGCTGATTTCAATGCTGAAAATATTACTCCACAAATTGTTGACTATAAAGGTGGAGATATTGAACTTGGAGACTCAGGTTACATTTTAAGTCCGAAAGATTTTCCAAATTTAAATAATTACCATGGGCAAACATTGATTACAACAGATGGTAAAACCTTACTGGGAGCAGACGATAAGTCTGGTATAGCAGAAATCATGACAGCTATGGAATATTTGGCTTCGCATCCAGAAATTGAGCACTGTGAAATTAGAGTTGGCTTTGGACCAGATGAAGAAATTGGTATAGGTGCAGATAAATTTGATGTTAAAGATTTTGATGTTGATTTTGCCTATACAGTGGATGGTGGACCACTAGGAGAATTACAGTATGAAACCTTTAGTGCAGCTGGTTTGGAGCTTACATTTGAAGGACGAAACGTTCACCCTGGAACTGCAAAAAATCAAATGATTAATGCTTTACAGCTTGCTATAGATTTTCATAGTCAATTACCAGAAAATGAACGTCCTGAACAAACAGATGGCTATCAAGGATTTTATCACTTATATGATTTAAGTGGAACAGTTGATCAAGCTAAAAGTTCATATATCATTCGAGATTTTGAGGAAGTTAATTTCTTAAAACGTAAGCAATTGGCTCAAGCTATCGCTGATAATATGAATGAAGCATTACAATCTGAACGTGTAAAGGTTAAACTATACGATCAATATTACAACATGAAGAAAGTTATTGAAAAAGACATGACACCTATCAACATTGCTAAAGAAGTAATGGAAGAGTTAGACATCAAGCCGATCATAGAACCGATTCGTGGTGGTACAGATGGCTCTAAAATTTCCTTTATGGGAATCCCTACTCCTAATCTTTTTGCAGGTGGTGAAAACATGCATGGACGCTTTGAATTCGTTAGTCTACAAACAATGGAAAAAGCAGTTGATGTTATTTTAGGCATCGTTGCTAAGGAT

SEQ ID NO: 16050 - protein, 406 aa, Streptococcus agalactiae
MSYEKLLERFLTYVKINTRSNPNSTQTPTTQSQVDFALTVLKPEMEAIGLKDVHYLPSNGYLVGTLPATSDRLRHKIGFISHMDTADFNAENITPQIVDYKGGDIELGDSGYILSPKDFPNLNNYHGQTLITTDGKTLLGADDKSGIAEIMTAMEYLASHPEIEHCEIRVGFGPDEEIGIGADKFDVKDFDVDFAYTVDGGPLGELQYETFSAAGLELTFEGRNVHPGTAKNQMINALQLAIDFHSQLPENERPEQTDGYQGFYHLYDLSGTVDQAKSSYIIRDFEEVNFLKRKQLAQAIADNMNEALQSERVKVKLYDQYYNMKKVIEKDMTPINIAKEVMEELDIKPIIEPIRGGTDGSKISFMGIPTPNLFAGGENMHGRFEFVSLQTMEKAVDVILGIVAKD

SEQ ID NO: 16051 - protein, 1632 aa, Streptococcus agalactiae
ATGTCACAAAAAACAACAAAAGTTAGTCAGCAAGAACAAATGGTCAAAGGGACGGCTTGGTTAACAGCAGGGAATTTCATTAGTCGCTTGCTGGGAGCCATCTATATTATCCCTTGGTATGTTTGGATGGGAAAGCATGCTGCCGAAGCAAATGCTTTATTTGGGATGGGATATGAAATCTATGCTTTATTTCTTTTGATATCAACTGTTGGAATTCCAGTAGCAGTTGCAAAACAAGTATCTAAGTATAACACTTTAGGTAAAGAAGAGATGAGCATTTATCTGGTTCGGAAAATCTTGCAGTTTATGCTGATTTTAGGTGGAGTTTTTGCATTAATTATGTATATTGGTTCACCTCTATTTGCTTCACTTAGTAAAGGAGGGCAAGAACTCGTTCCAATATTGCGTAGTCTAACTCTAGCTGTTTTAGTTTTTCCTTCAATGAGTGTTTTACGTGGTTTTTTTCAAGGTTTTAATAATTTAAAACCGTATGCCATTAGTCAAGTCGCTGAGCAGATTATACGTGTCATATGGATGTTATTAACTGCTTTCTATATTATGCGTCTAGGATCAGGAGATTATATTGCTGCTGTGACACAGTCAACATTCGCCGCCTTTGTCGGTATGTTTGCTAGTATAGCTGTGCTGCTTTATTTCTTATGGCGTTATAATATGCTATCTGCCTTGATTAGTAAAACTCCAGAGCACATTAAATTAGATACTAAAGAAATCCTAATTGAGACTGTTAAGGAAGCAATCCCTTTTATTATTACTGGTGCAGCAATTCAAATTTTCAAATTGATTGATCAGTTTTCATTTGGGAATACGATGGCGCTCTTTACGAATTATTCAAGTGAAGAATTACGGGTTATGTTTGCTTACTTTTCAAGCAACCCTGGTAAAGTTACGATGATTCTAATTGCTGTTGCTACCGCAATTGCTGGAGTTGGTATTCCATTGTTAACAGAGAATTTTGTTAAGAATGATAAAAAAGCCGCCGCTCGTTTGGTTGTTAATAATTTACAAATGTTACTAATGTTTTTACTGCCAGCTGTTGCAGGATCCGTTATTTTAGCAAAACCTTTGTATACAGTCTTTTATGGGTTACCACAGGGACAAGCTTTAGGGCTTTTTGTCATATCTCTTATTCAAACAATTATTTTATCTATTTATACTGTTTTAGCACCAATGCTACAAGCATTGTTTGAAAATCGTAAAGCTATTATTTACTTCCTATATGGTCTGGTGGCAAAAGTTATTTTACAAGTTCCCTCCATTTTCCTTTTCCATGCCTATGGACCACTTTTCTCAACGACAGTAGCTCTTTGTATCCCAGTAATTCTTATGTATTTGAAAATACATGAAATTACAGGATTTAAACGCCAAGCTATTCGTCGTACAAGTGCTTTAGTCCTTATTCTAACGCTATTGATGAGCTTTATTATTTCTATGATAATATGGTTAATGAACCTGGTTATTGTACCCGATAGTAGACTGGTAAGTCTAGTTTACATTATCGTTATCGGTGCAATAGGTTTAGGGGTATATGGCTTTATGGCACTGGCCACCCATCTACTTGATAAGATGATTGGTAGTCGTGCTCAAGACTTACGCCGAAAGTTGCACCTTAAC

SEQ ID NO: 16052 - protein, 544 aa, Streptococcus agalactiae
MSQKTTKVSQQEQMVKGTAWLTAGNFISRLLGAIYIIPWYVWMGKHAAEANALFGMGYEIYALFLLISTVGIPVAVAKQVSKYNTLGKEEMSIYLVRKILQFMLILGGVFALIMYIGSPLFASLSKGGQELVPILRSLTLAVLVFPSMSVLRGFFQGFNNLKPYAISQVAEQIIRVIWMLLTAFYIMRLGSGDYIAAVTQSTFAAFVGMFASIAVLLYFLWRYNMLSALISKTPEHIKLDTKEILIETVKEAIPFIITGAAIQIFKLIDQFSFGNTMALFTNYSSEELRVMFAYFSSNPGKVTMILIAVATAIAGVGIPLLTENFVKNDKKAAARLVVNNLQMLLMFLLPAVAGSVILAKPLYTVFYGLPQGQALGLFVISLIQTIILSIYTVLAPMLQALFENRKAIIYFLYGLVAKVILQVPSIFLFHAYGPLFSTTVALCIPVILMYLKIHEITGFKRQAIRRTSALVLILTLLMSFIISMIIWLMNLVIVPDSRLVSLVYIIVIGAIGLGVYGFMALATHLLDKMIGSRAQDLRRKLHLN

SEQ ID NO: 16053 - protein, 1449 aa, Streptococcus agalactiae
ATGATTACAATAGATAAAATTTTAGAAATTTTAAAAAATGACCATAATTTCAGAGAGATTTTGTTTCATGAGCATTATTATTATAACTGGACACAAAATGTAACTTTTAATGCCTTATCATATGATAGTCGTCAAATTTCATCTGATACTTTATTTTTTGCTAAGGGTGCCACTTTTAAAAAAGAATATCTAGATTCTGCAATCACAGCAGGCCTTTCTTTTTACGTTTCTGAGATAGATTACGGCGCCGATATTCCAGTGATATTAGTCAATGATATCAAAAAAGCCATGAGTTTGATATCTATGTCTTTCTATAATAACCCACAAAACAAACTTAAACTTCTAGCTTTTACTGGAACAAAAGGAAAAACAACTGCGGCTTACTTTGCTTATCATATGCTAAAAGTAAACCATCGTCCTGCTATGCTCTCAACTATGAACACAACATTAGATGGTAAATCTTTCTTTAAATCACATCTCACAACCCCCGAGAGTCTTGATTTATTTCGGATGATGGCTACAGCCGTTGAGAATCAAATGACACACTTAGTCATGGAAGTATCAAGCCAAGCATACCTAACCAAACGTGTTTATGGTTTAACCTTTGACGTTGGCGTTTTCTTAAATATTAGTCCCGATCATATTGGTCCTATCGAGCACCCTACATTCGAAGATTATTTTTTCCACAAACGGCTCTTGATGGAGAATAGCAATGCTGTCGTTGTAAATAGTCAGATGGATCATTTTAATATTGTCAAAGAACAGGTAGAATATATTCCTCATGATTTCTATGGAGATTATTCTGAAAATGTTATCACAGAATCACAGGCCTTTTCTTTCCATGTCAAAGGAAAGTTGGAGAACACCTACAATATCAACCTGATTGGAAAATTCAATCAAGAAAATGCTCTCGCAGCTGGACTTGCTTGTCTCCGACTTGGTGTTTCAATTGAAGATATAAAAAACGGAATTGCACAAACTACCGTCCCTGGCCGCATGGAAGTCCTAACACAAACCAACGGCGCAAAGATTTTCGTTGACTATGCCCACAACGGAGACAGTTTGAAGAAATTATTAGCTGTTGTTGAGGAACACCAAAAAGGGGATATTATATTAGTGCTCGGAGCTCCTGGTAATAAAGGTCAAAGCCGTCGTAAAGACTTCGGAGATGTCATTAATCAACATCCTAATCTACAAGTGATACTCACTGCAGATGATCCTAATTTTGAAGATCCCTTAGTTATCTCACAAGAAATCGCAAGCCATATTAATCGTCCGGTTACTATCATCATTGATCGAGAAGAAGCAATTGCTAATGCCAGTACTCTTACTAATTGCAAACTAGATGCAATTATTATCGCTGGTAAAGGGGCAGATGCTTATCAAATTATCAAAGGAAATCGTGACAATTACTCTGGAGATTTAGAAGTTGCGAAAAAATACCTTAAA

SEQ ID NO: 16054 - protein, 483 aa, Streptococcus agalactiae
MITIDKILEILKNDHNFREILFHEHYYYNWTQNVTFNALSYDSRQISSDTLFFAKGATFKKEYLDSAITAGLSFYVSEIDYGADIPVILVNDIKKAMSLISMSFYNNPQNKLKLLAFTGTKGKTTAAYFAYHMLKVNHRPAMLSTMNTTLDGKSFFKSHLTTPESLDLFRMMATAVENQMTHLVMEVSSQAYLTKRVYGLTFDVGVFLNISPDHIGPIEHPTFEDYFFHKRLLMENSNAVVVNSQMDHFNIVKEQVEYIPHDFYGDYSENVITESQAFSFHVKGKLENTYNINLIGKFNQENALAAGLACLRLGVSIEDIKNGIAQTTVPGRMEVLTQTNGAKIFVDYAHNGDSLKKLLAVVEEHQKGDIILVLGAPGNKGQSRRKDFGDVINQHPNLQVILTADDPNFEDPLVISQEIASHINRPVTIIIDREEAIANASTLTNCKLDAIIIAGKGADAYQIIKGNRDNYSGDLEVAKKYLK

SEQ ID NO: 16055 - protein, 792 aa, Streptococcus agalactiae
ATGTCTCACATAAAATCAGAAAACATTATTGTATCTTACGATCAGAAAGAAATCATCAATAATCTTTCCCTCAGTATACTTAACCAAAAAATAACAACGATTATTGGTGCCAATGGATGTGGAAAGTCTACTCTTTTGAAGGCTCTCACACGGATCCATAAAATAAAAGATGGTACTATCACTATTGATGGTCATGATATTGCACATTTACCCACAAAGGAAATTGCTAAGAAGATTGCACTTCTCCCACAGGTGTTAGAAGCAACTGAAGGGATAACAGTTTATGAACTAATATCTTATGGACGGTTCCCACACCAAAAATACCTTGGCAATTTGACAAATGATGATCGTAGTAAAATCCATTGGGCGATGGAAATGACTAACGTAGCGCAATTTGCTAATAGAGATGTTGATGACCTTTCAGGAGGTCAGAGGCAAAAAGTATGGATTGCTATGGCTTTAGCACAAGATACAGATACTATCTTTTTAGACGAACCTACAACTTATCTTGACATGAATCATCAATTAGAAGTCTTAGAATTGCTCAAAAAACTTAATAACGAAACGCAAAAAACAATTATTATGGTCCTACACGACCTAAACCTGTCTGCGCGCTATTCTGATTATCTAGTTGCAATGAAAACCGGTAAAATTATCTATGAAGGTAGTCCTAGTCAGATCATGACTAAAGATATTATCAAAGATATTTTTAAGATTGATGCTCATATCATTCAGGACCCTATTAGTAAACAACCTGTTTTGTTATCTTATCAATTATCAACTGATCAAAAT

SEQ ID NO: 16056 - protein, 264 aa, Streptococcus agalactiae
MSHIKSENIIVSYDQKEIINNLSLSILNQKITTIIGANGCGKSTLLKALTRIHKIKDGTITIDGHDIAHLPTKEIAKKIALLPQVLEATEGITVYELISYGRFPHQKYLGNLTNDDRSKIHWAMEMTNVAQFANRDVDDLSGGQRQKVWIAMALAQDTDTIFLDEPTTYLDMNHQLEVLELLKKLNNETQKTIIMVLHDLNLSARYSDYLVAMKTGKIIYEGSPSQIMTKDIIKDIFKIDAHIIQDPISKQPVLLSYQLSTDQN

SEQ ID NO: 16057 - protein, 157 aa, Streptococcus agalactiae
ATGAAAAAAATTGGAATTATTGTCCTCACACTACTGACCTTCTTTTTGGTATCTTGCAGACAACAAACTAAAGAAGAAAGCACTAAAACAACTATTTCTAAAATGCCTAAAATTGAAGGCTTCACCTATTATGGAAAAATTCTGAAATCCGAAAAAG

SEQ ID NO: 16058 - protein, 53 aa, Streptococcus agalactiae
MKKIGIIVLTLLTFFLVSCRQQTKEESTKTTISKMPKIEGFTYYGKIPENPKK

SEQ ID NO: 16059 - protein, 594 aa, Streptococcus agalactiae
ATGGTTTTCGATCAAGATCCAAACATCAATACTCTGAAAAAAATTGCACCAACTTTAGTTATTAAATATGGTGCACAAAATTATTTAGATATGATGCCAGCCTTGGGGAAAGTATTCGGTAAAGAAAAAGAAGCTAATCAGTGGGTTAGCCAATGGAAAACTAAAACTCTCGCTGCCAAAAAAGATTTACACCATATCTTAAAGCCTAACACTACTTTTACTATTATGGATTTTTATGATAAAAATATCTATTTATATGGTAATAATTTTGGACGCGGTGGAGAACTAATCTATGATTCACTAGGTTATGCTGCCCCAGAAAAAGTCAAAAAAGATGTCTTTAAAAAAGGGTGGTTTACCGTTTCGCAAGAAGCAATCGGTGATTACGTTGGAGATTATGCCCTTGTTAATATAAACAAAACGACTAAAAAAGCAGCTTCATCACTTAAAGAAAGTGATGTCTGGAAGAATTTACCAGCTGTCAAAAAAGGGCACATCATAGAAAGTAACTACGACGTGTTTTATTTCTCTGACCCTCTATCTTTAGAAGCTCAATTAAAATCATTTACAAAGGCTATCAAAGAAAATACAAAT

SEQ ID NO: 16060 - protein, 198 aa, Streptococcus agalactiae
MVFDQDPNINTLKKIAPTLVIKYGAQNYLDMMPALGKVFGKEKEANQWVSQWKTKTLAAKKDLHHILKPNTTFTIMDFYDKNIYLYGNNFGRGGELIYDSLGYAAPEKVKKDVFKKGWFTVSQEAIGDYVGDYALVNINKTTKKAASSLKESDVWKNLPAVKKGHIIESNYDVFYFSDPLSLEAQLKSFTKAIKENTN

SEQ ID NO: 16061 - protein, 1022 aa, Streptococcus agalactiae
ATGTTTAAAGCTTCAAAAAAACTCGTTCAAAAAATAAGTCAAATCATTTTTGGCTTGTTTTTTTCATAACACTTATACTATTTCTTATTGGTTGTTACGCCAGCTTACGATTTGGTGCTATCAATTTCAAGACTAGTGATTTAATAACTGTTTTAAAAAATCCCTTAAAAAACTCTAATGCTCAGGATGTTATTTTTGACATTAGACTACCACGCATAATTGCAGCTATCTTAGTAGGTGCAGCTATGTCACAAGCAGGTGCTATTATGCAGGGAGTCACTCGAAACGCCATTGCTGATCCTGGACTACTAGGTATTAACGCCGGAGCTGGGTTAGCCCTTGTTGTTGCATATGCTTTTTTAGGGAGCATGCACTATAGTACGATTCTCATTGTCTGCTTACTAGGGTCTGTCATTTCTTGTCTTTTAGTCTTCACACTCTCTTATACAAAGCAAAAGGGTTACCACCAACTACGACTCATTTTAGCTGGAGCGATGATCTCCACACTTTTTACGTCTGTTGGACAAGTGGTTACATTATACTTTAAACTCAATCGAACTGTTATCGGTTGGCAAGCAGGTGGTTTATCCCAAATTAACTGGAAAATGCTAATCATAATAGCACCTATCATTATTTTAGGTTTACTTATTTCACAACTCCTAGCACATCAATTAACTATCTTGAGCCTTAATGAATCTGTGGCCAAAGCATTGGGACAAAAAACTCAATTAATGACTGCGTTTCTATTACTTATTGTTTTGTTTTTATCGGCTTCATCAGTCGCGTTGATAGGAACCGTTTCTTTCATTGGATTGATTATTCCACATTTTATTAAGCTTTTTATTCCCAAAGATTATCGTCTGTTATTACCTTTAATAGGATTTTCAGGGGCTACTTTCATGATCTGGGTAGACTTATCATCTCGTATTATAAATCCCCCTTCAGAGACACCAATTAGTTCTATAATCAGTATCGTAGGGCTTCCATGTTTCCTATGGTTAATTAGAAAAGGGAAAAATCTA

SEQ ID NO: 16062 - protein, 341 aa, Streptococcus agalactiae
MFKASKKLVQKNKSNHFWLVFFITLILFLIGCYASLRFGAINFKTSDLITVLKNPLKNSNAQDVIFDIRLPRIIAAILVGAAMSQAGAIMQGVTRNAIADPGLLGINAGAGLALVVAYAFLGSMHYSTILIVCLLGSVISCLLVFTLSYTKQKGYHQLRLILAGAMISTLFTSVGQVVTLYFKLNRTVIGWQAGGLSQINWKMLIIIAPIIILGLLISQLLAHQLTILSLNESVAKALGQKTQLMTAFLLLIVLFLSASSVALIGTVSFIGLIIPHFIKLFIPKDYRLLLPLIGFSGATFMIWVDLSSRIINPPSETPISSIISIVGLPCFLWLIRKGKNL

SEQ ID NO: 16063 - protein, 999 aa, Streptococcus agalactiae
ATGATTCAAAAAAATAAAGCTCCTTTTGTTTTAATATCATCTGTCATTATCCTACTATTATTAATACTAGTATCAATTTCACTTGGCTATGCTAATACTTCCGTTATTGACGTTTTAAAACTAATAAGTGGAAAATCTGATGATGCCTTCCTTTTTATCATTACTAACATTCGTTTACCTCGTATTATTGTCTGTATCTTTGGGGGAGCTTCTTTAGGAATTGCTGGGTTGCTATTACAGACATTAACCAAAAATCCACTAGCTGATTCCGGTATTCTTGGTATCAATGCTGGAGCTGGATTAGTAATCGCTCTAACCATAGGAACATTTAATGTTAGCAATCCAACTATATTATACTTTTTACCCCTATTTGCTATGTTTGGAGGGTTGGTAACTATTTTTCTTGTCTATCTTATGTCATACAGAAGAAATCACAATATTAGCCCTACACGATTAATCATCACTGGTATCGGAATATCTACAATGATTTCAGGCGTTATGATTTCTATTATTAGTCAGTCTAATAATCAAAAAATGGATATGATCGTTGAATGGCTTAGTGGAAAAATTACAATTAGTTCCTGGACTACCATTATCACTTTTATCCCGATTCTCATTTTGTTATGGGGATTAGCATATAGTCGCAGTCGCCACCTTAATATTATGAACCTAAACGAGCAGACTGCTCTCGCTCTAGGGCTTCATTTAAAAAAGGAAAGAATATATACTTTGATGCTGGCAAGTAGCCTTGCTGCTATTAGCGTCGTCTTAATTGGTAATATTACTTTTATAGGCTTACTCGCTGGGCACTTAAGTAGACGACTATTAGGAAATAACCATAAAATTATACTACCTAGCTGTCTTCTTATTGGTGCTATTATCCTATTGGTATCAGATACTATAGGTCGTCTCCTCTTAGTTGGTACAGGTATACCCACTGGATTGGTTGTATCAATAATTGGTGCCCCCTATTTTCTCTGGTTGATGACAAAAGTTGAC

SEQ ID NO: 16064 - protein, 333 aa, Streptococcus agalactiae
MIQKNKAPFVLISSVIILLLLILVSISLGYANTSVIDVLKLISGKSDDAFLFIITNIRLPRIIVCIFGGASLGIAGLLLQTLTKNPLADSGILGINAGAGLVIALTIGTFNVSNPTILYFLPLFAMFGGLVTIFLVYLMSYRRNHNISPTRLIITGIGISTMISGVMISIISQSNNQKMDMIVEWLSGKITISSWTTIITFIPILILLWGLAYSRSRHLNIMNLNEQTALALGLHLKKERIYTLMLASSLAAISVVLIGNITFIGLLAGHLSRRLLGNNHKIILPSCLLIGAIILLVSDTIGRLLLVGTGIPTGLVVSIIGAPYFLWLMTKVD

SEQ ID NO: 16065 - protein, 647 aa, Streptococcus agalactiae
ATGATATTAACGTTTAATCCAGGAAAGTTAGAAAGACAAGAGTTTTTTGGAGCTTATTAACTATCTTTGGATACATGATGATGTAACACTAAGACAAATAAAGTCCCACTTTACAGACTATTCTAAAATTGACCGTTTGTTAGAAGAATATATTAATCATGGATATATCCTTCGCCAAAATAAACGCTACAGCCTTAATCTTCCTTTTCTGAGTTCGCTGGATGGATTAGCATTAGAGATTTGGTTTTCATAGATTCTGCTAGTCAAATCTATCAGTTATTACAGAAGCGAAAATTTGTGACAAATTTAGATAACCAAACCAATCACTTGGTATTTGTAGAAGAGACAGATTTTGAAAGAAACACTTTGACTCTTTCTAATTATTTCTATAAACTAACTAACTGTTATCCACTTTCAAGAGAACAAAAAAAGCTTTATCAACTTTTAGGAGATGTTAATTCGGAATATGCTTTAAAATATATGTCAAGCTTTATATTGAAATTTCTTCGCAAGGATAGTGTTAAGCAAAAACGTACAGATATTTTTATCCAAGCTTTAGAATTACTTGGATATATTAGCTTAAACCAAGATACTACCTATCGTTTAATGCTAAACTTGATGTTGAAGCTTTAAAGATTTACTTAACA

SEQ ID NO: 16066 - protein, 217 aa, Streptococcus agalactiae
  VARIANT 17, 80: Xaa = Any Amino Acid
MILTFNPGKLERQEFFXELINYLWIHDDVTLRQIKSHFTDYSKIDRLLEEYINHGYILRQNKRYSLNLPFLSSLDGLALXDLVFIDSASQIYQLLQKRKFVTNLDNQTNHLVFVEETDFERNTLTLSNYFYKLTNCYPLSREQKKLYQLLGDVNSEYALKYMSSFILKFLRKDSVKQKRTDIFIQALELLGYISLNQDTTYRLNAKLDVEALKIYLT

SEQ ID NO: 16067 - protein, 933 aa, Streptococcus agalactiae
ATGTCTAAAATTTTAGTCTTTGGTCACCAAAATCCAGATTCAGATGCTATTGGATCATCAGTTGCTTTTGCATATCTAGCTAAAGAAGCTTGGGGGCTTGACACAGAGGCCGTTGCTTTAGGAACTCCAAATGAAGAAACAGCATATGTTTTAGATTATTTTGGTGTTCAAGCACCTCGAGTAGTAGAATCTGCAAAAGCAGAGGGTGTAGAGACAGTCATTTTAACTGACCATAACGAATTCCAACAATCTATTTCTGATATTAAAGATGTGACAGTTTATGGTGTTGTTGATCATCATCGTGTTGCTAACTTTGAGACTGCCAATCCGTTATATATGCGTTTGGAACCAGTTGGCTCAGCATCATCGATTGTTTACCGTATGTTTAAGGAAAATGGAGTATCAGTACCCAAAGAGTTGGCTGGTTTATTATTATCAGGTTTGATTTCAGATACTCTTCTTTTGAAATCACCAACAACTCATGCTTCAGATATTCCAGTTGCAAAAGAACTAGCAGAGCTTGCAGGTGTAAACTTAGAAGAATATGGTTTAGAAATGCTTAAAGCAGGTACTAACCTCTCAAGTAAGACTGCAGCGGAGTTAATTGATATTGATGCTAAAACATTTGAATTAAATGGAGAAGCTGTTCGTGTTGCACAAGTTAATACTGTGGACATTAACGATATTTTAGCACGTCAAGAAGAGATTGAAGTTGCTATTCAAGAAGCAATTGTCACAGAAGGTTATTCGGATTTTGTATTGATGATTACTGACATTGTTAATTCAAATTCAGAGATTTTAGCTCTCGGTTCAAATATGGCTAAAGTTGAAGCAGCTTTTGAATTTACATTTGAAAATAACCACGCTTTTCTTGCTGGGGCAGTATCACGTAAAAAACAAGTTGTTCCTCAATTGACAGAAAGCTACAATGCT

SEQ ID NO: 16068 - protein, 311 aa, Streptococcus agalactiae
MSKILVFGHQNPDSDAIGSSVAFAYLAKEAWGLDTEAVALGTPNEETAYVLDYFGVQAPRVVESAKAEGVETVILTDHNEFQQSISDIKDVTVYGVVDHHRVANFETANPLYMRLEPVGSASSIVYRMFKENGVSVPKELAGLLLSGLISDTLLLKSPTTHASDIPVAKELAELAGVNLEEYGLEMLKAGTNLSSKTAAELIDIDAKTFELNGEAVRVAQVNTVDINDILARQEEIEVAIQEAIVTEGYSDFVLMITDIVNSNSEILALGSNMAKVEAAFEFTFENNHAFLAGAVSRKKQVVPQLTESYNA

SEQ ID NO: 16069 - protein, 394 aa, Streptococcus agalactiae
TTGTTAGATGTTACTGATTTGGTACTCCTTGACTTAAAAGAAATTGATCCAGAACAACATAAAATTGTAACTCGTCAGTCTAACAAAAATATTTTACAGTTGCTAGATATTATCTGATAGAGGTACTCCGGTATGGATTCGTCATGTTTTAGTTCCTGGATTGACTGATATTGATGACCATTTAAAACGTTTGGGTGAATTTGTCCAAACACTTGATAATGTCGATAAATTTGAAGTATTGCCTTATCATACTATGGGAGAGTTCAAATGGCGTGAATTAGGAATTCCGTATCCATTAGCTGGTGTGAAACCACCAACTCCAGAACGTGTTAAAAACGCTAAAGATATCATGAAAACAGAATCCTATACAGAATATCTAAAAAGAATTCAAAAT

SEQ ID NO: 16070 - protein, 132 aa, Streptococcus agalactiae
MLDVTDLVLLDLKEIDPEQHKIVTRQSNKNILQFARYLSDRGTPVWIRHVLVPGLTDIDDHLKRLGEFVQTLDNVDKFEVLPYHTMGEFKWRELGIPYPLAGVKPPTPERVKNAKDIMKTESYTEYLKRIQN

SEQ ID NO: 16071 - protein, 392 aa, Streptococcus agalactiae
ATGGCAGAAATAGACTATAAAAAAGTAACAGGAATGATCCATTCTACAGAAAGTTTCGGCTCTGTGGATGGGCCAGGTATTCGTTTTATCATTTTTATGCAAGGATGTAAAATGCGTTGTCAATACTGTCATAATCCTGATACTTGGGAAATGGAAACTAACAATTCAAAGGAACGCACCGTTGAGGATGTTCTAAAAGAAGCTCTTCGTTATAAACATTTTTGGGGAAAAGATGGAGGTATCACAGTTTCAGGTGGTGAAGCAATGCTGCGAATTGACTTTATTACAGCTCTCTTTATTGAGGCTAAGAAACTAGGTATTCATACGACGCTAGATACTTGTGGTTTTGCTTATCGAGCAACCAGAATACCATGCTATCCTTGAAAAATTGT

SEQ ID NO: 16072 - protein, 131 aa, Streptococcus agalactiae
MAEIDYKKVTGMIHSTESFGSVDGPGIRFIIFMQGCKMRCQYCHNPDTWEMETNNSKERTVEDVLKEALRYKHFWGKDGGITVSGGEAMLRIDFITALFIEAKKLGIHTTLDTCGFAYRAHQNTMLSLKNC

SEQ ID NO: 16073 - protein, 1332 aa, Streptococcus agalactiae
ATGGAAGACCCTGGCAGTCAGAGTTTGTTACTACAATTTGTTATTTTATTAATATTAACCCTGTTTAACGCCTTCTTTTCAGCATCTGAAATGGCTTTAGTATCGCTAAACCGCTCTAAAGTAGAACAGAAAGCTGAAGAAGGGGACAAAAGGTATCGACGTCTTTTGGACGTTCTTGAAAATCCCAATAATTTTTTATCAACAATTCAAGTTGGTATTACTTTTATTAGCCTTTTGCAAGGGGCTAGTTTATCTGCCTCACTAGGACATGTGATTTCAGGATGGCTAGGAAATTCAGCAACAGCCCGTACAGCAGGGAGTATTATTGCGCTAATCTTTTTAACATATGTCTCTATTGTTCTAGGAGAATTATATCCTAAGCGTATTGCTATGAATTTGAAAGATCGTCTAGCGATTGTTTCAGCTCCCATTATTATCTTTCTGGGGAAAATAGTAAGCCCCTTTGTATGGTTGCTCTCAGCTTCAACTAACTTATTGAGTAGAATCACTCCGATGACTTTTGATGATGCTGACGAGAAGATGACACGTGATGAAATTGAATATATGTTGACGAATAGTGAAGAAACTTTGGATGCTGAAGAAATTGAGATGCTGCAAGGGATTTTCTCGCTAGATGAAATGATGGCGCGTGAAGTTATGGTTCCGCGTACTGATGCTTTCATGATTGACATCAACAATGATGCACAATCAAATATTGAAGGAATTTTATCACAAAACTTTTCTCGTGTCCCTGTTTATGATGACGATAAAGATAGAGTTGTTGGTGTTTTACATACCAAGCGCTTATTGGAAGCGGGCTTTAAAACTGGTTTTGATACTATCGACTTGCGAAAAATACTTCAGGAACCTCTTTTTGTTCCAGAAACGATTTTTGTAGATGATCTTTTAAAAGCATTACGCAACACTCAAAATCAAATGGCCATTTTACTAGATGAATATGGTGGCGTTGCTGGTTTAGTAACTCTAGAGGATTTATTGGAAGAAATTGTCGGCGAAATTGATGATGAAACAGATACAGCTGAACAATTTGTCAGGGAAATCGATGAGAATATCTATATTGTTCTAGGAACTATGACGCTTAATGAATTTAATGATTATTTTGAGACAGAGTTAGAAAGTGATGATGTTGATACAATTGCGGGTTATTATTTAACTGGTGTGGGTAGTATTCCAAACCAAGAGGAAAAAGTAGCTTACGAAGTAGACAGCAAAGATAAACGCATCACTTTGATTAATGATAAAGTTAAAGATGGTCGTATAACAAAATTGAAAGTGCTATTGTCTGATATAGAACAGAATATTGAAAAAGAC

SEQ ID NO: 16074 - protein, 444 aa, Streptococcus agalactiae
MEDPGSQSLLLQFVILLILTLFNAFFSASEMALVSLNRSKVEQKAEEGDKRYRRLLDVLENPNNFLSTIQVGITFISLLQGASLSASLGHVISGWLGNSATARTAGSIIALIFLTYVSIVLGELYPKRIAMNLKDRLAIVSAPIIIFLGKIVSPFVWLLSASTNLLSRITPMTFDDADEKMTRDEIEYMLTNSEETLDAEEIEMLQGIFSLDEMMAREVMVPRTDAFMIDINNDAQSNIEGILSQNFSRVPVYDDDKDRVVGVLHTKRLLEAGFKTGFDTIDLRKILQEPLFVPETIFVDDLLKALRNTQNQMAILLDEYGGVAGLVTLEDLLEEIVGEIDDETDTAEQFVREIDENIYIVLGTMTLNEFNDYFETELESDDVDTIAGYYLTGVGSIPNQEEKVAYEVDSKDKRITLINDKVKDGRITKLKVLLSDIEQNIEKD

SEQ ID NO: 16075 - protein, 1164 aa, Streptococcus agalactiae
ATGACAAAACACAAACACCTAACTCTCTCAGACCGTAATGACATCCAATCTGGTTTGGATAGAGGAGAAACCTTTAAAGCCATCGGGCTTAATCTACTGAAACACCCTACTACTATCGCAAAAGAAGTCAAACGAAATAAGCAACTGAGAGAATCAACCAAAGACTGCCTAGACTGTCCGCTACTAAGAAAAGCTCCCTATGTTTGTAATGGGTGTCCAAAGAGGAGGATCAACTGTGGTTACAAGAAGACCTTCTATCTTGCTAAGCAAGCTCAAAGAAACTATGAAAAACTTTTAGTTGAATCTAGAGAAGGAATCCCTTTGAACAAAGAGACCTTCTGGAAAATAGATAGAGTGCTTTCTAATGGGGTCAAGAAGGGCCAACGTATCTATCATATCCTCAAAACCAACGATCTAGAAGTGAGTTCTTCAACCGTTTATCGACACATCAAGAAAGGCTACCTATCCATCACACCAATCGACCTACCCAGAGCTGTGAAGTTCAAAAAAAGGCGAAAGAGCACACTCCCTCCTATTCCAAAAGCGATTAAAGAAGGGCGACGGTACGAGGATTTTATAGAACACATGAACCAATCAGAGCTGAACTCCTGGCTTGAAATGGACACGGTTATTGGACGGATTGGTGGAAAGGTCCTTCTCACCTTCAATGTCGCCTTCTGTAACTTCATCTTTGCCAAACTGATGGATTCTAAGACAGCTATCGAAACTGCTAAACACATACAGGTCATTAAGAGGACACTCTATGATAACAAGAGAGACTTCTTCGAACTCTTTCCTGTTATCCTAACGGATAATGGTGGGGAATTCGCTAGAGTGGATGATATTGAGATAGATGTTTGTGGACAGTCTCAACTCTTCTTTTGTGACCCTAATCGGTCTGACCAGAAAGCAAGAATCGAGAAGAATCATACCCTCGTGAGAGACATACTGCCTAAGGGGACTTCCTTCGACAACTTGACTCAAGAGGACATTAATCTGGCACTATCTCATATCAACAGCGTTAAGAGACAGGCTCTAAATGGTAAAACGGCTTATGAGCTATTCTCTTTTACTTACGGAAAAGACATCGCAAGTATACTCGGTATTGAGGAAATTACTGCGGAAGACGTCTGCCAATCTCCCAAACTATTAAAAGACAAAATC

SEQ ID NO: 16076 - protein, 388 aa, Streptococcus agalactiae
MTKHKHLTLSDRNDIQSGLDRGETFKAIGLNLLKHPTTIAKEVKRNKQLRESTKDCLDCPLLRKAPYVCNGCPKRRINCGYKKTFYLAKQAQRNYEKLLVESREGIPLNKETFWKIDRVLSNGVKKGQRIYHILKTNDLEVSSSTVYRHIKKGYLSITPIDLPRAVKFKKRRKSTLPPIPKAIKEGRRYEDFIEHMNQSELNSWLEMDTVIGRIGGKVLLTFNVAFCNFIFAKLMDSKTAIETAKHIQVIKRTLYDNKRDFFELFPVILTDNGGEFARVDDIEIDVCGQSQLFFCDPNRSDQKARIEKNHTLVRDILPKGTSFDNLTQEDINLALSHINSVKRQALNGKTAYELFSFTYGKDIASILGIEEITAEDVCQSPKLLKDKI

SEQ ID NO: 16077 - protein, 564 aa, Streptococcus agalactiae
ATGATTAAAAGACCAATTCATCTTTCTCATGATTTTTTAGCAGAAGTTATTGATAAAGAAGCAATAACGCTTGATGCAACTATGGGAAATGGGAATGATACTGTTTTTTTAGCGAAAAGTTCTAAAAAAGTTTATGCATTTGATATTCAAGAAGAAGCAATAGCAAAAACGAAAGCAAAGCTCACGGAGCAAGGGATCTCTAACGCTGAACTTATCTTGGATGGGCATGAAAATTTGGAACAGTATGTTCATACACCTTTAAGAGCGGCTATATTTAATCTGGGATACTTACCCTCAGCGGATAAAACAGTTATTACAAAACCACACACAACTATCAAGGCAATCAAAAACGTTTTAGACATTTTAGAAGTAGGTGGACGTCTATCACTTATGGTTTATTATGGTCATGATGGTGGAAAAAGTGAGAGAGATGCGGTGATAGCATTCGTGGAACAATTACCACAGAATAATTTCGCTACAATGCTTTATCAACCACTCAATCAAGTTAATACGCCCCCCTTTTTAATTATGGTAGAAAAGTTACAATCATATGAAAATGAGGTG

SEQ ID NO: 16078 - protein, 188 aa, Streptococcus agalactiae
MIKRPIHLSHDFLAEVIDKEAITLDATMGNGNDTVFLAKSSKKVYAFDIQEEAIAKTKAKLTEQGISNAELILDGHENLEQYVHTPLRAAIFNLGYLPSADKTVITKPHTTIKAIKNVLDILEVGGRLSLMVYYGHDGGKSERDAVIAFVEQLPQNNFATMLYQPLNQVNTPPFLIMVEKLQSYENEV

SEQ ID NO: 16079 - protein, 933 aa, Streptococcus agalactiae
ATGAAAAAACGTTATCGTGCGATTAATGATTATTATCGAGAACTCTTTGGAGAAAAAATATTTAAATTACCTATAGATGCTGGTTTTGACTGTCCTAACAGAGATGGAACAGTTGCTAGAGGAGGGTGCACTTTTTGCACAGTTTCTGGTTCAGGGGATGCTATAGTTGCTCCAGAAGCTCCTATTCGTGAACAATTCTATAAAGAAATTGATTTCATGCATAGAAAGTGGCCTGAGGTTAATAAATACTTAGTCTATTTTCAAAATTTTACCAATACCCATGCTAAGTTAGAGATAATTAAAGAGCGTTACGAACAGGCTATTAATGAGCCAGGAGTTATCGGGATCAACATCGGAACAAGGCCGGATTGCTTACCTGATGAAACTATATACTATCTCGCTGAACTTTCTGAAAGAATGCATGTGACTTTAGAATTAGGCCTTCAGACAACTTATGAAGCAACTTCTGCATTAATAAATAGAGCACATTCATATGACCTTTACAAAAAAACTGTTAAGAGAGTACGAGAATTAGCTCCTAAAGTAGAAATCGTTTCTCACCTAATAAATGGTCTCCCAGGGGAGACACATGATATGATGGTGGAAAATGTTCGTCGATGTGTTACGGATAATGATATTCAGGGTATAAAATTACACCTTCTGCATCTTATGATTAATACAAGAATGCAGAGAGATTACCATGAAGGTCGTTTACGTTTGTTAAGTCAAGAAGACTATATTTCGATTATTTGTGACCAACTGGAGATTATTCCAAAACATATTGTTATTCACCGAATTACTGGTGATGCGCCACGTCATATGTTAATTGGACCGATGTGGAGCCTTAATAAATGGGAAGTGCTTAATGCCATTGACAAAGAAATGGAGAAAAGACAGTCATATCAAGGATGTAAAGTTGAGGTAAAACATGAT

SEQ ID NO: 16080 - protein, 311 aa, Streptococcus agalactiae
MKKRYRAINDYYRELFGEKIFKLPIDAGFDCPNRDGTVARGGCTFCTVSGSGDAIVAPEAPIREQFYKEIDFMHRKWPEVNKYLVYFQNFTNTHAKLEIIKERYEQAINEPGVIGINIGTRPDCLPDETIYYLAELSERMHVTLELGLQTTYEATSALINRAHSYDLYKKTVKRVRELAPKVEIVSHLINGLPGETHDMMVENVRRCVTDNDIQGIKLHLLHLMINTRMQRDYHEGRLRLLSQEDYISIICDQLEIIPKHIVIHRITGDAPRHMLIGPMWSLNKWEVLNAIDKEMEKRQSYQGCKVEVKHD

SEQ ID NO: 16081 - protein, 639 aa, Streptococcus agalactiae
ATGTTATCTCGTCAAAATAGTAAACTTATTCAAGCATTTATTGCTATTATCTTATTTTTCAGTTTAGGATTGGTCATCAAATATTGGCCCGACACTGTAATCGCATTTGACCAAACTATTCAAGAAAGTGTTAGAGGACAGTTGCCAAATCTTTCTACAAGATTTTTTAAGTTAATCACTGTGGTTGGTAATACTGTAAGCCAGATAGCTATTGCGATTATGAGCGTCACTTTCTGTTACCTTAAGAAGTGGTATCCTCAAGCTAGATTTATCGCAGTAAATGCTATTATCTCTGGTATATGTATACTTTCTTTAAAACTTATTTTTCAAAGAGTGAGACCAACTTTAACCCATTTAGTATTTGCAGGTGGCTATTCGTTTCCCAGTGGGCACTCGATGGGAACATTTATGATATTTGGGAGTAGTATTATTTTATTGCAGTACTATATGCCTAAGAGTATATGGAAACTGTTGTGCCAAGGTACATTGGGTTTGCTCATTTTTTTAATTGGGTTATCTCGTATTTACCTAGGGGTTCATTTTCCGACAGATGTTTTAGCTGGTTTTATACTTGCTTATGGTATTTTGAATCTAACTGCGTATATCTTTTTATCCAAGGATTGGTTAAAGAAAGTGAAG

SEQ ID NO: 16082 - protein, 213 aa, Streptococcus agalactiae
MLSRQNSKLIQAFIAIILFFSLGLVIKYWPDTVIAFDQTIQESVRGQLPNLSTRFFKLITVVGNTVSQIAIAIMSVTFCYLKKWYPQARFIAVNAIISGICILSLKLIFQRVRPTLTHLVFAGGYSFPSGHSMGTFMIFGSSIILLQYYMPKSIWKLLCQGTLGLLIFLIGLSRIYLGVHFPTDVLAGFILAYGILNLTAYIFLSKDWLKKVK

SEQ ID NO: 16083 - protein, 582 aa, Streptococcus agalactiae
ATGACAAATACACGTAAAATGGTGACAATCGCCATTCTTTCTGCCTTATCTTTTGTATTGATGATGGTTTCATTTCCATTAATACCAGGAGCAGAATTTTTAAAGGTTGATTTTTCAATCCTTCCGATGTTAGTTGCTTTTATTTTATTTGATTTGAAATCAAGTTATGGTGTACTCTTATTAAGATCACTTTTAAAAGTTATACTTGCTAATCGTGGTCCAGAAACCTTTATCGGTTTACCGATGAATATGGTTGCTCTAGCTCTATTTTTAGCAAGTTTCGCTATTTTCTGGAAAAATAGAGAGAGTGCAAAAGATTTTATTAAAGCTAGTTTATTTGGTACAGTTAGCTTGACTGTATCTATGGTAGCTCTCAACTATGTCTTTGCGATTCCTTTGTATGCTATATTTGCTAACTTTGATATCAGAACATTTATTGGTGTAGGCAATTACCTTTTAACAATGGTTATTCCATTTAATATCGTTGAGGGAATTTTAATTTCGATTGTTTTCTATCTAACTTACGTGGCTTGTTTGCCAATATTAGAAAGATATAAAAAGACTAATGTTATCTCGTCAAAA

SEQ ID NO: 16084 - protein, 194 aa, Streptococcus agalactiae; identical to SEQ ID NO: 2620

SEQ ID NO: 16085 - protein, 597 aa, Streptococcus agalactiae
GTGATTAGAAGATATTCAGCAAATTTTTTAGCTATACTCGGAATTATTCTGGTAAGTTCTGGAATCTATTGGGGTTGGTATAATATTAATCAGGCGCATCAAGCTGATTTAACTTCTCAGCATATTGTCAAGGTGCTTGATAAATCTATTACGCATCAAGTAAAGGGTTCAGAAAATGGAGAATTACCTGTAAAAAAGTTGGATAAAACAGATTACTTGGGAACTCTGGATATTCCGAACTTAAAACTGCATTTACCGGTAGCTGCTAATTATAGTTTTGAACAACTGTCTAAGACGCCTACAAGGTATTATGGTTCTTATTTAACTAATAACATGGTGATTTGTGCGCATAATTTTCCTTATCATTTTGATGCTTTAAAAAATGTAGATATGGGAACGGATGTTTATTTTACAACTACAACAGGGCAAATCTATCACTACAAAATCAGTAATAGAGAAATTATTGAACCAACAGCGATTGAAAAAGTTTATAAAACTGCCACATCAGACAATGATTGGGACTTAAGCTTGTTTACTTGTACAAAGGCAGGAGTAGCTAGAGTATTAGTGCGCTGTCAATTAATTGATGTTAAAAAT

SEQ ID NO: 16086 - protein, 199 aa, Streptococcus agalactiae
MIRRYSANFLAILGIILVSSGIYWGWYNINQAHQADLTSQHIVKVLDKSITHQVKGSENGELPVKKLDKTDYLGTLDIPNLKLHLPVAANYSFEQLSKTPTRYYGSYLTNNMVICAHNFPYHFDALKNVDMGTDVYFTTTTGQIYHYKISNREIIEPTAIEKVYKTATSDNDWDLSLFTCTKAGVARVLVRCQLIDVKN

SEQ ID NO: 16087 - protein, 669 aa, Streptococcus agalactiae
ATGATTTATAAAAAGATCCTAAAGATAACTCTTCTCTTATTATTTAGTCTAAGTACTCAACTTGTGTCTGCTGATACCAATGATCAGATGAAAACGGGTTCTATTACTATACAAAATAAGTATAATAATCAAGGTATCGCTGGCGGTAATTTACTTGTTTACCAAGTAGCACAAGCTAAAGATGTTGATGGTAATCAAGTTTTTACTCTAACTACCCCATTTCAAGGTATTGGAATAAAAGACGATGATCTAACACAAGTAAACCTTGATAGTAACCAAGCCAAATACGTCAATCTACTAACAAAAGCTGTTCATAAAACTCAACCTTTACAAACGTTTGATAATTTACCGGCTGAAGGTATTGTTGCGAACAATCTTCCTCAAGGGATTTATCTATTTATTCAGACTAAAACGGCTCAAGGTTATGAACTAATGTCTCCCTTTATACTATCAATACCTAAGGATGGGAAGTACGATATTACAGCATTTGAGAAAATGAGCCCTTTAAATGCTAAACCTAAAAAAGAAGAGACAATTACTCCTACAGTAACACATCAGACAAAGGGAAAGCTTCCGTTTACTGGACAAGTATGGTGGCCAATACCTATACTAATTATGTCAGGACTTCTGTGTTTAATAATAGCTTTAAAATGGAGAAGAAGACGTGAT

SEQ ID NO: 16088 - protein, 223 aa, Streptococcus agalactiae
MIYKKILKITLLLLFSLSTQLVSADTNDQMKTGSITIQNKYNNQGIAGGNLLVYQVAQAKDVDGNQVFTLTTPFQGIGIKDDDLTQVNLDSNQAKYVNLLTKAVHKTQPLQTFDNLPAEGIVANNLPQGIYLFIQTKTAQGYELMSPFILSIPKDGKYDITAFEKMSPLNAKPKKEETITPTVTHQTKGKLPFTGQVWWPIPILIMSGLLCLIIALKWRRRRD

SEQ ID NO: 16089 - protein, 804 aa, Streptococcus agalactiae
ATGGCTTATCCTTCACTTGCTAATTATTGGAATTCATTTCACCAATCTCGAGCGATTATGGATTACCAAGACCGCGTAACGCATATGGATGAAAACGATTATAAAAAAATTATTAACCGAGCCAAAGAATATAATAAGCAATTTAAAACTTCAGGAATGAAGTGGCACATGACTAGCCAAGAGCGTTTGGATTATAATTCACAACTGGCTATCGATAAAACGGGTAATATGGGTTATATTTCAATTCCAAAGATAAACATAAAATTACCACTTTATCATGGTACAAGTGAAAAAGTGCTTCAAACTTCTATTGGTCATTTAGAAGGAAGTAGTCTTCCAATTGGAGGAGACTCAACTCATTCTATTTTATCAGGACATAGAGGTTTACCCTCTTCAAGGCTTTTTTCTGATTTGGATAAGTTAAAAGTTGGAGACCACTGGACAGTCAGTATCTTAAATGAAACATATACTTATCAAGTGGATCAAATCAGAACAGTTAAACCGGATGATTTGAGGGATTTACAAATTGTTAAAGGTAAAGACTACCAAACTTTGGTGACGTGTACACCATATGGCGTTAATACCCATCGGTTACTAGTGAGAGGACATCGTGTACCAAACGATAATGGTAACGCTTTGGTAGTAGCAGAGGCAATACAAATAGAGCCTATTTATATCGCACCATTTATCGCTATTTTCCTTACTTTGATTTTACTTTTAATCTCTTTAGAAGTAACTAGGAGAGCACGTCAACGTAAGAAAATTTTAAAACAAGCAATGAGAAAGGAAGAGAACAATGATTTA

SEQ ID NO: 16090 - protein, 268 aa, Streptococcus agalactiae
MAYPSLANYWNSFHQSRAIMDYQDRVTHMDENDYKKIINRAKEYNKQFKTSGMKWHMTSQERLDYNSQLAIDKTGNMGYISIPKINIKLPLYHGTSEKVLQTSIGHLEGSSLPIGGDSTHSILSGHRGLPSSRLFSDLDKLKVGDHWTVSILNETYTYQVDQIRTVKPDDLRDLQIVKGKDYQTLVTCTPYGVNTHRLLVRGHRVPNDNGNALVVAEAIQIEPIYIAPFIAIFLTLILLLISLEVTRRARQRKKILKQAMRKEENNDL

SEQ ID NO: 16091 - protein, 1506 aa, Streptococcus agalactiae
ATGAAAAAGAAAATGATTCAATCGCTGTTAGTGGCGAGTTTAGCATTTGGTATGGCTGTATCACCAGTTACGCCGATAGCTTTTGCCGCTGAGACAGGGACAATTACAGTTCAAGATACTCAAAAAGGCGCAACCTATAAAGCATATAAAGTTTTTGATGCAGAAATAGATAATGCAAATGTATCTGATTCGAATAAAGATGGAGCTTCTTATTTAATTCCTCAAGGTAAAGAAGCTGAGTATAAAGCTTCAACTGATTTTAATTCTCTTTTTACGACAACTACTAATGGAGGGAGAACATATGTAACTAAAAAAGATACTGCGTCAGCAAATGAGATTGCGACATGGGCTAAATCTATATCAGCTAATACTACACCAGTTTCCACTGTTACTGAGTCAAATAATGATGGTACTGAGGTTATTAATGTTTCCCAATATGGATATTATTATGTTTCTAGCACTGTTAATAATGGAGCTGTGATTATGGTTACATCTGTAACTCCAAATGCTACTATTCATGAAAAGAATACTGATGCGACATGGGGAGATGGTGGTGGAAAAACTGTAGATCAAAAAACGTACTCGGTTGGTGATACAGTCAAATATACTATTACTTATAAGAATGCAGTCAATTATCATGGTACAGAAAAAGTGTATCAATATGTTATAAAGGATACTATGCCATCTGCTTCTGTAGTTGATTTGAACGAAGGGTCTTATGAAGTAACTATTACTGATGGATCAGGGAATATTACAACTCTAACTCAAGGTTCGGAAAAAGCAACTGGGAAGTATAACCTGTTAGAGGAAAATAATAATTTCACGATTACTATTCCGTGGGCAGCTACCAATACTCCAACCGGAAATACTCAAAATGGAGCTAATGATGACTTTTTTTATAAGGGAATAAATACAATCACAGTCACTTATACAGGAGTATTAAAGAGTGGAGCTAAACCAGGTTCAGCTGATTTACCAGAAAATACAAACATTGCGACCATCAACCCCAATACTAGCAATGATGACCCAGGTCAAAAAGTAACAGTGAGGGATGGTCAAATTACTATAAAAAAAATTGATGGTTCCACAAAAGCTTCATTACAAGGTGCTATATTTGTTTTAAAGAATGCTACGGGTCAATTTCTAAACTTTAACGATACAAATAACGTTGAATGGGGCACAGAAGCTAATGCAACAGAATATACAACAGGAGCAGATGGTATAATTACCATTACAGGCTTGAAAGAAGGTACATACTATCTAGTTGAGAAAAAGGCTCCCTTAGGTTACAATTTGTTAGATAACTCTCAGAAGGTTATTTTAGGAGATGGAGCCACTGATACGACTAATTCAGATAACCTTTTAGTTAACCCAACTGTTGAAAATAACAAAGGTACTGAGTTGCCTTCAACAGGTGGTATTGGTACAACAATTTTCTACATTATAGGTGCAATTTTAGTAATAGGAGCAGGTATCGTGCTTGTTGCTCGTCGTCGTTTACGTTCT

SEQ ID NO: 16092 - protein, 502 aa, Streptococcus agalactiae
MKKKMIQSLLVASLAFGMAVSPVTPIAFAAETGTITVQDTQKGATYKAYKVFDAEIDNANVSDSNKDGASYLIPQGKEAEYKASTDFNSLFTTTTNGGRTYVTKKDTASANEIATWAKSISANTTPVSTVTESNNDGTEVINVSQYGYYYVSSTVNNGAVIMVTSVTPNATIHEKNTDATWGDGGGKTVDQKTYSVGDTVKYTITYKNAVNYHGTEKVYQYVIKDTMPSASVVDLNEGSYEVTITDGSGNITTLTQGSEKATGKYNLLEENNNFTITIPWAATNTPTGNTQNGANDDFFYKGINTITVTYTGVLKSGAKPGSADLPENTNIATINPNTSNDDPGQKVTVRDGQITIKKIDGSTKASLQGAIFVLKNATGQFLNFNDTNNVEWGTEANATEYTTGADGIITITGLKEGTYYLVEKKAPLGYNLLDNSQKVILGDGATDTTNSDNLLVNPTVENNKGTELPSTGGIGTTIFYIIGAILVIGAGIVLVARRRLRS

SEQ ID NO: 16093 - protein, 4302 aa, Streptococcus agalactiae
ATGCTAAAGAAGTGTCAAACTTTTATAATCGAATCATTAAAAAAGAAAAAACACCCTAAAGAGTGGAAAATTATCATGTGGTCATTGATGATCCTAACAACTTTTTTAACGACTTATTTTTTAATTCTACCAGCAATAACAGTTGAAGAAACTAAGACAGATGATGTGGGGATTACTTTAGAAAATAAAAATTCTAGCCAGGTAACTTCATCAACATCTAGTTCTCAATCAAGTGTTGAGCAGAGCAAGCCCCAGACTCCTGCTTCTAGTGTAACAGAAACATCATCTTCTGAGGAAGCTGCTTATCGTGAAGAACCATTGATGTTTAGAGGTGCAGACTATACTGTAACAGTGACTTTGACCAAAGAAGCTAAGATTCCTAAAAATGCTGATTTAAAGGTGACGGAATTAAAAGACAATTCAGCTACTTTTAAAGATTATAAGAAAAAAGCATTGACAGAGGTTGCTAAACAAGATAGTGAAATCAAAAATTTCAAACTCTATGACATTACTATTGAGTCAAATGGTAAAGAAGCAGAACCCCAAGCTCCAGTAAAAGTAGAGGTTAACTATGATAAGCCATTAGAAGCTTCAGATGAAAACCTTAAAGTTGTTCACTTTAAAGATGATGGTCAAACAGAAGTATTAAAATCTAAAGATACTGCAGAAACTAAGAACACTAGCAGTGATGTTGCTTTTAAAACAGATTCATTCTCCATTTATGCAATTGTTCAAGAGGATAATACAGAAGTTCCTAGGTTAACTTACCATTTTCAAAATAATGACGGAACTGATTATGATTTCCTGACAGCTTCAGGTATGCAAGTTCATCATCAAATTATAAAAGATGGAGAATCTCTAGGAGAAGTTGGGATTCCGACGATTAAAGCAGGAGAGCATTTTAATGGTTGGTATACCTATGATCCTACTACTGGAAAGTATGGTGACCCTGTTAAATTTGGTGAGCCAATAACTGTAACTGAGACAAAAGAAATTTGTGTTCGTCCATTTATGAGTAAAGTGGCGACAGTAACTTTATATGATGATTCTGCTGGTAAAAGTATTTTGGAGCGTTATCAAGTACCATTGGATAGTTCAGGAAACGGAACCGCGGATTTAAGTTCATTTAAAGTTTCACCACCCACTTCAACATTGTTATTTGTAGGTTGGTCTAAAACTCAAAATGGAGCTCCACTTTCTGAATCAGAAATTCAAGCATTACCTGTATCTTCAGACATAAGTCTTTATCCTGTCTTTAAAGAATCGTACGGTGTTGAATTCAACACAGGCGACTTATCAACAGGAGTTACCTATATTGCACCTCGTCGTGTGTTAACAGGCCAACCTGCTTCGACAATTAAGCCTAATGATCCAACGAGGCCAGGTTATACTTTTGCAGGGTGGTACACAGCTGCTAGTGGTGGGGCAGCCTTTGATTTTAATCAAGTCTTGACCAAGGATACGACGCTATATGCACATTGGTCGCCCGCACAAACAACCTACACGATAAACTACTGGCAACAATCAGCAACGGATAATAAAAATGCTACTGATGCGCAAAAGACATATGAGTACGCAGGGCAAGTAACACGATCAGGCCTATCTTTATCTAATCAGACGCTAACACAACAAGATATTAATGATAAACTACCGACTGGCTTTAAAGTTAATAATACGAGGACAGAAACTTCTGTCATGATAAAAGACGATGGTTCAAGTGTTGTTAATGTTTATTATGATAGAAAACTCATCACAATAAAATTTGCAAAATATGGCGGATATTCCTTGCCAGAATATTACTATTCGTATAATTGGAGCTCTGATGCTGATACTTACACAGGACTTTACGGTACAACCTTGGCCGCTAATGGTTATCAATGGAAGACGGGTGCATGGGGTTATTTAGCCAATGTTGGAAATAACCAAGTTGGAACCTATGGGATGAGTTATTTGGGTGAGTTCATTTTACCTAATGATACCGTTGATTCAGATGTTATCAAACTCTTTCCAAAAGGGAATATAGTTCAAACTTATCGGTTCTTCAAACAAGGTTTGGATGGCACTTATTCTTTAGCAGATACCGGTGGAGGTGCTGGGGCAGATGAATTTACCTTTACAGAAAAATATCTAGGGTTTAATGTTAAATATTATCAACGTTTATATCCTGATAATTACCTTTTTGATCAGTACGCAAGTCAAACGAGTGCAGGAGTAAAAGTTCCTATTTCAGATGAATACTATGATAGATATGGTGCCTACCACAAAGATTATTTGAACTTAGTGGTATGGTATGAACGTAATTCATACAAGATTAAATATTTAGATCCGCTTGATAATACAGAGCTTCCTAATTTTCCAGTAAAGGATGTTCTATATGAGCAAAATTTGTCCTCTTATGCCCCCGATACGACAACTGTTCAACCTAAACCTAGTCGACCAGGGTATGTTTGGGATGGTAAATGGTATAAAGACCAAGCACAAACACAAGTATTTGACTTTAACACGACTATGCCTCCTCATGATGTTAAAGTCTATGCAGGTTGGCAAAAGGTAACATATCGTGTCAATATTGATCCAAACGGAGGCCGATTATCAAAAACAGATGATACCTATTTAGATTTGCATTATGGTGATCGTATTCCGGATTATACAGATATTACAAGGGATTATATCCAAGATCCTTCAGGTACATATTATTATAAGTATGATTCACGAGATAAAGATCCCGACTCAACTAAAGATGCCTATTATACGACAGATACTAGTCTCTCAAATGTTGATACAACAACTAAGTACAAGTACGTAAAAGACGCTTACAAATTAGTCGGTTGGTATTATGTTAATCCAGATGGTAGTATTAGACCTTATAACTTTTCAGGTGCTGTAACTCAAGATATCAATTTAAGAGCTATTTGGCGAAAGGCTGGAGATTATCATATTATATACAGCAATGATGCTGTTGGTACAGATGGAAAGCCAGCATTGGATGCTTCTGGTCAGCAATTACAAACAAGTAATGAGCCTACTGACCCTGATTCCTATGACGATGGCTCCCATTCAGCCTTACTGAGACGTCCGACAATGCCAGATGGCTATCGTTTCCGTGGCTGGTGGTACAATGGTAAAATTTATAACCCATATGATTCCATTGATATTGACGCCCATTTAGCAGATGCTAATAAAAATATCACCATAAAACCTGTCATTATTCCAGTAGGAGATATCAAATTAGAAGATACCTCCATCAAATACAATGGTAACGGTGGTACTAGAGTAGAAAATGGTAATGTGGTAACACAAGTGGAGACACCGCGTATGGAGTTGAATAGCACAACTACAATTCCTGAAAACCAATACTTTACAAGGACAGGTTACAACCTTATTGGTTGGCATCATGATAAGGATTTAGCTGATACAGGACGTGTGGAATTTACAGCAGGTCAATCAATAGGTATTGATAACAACCCTGATGCAACAAATACCTTATATGCTGTTTGGCAACCTAAAGAATACACCGTCAGAGTAAGTAAAACTGTCGTTGGACTAGATGAAGATAAGACGAAAGACTTCTTGTTTAATCCAAGTGAAACGTTGCAACAAGAGAATTTTCCGCTGAGAGATGGTCAGACTAAGGAATTTAAAGTACCTTATGGAACTTCTATATCAATAGATGAACAAGCCTACGATGAATTTAAAGTATCTGAGTCAATTACAGAAAAAAATCTAGCAACTGGTGAAGCTGATAAAACTTATGATGCTACCGGCTTACAATCCCTGACAGTTTCAGGAGACGTAGATATTAGCTTTACCAATACACGTATCAAGCAAAAAGTACGACTACAGAAAGTTAATGTCGAAAATGATAATAATTTTTTAGCAGGTGCAGTTTTTGATATTTATGAATCAGATGCTAATGGGAATAAAGCTTCACATCCTATGTATTCAGGGCTGGTGACAAACGATAAAGGCTTGTTATTAGTGGATGCTAATAACTACCTCAGTTTGCCAGTAGGAAAATACTACCTAACAGAGACAAAGGCCCCTCCAGGGTACCTACTACCTAAAAATGATATATCAGTATTAGTGATTTCTACGGGAGTTACCTTTGAACAAAATGGTAATAATGCGACACCAATAAAAGAGAATTTAGTGGATGGAAGTACAGTATATACTTTTAAAATTACTAACAGTAAAGGAACAGAATTGCCTAGTACTGGAGGTATTGGAACACACATTTATATCCTAGTTGGTTTAGCTTTAGCTCTACCATCAGGATTAATATTATACTATCGAAAAAAAATA

SEQ ID NO: 16094 - protein, 1434 aa, Streptococcus agalactiae
MLKKCQTFIIESLKKKKHPKEWKIIMWSLMILTTFLTTYFLILPAITVEETKTDDVGITLENKNSSQVTSSTSSSQSSVEQSKPQTPASSVTETSSSEEAAYREEPLMFRGADYTVTVTLTKEAKIPKNADLKVTELKDNSATFKDYKKKALTEVAKQDSEIKNFKLYDITIESNGKEAEPQAPVKVEVNYDKPLEASDENLKVVHFKDDGQTEVLKSKDTAETKNTSSDVAFKTDSFSIYAIVQEDNTEVPRLTYHFQNNDGTDYDFLTASGMQVHHQIIKDGESLGEVGIPTIKAGEHFNGWYTYDPTTGKYGDPVKFGEPITVTETKEICVRPFMSKVATVTLYDDSAGKSILERYQVPLDSSGNGTADLSSFKVSPPTSTLLFVGWSKTQNGAPLSESEIQALPVSSDISLYPVFKESYGVEFNTGDLSTGVTYIAPRRVLTGQPASTIKPNDPTRPGYTFAGWYTAASGGAAFDFNQVLTKDTTLYAHWSPAQTTYTINYWQQSATDNKNATDAQKTYEYAGQVTRSGLSLSNQTLTQQDINDKLPTGFKVNNTRTETSVMIKDDGSSVVNVYYDRKLITIKFAKYGGYSLPEYYYSYNWSSDADTYTGLYGTTLAANGYQWKTGAWGYLANVGNNQVGTYGMSYLGEFILPNDTVDSDVIKLFPKGNIVQTYRFFKQGLDGTYSLADTGGGAGADEFTFTEKYLGFNVKYYQRLYPDNYLFDQYASQTSAGVKVPISDEYYDRYGAYHKDYLNLVVWYERNSYKIKYLDPLDNTELPNFPVKDVLYEQNLSSYAPDTTTVQPKPSRPGYVWDGKWYKDQAQTQVFDFNTTMPPHDVKVYAGWQKVTYRVNIDPNGGRLSKTDDTYLDLHYGDRIPDYTDITRDYIQDPSGTYYYKYDSRDKDPDSTKDAYYTTDTSLSNVDTTTKYKYVKDAYKLVGWYYVNPDGSIRPYNFSGAVTQDINLRAIWRKAGDYHIIYSNDAVGTDGKPALDASGQQLQTSNEPTDPDSYDDGSHSALLRRPTMPDGYRFRGWWYNGKIYNPYDSIDIDAHLADANKNITIKPVIIPVGDIKLEDTSIKYNGNGGTRVENGNVVTQVETPRMELNSTTTIPENQYFTRTGYNLIGWHHDKDLADTGRVEFTAGQSIGIDNNPDATNTLYAVWQPKEYTVRVSKTVVGLDEDKTKDFLFNPSETLQQENFPLRDGQTKEFKVPYGTSISIDEQAYDEFKVSESITEKNLATGEADKTYDATGLQSLTVSGDVDISFTNTRIKQKVRLQKVNVENDNNFLAGAVFDIYESDANGNKASHPMYSGLVTNDKGLLLVDANNYLSLPVGKYYLTETKAPPGYLLPKNDISVLVISTGVTFEQNGNNATPIKENLVDGSTVYTFKITNSKGTELPSTGGIGTHIYILVGLALALPSGLILYYRKKI

SEQ ID NO: 16095 - protein, 567 aa, Streptococcus agalactiae
ATGAAAAGACAGATTAGTTCAGATAAATTATCTCAAGAACTGGATCGCGTAACTTATCAGAAACGCTTTTGGAGTGTCATTAAAAATACCATATACATCTTGATGGCGGTTGCCTCAATAGCCATTTTAATTGCGGTTTTATGGTTGCCTGTATTAAGAATCTACGGACATTCAATGAATAAGACTTTAAGTGCAGGTGATGTAGTCTTTACAGTAAAAGGTTCAAATTTTAAAACTGGAGACGTTGTCGCGTTTTACTACAATAATAAGGTCCTAGTCAAGCGGGTTATTGCAGAGTCAGGAGACTGGGTTAATATTGATTCTCAAGGGGATGTTTACGTGAATCAACATAAGTTGAAAGAACCATATGTTATTCATAAAGCACTCGGTAATAGTAATATAAAATACCCATATCAAGTACCTGATAAAAAAATTTTTGTATTAGGAGACAACCGAAAAACTTCAATTGATTCTCGAAGTACTTCTGTAGGAGATGTTTCAGAAGAACAAATTGTAGGTAAAATTTCTTTCAGAATATGGCCTCTAGGTAAGATTAGTAGTATCAAT

SEQ ID NO: 16096 - protein, 189 aa, Streptococcus agalactiae
MKRQISSDKLSQELDRVTYQKRFWSVIKNTIYILMAVASIAILIAVLWLPVLRIYGHSMNKTLSAGDVVFTVKGSNFKTGDVVAFYYNNKVLVKRVIAESGDWVNIDSQGDVYVNQHKLKEPYVIHKALGNSNIKYPYQVPDKKIFVLGDNRKTSIDSRSTSVGDVSEEQIVGKISFRIWPLGKISSIN

SEQ ID NO: 16097 - protein, 270 aa, Streptococcus agalactiae
ATGGAAGATTTAAAAAAATTAAAAAGAAAAGACTTGCTAGAAATTATGTTAGAACAGCAACTTCTTATTGAAAAACAAGAGAAAGAGATTCAGCAACTTAAAGAAGCGCTAGATGATAAAAAAATCAAAATTAGCAAAGCTGGTTCTATTGCCGAAGCTTCCTTAATGCTTAGTGGTATTTTTGAGACTGCTCAGTTAGCTGCAGATACCTATTTAGAAAACGTAAAGAATTTAGTAGATAAGAGAGGCGTAGACAATGAAAAGACAGAT

SEQ ID NO: 16098 - protein, 90 aa, Streptococcus agalactiae
MEDLKKLKRKDLLEIMLEQQLLIEKQEKEIQQLKEALDDKKIKISKAGSIAEASLMLSGIFETAQLAADTYLENVKNLVDKRGVDNEKTD

SEQ ID NO: 16099 - protein, 1146 aa, Streptococcus agalactiae
ATGGAAAATAAGGTAAAAACAGTTGCTGTTTTCTCAGGATATTATCTACCCTTCCTCGGAGGTATTGAACGTTATACAGATAAAATGACAGCAGATTTGGTTAAGCGTGGCTACCGTGTTGTTATTGTAACAACTAATCATGATGATTTACCGATTATAGATGAAGACAAGGGTAGAAAAATTTACCGTTTACCGACCAAAAATATTGTCAAGCAGCGCTATCCTATTATTAACAAAAATCGAGAATACAACACGCTGATGAAACATGTTTCAGATGAAAATATTGATTTTGTGATTTGTAATACACGTTTTCAGTTAACAACGCTAGAAGGGCTATCTTTTGCAAAGAAGCACCGTTTACCTAGTATTGTTTTAGACCATGGGTCAAGTCATTTTTCTGTCAATAATCGTTTTTTAGATTTCTTTGGAGCTATCTATGAACATCTTCTCACAGCGCGTGTTAAGCACTATCGTCCAGATTTTTATGCGGTATCTAAGAGAAGCGTTGAGTGGTTAAAACATTTTAATATAGAAGCTAAAGGAGTTATTTATAATTCGGTATCTGAAAGTCTAGGTTCTGATTTTGCTGACACGGCTTACCTTGAAAAATCTGCTGATGATATTTTCATCACTTATGCTGGTAGAATTATTAAAGAAAAAGGCATTGAATTGCTCTTAGAAGCATTTTCGATGTCACAGTACTCTGAAAATGTTTATTTACAGATTGCAGGAGACGGACCTGAATTAGCACATTTGAAAGAGAAATATCAGTCCAAACAGATTAACTTTTTGGGGAAATTAAACTTTGAACAGACTATGTCTTTAATGGCACAGACAGATATCTTTGTTTACCCATCAATGTATCCAGAGGGATTACCAACCTCTATTTTAGAAGCTGGTCTACTTTCGAGTGCTATTATTGCAACAGATCGCGGTGGAACAGTTGAAGTTATTGATAGCCCTGAGTTAGGAATCATCATGGAAGAAAATACTCAGTCACTCCATGAATCTCTTGATTTATTAGTAAAAGATAAGGCATTAAGAGAGAAACTACAACAGAATATTGCTAAAAGAATTAAAGAACATTTCACATGGGAAAAAACAGTTGAAAAGTTGGATTATATTATTCAAAAAGAACTTAATCTG

SEQ ID NO: 16100 - protein, 382 aa, Streptococcus agalactiae
MENKVKTVAVFSGYYLPFLGGIERYTDKMTADLVKRGYRVVIVTTNHDDLPIIDEDKGRKIYRLPTKNIVKQRYPIINKNREYNTLMKHVSDENIDFVICNTRFQLTTLEGLSFAKKHRLPSIVLDHGSSHFSVNNRFLDFFGAIYEHLLTARVKHYRPDFYAVSKRSVEWLKHFNIEAKGVIYNSVSESLGSDFADTAYLEKSADDIFITYAGRIIKEKGIELLLEAFSMSQYSENVYLQIAGDGPELAHLKEKYQSKQINFLGKLNFEQTMSLMAQTDIFVYPSMYPEGLPTSILEAGLLSSAIIATDRGGTVEVIDSPELGIIMEENTQSLHESLDLLVKDKALREKLQQNIAKRIKEHFTWEKTVEKLDYIIQKELNL
